United States Patent Application Publication US 2023/0026259 A1 - sequence listing, part 51

SEQ ID NO: 144207 - DNA, 3913 bp, Homo sapiens
  Payload ID: 8498
  Gene Symbol: ITSN1
  Gene Name: intersectin 1 (SH3 domain protein)
  Uniprot ID: Q15811
  ENST ID: ENST00000399353
  CDS Start-End: 347-3883
acttatgggcggagatggatggtggatggggggcgggggaggcagcggagggagatgaggagataggcgggagcgagggagcgagggagggagcgaaggaggtagagaagagtggaggcgccaggggagggagcgtagcttggttgctccgtagtacggcggctcgcgaggaagaatcccgagcgggctccgggacggacagagaggcgggcggggatggtgtgcggggctgcggctcctgcgtccctcccagcggcgcgtgagcggcactgatttgtccctggggcggcagcgcggacccgcccggagatgaggcgtcgattagcaaggtaaaagtaacagaaccatggctcagtttccaacaccttttggtggcagcctggatatctgggccataactgtagaggaaagagcgaagcatgatcagcagttccatagtttaaagccaatatctggattcattactggtgatcaagctagaaactttttttttcaatctgggttacctcaacctgttttagcacagatatgggcactagctgacatgaataatgatggaagaatggatcaagtggagttttccatagctatgaaacttatcaaactgaagctacaaggatatcagctaccctctgcacttccccctgtcatgaaacagcaaccagttgctatttctagcgcaccagcatttgcagctgtgccccccctggctaacggggctccccctgttatacaacctctgcctgcatttgctcatcctgcagccacattgccaaagagttcttcctttagtagatctggtccagggtcacaactaaacactaaattacaaaaggcacagtcatttgatgtggccagtgtcccaccagtggcagagtgggctgttcctcagtcatcaagactgaaatacaggcaattattcaatagtcatgacaaaactatgagtggacacttaacaggtccccaagcaagaactattcttatgcagtcaagtttaccacaggctcagctggcttcaatatggaatctttctgacattgatcaagatggaaaacttacagcagaggaatttatcctggcaatgcacctcattgatgtagctatgtctggccaaccactgccacctgtcctgcctccagaatacattccaccttcttttagaagagttcgatctggcagtggtatatctgtcataagctcaacatctgtagatcagaggctaccagaggaaccagttttagaagatgaacaacaacaattagaaaagaaattacctgtaacgtttgaagataagaagcgggagaactttgaacgtggcaacctggaactggagaaacgaaggcaagctctcctggaacagcagcgcaaggagcaggagcgcctggcccagctggagcgggcggagcaggagaggaaggagcgtgagcgccaggagcaagagcgcaaaagacaactggaactggagaagcaactggaaaagcagcgggagctagaacggcagagagaggaggagaggaggaaagaaattgagaggcgagaggctgcaaaacgggaacttgaaaggcaacgacaacttgagtgggaacggaatcgaaggcaagaactactaaatcaaagaaacaaagaacaagaggacatagttgtactgaaagcaaagaaaaagactttggaatttgaattagaagctctaaatgataaaaagcatcaactagaagggaaacttcaagatatcagatgtcgattgaccacccaaaggcaagaaattgagagcacaaacaaatctagagagttgagaattgccgaaatcacccatctacagcaacaattacaggaatctcagcaaatgcttggaagacttattccagaaaaacagatactcaatgaccaattaaaacaagttcagcagaacagtttgcacagagattcacttgttacacttaaaagagccttagaagcaaaagaactagctcggcagcacctacgagaccaactggatgaagtggagaaagaaactagatcaaaactacaggagattgatattttcaataatcagctgaaggaactaagagaaatacacaataagcaacaactccagaagcaaaagtccatggaggctgaacgactgaaacagaaagaacaagaacgaaagatcatagaattagaaaaacaaaaagaagaagcccaaagacgagctcaggaaagggacaagcagtggctggagcatgtgcagcaggaggacgagcatcagagaccaagaaaactccacgaagaggaaaaactgaaaagggaggagagtgtcaaaaagaaggatggcgaggaaaaaggcaaacaggaagcacaagacaagctgggtcggcttttccatcaacaccaagaaccagctaagccagctgtccaggcaccctggtccactgcagaaaaaggtccacttaccatttctgcacaggaaaatgtaaaagtggtgtattaccgggcactgtacccctttgaatccagaagccatgatgaaatcactatccagccaggagacatagtcatggtggatgaaagccaaactggagaacccggctggcttggaggagaattaaaaggaaagacagggtggttccctgcaaactatgcagagaaaatcccagaaaatgaggttcccgctccagtgaaaccagtgactgattcaacatctgcccctgcccccaaactggccttgcgtgagacccccgcccctttggcagtaacctcttcagagccctccacgacccctaataactgggccgacttcagctccacgtggcccaccagcacgaatgagaaaccagaaacggataactgggatgcatgggcagcccagccctctctcaccgttccaagtgccggccagttaaggcagaggtccgcctttactccagccacggccactggctcctccccgtctcctgtgctaggccagggtgaaaaggtggaggggctacaagctcaagccctatatccttggagagccaaaaaagacaaccacttaaattttaacaaaaatgatgtcatcaccgtcctggaacagcaagacatgtggtggtttggagaagttcaaggtcagaagggttggttccccaagtcttacgtgaaactcatttcagggcccataaggaagtctacaagcatggattctggttcttcagagagtcctgctagtctaaagcgagtagcctctccagcagccaagccggtcgtttcgggagaagaatttattgccatgtacacttacgagagttctgagcaaggagatttaacctttcagcaaggggatgtgattttggttaccaagaaagatggtgactggtggacaggaacagtgggcgacaaggccggagtcttcccttctaactatgtgaggcttaaagattcagagggctctggaactgctgggaaaacagggagtttaggaaaaaaacctgaaattgcccaggttattgcctcatacaccgccaccggccccgagcagctcactctcgcccctggtcagctgattttgatccgaaaaaagaacccaggtggatggtgggaaggagagctgcaagcacgtgggaaaaagcgccagataggctggttcccagctaattatgtaaagcttctaagccctgggacgagcaaaatcactccaacagagccacctaagtcaacagcattagcggcagtgtgccaggtgattgggatgtacgactacaccgcgcagaatgacgatgagctggccttcaacaagggccagatcatcaacgtcctcaacaaggaggaccctgactggtggaaaggagaagtcaatggacaagtggggctcttcccatccaattatgtgaagctgaccacagacatggacccaagccagcaatgaatcatatgttgtccatccccccctcaggct

SEQ ID NO: 144208 - DNA, 4003 bp, Homo sapiens
  Payload ID: 8498
  Gene Symbol: ITSN1
  Gene Name: intersectin 1 (SH3 domain protein)
  ENST ID: ENST00000399355
  CDS Start-End: 249-3698
gaggtagagaagagtggaggcgccaggggagggagcgtagcttggttgctccgtagtacggcggctcgcgaggaagaatcccgagcgggctccgggacggacagagaggcgggcggggatggtgtgcggggctgcggctcctgcgtccctcccagcggcgcgtgagcggcactgatttgtccctggggcggcagcgcggacccgcccggagatgaggcgtcgattagcaaggtaaaagtaacagaaccatggctcagtttccaacaccttttggtggcagcctggatatctgggccataactgtagaggaaagagcgaagcatgatcagcagttccatagtttaaagccaatatctggattcattactggtgatcaagctagaaactttttttttcaatctgggttacctcaacctgttttagcacagatatgggcactagctgacatgaataatgatggaagaatggatcaagtggagttttccatagctatgaaacttatcaaactgaagctacaaggatatcagctaccctctgcacttccccctgtcatgaaacagcaaccagttgctatttctagcgcaccagcatttggtatgggaggtatcgccagcatgccaccgcttacagctgttgctccagtgccaatgggatccattccagttgttggaatgtctccaaccctagtatcttctgttcccacagcagctgtgccccccctggctaacggggctccccctgttatacaacctctgcctgcatttgctcatcctgcagccacattgccaaagagttcttcctttagtagatctggtccagggtcacaactaaacactaaattacaaaaggcacagtcatttgatgtggccagtgtcccaccagtggcagagtgggctgttcctcagtcatcaagactgaaatacaggcaattattcaatagtcatgacaaaactatgagtggacacttaacaggtccccaagcaagaactattcttatgcagtcaagtttaccacaggctcagctggcttcaatatggaatctttctgacattgatcaagatggaaaacttacagcagaggaatttatcctggcaatgcacctcattgatgtagctatgtctggccaaccactgccacctgtcctgcctccagaatacattccaccttcttttagaagagttcgatctggcagtggtatatctgtcataagctcaacatctgtagatcagaggctaccagaggaaccagttttagaagatgaacaacaacaattagaaaagaaattacctgtaacgtttgaagataagaagcgggagaactttgaacgtggcaacctggaactggagaaacgaaggcaagctctcctggaacagcagcgcaaggagcaggagcgcctggcccagctggagcgggcggagcaggagaggaaggagcgtgagcgccaggagcaagagcgcaaaagacaactggaactggagaagcaactggaaaagcagcgggagctagaacggcagagagaggaggagaggaggaaagaaattgagaggcgagaggctgcaaaacgggaacttgaaaggcaacgacaacttgagtgggaacggaatcgaaggcaagaactactaaatcaaagaaacaaagaacaagaggacatagttgtactgaaagcaaagaaaaagactttggaatttgaattagaagctctaaatgataaaaagcatcaactagaagggaaacttcaagatatcagatgtcgattgaccacccaaaggcaagaaattgagagcacaaacaaatctagagagttgagaattgccgaaatcacccatctacagcaacaattacaggaatctcagcaaatgcttggaagacttattccagaaaaacagatactcaatgaccaattaaaacaagttcagcagaacagtttgcacagagattcacttgttacacttaaaagagccttagaagcaaaagaactagctcggcagcacctacgagaccaactggatgaagtggagaaagaaactagatcaaaactacaggagattgatattttcaataatcagctgaaggaactaagagaaatacacaataagcaacaactccagaagcaaaagtccatggaggctgaacgactgaaacagaaagaacaagaacgaaagatcatagaattagaaaaacaaaaagaagaagcccaaagacgagctcaggaaagggacaagcagtggctggagcatgtgcagcaggaggacgagcatcagagaccaagaaaactccacgaagaggaaaaactgaaaagggaggagagtgtcaaaaagaaggatggcgaggaaaaaggcaaacaggaagcacaagacaagctgggtcggcttttccatcaacaccaagaaccagctaagccagctgtccaggcaccctggtccactgcagaaaaaggtccacttaccatttctgcacaggaaaatgtaaaagtggtgtattaccgggcactgtacccctttgaatccagaagccatgatgaaatcactatccagccaggagacatagtcatggttaaaggggaatgggtggatgaaagccaaactggagaacccggctggcttggaggagaattaaaaggaaagacagggtggttccctgcaaactatgcagagaaaatcccagaaaatgaggttcccgctccagtgaaaccagtgactgattcaacatctgcccctgcccccaaactggccttgcgtgagacccccgcccctttggcagtaacctcttcagagccctccacgacccctaataactgggccgacttcagctccacgtggcccaccagcacgaatgagaaaccagaaacggataactgggatgcatgggcagcccagccctctctcaccgttccaagtgccggccagttaaggcagaggtccgcctttactccagccacggccactggctcctccccgtctcctgtgctaggccagggtgaaaaggtggaggggctacaagctcaagccctatatccttggagagccaaaaaagacaaccacttaaattttaacaaaaatgatgtcatcaccgtcctggaacagcaagacatgtggtggtttggagaagttcaaggtcagaagggttggttccccaagtcttacgtgaaactcatttcagggcccataaggaagtctacaagcatggattctggttcttcagagagtcctgctagtctaaagcgagtagcctctccagcagccaagccggtcgtttcgggagaagaaattgcccaggttattgcctcatacaccgccaccggccccgagcagctcactctcgcccctggtcagctgattttgatccgaaaaaagaacccaggtggatggtgggaaggagagctgcaagcacgtgggaaaaagcgccagataggctggttcccagctaattatgtaaagcttctaagccctgggacgagcaaaatcactccaacagagccacctaagtcaacagcattagcggcagtgtgccaggtgattgggatgtacgactacaccgcgcagaatgacgatgagctggccttcaacaagggccagatcatcaacgtcctcaacaaggaggaccctgactggtggaaaggagaagtcaatggacaagtggggctcttcccatccaattatgtgaagctgaccacagacatggacccaagccagcaatgaatcatatgttgtccatccccccctcaggcttgaaagtcctcaaagagacccactatcccatatcactgcccagagggatgatgggagatgcagccttgatcatgtgacttccagcatgatcacctactgccttctgagtagaagaactcactgcagagcagtttacctcattttaccttagttgcatgtgatcgcaatgtttgagttattacttgcagagataggagcaaaaattacaaaaacacacagggtagtgggtccttttgtggctttcctagttactcaaattgactttcccccacctt

SEQ ID NO: 144209 - DNA, 5722 bp, Homo sapiens
  Payload ID: 8498
  Gene Symbol: ITSN1
  Gene Name: intersectin 1 (SH3 domain protein)
  Uniprot ID: Q15811
  ENST ID: ENST00000399367
  CDS Start-End: 264-5414
agggagggagcgaaggaggtagagaagagtggaggcgccaggggagggagcgtagcttggttgctccgtagtacggcggctcgcgaggaagaatcccgagcgggctccgggacggacagagaggcgggcggggatggtgtgcggggctgcggctcctgcgtccctcccagcggcgcgtgagcggcactgatttgtccctggggcggcagcgcggacccgcccggagatgaggcgtcgattagcaaggtaaaagtaacagaaccatggctcagtttccaacaccttttggtggcagcctggatatctgggccataactgtagaggaaagagcgaagcatgatcagcagttccatagtttaaagccaatatctggattcattactggtgatcaagctagaaactttttttttcaatctgggttacctcaacctgttttagcacagatatgggcactagctgacatgaataatgatggaagaatggatcaagtggagttttccatagctatgaaacttatcaaactgaagctacaaggatatcagctaccctctgcacttccccctgtcatgaaacagcaaccagttgctatttctagcgcaccagcatttggtatgggaggtatcgccagcatgccaccgcttacagctgttgctccagtgccaatgggatccattccagttgttggaatgtctccaaccctagtatcttctgttcccacagcagctgtgccccccctggctaacggggctccccctgttatacaacctctgcctgcatttgctcatcctgcagccacattgccaaagagttcttcctttagtagatctggtccagggtcacaactaaacactaaattacaaaaggcacagtcatttgatgtggccagtgtcccaccagtggcagagtgggctgttcctcagtcatcaagactgaaatacaggcaattattcaatagtcatgacaaaactatgagtggacacttaacaggtccccaagcaagaactattcttatgcagtcaagtttaccacaggctcagctggcttcaatatggaatctttctgacattgatcaagatggaaaacttacagcagaggaatttatcctggcaatgcacctcattgatgtagctatgtctggccaaccactgccacctgtcctgcctccagaatacattccaccttcttttagaagagttcgatctggcagtggtatatctgtcataagctcaacatctgtagatcagaggctaccagaggaaccagttttagaagatgaacaacaacaattagaaaagaaattacctgtaacgtttgaagataagaagcgggagaactttgaacgtggcaacctggaactggagaaacgaaggcaagctctcctggaacagcagcgcaaggagcaggagcgcctggcccagctggagcgggcggagcaggagaggaaggagcgtgagcgccaggagcaagagcgcaaaagacaactggaactggagaagcaactggaaaagcagcgggagctagaacggcagagagaggaggagaggaggaaagaaattgagaggcgagaggctgcaaaacgggaacttgaaaggcaacgacaacttgagtgggaacggaatcgaaggcaagaactactaaatcaaagaaacaaagaacaagaggacatagttgtactgaaagcaaagaaaaagactttggaatttgaattagaagctctaaatgataaaaagcatcaactagaagggaaacttcaagatatcagatgtcgattgaccacccaaaggcaagaaattgagagcacaaacaaatctagagagttgagaattgccgaaatcacccatctacagcaacaattacaggaatctcagcaaatgcttggaagacttattccagaaaaacagatactcaatgaccaattaaaacaagttcagcagaacagtttgcacagagattcacttgttacacttaaaagagccttagaagcaaaagaactagctcggcagcacctacgagaccaactggatgaagtggagaaagaaactagatcaaaactacaggagattgatattttcaataatcagctgaaggaactaagagaaatacacaataagcaacaactccagaagcaaaagtccatggaggctgaacgactgaaacagaaagaacaagaacgaaagatcatagaattagaaaaacaaaaagaagaagcccaaagacgagctcaggaaagggacaagcagtggctggagcatgtgcagcaggaggacgagcatcagagaccaagaaaactccacgaagaggaaaaactgaaaagggaggagagtgtcaaaaagaaggatggcgaggaaaaaggcaaacaggaagcacaagacaagctgggtcggcttttccatcaacaccaagaaccagctaagccagctgtccaggcaccctggtccactgcagaaaaaggtccacttaccatttctgcacaggaaaatgtaaaagtggtgtattaccgggcactgtacccctttgaatccagaagccatgatgaaatcactatccagccaggagacatagtcatggtggatgaaagccaaactggagaacccggctggcttggaggagaattaaaaggaaagacagggtggttccctgcaaactatgcagagaaaatcccagaaaatgaggttcccgctccagtgaaaccagtgactgattcaacatctgcccctgcccccaaactggccttgcgtgagacccccgcccctttggcagtaacctcttcagagccctccacgacccctaataactgggccgacttcagctccacgtggcccaccagcacgaatgagaaaccagaaacggataactgggatgcatgggcagcccagccctctctcaccgttccaagtgccggccagttaaggcagaggtccgcctttactccagccacggccactggctcctccccgtctcctgtgctaggccagggtgaaaaggtggaggggctacaagctcaagccctatatccttggagagccaaaaaagacaaccacttaaattttaacaaaaatgatgtcatcaccgtcctggaacagcaagacatgtggtggtttggagaagttcaaggtcagaagggttggttccccaagtcttacgtgaaactcatttcagggcccataaggaagtctacaagcatggattctggttcttcagagagtcctgctagtctaaagcgagtagcctctccagcagccaagccggtcgtttcgggagaagaatttattgccatgtacacttacgagagttctgagcaaggagatttaacctttcagcaaggggatgtgattttggttaccaagaaagatggtgactggtggacaggaacagtgggcgacaaggccggagtcttcccttctaactatgtgaggcttaaagattcagagggctctggaactgctgggaaaacagggagtttaggaaaaaaacctgaaattgcccaggttattgcctcatacaccgccaccggccccgagcagctcactctcgcccctggtcagctgattttgatccgaaaaaagaacccaggtggatggtgggaaggagagctgcaagcacgtgggaaaaagcgccagataggctggttcccagctaattatgtaaagcttctaagccctgggacgagcaaaatcactccaacagagccacctaagtcaacagcattagcggcagtgtgccaggtgattgggatgtacgactacaccgcgcagaatgacgatgagctggccttcaacaagggccagatcatcaacgtcctcaacaaggaggaccctgactggtggaaaggagaagtcaatggacaagtggggctcttcccatccaattatgtgaagctgaccacagacatggacccaagccagcaatggtgttcagacttacatctcttggatatgttgaccccaactgaaagaaagcgacaaggatacatccacgagctcattgtcaccgaggagaactatgtgaatgacctgcagctggtcacagagatttttcaaaaacccctgatggagtctgagctgctgacagaaaaagaggttgctatgatttttgtgaactggaaggagctgattatgtgtaatatcaaactactaaaagcgctgagagtccgcaagaagatgtccggggagaagatgcctgtgaagatgattggagacatcctgagcgcacagctgccgcacatgcagccctacatccgcttctgcagccgccagctcaacggggctgccctgatccagcagaagacggatgaggccccagacttcaaggagttcgtcaaaagattggcaatggatcctcggtgtaaagggatgccactctctagttttatactgaagcctatgcaacgggtaacaagatacccactgatcattaaaaatatcctggaaaacacccctgaaaaccacccggaccacagccacttgaagcacgccctggagaaggcggaagagctctgttcccaggtgaacgaaggggtgcgggagaaggagaactctgaccggctggagtggatccaggcccacgtgcagtgtgaaggcctgtctgagcaacttgtgttcaattcagtgaccaattgcttggggccgcgcaaatttctgcacagtgggaagctctacaaggccaagagcaacaaggagctgtatggcttccttttcaacgacttcctcctgctgactcagatcacgaagcctttggggtcttctggcaccgacaaagtcttcagccccaaatcaaacctgcagtataaaatgtataaaacacctattttcctaaatgaggttctagtaaaattacccaccgacccttctggagacgagcccatcttccacatctcccacattgaccgcgtctatactctccgagcagaaagcataaatgaaaggactgcctgggtgcagaaaatcaaagctgcttctgaactctacatagagactgagaaaaagaagcgcgagaaagcgtacctggtccgttcccaaagggcaacaggcattggaaggttgatggtgaacgtggttgaaggcatcgagttgaaaccctgtcggtcacatggaaagagcaacccgtactgtgaggtgaccatgggttcccagtgccacatcaccaagacgatccaggacactctgaaccccaagtggaattccaactgccagttcttcatccgagacctggagcaggaagtcctctgcatcactgtgttcgagagggaccagttctcaccagatgattttttgggtcggacggagatccgtgtggcggacatcaagaaagaccagggctccaaaggtccagttacgaagtgtcttctgctgcacgaagtccccacgggagagattgtggtccgcttggacctgcagttgtttgatgagccgtaggcagcgggctcagggtgtgctcagcagggtcccagcccacggccacacatgctgtctggaaattgtattccttttctaagaaaccaccatttggtattcagtcacagggatatgggatggcaaagacaggcccctcaaagctcctaggaatcattctcgacaatcctccctgccccgaaacaatttcctgtttcatgaaacaaagctgtgttttcctttgtcctcactacaggtctcattatggcttctagggtcgctgaaatcccatagccctcaacagggtgcagctgggagtctagccccttccc

SEQ ID NO: 144210 - DNA, 1330 bp, Homo sapiens
  Payload ID: 8498
  Gene Symbol: ITSN1
  Gene Name: intersectin 1 (SH3 domain protein)
  ENST ID: ENST00000437442
  CDS Start-End: 617-1330
gagcgagggagggagcgaaggaggtagagaagagtggaggcgccaggggagggagcgtagcttggttgctccgtagtacggcggctcgcgaggaagaatcccgagcgggctccgggacggacagagaggcgggcggggatggtgtgcggggctgcggctcctgcgtccctcccagcggcgcgtgagcggcactgatttgtccctggggcggcagcgcggacccgcccggagatgaggcgtcgattagcaaggtaaaagtaacagaaccatggctcagtttccaacaccttttggtggcagcctggatatctgggccataactgtagaggaaagagcgaagcatgatcagcagttccatagtttaaagccaatatctggattcattactggtgatcaagctagaaactttttttttcaatctgggttacctcaacctgttttagcacagatatgggcactagctgacatgaataatgatggaagaatggatcaagtggagttttccatagctatgaaacttatcaaactgaagctacaaggatatcagctaccctctgcacttccccctgtcatgaaacagcaaccagttgctatttctagcgcaccagcatttggtatgggaggtatcgccagcatgccaccgcttacagctgttgctccagtgccaatgggatccattccagttgttggaatgtctccaaccctagtatcttctgttcccacagcagctgtgccccccctggctaacggggctccccctgttatacaacctctgcctgcatttgctcatcctgcagccacattgccaaagagttcttcctttagtagatctggtccagggtcacaactaaacactaaattacaaaaggcacagtcatttgatgtggccagtgtcccaccagtggcagagtgggctgttcctcagtcatcaagactgaaatacaggcaattattcaatagtcatgacaaaactatgagtggacacttaacaggtccccaagcaagaactattcttatgcagtcaagtttaccacaggctcagctggcttcaatatggaatctttctgacattgatcaagatggaaaacttacagcagaggaatttatcctggcaatgcacctcattgatgtagctatgtctggccaaccactgccacctgtcctgcctccagaatacattccaccttcttttagaagagttcgatctggcagtggtatatctgtcataagctcaacatctgtagatcagaggctaccagaggaaccagttttagaagatgaacaacaacaattagaaaagaaattacctgttgctgtgttccttgtctga

SEQ ID NO: 144211 - DNA, 936 bp, Homo sapiens
  Payload ID: 8498
  Gene Symbol: ITSN1
  Gene Name: intersectin 1 (SH3 domain protein)
  ENST ID: ENST00000440794
  CDS Start-End: 1-781
agtcatggttaaaggggaatgggtggatgaaagccaaactggagaacccggctggcttggaggagaattaaaaggaaagacagggtggttccctgcaaactatgcagagaaaatcccagaaaatgaggttcccgctccagtgaaaccagtgactgattcaacatctgcccctgcccccaaactggccttgcgtgagacccccgcccctttggcagtaacctcttcagagccctccacgacccctaataactgggccgacttcagctccacgtggcccaccagcacgaatgagaaaccagaaacggataactgggatgcatgggcagcccagccctctctcaccgttccaagtgccggccagttaaggcagaggtccgcctttactccagccacggccactggctcctccccgtctcctgtgctaggccagcctgacttcctcctccacccctccatgagactaggccacatgcagccccggattgtgcttctcttcccggaccccctgcagtgttccacctcgaggcttttgcccatgctgcgccctcggcctggagtgcccttcctccgaagccctagctgtcaaagtccttctcatccttcaaggcccatctcagatgctgccccctctgtgaaatttacgctgatgcccccaggcagaattcatccctgttttctctttattcctgcagtgaatagtaggaactcctttttagtatatttcattctgccaggtggtacacttggttgtttttatctctgtcttccccattacttgtgaattacctgctagtaatactgcccatctttatagtgctttgtggttaataaagtgcttttccctaaattatctgggggaggcagagactgtttttttcatctgtaatctcatggggcagtgcatgtagatgtacaataaatggtaattacaatgaa

SEQ ID NO: 144212 - DNA, 827 bp, Homo sapiens
  Payload ID: 8498
  Gene Symbol: ITSN1
  Gene Name: intersectin 1 (SH3 domain protein)
  ENST ID: ENST00000444491
  CDS Start-End: 482-827
agatgaggagataggcgggagcgagggagcgagggagggagcgaaggaggtagagaagagtggaggcgccaggggagggagcgtagcttggttgctccgtagtacggcggctcgcgaggaagaatcccgagcgggctccgggacggacagagaggcgggcggggatggtgtgcggggctgcggctcctgcgtccctcccagcggcgcgtgagcggcactgatttgtccctggggcggcagcgcggacccgcccggagatgaggtttaagctgtcaccttcccaaatgcggcatctgtgtagccccagagggagcattctaaaaggcagcacttagatgagttgatcccttcacaccccacccagcagttcgttctacctggcaaaacttaacagcttcggtgaagaaacctccacattactgaacatttggaggtgtcccaatgaaaaggcgtcgattagcaaggtaaaagtaacagaaccatggctcagtttccaacaccttttggtggcagcctggatatctgggccataactgtagaggaaagagcgaagcatgatcagcagttccatagtttaaagccaatatctggattcattactggtgatcaagctagaaactttttttttcaatctgggttacctcaacctgttttagcacagatatgggcactagctgacatgaataatgatggaagaatggatcaagtggagttttccatagctatgaaacttatcaaactgaagctacaaggatatcagctaccctctgcacttccccctgtcatgaaacagcaaccagttgctatttctagcgcaccagcatttg

SEQ ID NO: 144213 - DNA, 501 bp, Homo sapiens
  Payload ID: 8498
  Gene Symbol: ITSN1
  Gene Name: intersectin 1 (SH3 domain protein)
  ENST ID: ENST00000451686
  CDS Start-End: 267-501
gttgctccgtagtacggcggctcgcgaggaagaatcccgagcgggctccgggacggacagagaggcgggcggggatggtgtgcggggctgcggctcctgcgtccctcccagcggcgcgtgagcggcactgatttgtccctggggcggcagcgcggacccgcccggagatgaggtttaagctgtcaccttcccaaatgcggcatctgtgtagccccagagggagcattctaaaaggcgtcgattagcaaggtaaaagtaacagaaccatggctcagtttccaacaccttttggtggcagcctggatatctgggccataactgtagaggaaagagcgaagcatgatcagcagttccatagtttaaagccaatatctggattcattactggtgatcaagctagaaactttttttttcaatctgggttacctcaacctgttttagcacagatatgggcactagctgacatgaataatgatggaagaatggatcaagtggagtttt

SEQ ID NO: 144214 - DNA, 422 bp, Homo sapiens
  Payload ID: 8498
  Gene Symbol: ITSN1
  Gene Name: intersectin 1 (SH3 domain protein)
  ENST ID: ENST00000420666
  CDS Start-End: 1-200
tggaaaacacccctgaaaaccacccggaccacagccacttgaagcacgccctggagaaggcggaagagctctgttcccaggtgaacgaaggggtgcgggagaaggagaactctgaccggctggagtggatccaggcccacgtgcagtgtgaaggcctgtctgaggactgcctgggtgcagaaaatcaaagctgcttctgaactctacatagagactgagaaaaagaagcgcgagaaagcgtacctggtccgttcccaaagggcaacaggcattggaaggttgatggtgaacgtggttgaaggcatcgagttgaaaccctgtcggtcacatggaaagagcaacccgtactgtgaggtgaccatgggttcccagtgccacatcaccaagacgatccaggacactctgaaccccaagtggaattc

SEQ ID NO: 144215 - DNA, 519 bp, Homo sapiens
  Payload ID: 8498
  Gene Symbol: ITSN1
  Gene Name: intersectin 1 (SH3 domain protein)
  ENST ID: ENST00000415023
  CDS Start-End: 1-519
gaaaacacccctgaaaaccacccggaccacagccacttgaagcacgccctggagaaggcggaagagctctgttcccaggtgaacgaaggggtgcgggagaaggagaactctgaccggctggagtggatccaggcccacgtgcagtgtgaaggcctgtctgagcctattttcctaaatgaggttctagtaaaattacccaccgacccttctggagacgagcccatcttccacatctcccacattgaccgcgtctatactctccgagcagaaagcataaatgaaaggactgcctgggtgcagaaaatcaaagctgcttctgaactctacatagagactgagaaaaagaagcgcgagaaagcgtacctggtccgttcccaaagggcaacaggcattggaaggttgatggtgaacgtggttgaaggcatcgagttgaaaccctgtcggtcacatggaaagagcaacccgtactgtgaggtgaccatgggttcccagtgccacatcaccaagacgatccaggac

SEQ ID NO: 144216 - DNA, 485 bp, Homo sapiens
  Payload ID: 8498
  Gene Symbol: ITSN1
  Gene Name: intersectin 1 (SH3 domain protein)
  ENST ID: ENST00000456489
  CDS Start-End: 1-181
cagggcactagctgacatgaataatgatggaagaatggatcaagtggagttttccatagctatgaaacttatcaaactgaagctacaaggatatcagctaccctctgcacttccccctgtcatgaaacagcaaccagttgctatttctagcgcaccagcatttggaggtaattctgtctgaaaaatgatggccccctgcaggaagatagtgctggggagaagaaggagcatgttcacatttgaaccctgggatgtaaagtaatcaaaatgaaagcagagatgcaggccgccagtcaggggaaaaggaagaaacttacagtccgctgctgcagcttctgggtttttttttttttttctcttccattatccttcaggttgttgcatacttccttttgattttcggtttccataatgtctgtttctccttgtgcataaacaattcctttggattatggcatctagaaatatatatattttgaatcaca

SEQ ID NO: 144217 - DNA, 514 bp, Homo sapiens
  Payload ID: 8498
  Gene Symbol: ITSN1
  Gene Name: intersectin 1 (SH3 domain protein)
  ENST ID: ENST00000437126
  CDS Start-End: 1-232
gtggtggtttggagaagttcaaggtcagaagggttggttccccaagtcttacgtgaaactcatttcagggcccataaggaagtctacaagcatggattctggttcttcagagagtcctgctagtctaaagcgagtagcctctccagcagccaagccggtcgtttcgggagaagggctctggaactgctgggaaaacagggagtttaggaaaaaaacctggtccctcctgtaacgtgaaataaaaagaaagaaatttgccctgccatgatttgcacctgatattcagggatcactctcaaaataaattgcccaggttattgcctcatacaccgccaccggccccgagcagctcactctcgcccctggtcagctgattttgatccgaaaaaagaacccaggtggatggtgggaaggagagctgcaagcacgtgggaaaaagcgccagataggctggttcccagctaattatgtaaagcttctaagccctgggacgagcaaaatcactccaacagag

SEQ ID NO: 144218 - DNA, 779 bp, Homo sapiens
  Payload ID: 8498
  Gene Symbol: ITSN1
  Gene Name: intersectin 1 (SH3 domain protein)
  ENST ID: ENST00000419241
  CDS Start-End: 1-234
catcaacaccaagaaccagctaagccagctgtccaggcaccctggtccactgcagaaaaaggtccacttaccatttctgcacaggaaaatgtaaaagtggtgtattaccgggcactgtacccctttgaatccagaagccatgatgaaatcactatccagccaggagacatagtcatggggaatgggtggatgaaagccaaactggagaacccggctggcttggaggagaattaaaaggaaagacagggtggttccctgcaaactatgcagagaaaatcccagaaaatgaggttcccgctccagtgaaaccagtgactgattcaacatctgcccctgcccccaaactggccttgcgtgagacccccgcccctttggcagtaacctcttcagagccctccacgacccctaataactgggccgacttcagctccacgtggcccaccagcacgaatgagaaaccagaaacggataactgggatgcatgggcagcccagccctctctcaccgttccaagtgccggccagttaaggcagaggtccgcctttactccagccacggccactggctcctccccgtctcctgtgctaggccagcctgacttcctcctccacccctccatgagactaggccacatgcagccccggattgtgcttctcttcccggaccccctgcagtgttccacctcgaggcttttgcccatgctgcgccctcggcctggagtgcccttcctccgaagccctagctgtcaaagtccttctcatccttcaaggcccatctca

SEQ ID NO: 144219 - DNA, 6300 bp, Homo sapiens
  Payload ID: 8499
  Gene Symbol: ITSN2
  Gene Name: intersectin 2
  Uniprot ID: Q9NZM3
  ENST ID: ENST00000355123
  CDS Start-End: 445-5538
gcttcggacccgaccgactcggagcagaccttcagggttcaatgccccggaactcctggggcgaggagccacgcccgggcagtttcgggctccggagggtggggagtcggtgcccggcagcgggcgggccgtcagctgcccggcccggcgcctacctccccgccccccggcttcctgcggaggccgcggccgccatgttgttgtggggctgaggcggcgccggcggagccctgagcggctgtgacaggctacgcaacaggttcgcgggcggcggcctgacgaccaagccagctgcagtggcggcgacggcggcagagcagggtctccccgcgcctgcccgcgcccaggctgccggtgctgagggacgcggagtcgcgctgtgacgagcgggaggcgcggcgagggcgccagatggctgagagctagcaaggaaaactcaggaccatgatggctcagtttcccacagctatgaatggagggccaaacatgtgggctattacctctgaagaacgtactaagcatgacaggcagtttgataacctcaaaccttcaggaggttacataacaggtgatcaagcacgtaattttttcctacaatcaggtctgccggcccctgttttagctgaaatatgggctttatcagacctaaacaaggatgggaagatggatcagcaagagttctccatagctatgaaactcatcaaactgaagcttcaaggccaacagttgcctgtggttctccctcctattatgaagcaaccccctatgttttctccattaatttctgctcgttttggaatgggaagcatgcccaatctgtccattcctcagccattgcctccagctgcacctataacatcattgtcttctgcgacttcagggaccaaccttcctcccttaatgatgcccactcccctagtgccttctgttagcacatcatcattaccaaatggaaccgccagtctcattcagcctttacccattccttattcttcttcaacattgcctcatgggtcatcttatagtctgatgatgggaggatttggaggtgctagtatacagaaagcgcagtctctgattgatttaggatctagtagctcaacttcctcgactgcttcactctcagggaactcacccaagactgggacctcagagtgggcagttcctcagcctacaagattaaaatatcggcaaaaatttaatactcttgacaaaagtatgagtggatatctctcaggttttcaagctagaaatgcccttcttcagtcaaatctttctcaaactcagctggctactatttggactctggctgacgttgatggtgatggacagctaaaagcagaagagtttattcttgcaatgcaccttactgacatggccaaagctggacagccattaccactgactttacctcctgagcttgttcctccatctttcagaggaggaaagcaaattgattccattaatggaactctgccttcatatcagaaaatgcaagaagaggagcctcagaagaaattaccagttacttttgaggacaaacggaaagccaactatgagcgagggaacatggagctggaaaagcgacgccaagccttgatggagcagcaacaaagggaggcagaacgtaaagcccagaaagaaaaggaagagtgggaacgaaaacagagagaattacaagaacaagaatggaagaaacaacttgaattagaaaaacgcttagagaagcaacgggaattggagagacaacgagaggaagaaaggagaaaagacatagaaagacgagaggcagcaaaacaggaacttgaacgacaacgtcgcttagaatgggagagaattcggcgacaggagcttctcaatcaaaagaatagagaacaagaagaaattgtcaggttaaactctaaaaagaagaatcttcatcttgagttggaagcactgaatggcaaacatcagcagatctcaggcagacttcaggatgtccgactcaaaaagcaaactcaaaagactgagctggaagttctggataagcagtgtgacttggaaattatggaaatcaagcaacttcaacaggaacttcaggaatatcagaataagcttatctatctggtacctgagaagcaattattaaatgaaagaattaaaaacatgcagttcagtaacacacctgattcaggggtcagtttacttcataaaaaatcattagaaaaggaagaattatgccaaagacttaaagaacagttagatgctcttgaaaaagaaactgcatctaagctgtcagaaatggattcttttaacaatcaactaaagtgtgggaatatggatgactctgttcttcagtgccttttgtctctgctaagctgtctcaacaacctcttcctcttacttaaggaactgagagaaacctacaacacacagcagttagcccttgaacagctttataagatcaaacgtgacaagttgaaggaaattgaaaggaaaagattagaactaatgcagaaaaagaaactagaagatgaggctgcaaggaaagcaaagcaaggaaaagaaaacttatggaaagaaaatcttagaaaggaggaagaagaaaaacaaaagcgactccaggaagaaaaaacacaagaaaaaattcaagaagaggaacggaaagctgaggagaaacaacgtaaggataaggatactttgaaagctgaggagaaaaaacgtgagacagctagtgttttggtgaattatagagcattatacccctttgaagcaaggaaccatgatgagatgagttttaattctggagatataattcaggttgatgaaaaaaccgtaggagaacctggttggctttatggtagttttcaaggaaattttggctggtttccatgcaattatgtagaaaaaatgccatcaagtgaaaatgaaaaagctgtatctccaaagaaggccttacttcctcctacagtttctttatctgctacctcaacttcctctgaaccactttcttcaaatcaaccagcatcagtgactgattatcaaaatgtatctttttcaaacctaactgtaaatacatcatggcagaaaaaatcagccttcactcgaactgtgtcccctggatctgtatcacctattcatggacagggacaagtggtagaaaacttaaaagcacaggccctttgttcctggactgcaaagaaagataaccacttgaacttctcaaaacatgacattattactgtcttggagcagcaagaaaattggtggtttggggaggtgcatggaggaagaggatggtttcccaaatcttatgtcaagatcattcctgggagtgaagtaaaacgggaagaaccagaagctttgtatgcagctgtaaataagaaacctacctcggcagcctattcagttggagaagaatatattgcactttatccatattcaagtgtggaacctggagatttgactttcacagaaggtgaagaaatattggtgacccagaaagatggagagtggtggacaggaagtattggagatagaagtggaatttttccatcaaactatgtcaaaccaaaggatcaagagagttttgggagtgctagcaagtctggagcatcaaataaaaaacctgagattgctcaggtaacttcagcatatgttgcttctggttctgaacaacttagccttgcaccaggacagttaatattaattctaaagaaaaatacaagtgggtggtggcaaggagagttacaggccagaggaaaaaagcgacagaaaggatggtttcctgccagtcatgttaaacttttgggtccaagtagtgaaagagccacacctgcctttcatcctgtatgtcaggtgattgctatgtatgactatgcagcaaataatgaagatgagctcagtttctccaagggacaactcattaatgttatgaacaaagatgatcctgattggtggcaaggagagatcaacggggtgactggtctctttccttcaaactacgttaagatgacgacagactcagatccaagtcaacagtggtgtgctgatctgcaaaccctggacacaatgcagccaattgagaggaaaagacagggctatattcatgagctgattcagaccgaagagcggtacatggctgaccttcagctcgtcgtcgaggtttttcagaaacgcatggcagagtcaggctttctcactgaaggggagatggccctgatttttgttaactggaaggagctcatcatgtccaacacaaagctgctgaaggctttgcgggtgcggaagaagaccgggggcgagaagatgccggtgcagatgattggggacatcctggccgctgagctgtcccacatgcaggcttacatcaggttctgcagctgccagcttaatggagcagctctgttacagcagaagacagatgaagacacagatttcaaagaatttttaaagaagctggcatctgacccgcggtgtaaaggaatgcccctctccagcttcctgctgaaacccatgcagaggatcacccgctacccactgctcatcagaagtattctggagaacaccccggagagccatgcagaccattcctccctaaagctggccctcgagcgggcagaggagctgtgctctcaagtgaatgagggagttcgggagaaggaaaactcggaccgactggagtggatccaggcgcacgtgcagtgtgaaggcctcgcggagcaacttattttcaactctctcaccaactgcctggggccccggaagctcttacacagtgggaaattatacaagaccaagagcaacaaggaactgcacggattcctcttcaatgacttcctgcttcttacctacatggtcaagcagtttgctgtttcctctggctctgagaaacttttcagctcgaagtccaatgctcaattcaaaatgtataaaacgcccattttcctgaatgaagtcttggtgaaactgcccacagacccttccagcgatgagcctgtcttccacatttcccacattgatcgggtctacaccctccgaacagacaacattaatgagaggaccgcctgggtgcagaagatcaaggcggcgtctgagcagtacatcgacaccgagaagaagaagcgtgagaaagcttaccaagcccgctcccaaaagacttcaggcattgggcgcctgatggtgcatgtcattgaagctacagaattaaaagcctgcaaaccaaatggaaagagcaacccatactgtgaaatcagcatgggctcccagagctacaccaccaggaccatccaggacacactcaatcccaagtggaattttaactgccagttctttattaaggatctctaccaagacgtgctgtgtctcaccctgtttgacagagaccagttttcaccagatgatttcctgggtcgtactgaaattccagtggcaaaaattcgaacagaacaggaaagcaaaggccctatgacccgccgactgctgctgcatgaggtccccaccggggaggtctgggtccgttttgacctgcagctttttgagcaaaaaactctcctgtaggggttctaaaggacagcaccagcgggacagcccacaaggctggggctggagaatgagagactgcgctctcttggggctgagggagcaccatgcagcttcacccctcacaaagccatgcacgctgggggctctgttttcctgcacactaaatagctagcaatctatgcaaacacctttcccataaagaaaccaaaccccatagtacagtgccttgtcctagtgttcacatgttcagctctgtttgtttagatgccaaggtttccattttcagggctataaaaagtattacttggaaatgaggcatcagaccaccagatgttaccgctcggttgaatgtgtccaccgtggagtggtttggtgacgctgtaaccattccacgccagtgacctctgctgggtcacagccactcaggaggggaagggtcaggatgagaggctgcagcctcgacacttggcgcggcctgatactgaaatagcgtctactcgtgcactgaataaaaacagaaacttgatcattttattcctgattagattttatcactctctgctaagacaatatagtctggagtataagtgggaaagcttgatttaaatactgtgaactctaataatgtggaaaatatttttcaactttaattttctgaagtataaattatttatgtaaattcattgtttttgcatatttcttaggacatgcatctttaagctttatcattgcccatatgtacagaaagagaataaagacatatgtttatggatggaa

SEQ ID NO: 144220 - DNA, 5814 bp, Homo sapiens
  Payload ID: 8499
  Gene Symbol: ITSN2
  Gene Name: intersectin 2
  Uniprot ID: Q9NZM3
  ENST ID: ENST00000361999
  CDS Start-End: 40-5052
cgccagatggctgagagctagcaaggaaaactcaggaccatgatggctcagtttcccacagctatgaatggagggccaaacatgtgggctattacctctgaagaacgtactaagcatgacaggcagtttgataacctcaaaccttcaggaggttacataacaggtgatcaagcacgtaattttttcctacaatcaggtctgccggcccctgttttagctgaaatatgggctttatcagacctaaacaaggatgggaagatggatcagcaagagttctccatagctatgaaactcatcaaactgaagcttcaaggccaacagttgcctgtggttctccctcctattatgaagcaaccccctatgttttctccattaatttctgctcgttttggaatgggaagcatgcccaatctgtccattcctcagccattgcctccagctgcacctataacatcattgtcttctgcgacttcagggaccaaccttcctcccttaatgatgcccactcccctagtgccttctgttagcacatcatcattaccaaatggaaccgccagtctcattcagcctttacccattccttattcttcttcaacattgcctcatgggtcatcttatagtctgatgatgggaggatttggaggtgctagtatacagaaagcgcagtctctgattgatttaggatctagtagctcaacttcctcgactgcttcactctcagggaactcacccaagactgggacctcagagtgggcagttcctcagcctacaagattaaaatatcggcaaaaatttaatactcttgacaaaagtatgagtggatatctctcaggttttcaagctagaaatgcccttcttcagtcaaatctttctcaaactcagctggctactatttggactctggctgacgttgatggtgatggacagctaaaagcagaagagtttattcttgcaatgcaccttactgacatggccaaagctggacagccattaccactgactttacctcctgagcttgttcctccatctttcagaggaggaaagcaaattgattccattaatggaactctgccttcatatcagaaaatgcaagaagaggagcctcagaagaaattaccagttacttttgaggacaaacggaaagccaactatgagcgagggaacatggagctggaaaagcgacgccaagccttgatggagcagcaacaaagggaggcagaacgtaaagcccagaaagaaaaggaagagtgggaacgaaaacagagagaattacaagaacaagaatggaagaaacaacttgaattagaaaaacgcttagagaagcaacgggaattggagagacaacgagaggaagaaaggagaaaagacatagaaagacgagaggcagcaaaacaggaacttgaacgacaacgtcgcttagaatgggagagaattcggcgacaggagcttctcaatcaaaagaatagagaacaagaagaaattgtcaggttaaactctaaaaagaagaatcttcatcttgagttggaagcactgaatggcaaacatcagcagatctcaggcagacttcaggatgtccgactcaaaaagcaaactcaaaagactgagctggaagttctggataagcagtgtgacttggaaattatggaaatcaagcaacttcaacaggaacttcaggaatatcagaataagcttatctatctggtacctgagaagcaattattaaatgaaagaattaaaaacatgcagttcagtaacacacctgattcaggggtcagtttacttcataaaaaatcattagaaaaggaagaattatgccaaagacttaaagaacagttagatgctcttgaaaaagaaactgcatctaagctgtcagaaatggattcttttaacaatcaactaaaggaactgagagaaacctacaacacacagcagttagcccttgaacagctttataagatcaaacgtgacaagttgaaggaaattgaaaggaaaagattagaactaatgcagaaaaagaaactagaagatgaggctgcaaggaaagcaaagcaaggaaaagaaaacttatggaaagaaaatcttagaaaggaggaagaagaaaaacaaaagcgactccaggaagaaaaaacacaagaaaaaattcaagaagaggaacggaaagctgaggagaaacaacgtaaggataaggatactttgaaagctgaggagaaaaaacgtgagacagctagtgttttggtgaattatagagcattatacccctttgaagcaaggaaccatgatgagatgagttttaattctggagatataattcaggttgatgaaaaaaccgtaggagaacctggttggctttatggtagttttcaaggaaattttggctggtttccatgcaattatgtagaaaaaatgccatcaagtgaaaatgaaaaagctgtatctccaaagaaggccttacttcctcctacagtttctttatctgctacctcaacttcctctgaaccactttcttcaaatcaaccagcatcagtgactgattatcaaaatgtatctttttcaaacctaactgtaaatacatcatggcagaaaaaatcagccttcactcgaactgtgtcccctggatctgtatcacctattcatggacagggacaagtggtagaaaacttaaaagcacaggccctttgttcctggactgcaaagaaagataaccacttgaacttctcaaaacatgacattattactgtcttggagcagcaagaaaattggtggtttggggaggtgcatggaggaagaggatggtttcccaaatcttatgtcaagatcattcctgggagtgaagtaaaacgggaagaaccagaagctttgtatgcagctgtaaataagaaacctacctcggcagcctattcagttggagaagaatatattgcactttatccatattcaagtgtggaacctggagatttgactttcacagaaggtgaagaaatattggtgacccagaaagatggagagtggtggacaggaagtattggagatagaagtggaatttttccatcaaactatgtcaaaccaaaggatcaagagagttttgggagtgctagcaagtctggagcatcaaataaaaaacctgagattgctcaggtaacttcagcatatgttgcttctggttctgaacaacttagccttgcaccaggacagttaatattaattctaaagaaaaatacaagtgggtggtggcaaggagagttacaggccagaggaaaaaagcgacagaaaggatggtttcctgccagtcatgttaaacttttgggtccaagtagtgaaagagccacacctgcctttcatcctgtatgtcaggtgattgctatgtatgactatgcagcaaataatgaagatgagctcagtttctccaagggacaactcattaatgttatgaacaaagatgatcctgattggtggcaaggagagatcaacggggtgactggtctctttccttcaaactacgttaagatgacgacagactcagatccaagtcaacagtggtgtgctgatctgcaaaccctggacacaatgcagccaattgagaggaaaagacagggctatattcatgagctgattcagaccgaagagcggtacatggctgaccttcagctcgtcgtcgaggtttttcagaaacgcatggcagagtcaggctttctcactgaaggggagatggccctgatttttgttaactggaaggagctcatcatgtccaacacaaagctgctgaaggctttgcgggtgcggaagaagaccgggggcgagaagatgccggtgcagatgattggggacatcctggccgctgagctgtcccacatgcaggcttacatcaggttctgcagctgccagcttaatggagcagctctgttacagcagaagacagatgaagacacagatttcaaagaatttttaaagaagctggcatctgacccgcggtgtaaaggaatgcccctctccagcttcctgctgaaacccatgcagaggatcacccgctacccactgctcatcagaagtattctggagaacaccccggagagccatgcagaccattcctccctaaagctggccctcgagcgggcagaggagctgtgctctcaagtgaatgagggagttcgggagaaggaaaactcggaccgactggagtggatccaggcgcacgtgcagtgtgaaggcctcgcggagcaacttattttcaactctctcaccaactgcctggggccccggaagctcttacacagtgggaaattatacaagaccaagagcaacaaggaactgcacggattcctcttcaatgacttcctgcttcttacctacatggtcaagcagtttgctgtttcctctggctctgagaaacttttcagctcgaagtccaatgctcaattcaaaatgtataaaacgcccattttcctgaatgaagtcttggtgaaactgcccacagacccttccagcgatgagcctgtcttccacatttcccacattgatcgggtctacaccctccgaacagacaacattaatgagaggaccgcctgggtgcagaagatcaaggcggcgtctgagcagtacatcgacaccgagaagaagaagcgtgagaaagcttaccaagcccgctcccaaaagacttcaggcattgggcgcctgatggtgcatgtcattgaagctacagaattaaaagcctgcaaaccaaatggaaagagcaacccatactgtgaaatcagcatgggctcccagagctacaccaccaggaccatccaggacacactcaatcccaagtggaattttaactgccagttctttattaaggatctctaccaagacgtgctgtgtctcaccctgtttgacagagaccagttttcaccagatgatttcctgggtcgtactgaaattccagtggcaaaaattcgaacagaacaggaaagcaaaggccctatgacccgccgactgctgctgcatgaggtccccaccggggaggtctgggtccgttttgacctgcagctttttgagcaaaaaactctcctgtaggggttctaaaggacagcaccagcgggacagcccacaaggctggggctggagaatgagagactgcgctctcttggggctgagggagcaccatgcagcttcacccctcacaaagccatgcacgctgggggctctgttttcctgcacactaaatagctagcaatctatgcaaacacctttcccataaagaaaccaaaccccatagtacagtgccttgtcctagtgttcacatgttcagctctgtttgtttagatgccaaggtttccattttcagggctataaaaagtattacttggaaatgaggcatcagaccaccagatgttaccgctcggttgaatgtgtccaccgtggagtggtttggtgacgctgtaaccattccacgccagtgacctctgctgggtcacagccactcaggaggggaagggtcaggatgagaggctgcagcctcgacacttggcgcggcctgatactgaaatagcgtctactcgtgcactgaataaaaacagaaacttgatcattttattcctgattagattttatcactctctgctaagacaatatagtctggagtataagtgggaaagcttgatttaaatactgtgaactctaataatgtggaaaatatttttcaactttaattttctgaagtataaattatttatgtaaattcattgtttttgcatatttcttaggacatgcatctttaagctttatcattgcccatatgtacagaaagagaataaagacatatgtttatggatggaa

SEQ ID NO: 144221 - DNA, 4563 bp, Homo sapiens
  Payload ID: 8499
  Gene Symbol: ITSN2
  Gene Name: intersectin 2
  Uniprot ID: Q9NZM3
  ENST ID: ENST00000406921
  CDS Start-End: 239-3988
ggctgaggcggcgccggcggagccctgagcggctgtgacaggctacgcaacaggttcgcgggcggcggcctgacgaccaagccagctgcagtggcggcgacggcggcagagcagggtctccccgcgcctgcccgcgcccaggctgccggtgctgagggacgcggagtcgcgctgtgacgagcgggaggcgcggcgagggcgccagatggctgagagctagcaaggaaaactcaggaccatgatggctcagtttcccacagctatgaatggagggccaaacatgtgggctattacctctgaagaacgtactaagcatgacaggcagtttgataacctcaaaccttcaggaggttacataacaggtgatcaagcacgtaattttttcctacaatcaggtctgccggcccctgttttagctgaaatatgggctttatcagacctaaacaaggatgggaagatggatcagcaagagttctccatagctatgaaactcatcaaactgaagcttcaaggccaacagttgcctgtggttctccctcctattatgaagcaaccccctatgttttctccattaatttctgctcgttttggaatgggaagcatgcccaatctgtccattcctcagccattgcctccagctgcacctataacatcattgtcttctgcgacttcagggaccaaccttcctcccttaatgatgcccactcccctagtgccttctgttagcacatcatcattaccaaatggaaccgccagtctcattcagcctttacccattccttattcttcttcaacattgcctcatgggtcatcttatagtctgatgatgggaggatttggaggtgctagtatacagaaagcgcagtctctgattgatttaggatctagtagctcaacttcctcgactgcttcactctcagggaactcacccaagactgggacctcagagtgggcagttcctcagcctacaagattaaaatatcggcaaaaatttaatactcttgacaaaagtatgagtggatatctctcaggttttcaagctagaaatgcccttcttcagtcaaatctttctcaaactcagctggctactatttggactctggctgacgttgatggtgatggacagctaaaagcagaagagtttattcttgcaatgcaccttactgacatggccaaagctggacagccattaccactgactttacctcctgagcttgttcctccatctttcagaggaggaaagcaaattgattccattaatggaactctgccttcatatcagaaaatgcaagaagaggagcctcagaagaaattaccagttacttttgaggacaaacggaaagccaactatgagcgagggaacatggagctggaaaagcgacgccaagccttgatggagcagcaacaaagggaggcagaacgtaaagcccagaaagaaaaggaagagtgggaacgaaaacagagagaattacaagaacaagaatggaagaaacaacttgaattagaaaaacgcttagagaagcaacgggaattggagagacaacgagaggaagaaaggagaaaagacatagaaagacgagaggcagcaaaacaggaacttgaacgacaacgtcgcttagaatgggagagaattcggcgacaggagcttctcaatcaaaagaatagagaacaagaagaaattgtcaggttaaactctaaaaagaagaatcttcatcttgagttggaagcactgaatggcaaacatcagcagatctcaggcagacttcaggatgtccgactcaaaaagcaaactcaaaagactgagctggaagttctggataagcagtgtgacttggaaattatggaaatcaagcaacttcaacaggaacttcaggaatatcagaataagcttatctatctggtacctgagaagcaattattaaatgaaagaattaaaaacatgcagttcagtaacacacctgattcaggggtcagtttacttcataaaaaatcattagaaaaggaagaattatgccaaagacttaaagaacagttagatgctcttgaaaaagaaactgcatctaagctgtcagaaatggattcttttaacaatcaactaaagtgtgggaatatggatgactctgttcttcagtgccttttgtctctgctaagctgtctcaacaacctcttcctcttacttaaggaactgagagaaacctacaacacacagcagttagcccttgaacagctttataagatcaaacgtgacaagttgaaggaaattgaaaggaaaagattagaactaatgcagaaaaagaaactagaagatgaggctgcaaggaaagcaaagcaaggaaaagaaaacttatggaaagaaaatcttagaaaggaggaagaagaaaaacaaaagcgactccaggaagaaaaaacacaagaaaaaattcaagaagaggaacggaaagctgaggagaaacaacgtaaggataaggatactttgaaagctgaggagaaaaaacgtgagacagctagtgttttggtgaattatagagcattatacccctttgaagcaaggaaccatgatgagatgagttttaattctggagatataattcaggttgatgaaaaaaccgtaggagaacctggttggctttatggtagttttcaaggaaattttggctggtttccatgcaattatgtagaaaaaatgccatcaagtgaaaatgaaaaagctgtatctccaaagaaggccttacttcctcctacagtttctttatctgctacctcaacttcctctgaaccactttcttcaaatcaaccagcatcagtgactgattatcaaaatgtatctttttcaaacctaactgtaaatacatcatggcagaaaaaatcagccttcactcgaactgtgtcccctggatctgtatcacctattcatggacagggacaagtggtagaaaacttaaaagcacaggccctttgttcctggactgcaaagaaagataaccacttgaacttctcaaaacatgacattattactgtcttggagcagcaagaaaattggtggtttggggaggtgcatggaggaagaggatggtttcccaaatcttatgtcaagatcattcctgggagtgaagtaaaacgggaagaaccagaagctttgtatgcagctgtaaataagaaacctacctcggcagcctattcagttggagaagaatatattgcactttatccatattcaagtgtggaacctggagatttgactttcacagaaggtgaagaaatattggtgacccagaaagatggagagtggtggacaggaagtattggagatagaagtggaatttttccatcaaactatgtcaaaccaaaggatcaagagagttttgggagtgctagcaagtctggagcatcaaataaaaaacctgagattgctcaggtaacttcagcatatgttgcttctggttctgaacaacttagccttgcaccaggacagttaatattaattctaaagaaaaatacaagtgggtggtggcaaggagagttacaggccagaggaaaaaagcgacagaaaggatggtttcctgccagtcatgttaaacttttgggtccaagtagtgaaagagccacacctgcctttcatcctgtatgtcaggtgattgctatgtatgactatgcagcaaataatgaagatgagctcagtttctccaagggacaactcattaatgttatgaacaaagatgatcctgattggtggcaaggagagatcaacggggtgactggtctctttccttcaaactacgttaagatgacgacagactcagatccaagtcaacagtggtgtgctgatctgcaaaccctggacacaatgcagccaattgagaggaaaagacagggctatattcatgagctgattcagaccgaagagcggtacatggctgaccttcagctcgtcgtcgaggtgaggaggctgctgctggctagctctcggggtatctgctgtctctcatgagagatggtgggcatcagactcagggctgcctccacgcagagtcaaagcaaggcatcacttttgatgtgtgaattcacaaatagtgacggaagctctcacatcctccaaatgctgtctctgcctgccggataatgcttgagattgaaagtctctaatgagctctttcccccagatgaggtcactcagagtgaagcgggagaacaagagggcattcgcatggcttcgttggatgtggcaggagccccatcaaggaaggacggggatagagtggatgggaagggcctatggcagaccgtagcttccttggatatttgcctaatatctgttttaacatctgacattttcataaactggtatctctggaggaactgtgaaacagtgaaagtgttcacctcatggttgtatcagtttggaaaacccaatgggagcatattgtaaaatagttcccaaatatcatatagctactgtttgtttataccagtgacctctacgctgatgacagctatccttattcgagtagcactttaaaatgatttgtgcttgagtgaacaaaagaagactttccatttctacta

SEQ ID NO: 144222 - DNA, 3634 bp, Homo sapiens
  Payload ID: 8499
  Gene Symbol: ITSN2
  Gene Name: intersectin 2
  ENST ID: ENST00000416160
  CDS Start-End: 1-362
gccttgcaccaggacagttaatattaattctaaagaaaaatacaagtgggtggtggcaaggagagttacaggccagaggaaaaaagcgacagaaaggatggtttcctgccagtcatgttaaacttttgggtccaagtagtgaaagagccacacctgcctttcatcctgtatgtcaggtgattgctatgtatgactatgcagcaaataatgaagatgagctcagtttctccaagggacaactcattaatgttatgaacaaagatgatcctgattggtggcaaggagagatcaacggggtgactggtctctttccttcaaactacgttaagatgacgacagactcagatccaagtcaacagtgacccaatgttgtcttccagttgtgaaagcaccccagagacccactatccaagtttcactctagcgtggaggcagggcaggcagccctgatcaaatatctcctacacaattcgtttacttcgtttgaatgttagagccacttgtgattatttttttgtgtttctaacttacagtttaaatttatttgtaaaaagttaaaggatagtgggtctttgtgtggctttccctgctgttcactctggcatctttagcatttttcttcttttttaatttgataattgtaggtcattagcatgcatattgagtttgcccttatgtggtgggagttcaaacacacaaagacccactatttgcacaaactattcttactggtttggaataggctgccatgcttttttaatgttattgcaacatgtgtattcatttacagaattcagataaaatttgcttatgttctgctattatgtttgatctaatcctaatcacagtgagctcttaattagctcaatatgtggtttgccctcaagtgtgcactgtttattactttgtaatatgccactatgagtactgacatttagatttgtttaaaggccaagaactggaaacagccatgccctgttttctgtgtatttgggatgggaataacaacattttgggggagctttttaaatctcagagaagaggaaagtggcctgctctggcaggtatgtgcagtgtttcatttgttccagtcccaagaatgagcactgtcctatggtagttcgcttaggatctttatgtgctctgggctaatgaaggtactgcatcatgtgctgcagcgtgtgtattctttttcgatgacctataaagggattatttttgaggaatgaaaggctcccatcattgactgtgagatgggaaaaacctttcctagcttagagcatttatatcttaatccattttaaagtcagagttcattgttacctgttttaatcaggtgactacatgtcccagtatacaaaggggcactggttgacattcttcttaatgtatttagtaaatatcataagaaatcctttaagagtttaaatgtccccaaaacagacatgtgggctctagtcaagaatgaattagagtgaaggaaagctgtgtaacacctggcattcctctgtgttcatggagcttctttgaggctctaagattgattttaccatcagacttctctaatacctgttcttcaaccatattggctactttgacataagaatttacttcttttcctggaatggaaaacactttaaaaaataataacaaacattattataaactaatatatgtgagagtacttagttgatacaaaaaggagttttagtagacagtattatactatatttgaaaatcaaggagaattttatgcaacttaaaatgtttacaaactgcagtgcaatctactgtttgtgaatgtcaaagtatcaggaaaagtgtatatacaatcacagagtcatatttcctcacaaagttatttacaaagagtgaaatatgtttttgtacctctcagtttcagttagaggcatattttgtgcaatatttatgttaatgtgcctatacattatgaatgaattatttcagtcatacattgcctaaatcataactttatgatgcttgggaaagaatcaacagttaaaacttcataaagttataatgtctgtgttccaaaatacatcacattattaggatgtagggagataagtatgtgtgctccctagggtggcaatttctagttactagaccacctctatttttagcatttggcatcctcatgatacttttataaatatgacattaataggaaagcaataatttcattttacagatagaataacagatttgcctgcattcactgaaagagtgcaaagactgggtccttgtgaattcaactgactctcccaaattgtattaattacctgttcttgccttttattttctgaacttgctgcttttgcattcttttgagttcaaagacagttactttaaatccatttttaaaccctcggggtagaaatcataccactgttaatcagccacattatttggtctaaggttttttctttataattctgaaactgagtttatctaatacattgatgaattatttcaaacgtatttttatagttcaaatcacttcacttttacactgataaatataaattactgggaatgaccttcagacagcgtttagcatctgtaaccaacctgaaaataatatgttcatcaggtacctatggattaaatcatatactggcgtatttaagctgaatgtcagtctggaaaataaatttactatattaactgaaataccactctttgtgtaggtattttgtcatgtatttaagaaaaagataaaaagaatggaaatcatatgacataataacttaagtctttcttaaaagtgcatgctgtcttttgcaatacctcattcagccaagtatttgttctcttcctcattcagtataagtcagctttcaatttgcttagaaggcaacattagaaggttagagttcatcagaaacatagaattttaaaatgtgagttcaactgaataaatttgaatttctgtaggaggtaaagaatcaaaatacctgtttaaagattgcaattgcaatgtataataatcacttttaaattatttgattaaaccttttaggttttccagaaatgaaaaaaatcagttctaaaaccaaagctgatttttagaaaatttgagaatgtaaatcagccctatccataatatagtttctctaaaactttatcttaaagagtcattttaaaataatataactattaaaaatgtaactgatatttaaatgttttgaaataaaacattttaaaatataaatactgtagtttaaaagaaagaaactgggggaaagaaaagtagagaaagaaataccaattccagtccaaagctttatttgccaggttttcttagaatgacttttaccagtttatgaattcttgtaaacagaatctataatggaaatactgaaagacttttgcctaaagtggcattattgaatgctgctgtgatgctactgtaatgtaataaattattaaattgttgcaaagtgctgtttttgccttaaaattttattttgtgtgtcttgaaaattatagtattaaaggtattgagattgtgcaaatgctgggcacgcttggcatgagataatctgtttttatttttacaaaattgtaatataactatgcaagtgtgtttattaaaagaacacaaactata

SEQ ID NO: 144223 - DNA, 2066 bp, Homo sapiens
  Payload ID: 8499
  Gene Symbol: ITSN2
  Gene Name: intersectin 2
  ENST ID: ENST00000412011
  CDS Start-End: 240-2066
gggctgaggcggcgccggcggagccctgagcggctgtgacaggctacgcaacaggttcgcgggcggcggcctgacgaccaagccagctgcagtggcggcgacggcggcagagcagggtctccccgcgcctgcccgcgcccaggctgccggtgctgagggacgcggagtcgcgctgtgacgagcgggaggcgcggcgagggcgccagatggctgagagctagcaaggaaaactcaggaccatgatggctcagtttcccacagctatgaatggagggccaaacatgtgggctattacctctgaagaacgtactaagcatgacaggcagtttgataacctcaaaccttcaggaggttacataacaggtgatcaagcacgtaattttttcctacaatcaggtctgccggcccctgttttagctgaaatatgggctttatcagacctaaacaaggatgggaagatggatcagcaagagttctccatagctatgaaactcatcaaactgaagcttcaaggccaacagttgcctgtggttctccctcctattatgaagcaaccccctatgttttctccattaatttctgctcgttttggaatgggaagcatgcccaatctgtccattcctcagccattgcctccagctgcacctataacatcattgtcttctgcgacttcagggaccaaccttcctcccttaatgatgcccactcccctagtgccttctgttagcacatcatcattaccaaatggaaccgccagtctcattcagcctttacccattccttattcttcttcaacattgcctcatgggtcatcttatagtctgatgatgggaggatttggaggtgctagtatacagaaagcgcagtctctgattgatttaggatctagtaggagctggagctcaggtagtagtgctcactcacctgccactcaccgagccccgctgtccagcccggttcctaacagctcaacttcctcgactgcttcactctcagggaactcacccaagactgggacctcagagtgggcagttcctcagcctacaagattaaaatatcggcaaaaatttaatactcttgacaaaagtatgagtggatatctctcaggttttcaagctagaaatgcccttcttcagtcaaatctttctcaaactcagctggctactatttggactctggctgacgttgatggtgatggacagctaaaagcagaagagtttattcttgcaatgcaccttactgacatggccaaagctggacagccattaccactgactttacctcctgagcttgttcctccatctttcagaggaggaaagcaaattgattccattaatggaactctgccttcatatcagaaaatgcaagaagaggagcctcagaagaaattaccagttacttttgaggacaaacggaaagccaactatgagcgagggaacatggagctggaaaagcgacgccaagccttgatggagcagcaacaaagggaggcagaacgtaaagcccagaaagaaaaggaagagtgggaacgaaaacagagagaattacaagaacaagaatggaagaaacaacttgaattagaaaaacgcttagagaagcaacgggaattggagagacaacgagaggaagaaaggagaaaagacatagaaagacgagaggcagcaaaacaggaacttgaacgacaacgtcgcttagaatgggagagaattcggcgacaggagcttctcaatcaaaagaatagagaacaagaagaaattgtcaggttaaactctaaaaagaagaatcttcatcttgagttggaagcactgaatggcaaacatcagcagatctcaggcagacttcaggatgtccgactcaaaaagcaaactcaaaagactgagctggaagttctggataagcagtgtgacttggaaattatggaaatcaagcaacttcaacaggaacttcaggaatatcagaataagcttatctatctggtacctgagaagcaattattaaatgaaagaattaaaaacatgcagttcagtaacacacctgattcaggggtcagtttacttcataaaaaa

SEQ ID NO: 144224 - DNA, 902 bp, Homo sapiens
  Payload ID: 8499
  Gene Symbol: ITSN2
  Gene Name: intersectin 2
  ENST ID: ENST00000443927
  CDS Start-End: 352-902
ggagccctgagcggctgtgacaggctacgcaacaggttcgcgggcggcggcctgacgaccaagccagctgcagtggcggcgacggcggcagagcagggtctccccgcgcctgcccgcgcccaggctgccggtgctgagggacgcggagtcgcgctgtgacgagcgggaggcgcggcgagggcgccagatggctgagagctagcaaggaaaactcaggaccatgatggctcagtttcccacagctatgaatgaacctattatttaaggattaatgttaatgctgggggctcagtgagttgctgcatataaagtccctgacaatagtcagggttcaataaaggagggccaaacatgtgggctattacctctgaagaacgtactaagcatgacaggcagtttgataacctcaaaccttcaggaggttacataacaggtgatcaagcacgtaattttttcctacaatcaggtctgccggcccctgttttagctgaaatatgggctttatcagacctaaacaaggatgggaagatggatcagcaagagttctccatagctatgaaactcatcaaactgaagcttcaaggccaacagttgcctgtggttctccctcctattatgaagcaaccccctatgttttctccattaatttctgctcgttttggaatgggaagcatgcccaatctgtccattcctcagccattgcctccagctgcacctataacatcattgtcttctgcgacttcagggaccaaccttcctcccttaatgatgcccactcccctagtgccttctgttagcacatcatcattaccaaatggaaccgccagtctcattcagcctttacccattccttattcttcttcaacattgcctcatgggtcatcttatagtctgatgatggg

SEQ ID NO: 144225 - DNA, 974 bp, Homo sapiens
  Payload ID: 8499
  Gene Symbol: ITSN2
  Gene Name: intersectin 2
  ENST ID: ENST00000427234
  CDS Start-End: 1-167
aggaactgcacggattcctcttcaatgacttcctgcttcttacctacatggtcaagcagtttgctgtttcctctggctctgagaaacttttcagctcgaagtccaatgctcaattcaaaatgtataaaacggaccgcctgggtgcagaagatcaaggcggcgtctgagcagtacatcgacaccgagaagaagaagcgtgagaaagcttaccaagcccgctcccaaaagacttcaggcattgggcgcctgatggtgcatgtcattgaagctacagaattaaaagcctgcaaaccaaatggaaagagcaacccatactgtgaaatcagcatgggctcccagagctacaccaccaggaccatccaggacacactcaatcccaagtggaattttaactgccagttctttattaaggatctctaccaagacgtgctgtgtctcaccctgtttgacagagaccagttttcaccagatgatttcctgggtcgtactgaaattccagtggcaaaaattcgaacagaacaggaaagcaaaggccctatgacccgccgactgctgctgcatgaggtccccaccggggaggtctgggtccgttttgacctgcagctttttgagcaaaaaactctcctgtaggggttctaaaggacagcaccagcgggacagcccacaaggctggggctggagaatgagagactgcgctctcttggggctgagggagcaccatgcagcttcacccctcacaaagccatgcacgctgggggctctgttttcctgcacactaaatagctagcaatctatgcaaacacctttcccataaagaaaccaaaccccatagtacagtgccttgtcctagtgttcacatgttcagctctgtttgtttagatgccaaggtttccattttcagggctataaaaagtattacttggaaatgaggcatcagaccaccagatgttaccgctcggttgaatgtgtccacc

SEQ ID NO: 144226 - DNA, 252 bp, Homo sapiens
  Payload ID: 8499
  Gene Symbol: ITSN2
  Gene Name: intersectin 2
  ENST ID: ENST00000449392
  CDS Start-End: 1-109
cgcctgggtgcagaagatcaaggcggcgtctgagcagtacatcgacaccgagaagaagaagcgtgagaaagcttaccaaggtttcccccattttgttatatactcctaaaagcccgctcccaaaagacttcaggcattgggcgcctgatggtgcatgtcattgaagctacagaattaaaagcctgcaaaccaaatggaaagagcaacccatactgtgaaatcagcatgggctcccagagctacaccaccagg

SEQ ID NO: 144227 - DNA, 5805 bp, Homo sapiens
  Payload ID: 8499
  Gene Symbol: ITSN2
  Gene Name: intersectin 2
  ENST ID: ENST00000622089
  CDS Start-End: 4-5046
cagatggctgagagccaaggaaaactcaggaccatgatggctcagtttcccacagctatgaatggagggccaaacatgtgggctattacctctgaagaacgtactaagcatgacaggcagtttgataacctcaaaccttcaggaggttacataacaggtgatcaagcacgtaattttttcctacaatcaggtctgccggcccctgttttagctgaaatatgggctttatcagacctaaacaaggatgggaagatggatcagcaagagttctccatagctatgaaactcatcaaactgaagcttcaaggccaacagttgcctgtggttctccctcctattatgaagcaaccccctatgttttctccattaatttctgctcgttttggaatgggaagcatgcccaatctgtccattcctcagccattgcctccagctgcacctataacatcattgtcttctgcgacttcagggaccaaccttcctcccttaatgatgcccactcccctagtgccttctgttagcacatcatcattaccaaatggaaccgccagtctcattcagcctttacccattccttattcttcttcaacattgcctcatgggtcatcttatagtctgatgatgggaggatttggaggtgctagtatacagaaagcgcagtctctgattgatttaggatctagtagctcaacttcctcgactgcttcactctcagggaactcacccaagactgggacctcagagtgggcagttcctcagcctacaagattaaaatatcggcaaaaatttaatactcttgacaaaagtatgagtggatatctctcaggttttcaagctagaaatgcccttcttcagtcaaatctttctcaaactcagctggctactatttggactctggctgacgttgatggtgatggacagctaaaagcagaagagtttattcttgcaatgcaccttactgacatggccaaagctggacagccattaccactgactttacctcctgagcttgttcctccatctttcagaggaggaaagcaaattgattccattaatggaactctgccttcatatcagaaaatgcaagaagaggagcctcagaagaaattaccagttacttttgaggacaaacggaaagccaactatgagcgagggaacatggagctggaaaagcgacgccaagccttgatggagcagcaacaaagggaggcagaacgtaaagcccagaaagaaaaggaagagtgggaacgaaaacagagagaattacaagaacaagaatggaagaaacaacttgaattagaaaaacgcttagagaagcaacgggaattggagagacaacgagaggaagaaaggagaaaagacatagaaagacgagaggcagcaaaacaggaacttgaacgacaacgtcgcttagaatgggagagaattcggcgacaggagcttctcaatcaaaagaatagagaacaagaagaaattgtcaggttaaactctaaaaagaagaatcttcatcttgagttggaagcactgaatggcaaacatcagcagatctcaggcagacttcaggatgtccgactcaaaaagcaaactcaaaagactgagctggaagttctggataagcagtgtgacttggaaattatggaaatcaagcaacttcaacaggaacttcaggaatatcagaataagcttatctatctggtacctgagaagcaattattaaatgaaagaattaaaaacatgcagttcagtaacacacctgattcaggggtcagtttacttcataaaaaatcattagaaaaggaagaattatgccaaagacttaaagaacagttagatgctcttgaaaaagaaactgcatctaagctgtcagaaatggattcttttaacaatcaactaaaggaactgagagaaacctacaacacacagcagttagcccttgaacagctttataagatcaaacgtgacaagttgaaggaaattgaaaggaaaagattagaactaatgcagaaaaagaaactagaagatgaggctgcaaggaaagcaaagcaaggaaaagaaaacttatggaaagaaaatcttagaaaggaggaagaagaaaaacaaaagcgactccaggaagaaaaaacacaagaaaaaattcaagaagaggaacggaaagctgaggagaaacaacgtaaggataaggatactttgaaagctgaggagaaaaaacgtgagacagctagtgttttggtgaattatagagcattatacccctttgaagcaaggaaccatgatgagatgagttttaattctggagatataattcaggttgatgaaaaaaccgtaggagaacctggttggctttatggtagttttcaaggaaattttggctggtttccatgcaattatgtagaaaaaatgccatcaagtgaaaatgaaaaagctgtatctccaaagaaggccttacttcctcctacagtttctttatctgctacctcaacttcctctgaaccactttcttcaaatcaaccagcatcagtgactgattatcaaaatgtatctttttcaaacctaactgtaaatacatcatggcagaaaaaatcagccttcactcgaactgtgtcccctggatctgtatcacctattcatggacagggacaagtggtagaaaacttaaaagcacaggccctttgttcctggactgcaaagaaagataaccacttgaacttctcaaaacatgacattattactgtcttggagcagcaagaaaattggtggtttggggaggtgcatggaggaagaggatggtttcccaaatcttatgtcaagatcattcctgggagtgaagtaaaacgggaagaaccagaagctttgtatgcagctgtaaataagaaacctacctcggcagcctattcagttggagaagaatatattgcactttatccatattcaagtgtggaacctggagatttgactttcacagaaggtgaagaaatattggtgacccagaaagatggagagtggtggacaggaagtattggagatagaagtggaatttttccatcaaactatgtcaaaccaaaggatcaagagagttttgggagtgctagcaagtctggagcatcaaataaaaaacctgagattgctcaggtaacttcagcatatgttgcttctggttctgaacaacttagccttgcaccaggacagttaatattaattctaaagaaaaatacaagtgggtggtggcaaggagagttacaggccagaggaaaaaagcgacagaaaggatggtttcctgccagtcatgttaaacttttgggtccaagtagtgaaagagccacacctgcctttcatcctgtatgtcaggtgattgctatgtatgactatgcagcaaataatgaagatgagctcagtttctccaagggacaactcattaatgttatgaacaaagatgatcctgattggtggcaaggagagatcaacggggtgactggtctctttccttcaaactacgttaagatgacgacagactcagatccaagtcaacagtggtgtgctgatctgcaaaccctggacacaatgcagccaattgagaggaaaagacagggctatattcatgagctgattcagaccgaagagcggtacatggctgaccttcagctcgtcgtcgaggtttttcagaaacgcatggcagagtcaggctttctcactgaaggggagatggccctgatttttgttaactggaaggagctcatcatgtccaacacaaagctgctgaaggctttgcgggtgcggaagaagaccgggggcgagaagatgccggtgcagatgattggggacatcctggccgctgagctgtcccacatgcaggcttacatcaggttctgcagctgccagcttaatggagcagctctgttacagcagaagacagatgaagacacagatttcaaagaatttttaaagaagctggcatctgacccgcggtgtaaaggaatgcccctctccagcttcctgctgaaacccatgcagaggatcacccgctacccactgctcatcagaagtattctggagaacaccccggagagccatgcagaccattcctccctaaagctggccctcgagcgggcagaggagctgtgctctcaagtgaatgagggagttcgggagaaggaaaactcggaccgactggagtggatccaggcgcacgtgcagtgtgaaggcctcgcggagcaacttattttcaactctctcaccaactgcctggggccccggaagctcttacacagtgggaaattatacaagaccaagagcaacaaggaactgcacggattcctcttcaatgacttcctgcttcttacctacatggtcaagcagtttgctgtttcctctggctctgagaaacttttcagctcgaagtccaatgctcaattcaaaatgtataaaacgcccattttcctgaatgaagtcttggtgaaactgcccacagacccttccagcgatgagcctgtcttccacatttcccacattgatcgggtctacaccctccgaacagacaacattaatgagaggaccgcctgggtgcagaagatcaaggcggcgtctgagcagtacatcgacaccgagaagaagaagcgtgagaaagcttaccaagcccgctcccaaaagacttcaggcattgggcgcctgatggtgcatgtcattgaagctacagaattaaaagcctgcaaaccaaatggaaagagcaacccatactgtgaaatcagcatgggctcccagagctacaccaccaggaccatccaggacacactcaatcccaagtggaattttaactgccagttctttattaaggatctctaccaagacgtgctgtgtctcaccctgtttgacagagaccagttttcaccagatgatttcctgggtcgtactgaaattccagtggcaaaaattcgaacagaacaggaaagcaaaggccctatgacccgccgactgctgctgcatgaggtccccaccggggaggtctgggtccgttttgacctgcagctttttgagcaaaaaactctcctgtaggggttctaaaggacagcaccagcgggacagcccacaaggctggggctggagaatgagagactgcgctctcttggggctgagggagcaccatgcagcttcacccctcacaaagccatgcacgctgggggctctgttttcctgcacactaaatagctagcaatctatgcaaacacctttcccataaagaaaccaaaccccatagtacagtgccttgtcctagtgttcacatgttcagctctgtttgtttagatgccaaggtttccattttcagggctataaaaagtattacttggaaatgaggcatcagaccaccagatgttaccgctcggttgaatgtgtccaccgtggagtggtttggtgacgctgtaaccattccacgccagtgacctctgctgggtcacagccactcaggaggggaagggtcaggatgagaggctgcagcctcgacacttggcgcggcctgatactgaaatagcgtctactcgtgcactgaataaaaacagaaacttgatcattttattcctgattagattttatcactctctgctaagacaatatagtctggagtataagtgggaaagcttgatttaaatactgtgaactctaataatgtggaaaatatttttcaactttaattttctgaagtataaattatttatgtaaattcattgtttttgcatatttcttaggacatgcatctttaagctttatcattgcccatatgtacagaaagagaataaagacatatgtttatggatg

SEQ ID NO: 144228 - DNA, 6116 bp, Homo sapiens
  Payload ID: 8500
  Gene Symbol: ICK
  Gene Name: intestinal cell (MAK-like) kinase
  Uniprot ID: Q9UPZ9
  ENST ID: ENST00000350082
  CDS Start-End: 348-2246
gcgccgtgcggcccgtgcgactcgccggacctcgcgggcgtccctgtacggagccctcggccggtcctagcagggattgtccccatttccagctccggagcgggcggctgcgccccgctcgtcgaggagctgcgctcacctcaggggcgggcccccgcctgcgttcgcggcgccagcagaagactgatttttggaaatatgtatttgggagacagtcacgtcctattgaataccttgtgctggtgctgccatcgaaaaatctggttacactctggggaggactgctaccactgcagaactgaaccacttcggccgtgagatgagtgtccggcctgagcaggcacaccatgaatagatacacaacaatcaggcagctcggggatggaacctacggttccgtcctgctgggaagaagcattgagtctggggagctgatcgctattaaaaaaatgaaaagaaaattttattcctgggaggaatgcatgaaccttcgggaggttaagtctttaaagaagctcaaccatgccaatgtagtcaaattaaaagaagttatcagggaaaatgatcatctttattttatcttcgagtacatgaaggaaaatctttaccagctcattaaagagagaaataagttgtttcctgagtctgctataaggaatatcatgtatcagatattacaaggactcgcatttattcacaaacacggcttctttcatcgagacttaaagcctgagaacctcctctgcatgggaccagaacttgtgaaaattgcagactttggtttggcccgagaaatacgatcaaaacctccatatacagattatgtatctaccagatggtacagggctccagaagtactcctgaggtctaccaactacagctcccccattgacgtctgggcggtgggctgcatcatggcagaagtttacaccctcaggccactcttccctggagccagtgaaattgacacaatattcaaaatttgccaagtgctggggacaccaaaaaagactgactggcctgaaggctatcaactttcaagtgcaatgaacttccgttggccacagtgtgtacccaataacttaaagaccttgattcccaatgctagcagtgaagcagtccagctcctgagagacatgcttcagtgggatcccaagaaacgaccaacagctagtcaggcacttcgatatccttacttccaagttggacacccactaggcagcaccacacaaaaccttcaggattcagaaaaaccacagaaaggcatcctggaaaaggcaggcccacctccttatattaagccagtcccacctgcccagccaccagccaagccacacacacgaatttcttcacgacagcatcaagccagccagccccctctgcatctcacgtacccctacaaagcagaggtctccaggacagatcacccaagccatctccaggaggacaagccaagcccgttgcttttcccatccctccacaacaagcatccacagtcgaaaatcacagctggcctggagcacaaaaatggtgagataaagccaaagagtaggagaaggtggggtcttatttccaggtcaacaaaggattcagatgattgggctgacttggatgacttggatttcagtccatccctcagcaggattgacctgaaaaacaagaaaagacagagtgatgacactctctgcaggtttgagagtgttttggacctgaagccctctgagcctgtgggcacaggaaacagtgcccccacccagacgtcatatcagcggcgagacacgcccaccctgagatctgcagccaagcagcactatttgaagcactctcgatacttgcctgggatcagtataagaaatggcatactctcgaatccaggcaaggaatttattccacctaatccatggtctagttctggcttgtctggaaaatcttcagggacaatgtcagtaatcagcaaagtaaattcagttggttccagctctacaagttctagtggactgactggaaactatgtcccttcctttctgaaaaaagaaatcggttctgctatgcagagggtacacctagcacctattccagacccttcccctggttattcctccctgaaggccatgagacctcatcctgggcgaccattcttccacacccagcctagaagcactcctgggttgataccacggcctccagccgcccagccagtgcatggccggacagactgggcttccaagtacgcatctcggcgatgactgtctgccttggtgatgaatctcttcctagggagaagcaggatactttccctcagctgactggtgttctacctgcaagatgtgcagagggcataaaagcaaatcaacactttatagttattcttctgaactaagacatgtcaatattcttttttaaagtttttttttaaaatattgatttgaatgcagtaggcttttttgtataaaattattttattctaaaactgggtcccattattttcttaaacaacagcattttgtatatatggattatgttttagcattttatacagtcaactttgtaatgaactttttaaaaattaattgattttcctttggggttccagataatattttctacagattttgaaaaatgtaataatattaatgcagtattgcaacaggggtgcaatttaaggctatgtgatagagggttatttactcagtgtgtgcagatatttatgaagtggtgaaatttcaagtgtggctcactaggtacttcaggccttcttggactgttgttagaaaagtgatcctctgcttttcttagtaggtcattggtttgatttttggataccactctgctgttctaaaaggactattatattatataattcactttgttttacttttgttccccagatgaaagaactctaagtaaatacattttaaaaaatttttctgacaccctttaatgtggttgcagatctcagatgaaaccaagcttaattatactatgccattatattctaatttattccatttttgaaatcaagttgtatgtgtaccaataaaagagatttctgcttcaaaaggctctcaacatgaaggttaacacagtcaatcaaacttacattcctgccaagatgcatggccaaaaaactaagtatcaaagcagcagaaggtttttgattatagtaactgagatggaattttgtgcctagctcagttctccagatctggctaggagcagtcaatgactaatgttctgtcctagccaaattctcaggacaatttggggagcagaaagagttatggcagaggttccactcatctacaaagtcacagtcacatgccacatttgatctcctaaccctggtgtagtttctttcaagagtgagaactttatttgttgggcagaggctgttccattgagaggaatgtttacagcagtttcaaaaatgacaaagtcagtttggagacagaaaaagacaaaaggtccagtctcatccatctctatatggtacatttgcctcacttatggttgccttaaaggcaagagggaaggtcaccatcagtgaacgcaatgcaatctcaacagtgtattgattcatattctcctagggctcaaactactctctattggttccaggataatgacaaattgaaccatatgtaagtaatcttttattttttattttttttttgagacagagtctcactctgtcacccaggctggagtgcagtggcgcgatcttagctctctgcaacctctgcctcccaggttcaagcctcctgagtaactgggactacaggcgcccgccaccacgcccagctaattttttgtatttttagtagagacggggtttcactgtgttagccaggacggcctcgatctcctgacctcgtgatccaccctcctccacctcccaaagtactgggattacaggcatgagccactgcacccagccaagtgatcatttttataggttaaaatgataggtgaaatgaatatagacactttcatatggttcaacctaatgacttggtaaattattgccttggtgtattaataatatgttgcattctgaacaaataaccatggcttccaaagggccctaacctaaaatcggagagtaatttatgctttggagaatttgactcaaatatatacttgaccaagcaccatgatccctaggggcatgagaaaagcacataatggatgtggatgtgataggtggtcttttcctgttaacaagctggcagcaaagcttcagaaaatatatatgcaagcacaacttgaagctgaattcatttctgtattatattctcaactcgttatctaaagcatcagaacatgtgttttcagagatgagtcctttactataaggttaatatttattttcattttctgtattatatatgaaaagtaaattaatgtgaaacctggcccagcttgctggaaagcaggttttaaattgtaaatattccttagaggagcaaatggattgtttaataccatagtctcagtaatctagcttatataaggtcattacattttttaactgaaaaacctagttacctgattattgcacattataaaattgtttttctaatactttatagggcccaacttcagaaaatacttcgcttttttctttttatgctttcgtttgtttaccagcaagcaacttccctggggaagccaaacacatattcataaaaaaaatcaagtagctgatgtgcagttgagaaaactagaggactgaaaaaacaaattttaactagcaaatgctgtgaattactcttcctccccttctctgaaatgggtaaaggacaaattgtgtaaaaaaacctatgcactatagaagggaatagtaaccatttcttttgtctctctgtttctgttctgactgagaacctgcagccatttcttgttacatgaaaacaaaatgctacttgttacctctattttttgttactatacaattatgaaatgtaatgtaagacaccaacagaaatgatatacctgtaactgtacctatcaggactatacctcatttacagtcagaaagcttactgggatgtcaggaaatgatacagggttggttctcatttcgtgccgaaatgagacagaaattcagtgacgaaggtgcgttgtaggggtattgatgtgccccaggtagtgccagcagagtagggaaaactgcatttgcataaaaactactcttgacatgattgttcattttacaaaaaaattccattaattaccaagccctcacccagcccatgtgtgataggatttatgtaggaagaaacttgattttcaaataattttttaaatgtatctcttgcctaaaggactatatacatctaataaagtaacactgtgtcatcttctggagttatcaaaaattgtatacaatcaagacaacacaagaattattttatttttgagtgcaaatacaggtactgttggagttgatgggcaccatgctttctcatgaagtagcatttccctaccatcaagccattgttttgtgccattcaggagaggaaaaaaaggaatttatgctgtacatttcagttcagtgtatgaccaaaagcaatatgtttataagaagatgtttgacatactaattattttatatcatttaaaccatactgtagcaacataatatatggagctaatttgtagaattatttttacgatttccaaacaaatgtactgtactgttatataatttattgtgaggaccttctcatggaagccattaggaaaacaaactagaggtaaatatcacattaatctgtattatcaatttctcatagacactgtgctaatgtgaattttaaatgacctgcatcaagtcttctgatctcagataactcagtacagatagcaattagtcagctgatttgattacaatggagtaaccgacaatatatttatttataaagcacatattcataataacgagaagaattcagaaaaccacttaagcaagacccttctgaaataaaaaatgttgctttttaaatagtttgtcctaaggtgtttaaaacatgtcaaccttatgtaaggaaaaatttcctggtccaaataaagttgaagtttaagaaaaattgatttgagtgttctgtttttgt

SEQ ID NO: 144229 - DNA, 6227 bp, Homo sapiens
  Payload ID: 8500
  Gene Symbol: ICK
  Gene Name: intestinal cell (MAK-like) kinase
  Uniprot ID: Q9UPZ9
  ENST ID: ENST00000356971
  CDS Start-End: 491-2389
ggaaaacggccgggttcctgctgcactaccatgcgccgtgcggcccgtgcgactcgccggacctcgcgggcgtccctgtacggagccctcggccggtcctagcagggattgtccccatttccagctccggagcgggcggctgcgccccgctcgtcgaggagctgcgctcacctcaggggcgggcccccgcctgcgttcgcggcgccaagaagagtattcctttccacttacaactaaataagacctgcttttgctggagctgtgctaggctgagggaattccacactgaattttacaagcgggatggatttctctaaggcagaagactgatttttggaaatatgtatttgggagacagtcacgtcctattgaataccttgtgctggtgctgccatcgaaaaatctggttacactctggggaggactgctaccactgcagaactgaaccacttcggccgtgagatgagtgtccggcctgagcaggcacaccatgaatagatacacaacaatcaggcagctcggggatggaacctacggttccgtcctgctgggaagaagcattgagtctggggagctgatcgctattaaaaaaatgaaaagaaaattttattcctgggaggaatgcatgaaccttcgggaggttaagtctttaaagaagctcaaccatgccaatgtagtcaaattaaaagaagttatcagggaaaatgatcatctttattttatcttcgagtacatgaaggaaaatctttaccagctcattaaagagagaaataagttgtttcctgagtctgctataaggaatatcatgtatcagatattacaaggactcgcatttattcacaaacacggcttctttcatcgagacttaaagcctgagaacctcctctgcatgggaccagaacttgtgaaaattgcagactttggtttggcccgagaaatacgatcaaaacctccatatacagattatgtatctaccagatggtacagggctccagaagtactcctgaggtctaccaactacagctcccccattgacgtctgggcggtgggctgcatcatggcagaagtttacaccctcaggccactcttccctggagccagtgaaattgacacaatattcaaaatttgccaagtgctggggacaccaaaaaagactgactggcctgaaggctatcaactttcaagtgcaatgaacttccgttggccacagtgtgtacccaataacttaaagaccttgattcccaatgctagcagtgaagcagtccagctcctgagagacatgcttcagtgggatcccaagaaacgaccaacagctagtcaggcacttcgatatccttacttccaagttggacacccactaggcagcaccacacaaaaccttcaggattcagaaaaaccacagaaaggcatcctggaaaaggcaggcccacctccttatattaagccagtcccacctgcccagccaccagccaagccacacacacgaatttcttcacgacagcatcaagccagccagccccctctgcatctcacgtacccctacaaagcagaggtctccaggacagatcacccaagccatctccaggaggacaagccaagcccgttgcttttcccatccctccacaacaagcatccacagtcgaaaatcacagctggcctggagcacaaaaatggtgagataaagccaaagagtaggagaaggtggggtcttatttccaggtcaacaaaggattcagatgattgggctgacttggatgacttggatttcagtccatccctcagcaggattgacctgaaaaacaagaaaagacagagtgatgacactctctgcaggtttgagagtgttttggacctgaagccctctgagcctgtgggcacaggaaacagtgcccccacccagacgtcatatcagcggcgagacacgcccaccctgagatctgcagccaagcagcactatttgaagcactctcgatacttgcctgggatcagtataagaaatggcatactctcgaatccaggcaaggaatttattccacctaatccatggtctagttctggcttgtctggaaaatcttcagggacaatgtcagtaatcagcaaagtaaattcagttggttccagctctacaagttctagtggactgactggaaactatgtcccttcctttctgaaaaaagaaatcggttctgctatgcagagggtacacctagcacctattccagacccttcccctggttattcctccctgaaggccatgagacctcatcctgggcgaccattcttccacacccagcctagaagcactcctgggttgataccacggcctccagccgcccagccagtgcatggccggacagactgggcttccaagtacgcatctcggcgatgactgtctgccttggtgatgaatctcttcctagggagaagcaggatactttccctcagctgactggtgttctacctgcaagatgtgcagagggcataaaagcaaatcaacactttatagttattcttctgaactaagacatgtcaatattcttttttaaagtttttttttaaaatattgatttgaatgcagtaggcttttttgtataaaattattttattctaaaactgggtcccattattttcttaaacaacagcattttgtatatatggattatgttttagcattttatacagtcaactttgtaatgaactttttaaaaattaattgattttcctttggggttccagataatattttctacagattttgaaaaatgtaataatattaatgcagtattgcaacaggggtgcaatttaaggctatgtgatagagggttatttactcagtgtgtgcagatatttatgaagtggtgaaatttcaagtgtggctcactaggtacttcaggccttcttggactgttgttagaaaagtgatcctctgcttttcttagtaggtcattggtttgatttttggataccactctgctgttctaaaaggactattatattatataattcactttgttttacttttgttccccagatgaaagaactctaagtaaatacattttaaaaaatttttctgacaccctttaatgtggttgcagatctcagatgaaaccaagcttaattatactatgccattatattctaatttattccatttttgaaatcaagttgtatgtgtaccaataaaagagatttctgcttcaaaaggctctcaacatgaaggttaacacagtcaatcaaacttacattcctgccaagatgcatggccaaaaaactaagtatcaaagcagcagaaggtttttgattatagtaactgagatggaattttgtgcctagctcagttctccagatctggctaggagcagtcaatgactaatgttctgtcctagccaaattctcaggacaatttggggagcagaaagagttatggcagaggttccactcatctacaaagtcacagtcacatgccacatttgatctcctaaccctggtgtagtttctttcaagagtgagaactttatttgttgggcagaggctgttccattgagaggaatgtttacagcagtttcaaaaatgacaaagtcagtttggagacagaaaaagacaaaaggtccagtctcatccatctctatatggtacatttgcctcacttatggttgccttaaaggcaagagggaaggtcaccatcagtgaacgcaatgcaatctcaacagtgtattgattcatattctcctagggctcaaactactctctattggttccaggataatgacaaattgaaccatatgtaagtaatcttttattttttattttttttttgagacagagtctcactctgtcacccaggctggagtgcagtggcgcgatcttagctctctgcaacctctgcctcccaggttcaagcctcctgagtaactgggactacaggcgcccgccaccacgcccagctaattttttgtatttttagtagagacggggtttcactgtgttagccaggacggcctcgatctcctgacctcgtgatccaccctcctccacctcccaaagtactgggattacaggcatgagccactgcacccagccaagtgatcatttttataggttaaaatgataggtgaaatgaatatagacactttcatatggttcaacctaatgacttggtaaattattgccttggtgtattaataatatgttgcattctgaacaaataaccatggcttccaaagggccctaacctaaaatcggagagtaatttatgctttggagaatttgactcaaatatatacttgaccaagcaccatgatccctaggggcatgagaaaagcacataatggatgtggatgtgataggtggtcttttcctgttaacaagctggcagcaaagcttcagaaaatatatatgcaagcacaacttgaagctgaattcatttctgtattatattctcaactcgttatctaaagcatcagaacatgtgttttcagagatgagtcctttactataaggttaatatttattttcattttctgtattatatatgaaaagtaaattaatgtgaaacctggcccagcttgctggaaagcaggttttaaattgtaaatattccttagaggagcaaatggattgtttaataccatagtctcagtaatctagcttatataaggtcattacattttttaactgaaaaacctagttacctgattattgcacattataaaattgtttttctaatactttatagggcccaacttcagaaaatacttcgcttttttctttttatgctttcgtttgtttaccagcaagcaacttccctggggaagccaaacacatattcataaaaaaaatcaagtagctgatgtgcagttgagaaaactagaggactgaaaaaacaaattttaactagcaaatgctgtgaattactcttcctccccttctctgaaatgggtaaaggacaaattgtgtaaaaaaacctatgcactatagaagggaatagtaaccatttcttttgtctctctgtttctgttctgactgagaacctgcagccatttcttgttacatgaaaacaaaatgctacttgttacctctattttttgttactatacaattatgaaatgtaatgtaagacaccaacagaaatgatatacctgtaactgtacctatcaggactatacctcatttacagtcagaaagcttactgggatgtcaggaaatgatacagggttggttctcatttcgtgccgaaatgagacagaaattcagtgacgaaggtgcgttgtaggggtattgatgtgccccaggtagtgccagcagagtagggaaaactgcatttgcataaaaactactcttgacatgattgttcattttacaaaaaaattccattaattaccaagccctcacccagcccatgtgtgataggatttatgtaggaagaaacttgattttcaaataattttttaaatgtatctcttgcctaaaggactatatacatctaataaagtaacactgtgtcatcttctggagttatcaaaaattgtatacaatcaagacaacacaagaattattttatttttgagtgcaaatacaggtactgttggagttgatgggcaccatgctttctcatgaagtagcatttccctaccatcaagccattgttttgtgccattcaggagaggaaaaaaaggaatttatgctgtacatttcagttcagtgtatgaccaaaagcaatatgtttataagaagatgtttgacatactaattattttatatcatttaaaccatactgtagcaacataatatatggagctaatttgtagaattatttttacgatttccaaacaaatgtactgtactgttatataatttattgtgaggaccttctcatggaagccattaggaaaacaaactagaggtaaatatcacattaatctgtattatcaatttctcatagacactgtgctaatgtgaattttaaatgacctgcatcaagtcttctgatctcagataactcagtacagatagcaattagtcagctgatttgattacaatggagtaaccgacaatatatttatttataaagcacatattcataataacgagaagaattcagaaaaccacttaagcaagacccttctgaaataaaaaatgttgctttttaaatagtttgtcctaaggtgtttaaaacatgtcaaccttatgtaaggaaaaatttcctggtccaaataaagttgaagttt

SEQ ID NO: 144230 - DNA, 3384 bp, Homo sapiens
  Payload ID: 8501
  Gene Symbol: ISX
  Gene Name: intestine-specific homeobox
  Uniprot ID: Q2M1V0
  ENST ID: ENST00000308700
  CDS Start-End: 953-1690
agatcaacaactgtcagctcccagtcagagagaaagggcctcttcagtctgtctcaggagactgggagaaacagcataaaggaccccacaaggaagggagaggtaccctgggtcaggcgcttgtggagagagggcttcgcatgtaaagtgacgtcagggaaaatagaacagaaaaaaagccagggccagcccagaggcacctgagaagaatcagacccacagctcagcccagccctggcacagagaagagacaggcctggcagcacccagggaccccctttcctcagcctccacctgcaggacagcaggagcactgatgcgctgaaggtacgttctggagtctggaagcagcagaactgaaggaagtaaacacgggtgtctgggaagacccctcaagctgcagtaaagcccaggactgaattggccacctgaggccaagggtggcactccaacctcctcctaaaggctggctagagccacaggaaagggccagaagccagagaaagggcaaaggtggacccctgcctccaaacctcctctggagactgacctcctctttcctgtgccttattgtttctccctcttctctttgttcgccactgggcggtgacctcagggatcctggcctaacctggtgattgtgcaggcaactgtgtccgagaagacccttctctggaagattgaaccccaattcagccatggtgactcctttgatgtcaaactggtaagggctgagccgtgggcacaggataccactccttccagctcttctgctgtgacctgcccatggaagtccctgtggacacgaaatcctgtttggatcatctaactggaggctctctgttcttcacctccacgcgccctcttgaccccaggaggttcaggggaggaagtacgccactctccactggcaccctccttggcctacacagagtcacccctgagcccctcaatgtgtgctgaggtgggccctgctctctgcaggggtatggagagaaatagcttggggtgctgtgaggccccgaagaagctgagcctgtccttctccattgaggcgatcctaaagaggcctgccaggaggagtgatatggacagaccagaagggccaggtgaagagggccccggagaagctgcggcctcaggctctgggctagaaaagcctccaaaggaccagccccaggaaggaaggaagagcaagcggagggttcgtaccaccttcaccactgagcagctgcatgagctggagaagatcttccactttacccactacccagacgttcacatccgcagccagctggcagccaggatcaacctcccagaagctcgggtgcagatctggttccagaatcagcgagccaagtggcggaagcaggagaagattggcaacctgggggctccacagcagctgagtgaagccagtgtggccctgcccacaaatctggatgtggctgggcccacgtggacatccactgctctgcgcaggctggctcctcccacgagctgttgtccatcggctcaagatcagctggcctctgcctggttccctgcctggatcaccctcctcccagcgcacccatgggaaacacagcctgtcccaggtcttcccatccatcaaacttgcatccctgtgctatgcatccttccacctccacaccccaaatggggcagcatctgtgctacttcaacatagagattggacatgctctccccaaatgagccactttcctctccaggtgaaggcaggtagcagatgtgccctgggcctctggggaaatcgatttcacaatccaaaaatggcccacagcccaggaagctaccctgaacatgccagttggaaggctgcaccagactcaaaagcaaactaaacaataaaggacagctctcttctctcctggctaaagctgctctcctggttcagaagacaggctggatgagatctcaggccgagctctgaaatagggaggtaatcctccagcacctgtgtttcctctaacttgctgtgtgacctccagccggtcactcaccctctctggacctcatctgtaagaggagccagctggataagatgatttctgaagacgcttccatggtgggcactgaggcacagaggaggccaaggagaggttgtttgttcatgcatgcattcatccgtgacacatgagtacctactgaggactccataaacagaacgggatacagagataaacaatttgggttctgtccacgtttgtcaaaaggtggtgctggcccacctctgaaagcagaacacttgctcaacaaccttgctgttggcccaagtctaacacattctttatgactgtgagcatctcagagtgagagaaaaatgtagaaagttttttaaattctaaacaggatttagtgtctttagttatcttgctggatgggaaagggatgttgtcatttctggcacaaatgaaaagtaggacggaaagctcctttcattcagtttatctttccaggatatatgaaaagggaccagctggaagactagcctcactctgtcctcgaaagcctgagctttcattcaactccctatttccatgcaaagacgctgggcaaaccacatgttctgtctgagcctcagttttcctatccataaaatgaaggtagccaggcctgcctcaaagagcattcaggaggctctgagaggacatgagagtattttgcaaagtgagggcaaggcccagtgtggagtgatattgttattccaagattccactgcaaaagtggctgctttggatgccagcccaggatgagtagttcctgttctcagggaggtcatccgctgagcatcccttctgcacagatgtctctgattcttgtccttgcaggtggaggacagggcctgctcccctaagctgggaagcctggaatgacctcttgcacaagcctaaattccaggaatcttccccaaatcccagatcctctgcaatctacctgcacccctgacccacccaggagttggaccgggagttgggaagcctaggtcttagtcctacactccttctaatttgctgtgtaaccttaccattaatctctctgggtctcagttttctcatctgtattggaggtagcagtgctagctctgccttcaggcatgcaatatgccagaactacagacaacagcccacaggatgcaaaagtgctttgccatcttaaaaatgccagatcactcagagcctatgaatgtggatatcaacaccaggtctctagcaccgctggatgaaaggagaaggctagaggctgagggaggaaagagcagttaacaaacaaaggcagtagctcatcacttgggtagcaggtacccattttaggaccctacactcaaatgtgcaaaataaaatttctatcattttgctataa

SEQ ID NO: 144231 - DNA, 3094 bp, Homo sapiens
  Payload ID: 8501
  Gene Symbol: ISX
  Gene Name: intestine-specific homeobox
  Uniprot ID: Q2M1V0
  ENST ID: ENST00000404699
  CDS Start-End: 664-1401
agatcaacaactgtcagctcccagtcagagagaaagggcctcttcagtctgtctcaggagactgggagaaacagcataaaggaccccacaaggaagggagaggtaccctgggtcaggcgcttgtggagagagggcttcgcatgtaaagtgacgtcagggaaaatagaacagaaaaaaagccagggccagcccagaggcacctgagaagaatcagacccacagctcagcccagccctggcacagagaagagacaggcctggcagcacccagggaccccctttcctcagcctccacctgcaggacagcaggagcactgatgcgctgaagggatcctggcctaacctggtgattgtgcaggcaactgtgtccgagaagacccttctctggaagattgaaccccaattcagccatggtgactcctttgatgtcaaactggtaagggctgagccgtgggcacaggataccactccttccagctcttctgctgtgacctgcccatggaagtccctgtggacacgaaatcctgtttggatcatctaactggaggctctctgttcttcacctccacgcgccctcttgaccccaggaggttcaggggaggaagtacgccactctccactggcaccctccttggcctacacagagtcacccctgagcccctcaatgtgtgctgaggtgggccctgctctctgcaggggtatggagagaaatagcttggggtgctgtgaggccccgaagaagctgagcctgtccttctccattgaggcgatcctaaagaggcctgccaggaggagtgatatggacagaccagaagggccaggtgaagagggccccggagaagctgcggcctcaggctctgggctagaaaagcctccaaaggaccagccccaggaaggaaggaagagcaagcggagggttcgtaccaccttcaccactgagcagctgcatgagctggagaagatcttccactttacccactacccagacgttcacatccgcagccagctggcagccaggatcaacctcccagaagctcgggtgcagatctggttccagaatcagcgagccaagtggcggaagcaggagaagattggcaacctgggggctccacagcagctgagtgaagccagtgtggccctgcccacaaatctggatgtggctgggcccacgtggacatccactgctctgcgcaggctggctcctcccacgagctgttgtccatcggctcaagatcagctggcctctgcctggttccctgcctggatcaccctcctcccagcgcacccatgggaaacacagcctgtcccaggtcttcccatccatcaaacttgcatccctgtgctatgcatccttccacctccacaccccaaatggggcagcatctgtgctacttcaacatagagattggacatgctctccccaaatgagccactttcctctccaggtgaaggcaggtagcagatgtgccctgggcctctggggaaatcgatttcacaatccaaaaatggcccacagcccaggaagctaccctgaacatgccagttggaaggctgcaccagactcaaaagcaaactaaacaataaaggacagctctcttctctcctggctaaagctgctctcctggttcagaagacaggctggatgagatctcaggccgagctctgaaatagggaggtaatcctccagcacctgtgtttcctctaacttgctgtgtgacctccagccggtcactcaccctctctggacctcatctgtaagaggagccagctggataagatgatttctgaagacgcttccatggtgggcactgaggcacagaggaggccaaggagaggttgtttgttcatgcatgcattcatccgtgacacatgagtacctactgaggactccataaacagaacgggatacagagataaacaatttgggttctgtccacgtttgtcaaaaggtggtgctggcccacctctgaaagcagaacacttgctcaacaaccttgctgttggcccaagtctaacacattctttatgactgtgagcatctcagagtgagagaaaaatgtagaaagttttttaaattctaaacaggatttagtgtctttagttatcttgctggatgggaaagggatgttgtcatttctggcacaaatgaaaagtaggacggaaagctcctttcattcagtttatctttccaggatatatgaaaagggaccagctggaagactagcctcactctgtcctcgaaagcctgagctttcattcaactccctatttccatgcaaagacgctgggcaaaccacatgttctgtctgagcctcagttttcctatccataaaatgaaggtagccaggcctgcctcaaagagcattcaggaggctctgagaggacatgagagtattttgcaaagtgagggcaaggcccagtgtggagtgatattgttattccaagattccactgcaaaagtggctgctttggatgccagcccaggatgagtagttcctgttctcagggaggtcatccgctgagcatcccttctgcacagatgtctctgattcttgtccttgcaggtggaggacagggcctgctcccctaagctgggaagcctggaatgacctcttgcacaagcctaaattccaggaatcttccccaaatcccagatcctctgcaatctacctgcacccctgacccacccaggagttggaccgggagttgggaagcctaggtcttagtcctacactccttctaatttgctgtgtaaccttaccattaatctctctgggtctcagttttctcatctgtattggaggtagcagtgctagctctgccttcaggcatgcaatatgccagaactacagacaacagcccacaggatgcaaaagtgctttgccatcttaaaaatgccagatcactcagagcctatgaatgtggatatcaacaccaggtctctagcaccgctggatgaaaggagaaggctagaggctgagggaggaaagagcagttaacaaacaaaggcagtagctcatcacttgggtagcaggtacccattttaggaccctacactcaaatgtgcaaaataaaatttctatcattttgctata

SEQ ID NO: 144232 - DNA, 1947 bp, Homo sapiens
  Payload ID: 8502
  Gene Symbol: IPP
  Gene Name: intracisternal A particle-promoted polypeptide
  Uniprot ID: Q9Y573
  ENST ID: ENST00000359942
  CDS Start-End: 105-1853
cgcgactgcgcgcgcagggcctgagcgggcgccggagggaaggggaagcggcggggtagtaacagattatgggcaacagtccttttaattaatctaccgtcatcatggctaatgaggactgtcccaaggctgctgatagtcctttttcatcagataaacatgcccaactcatcttggcccaaatcaataagatgagaaatggacagcatttctgtgatgtgcagctgcaagttggacaggaaagttttaaagctcatcggctggttttggctgccagcagtccttactttgcagctttgttcactggaggaatgaaagagtcctcaaaagatgttgtaccgattctaggaattgaagcaggaatctttcagatacttctagatttcatttacacaggtatagtgaacataggtgtgaataatgtccaggagttgattattgcagcagacatgctacagttgactgaagttgttcatctttgctgtgaatttctgaaaggacaaattgatccactgaactgcattggaatttttcagttctctgagcaaattgcctgccatgatctcttggaattctcagaaaactacattcatgtccatttcttggaggttcatagtggagaagagttcctggcacttacgaaagatcagctgatcaaaattttgcgaagtgaagagcttagcattgaggatgaataccaggtcttcttagctgcaatgcaatggattctgaaagatttgggaaaaagaagaaaacatgtggtggaagtgctagacccaattcgattccctttattacctcctcagagacttttaaagtatatagaaggagtatccgattttaatcttcgtgttgcattgcaaacacttctgaaagagtactgtgaagtatgcaaatctcccaaagagaacaagttttgtagttttctgcagacatctaaggttcgacctcggaagaaagcaagaaagtacctgtatgcagtaggtggatatactcggttgcaggggggtcgctggagtgatagcagagccctcagctgtgtagaacgttttgacacctttagccagtactggaccactgtgtcttcacttcatcaggctcgaagtgggctgggagtaacagttctgggagggatggtctacgctattggaggtgaaaaggattcaatgatttttgattgtactgaatgctatgatccagttactaaacagtggacaactgtagcttcgatgaatcatccccgctgcggcttaggagtgtgtgtgtgttatggggctatctatgctttgggtggatgggttggagctgagatagggaacaccattgaacgatttgatcctgatgaaaataaatgggaagtagttggtaacatggctgtgtcacgctactactttgggtgctgtgaaatgcaaggtttaatttatgtaattgggggcatcagcaatgaaggaatagaacttcgttcttttgaagtctatgatccactttctaagcgttggtctccacttcctccaatgggaaccaggagagcatatcttggtgtggctgcactcaatgactgcatctattctgttggaggatggaatgagacccaagatgctcttcatactgtagaaaaatattcctttgaagaggaaaagtgggttgaagttgcctcaatgaaagtgcctagagcaggcatgtgtgttgtggcagtcaatggtcttctgtatgtttctggaggtcgatcttccagccatgattttttggctccagatactcacagatacgaggttttccgcttgaagtgggagaatatgtgcattcttttcaatgatcacaagactctaacaaaggggatttttaatctttaattttcaagatggttaaaatattgaaatgtttaagtggataactatattattcataaaatgactgagtgaaaactaatatactatgagatgaaaa

SEQ ID NO: 144233 - DNA, 3113 bp, Homo sapiens
  Payload ID: 8502
  Gene Symbol: IPP
  Gene Name: intracisternal A particle-promoted polypeptide
  Uniprot ID: Q9Y573
  ENST ID: ENST00000396478
  CDS Start-End: 104-1858
gcgactgcgcgcgcagggcctgagcgggcgccggagggaaggggaagcggcggggtagtaacagattatgggcaacagtccttttaattaatctaccgtcatcatggctaatgaggactgtcccaaggctgctgatagtcctttttcatcagataaacatgcccaactcatcttggcccaaatcaataagatgagaaatggacagcatttctgtgatgtgcagctgcaagttggacaggaaagttttaaagctcatcggctggttttggctgccagcagtccttactttgcagctttgttcactggaggaatgaaagagtcctcaaaagatgttgtaccgattctaggaattgaagcaggaatctttcagatacttctagatttcatttacacaggtatagtgaacataggtgtgaataatgtccaggagttgattattgcagcagacatgctacagttgactgaagttgttcatctttgctgtgaatttctgaaaggacaaattgatccactgaactgcattggaatttttcagttctctgagcaaattgcctgccatgatctcttggaattctcagaaaactacattcatgtccatttcttggaggttcatagtggagaagagttcctggcacttacgaaagatcagctgatcaaaattttgcgaagtgaagagcttagcattgaggatgaataccaggtcttcttagctgcaatgcaatggattctgaaagatttgggaaaaagaagaaaacatgtggtggaagtgctagacccaattcgattccctttattacctcctcagagacttttaaagtatatagaaggagtatccgattttaatcttcgtgttgcattgcaaacacttctgaaagagtactgtgaagtatgcaaatctcccaaagagaacaagttttgtagttttctgcagacatctaaggttcgacctcggaagaaagcaagaaagtacctgtatgcagtaggtggatatactcggttgcaggggggtcgctggagtgatagcagagccctcagctgtgtagaacgttttgacacctttagccagtactggaccactgtgtcttcacttcatcaggctcgaagtgggctgggagtaacagttctgggagggatggtctacgctattggaggtgaaaaggattcaatgatttttgattgtactgaatgctatgatccagttactaaacagtggacaactgtagcttcgatgaatcatccccgctgcggcttaggagtgtgtgtgtgttatggggctatctatgctttgggtggatgggttggagctgagatagggaacaccattgaacgatttgatcctgatgaaaataaatgggaagtagttggtaacatggctgtgtcacgctactactttgggtgctgtgaaatgcaaggtttaatttatgtaattgggggcatcagcaatgaaggaatagaacttcgttcttttgaagtctatgatccactttctaagcgttggtctccacttcctccaatgggaaccaggagagcatatcttggtgtggctgcactcaatgactgcatctattctgttggaggatggaatgagacccaagatgctcttcatactgtagaaaaatattcctttgaagaggaaaagtgggttgaagttgcctcaatgaaagtgcctagagcaggcatgtgtgttgtggcagtcaatggtcttctgtatgtttctggaggtcgatcttccagccatgattttttggctccaggtaccttggactcagttgaagtttataaccctcattcagatacatggacagaaattggtaacatgatcaccagtcgttgtgaagggggcgttgctgtgctatgaaatataaagcataacagagcacaaggaacattttgaaaatgcaggacctgaccttttgcaaagcaaacatagatttggtgataagaccctctgattctgtgagttttccatgtatttggtagataaatgactaacgaggctgggcgcagtggcctcatgcctataatcccagcactttggaaggctgaggcagaaggatcacttgagcccaggaatttgaggttgtagtaagctacgatcatgccactgcactccactctgggcaacagaatgagatcctgtctcttaaagaaaaaaaataaactcaagaatgatttttctaaaaatatgagtgagaatggatatggaatatatcccaattaataaagagctcacacagatttgccaggtttactaataatagaaatgccatttatgctgtagaattctccagtttaagtgtagacaactcctattttacaaatttgtagaaattatttactagaagcttcctggcaaatagtccctttagctacttctccagtgcagtataaattgtaacataaaactttatgtgatataggaatagtgtcaatgacacagtttaaagacctctatattcacaattatatccagagcataattttccatggccatagtttgagccacagagaaagccaatgaaatagattcctacttttatttaatgccaagagttttcactagccccaaactttttattggcagcagatatcctaggaggggtgtttgggaaatatctagctattttaatagatagatacctttttgcttgatgataagtttttgcttgctcatattttttgtcttgatcctgagaatgcaagtaaggaattaataggaggttcttagtgaccagatgttgtaatgggctatacagtccagcaggcagtatgcacctagaaatttctcccttttttaggctgggcatggtggctcacacctgtaatcccagcactttgagaggccgaggtgagacgggaagatggcttgaactcaggagttcgagactagcctgggcaacgtgatgagactccgtctctaccaaaaaatatataaaaattagccgggcgttgtggcttgtacctgtggtcccatctgcttgggaggctgaggttgcaggatcacttgagcccaggaggtcaaggctgcagtgagccaagattgtgccactgcacaccggcctgggtgacagcatgagaacctgtctcaaaaaaaaaaaaaaaaaaagaaaaaa

SEQ ID NO: 144234 - DNA, 4151 bp, Homo sapiens
  Payload ID: 8503
  Gene Symbol: IFT122
  Gene Name: intraflagellar transport 122
  Uniprot ID: Q9HBG6
  ENST ID: ENST00000296266
  CDS Start-End: 193-4071
ttttctggctttccctttcggacatgcgcgctcggagcaaggcgccctcgcactcagcttaccgcgcatgtacgttgccaggggtaacgcaggtagccaaagtggcttgtggagtggcgaccgttagtgaggcggttgctgagacagacgctgaggcgggtaggaggagcccgagccgtaagggaagccgtgatgagggccgtgttgacgtggagagataaagccgagcactgtataaatgacatcgcatttaagcctgatggaactcaactgattttggctgccggaagcagattactggtttatgacacctctgatggcaccttacttcagcccctcaagggacacaaagacactgtgtactgtgtggcatatgcgaaggatggcaagcgctttgcttctggatcagctgacaaaagcgttattatctggacatcaaaactggaaggcattctgaagtacacatcttggtctgtgatgtcttcattgcacctccatcttccatttctgggcctccacaaaacagtaagagtaacagccacagataaagcacctaaaggccaaggtgggaggattgattgcttgaggccaagcgttcaaaaccaacctggccaaaagcacaatgatgctatacaatgtgtctcctacaatcctattactcatcaactggcatcttgttcctccagtgactttgggttgtggtctcctgaacagaagtctgtctccaaacacaaatcaagcagcaagatcatctgctgcagctggacaaatgatggtcagtacctggcgctggggatgttcaatgggatcatcagcatacggaacaaaaatggcgaggagaaagtaaagatcgagcggccggggggctccctctcgccaatatggtccatctgctggaacccttcaagccgatgggagagtttctggatgaacagagagaatgaggatgccgaggatgtcattgtcaacagatatattcaggaaatcccttccactctgaagtcagcagtgtacagtagtcagggtagtgaggcagaggaggaagaaccagaggaagaggacgacagtcccagggacgacaacttagaggaacgtaatgacatcctggctgtggctgactggggacagaaagtttccttctaccagctgagtggaaaacagattggaaaggatcgggcactgaactttgacccctgctgcatcagctactttactaaaggcgagtacattttgctggggggttcagacaagcaagtatctcttttcaccaaggatggagtgcggcttgggactgttggggagcagaactcctgggtgtggacgtgtcaagcgaaaccggattccaactatgtggtggtcggctgccaggacggcaccatttccttctaccagcttattttcagcacagtccatgggctttacaaggaccgctatgcctacagggatagcatgactgacgtcattgtgcagcacctgatcactgagcagaaagttcggattaaatgcaaagagcttgtcaagaagattgccatctacagaaatcgattggctatccaactgccagagaaaatcctcatctatgagttgtattcagaggacttatcagacatgcattaccgggtaaaggagaagattatcaagaagtttgagtgcaacctcctggtggtgtgtgccaatcacatcatcctgtgccaggagaaacggctgcagtgcctgtccttcagcggagtgaaggagcgggagtggcagatggagtctctcattcgttacatcaaggtgatcggtggccctcctggaagagaaggcctcttagtggggctgaagaatggacagatcctgaagatcttcgtggacaatctctttgctatcgtcctgctgaagcaggccacagctgtgcgctgcttggacatgagtgcctcccgtaagaagctggccgtggtagatgaaaatgacacttgcctggtgtatgacatcgacaccaaggagctgctttttcaggaaccaaacgccaacagtgtagcttggaacacccagtgtgaggacatgctctgcttctcgggaggaggctacctcaacatcaaagccagcaccttccctgtgcaccggcagaagctgcagggctttgtggtcggctacaatggctccaagatcttctgcctccatgtcttctccatttctgccgtggaggtgccgcagtccgctcccatgtaccagtacctggataggaaactgttcaaggaagcctaccagattgcttgcttgggtgtcacagacactgattggcgtgaactggccatggaagcgctagaaggtttagattttgaaacagcaaagaaggccttcatcagagtacaagacctccgatatttagagctcatcagcagcattgaggagaggaagaagcggggagagaccaacaatgacctgtttctggcagatgtgttttcctaccaggggaagttccatgaggccgccaaactgtacaagaggagtgggcacgagaacctcgcgcttgaaatgtacaccgacctctgcatgtttgagtatgccaaggatttccttggatctggagaccccaaagaaacaaagatgctaatcaccaaacaggctgactgggccagaaatatcaaggagcccaaagccgccgtggagatgtacatctcagcaggagagcacgtcaaggccatcgagatctgtggtgaccatggctgggttgacatgttgatcgacatcgcccgcaaactggacaaggctgagcgcgagcccctgctgctgtgcgctacctacctcaagaagctggacagccctggctatgctgctgagacctacctgaagatgggtgacctcaagtccctggtgcagctgcacgtggagacccagcgctgggatgaggcctttgctttgggtgagaagcatcctgagtttaaggatgacatctacatgccgtatgctcagtggctagcagagaacgatcgctttgaggaagcccagaaagcgttccacaaggctgggcgacagagagaagcggtccaggtgctggagcagctcacaaacaatgccgtggcggagagcaggtttaatgatgctgcctattattactggatgctgtccatgcagtgcctcgatatagctcaagatcctgcccagaaggacacaatgcttggcaagttctaccacttccagcgtttggcagagctgtaccatggttaccatgccatccatcgccacacggaagatccgttcagtgtccatcgtcctgaaactcttttcaacatctccaggttcctgctgcacagcctgcccaaggacaccccctcgggcatctctaaagtgaaaatactcttcaccttggccaagcagagcaaggccctcggtgcctacaggctggcccggcacgcctatgacaagctgcgtggcctgtacatccctgccagattccaaaagtccattgagctgggtaccctgaccatccgcgccaagcccttccacgacagtgaggagttggtgcccttgtgctaccgctgctccaccaacaacccgctgctcaacaacctgggcaacgtctgcatcaactgccgccagcccttcatcttctccgcctcttcctacgacgtgctacacctggttgagttctacctggaggaagggatcactgatgaagaagccatctccctcatcgacctggaggtgctgagacccaagcgggatgacagacagctagagattgcaaacaacagctcccagattctgcggctagtggagaccaaggactccatcggagatgaggacccgttcacagctaagctgagctttgagcaaggtggctcagagttcgtgccagtggtggtgagccggctggtgctgcgctccatgagccgccgggatgtcctcatcaagcgatggcccccacccctgaggtggcaatacttccgctcactgctgcctgacgcctccattaccatgtgcccctcctgcttccagatgttccattctgaggactatgagttgctggtgcttcagcatggctgctgcccctactgccgcaggtgcaaggatgaccctggcccatgaccagcatcctggggacggcctgcaccctctgcccgccttggggtctgctgggctgtgaaggagaataaagagttaaactg

SEQ ID NO: 144235 - DNA, 3841 bp, Homo sapiens
  Payload ID: 8503
  Gene Symbol: IFT122
  Gene Name: intraflagellar transport 122
  Uniprot ID: Q9HBG6
  ENST ID: ENST00000347300
  CDS Start-End: 207-3755
attgcttttgctgcttttctggctttccctttcggacatgcgcgctcggagcaaggcgccctcgcactcagcttaccgcgcatgtacgttgccaggggtaacgcaggtagccaaagtggcttgtggagtggcgaccgttagtgaggcggttgctgagacagacgctgaggcgggtaggaggagcccgagccgtaagggaagccgtgatgagggccgtgttgacgtggagagataaagccgagcactgtataaatgacatcgcatttaagcctgatggaactcaactgattttggctgccggaagcagattactggtttatgacacctctgatggcaccttacttcagcccctcaagggacacaaagacactgtgtactgtgtggcatatgcgaaggatggcaagcgctttgcttctggatcagctgacaaaagcgttattatctggacatcaaaactggaaggcattctgaagtacacgcacaatgatgctatacaatgtgtctcctacaatcctattactcatcaactggcatcttgttcctccagtgactttgggttgtggtctcctgaacagaagtctgtctccaaacacaaatcaagcagcaagatcatctgctgcagctggacaaatgatggtcagtacctggcgctggggatgttcaatgggatcatcagcatacggaacaaaaatggcgaggagaaagtaaagatcgagcggccggggggctccctctcgccaatatggtccatctgctggaacccttcaagagaggaacgtaatgacatcctggctgtggctgactggggacagaaagtttccttctaccagctgagtggaaaacagattggaaaggatcgggcactgaactttgacccctgctgcatcagctactttactaaaggcgagtacattttgctggggggttcagacaagcaagtatctcttttcaccaaggatggagtgcggcttgggactgttggggagcagaactcctgggtgtggacgtgtcaagcgaaaccggattccaactatgtggtggtcggctgccaggacggcaccatttccttctaccagcttattttcagcacagtccatgggctttacaaggaccgctatgcctacagggatagcatgactgacgtcattgtgcagcacctgatcactgagcagaaagttcggattaaatgcaaagagcttgtcaagaagattgccatctacagaaatcgattggctatccaactgccagagaaaatcctcatctatgagttgtattcagaggacttatcagacatgcattaccgggtaaaggagaagattatcaagaagtttgagtgcaacctcctggtggtgtgtgccaatcacatcatcctgtgccaggagaaacggctgcagtgcctgtccttcagcggagtgaaggagcgggagtggcagatggagtctctcattcgttacatcaaggtgatcggtggccctcctggaagagaaggcctcttagtggggctgaagaatggacagatcctgaagatcttcgtggacaatctctttgctatcgtcctgctgaagcaggccacagctgtgcgctgcttggacatgagtgcctcccgtaagaagctggccgtggtagatgaaaatgacacttgcctggtgtatgacatcgacaccaaggagctgctttttcaggaaccaaacgccaacagtgtagcttggaacacccagtgtgaggacatgctctgcttctcgggaggaggctacctcaacatcaaagccagcaccttccctgtgcaccggcagaagctgcagggctttgtggtcggctacaatggctccaagatcttctgcctccatgtcttctccatttctgccgtggaggtgccgcagtccgctcccatgtaccagtacctggataggaaactgttcaaggaagcctaccagattgcttgcttgggtgtcacagacactgattggcgtgaactggccatggaagcgctagaaggtttagattttgaaacagcaaagaaggccttcatcagagtacaagacctccgatatttagagctcatcagcagcattgaggagaggaagaagcggggagagaccaacaatgacctgtttctggcagatgtgttttcctaccaggggaagttccatgaggccgccaaactgtacaagaggagtgggcacgagaacctcgcgcttgaaatgtacaccgacctctgcatgtttgagtatgccaaggatttccttggatctggagaccccaaagaaacaaagatgctaatcaccaaacaggctgactgggccagaaatatcaaggagcccaaagccgccgtggagatgtacatctcagcaggagagcacgtcaaggccatcgagatctgtggtgaccatggctgggttgacatgttgatcgacatcgcccgcaaactggacaaggctgagcgcgagcccctgctgctgtgcgctacctacctcaagaagctggacagccctggctatgctgctgagacctacctgaagatgggtgacctcaagtccctggtgcagctgcacgtggagacccagcgctgggatgaggcctttgctttgggtgagaagcatcctgagtttaaggatgacatctacatgccgtatgctcagtggctagcagagaacgatcgctttgaggaagcccagaaagcgttccacaaggctgggcgacagagagaagcggtccaggtgctggagcagctcacaaacaatgccgtggcggagagcaggtttaatgatgctgcctattattactggatgctgtccatgcagtgcctcgatatagctcaagatcctgcccagaaggacacaatgcttggcaagttctaccacttccagcgtttggcagagctgtaccatggttaccatgccatccatcgccacacggaagatccgttcagtgtccatcgtcctgaaactcttttcaacatctccaggttcctgctgcacagcctgcccaaggacaccccctcgggcatctctaaagtgaaaatactcttcaccttggccaagcagagcaaggccctcggtgcctacaggctggcccggcacgcctatgacaagctgcgtggcctgtacatccctgccagattccaaaagtccattgagctgggtaccctgaccatccgcgccaagcccttccacgacagtgaggagttggtgcccttgtgctaccgctgctccaccaacaacccgctgctcaacaacctgggcaacgtctgcatcaactgccgccagcccttcatcttctccgcctcttcctacgacgtgctacacctggttgagttctacctggaggaagggatcactgatgaagaagccatctccctcatcgacctggaggtgctgagacccaagcgggatgacagacagctagagattgcaaacaacagctcccagattctgcggctagtggagaccaaggactccatcggagatgaggacccgttcacagctaagctgagctttgagcaaggtggctcagagttcgtgccagtggtggtgagccggctggtgctgcgctccatgagccgccgggatgtcctcatcaagcgatggcccccacccctgaggtggcaatacttccgctcactgctgcctgacgcctccattaccatgtgcccctcctgcttccagatgttccattctgaggactatgagttgctggtgcttcagcatggctgctgcccctactgccgcaggtgcaaggatgaccctggcccatgaccagcatcctggggacggcctgcaccctctgcccgccttggggtctgctgggctgtgaaggagaataaagagttaaactgtcagaa

SEQ ID NO: 144236 - DNA, 3877 bp, Homo sapiens
  Payload ID: 8503
  Gene Symbol: IFT122
  Gene Name: intraflagellar transport 122
  Uniprot ID: Q9HBG6
  ENST ID: ENST00000348417
  CDS Start-End: 78-3803
ggcgaccgttagtgaggcggttgctgagacagacgctgaggcgggtaggaggagcccgagccgtaagggaagccgtgatgagggccgtgttgacgtggagagataaagccgagcactgtataaatgacatcgcatttaagcctgatggaactcaactgattttggctgccggaagcagattactggtttatgacacctctgatggcaccttacttcagcccctcaagggacacaaagacactgtgtactgtgtggcatatgcgaaggatggcaagcgctttgcttctggatcagctgacaaaagcgttattatctggacatcaaaactggaaggcattctgaagtacacgcacaatgatgctatacaatgtgtctcctacaatcctattactcatcaactggcatcttgttcctccagtgactttgggttgtggtctcctgaacagaagtctgtctccaaacacaaatcaagcagcaagatcatctgctgcagctggacaaatgatggtcagtacctggcgctggggatgttcaatgggatcatcagcatacggaacaaaaatggcgaggagaaagtaaagatcgagcggccggggggctccctctcgccaatatggtccatctgctggaacccttcaagccgatgggagagtttctggatgaacagagagaatgaggatgccgaggatgtcattgtcaacagatatattcaggaaatcccttccactctgaagtcagcagtgtacagtagtcagggtagtgaggcagaggaggaagaaccagaggaagaggacgacagtcccagggacgacaacttagaggaacgtaatgacatcctggctgtggctgactggggacagaaagtttccttctaccagctgagtggaaaacagattggaaaggatcgggcactgaactttgacccctgctgcatcagctactttactaaaggcgagtacattttgctggggggttcagacaagcaagtatctcttttcaccaaggatggagtgcggcttgggactgttggggagcagaactcctgggtgtggacgtgtcaagcgaaaccggattccaactatgtggtggtcggctgccaggacggcaccatttccttctaccagcttattttcagcacagtccatgggctttacaaggaccgctatgcctacagggatagcatgactgacgtcattgtgcagcacctgatcactgagcagaaagttcggattaaatgcaaagagcttgtcaagaagattgccatctacagaaatcgattggctatccaactgccagagaaaatcctcatctatgagttgtattcagaggacttatcagacatgcattaccgggtaaaggagaagattatcaagaagtttgagtgcaacctcctggtggtgtgtgccaatcacatcatcctgtgccaggagaaacggctgcagtgcctgtccttcagcggagtgaaggagcgggagtggcagatggagtctctcattcgttacatcaaggtgatcggtggccctcctggaagagaaggcctcttagtggggctgaagaatggacagatcctgaagatcttcgtggacaatctctttgctatcgtcctgctgaagcaggccacagctgtgcgctgcttggacatgagtgcctcccgtaagaagctggccgtggtagatgaaaatgacacttgcctggtgtatgacatcgacaccaaggagctgctttttcaggaaccaaacgccaacagtgtagcttggaacacccagtgtgaggacatgctctgcttctcgggaggaggctacctcaacatcaaagccagcaccttccctgtgcaccggcagaagctgcagggctttgtggtcggctacaatggctccaagatcttctgcctccatgtcttctccatttctgccgtggaggtgccgcagtccgctcccatgtaccagtacctggataggaaactgttcaaggaagcctaccagattgcttgcttgggtgtcacagacactgattggcgtgaactggccatggaagcgctagaaggtttagattttgaaacagcaaagaaggccttcatcagagtacaagacctccgatatttagagctcatcagcagcattgaggagaggaagaagcggggagagaccaacaatgacctgtttctggcagatgtgttttcctaccaggggaagttccatgaggccgccaaactgtacaagaggagtgggcacgagaacctcgcgcttgaaatgtacaccgacctctgcatgtttgagtatgccaaggatttccttggatctggagaccccaaagaaacaaagatgctaatcaccaaacaggctgactgggccagaaatatcaaggagcccaaagccgccgtggagatgtacatctcagcaggagagcacgtcaaggccatcgagatctgtggtgaccatggctgggttgacatgttgatcgacatcgcccgcaaactggacaaggctgagcgcgagcccctgctgctgtgcgctacctacctcaagaagctggacagccctggctatgctgctgagacctacctgaagatgggtgacctcaagtccctggtgcagctgcacgtggagacccagcgctgggatgaggcctttgctttgggtgagaagcatcctgagtttaaggatgacatctacatgccgtatgctcagtggctagcagagaacgatcgctttgaggaagcccagaaagcgttccacaaggctgggcgacagagagaagcggtccaggtgctggagcagctcacaaacaatgccgtggcggagagcaggtttaatgatgctgcctattattactggatgctgtccatgcagtgcctcgatatagctcaagatcctgcccagaaggacacaatgcttggcaagttctaccacttccagcgtttggcagagctgtaccatggttaccatgccatccatcgccacacggaagatccgttcagtgtccatcgtcctgaaactcttttcaacatctccaggttcctgctgcacagcctgcccaaggacaccccctcgggcatctctaaagtgaaaatactcttcaccttggccaagcagagcaaggccctcggtgcctacaggctggcccggcacgcctatgacaagctgcgtggcctgtacatccctgccagattccaaaagtccattgagctgggtaccctgaccatccgcgccaagcccttccacgacagtgaggagttggtgcccttgtgctaccgctgctccaccaacaacccgctgctcaacaacctgggcaacgtctgcatcaactgccgccagcccttcatcttctccgcctcttcctacgacgtgctacacctggttgagttctacctggaggaagggatcactgatgaagaagccatctccctcatcgacctggaggtgctgagacccaagcgggatgacagacagctagagattgcaaacaacagctcccagattctgcggctagtggagaccaaggactccatcggagatgaggacccgttcacagctaagctgagctttgagcaaggtggctcagagttcgtgccagtggtggtgagccggctggtgctgcgctccatgagccgccgggatgtcctcatcaagcgatggcccccacccctgaggtggcaatacttccgctcactgctgcctgacgcctccattaccatgtgcccctcctgcttccagatgttccattctgaggactatgagttgctggtgcttcagcatggctgctgcccctactgccgcaggtgcaaggatgaccctggcccatgaccagcatcctggggacggcctgcaccctctgcccgccttggggtctgctgggctgtgaaggagaataaagagtt

SEQ ID NO: 144237 - DNA, 3569 bp, Homo sapiens
  Payload ID: 8503
  Gene Symbol: IFT122
  Gene Name: intraflagellar transport 122
  Uniprot ID: Q9HBG6
  ENST ID: ENST00000349441
  CDS Start-End: 88-3483
cttgtggagtggcgaccgttagtgaggcggttgctgagacagacgctgaggcgggtaggaggagcccgagccgtaagggaagccgtgatgagggccgtgttgacgtggagagataaagccgagcactgtataaatgacatcgcatttaagcctgatggaactcaactgattttggctgccggaagcagattactggtttatgacacctctgatggcaccttacttcagcccctcaagggacacaaagacactgtgtactgtgtggcatatgcgaaggatgggttgtggtctcctgaacagaagtctgtctccaaacacaaatcaagcagcaagatcatctgctgcagctggacaaatgatggtcagtacctggcgctggggatgttcaatgggatcatcagcatacggaacaaaaatggcgaggagaaagtaaagatcgagcggccggggggctccctctcgccaatatggtccatctgctggaacccttcaagagaggaacgtaatgacatcctggctgtggctgactggggacagaaagtttccttctaccagctgagtggaaaacagattggaaaggatcgggcactgaactttgacccctgctgcatcagctactttactaaaggcgagtacattttgctggggggttcagacaagcaagtatctcttttcaccaaggatggagtgcggcttgggactgttggggagcagaactcctgggtgtggacgtgtcaagcgaaaccggattccaactatgtggtggtcggctgccaggacggcaccatttccttctaccagcttattttcagcacagtccatgggctttacaaggaccgctatgcctacagggatagcatgactgacgtcattgtgcagcacctgatcactgagcagaaagttcggattaaatgcaaagagcttgtcaagaagattgccatctacagaaatcgattggctatccaactgccagagaaaatcctcatctatgagttgtattcagaggacttatcagacatgcattaccgggtaaaggagaagattatcaagaagtttgagtgcaacctcctggtggtgtgtgccaatcacatcatcctgtgccaggagaaacggctgcagtgcctgtccttcagcggagtgaaggagcgggagtggcagatggagtctctcattcgttacatcaaggtgatcggtggccctcctggaagagaaggcctcttagtggggctgaagaatggacagatcctgaagatcttcgtggacaatctctttgctatcgtcctgctgaagcaggccacagctgtgcgctgcttggacatgagtgcctcccgtaagaagctggccgtggtagatgaaaatgacacttgcctggtgtatgacatcgacaccaaggagctgctttttcaggaaccaaacgccaacagtgtagcttggaacacccagtgtgaggacatgctctgcttctcgggaggaggctacctcaacatcaaagccagcaccttccctgtgcaccggcagaagctgcagggctttgtggtcggctacaatggctccaagatcttctgcctccatgtcttctccatttctgccgtggaggtgccgcagtccgctcccatgtaccagtacctggataggaaactgttcaaggaagcctaccagattgcttgcttgggtgtcacagacactgattggcgtgaactggccatggaagcgctagaaggtttagattttgaaacagcaaagaaggccttcatcagagtacaagacctccgatatttagagctcatcagcagcattgaggagaggaagaagcggggagagaccaacaatgacctgtttctggcagatgtgttttcctaccaggggaagttccatgaggccgccaaactgtacaagaggagtgggcacgagaacctcgcgcttgaaatgtacaccgacctctgcatgtttgagtatgccaaggatttccttggatctggagaccccaaagaaacaaagatgctaatcaccaaacaggctgactgggccagaaatatcaaggagcccaaagccgccgtggagatgtacatctcagcaggagagcacgtcaaggccatcgagatctgtggtgaccatggctgggttgacatgttgatcgacatcgcccgcaaactggacaaggctgagcgcgagcccctgctgctgtgcgctacctacctcaagaagctggacagccctggctatgctgctgagacctacctgaagatgggtgacctcaagtccctggtgcagctgcacgtggagacccagcgctgggatgaggcctttgctttgggtgagaagcatcctgagtttaaggatgacatctacatgccgtatgctcagtggctagcagagaacgatcgctttgaggaagcccagaaagcgttccacaaggctgggcgacagagagaagcggtccaggtgctggagcagctcacaaacaatgccgtggcggagagcaggtttaatgatgctgcctattattactggatgctgtccatgcagtgcctcgatatagctcaagcagatcctgcccagaaggacacaatgcttggcaagttctaccacttccagcgtttggcagagctgtaccatggttaccatgccatccatcgccacacggaagatccgttcagtgtccatcgtcctgaaactcttttcaacatctccaggttcctgctgcacagcctgcccaaggacaccccctcgggcatctctaaagtgaaaatactcttcaccttggccaagcagagcaaggccctcggtgcctacaggctggcccggcacgcctatgacaagctgcgtggcctgtacatccctgccagattccaaaagtccattgagctgggtaccctgaccatccgcgccaagcccttccacgacagtgaggagttggtgcccttgtgctaccgctgctccaccaacaacccgctgctcaacaacctgggcaacgtctgcatcaactgccgccagcccttcatcttctccgcctcttcctacgacgtgctacacctggttgagttctacctggaggaagggatcactgatgaagaagccatctccctcatcgacctggaggtgctgagacccaagcgggatgacagacagctagagattgcaaacaacagctcccagattctgcggctagtggagaccaaggactccatcggagatgaggacccgttcacagctaagctgagctttgagcaaggtggctcagagttcgtgccagtggtggtgagccggctggtgctgcgctccatgagccgccgggatgtcctcatcaagcgatggcccccacccctgaggtggcaatacttccgctcactgctgcctgacgcctccattaccatgtgcccctcctgcttccagatgttccattctgaggactatgagttgctggtgcttcagcatggctgctgcccctactgccgcaggtgcaaggatgaccctggcccatgaccagcatcctggggacggcctgcaccctctgcccgccttggggtctgctgggctgtgaaggagaataaagagttaaactgtcagaa

SEQ ID NO: 144238 - DNA, 4007 bp, Homo sapiens
  Payload ID: 8503
  Gene Symbol: IFT122
  Gene Name: intraflagellar transport 122
  Uniprot ID: Q9HBG6
  ENST ID: ENST00000440957
  CDS Start-End: 667-3765
attctcgaggaagacgcaccgcccccacacgccccgaccaatcgctcgcgctctggttgcgctggcgccttaggggctccagtgccaccattgcttttgctgcttttctggctttccctttcggacatgcgcgctcggagcaaggcgccctcgcactcagcttaccgcgcatgtacgttgccaggggtaacgcaggtagccaaagtggcttgtggagtggcgaccgttagtgaggcggttgctgagacagacgctgaggcgggtaggaggagcccgagccgtaagggaagccgtgatgagggccgtgttgacgtggagagataaagccgagcactgtataaatgacatcgcatttaagcctgatggaactcaactgattttggctgccggaagcagattactggtttatgacacctctgatggcaccttacttcagcccctcaagggacacaaagacactgtgtactgtgtggcatatgcgaaggatggcacaatgatgctatacaatgtgtctcctacaatcctattactcatcaactggcatcttgttcctccagtgactttgggttgtggtctcctgaacagaagtctgtctccaaacacaaatcaagcagcaagatcatctgctgcagctggacaaatgatggtcagtacctggcgctggggatgttcaatgggatcatcagcatacggaacaaaaatggcgaggagaaagtaaagatcgagcggccggggggctccctctcgccaatatggtccatctgctggaacccttcaagagaggaacgtaatgacatcctggctgtggctgactggggacagaaagtttccttctaccagctgagtggaaaacagattggaaaggatcgggcactgaactttgacccctgctgcatcagctactttactaaaggcgagtacattttgctggggggttcagacaagcaagtatctcttttcaccaaggatggagtgcggcttgggactgttggggagcagaactcctgggtgtggacgtgtcaagcgaaaccggattccaactatgtggtggtcggctgccaggacggcaccatttccttctaccagcttattttcagcacagtccatgggctttacaaggaccgctatgcctacagggatagcatgactgacgtcattgtgcagcacctgatcactgagcagaaagttcggattaaatgcaaagagcttgtcaagaagattgccatctacagaaatcgattggctatccaactgccagagaaaatcctcatctatgagttgtattcagaggacttatcagacatgcattaccgggtaaaggagaagattatcaagaagtttgagtgcaacctcctggtggtgtgtgccaatcacatcatcctgtgccaggagaaacggctgcagtgcctgtccttcagcggagtgaaggagcgggagtggcagatggagtctctcattcgttacatcaaggtgatcggtggccctcctggaagagaaggcctcttagtggggctgaagaatggacagatcctgaagatcttcgtggacaatctctttgctatcgtcctgctgaagcaggccacagctgtgcgctgcttggacatgagtgcctcccgtaagaagctggccgtggtagatgaaaatgacacttgcctggtgtatgacatcgacaccaaggagctgctttttcaggaaccaaacgccaacagtgtagcttggaacacccagtgtgaggacatgctctgcttctcgggaggaggctacctcaacatcaaagccagcaccttccctgtgcaccggcagaagctgcagggctttgtggtcggctacaatggctccaagatcttctgcctccatgtcttctccatttctgccgtggaggtgccgcagtccgctcccatgtaccagtacctggataggaaactgttcaaggaagcctaccagattgcttgcttgggtgtcacagacactgattggcgtgaactggccatggaagcgctagaaggtttagattttgaaacagcaaagaaggccttcatcagagtacaagacctccgatatttagagctcatcagcagcattgaggagaggaagaagcggggagagaccaacaatgacctgtttctggcagatgtgttttcctaccaggggaagttccatgaggccgccaaactgtacaagaggagtgggcacgagaacctcgcgcttgaaatgtacaccgacctctgcatgtttgagtatgccaaggatttccttggatctggagaccccaaagaaacaaagatgctaatcaccaaacaggctgactgggccagaaatatcaaggagcccaaagccgccgtggagatgtacatctcagcaggagagcacgtcaaggccatcgagatctgtggtgaccatggctgggttgacatgttgatcgacatcgcccgcaaactggacaaggctgagcgcgagcccctgctgctgtgcgctacctacctcaagaagctggacagccctggctatgctgctgagacctacctgaagatgggtgacctcaagtccctggtgcagctgcacgtggagacccagcgctgggatgaggcctttgctttgggtgagaagcatcctgagtttaaggatgacatctacatgccgtatgctcagtggctagcagagaacgatcgctttgaggaagcccagaaagcgttccacaaggctgggcgacagagagaagcggtccaggtgctggagcagctcacaaacaatgccgtggcggagagcaggtttaatgatgctgcctattattactggatgctgtccatgcagtgcctcgatatagctcaagatcctgcccagaaggacacaatgcttggcaagttctaccacttccagcgtttggcagagctgtaccatggttaccatgccatccatcgccacacggaagatccgttcagtgtccatcgtcctgaaactcttttcaacatctccaggttcctgctgcacagcctgcccaaggacaccccctcgggcatctctaaagtgaaaatactcttcaccttggccaagcagagcaaggccctcggtgcctacaggctggcccggcacgcctatgacaagctgcgtggcctgtacatccctgccagattccaaaagtccattgagctgggtaccctgaccatccgcgccaagcccttccacgacagtgaggagttggtgcccttgtgctaccgctgctccaccaacaacccgctgctcaacaacctgggcaacgtctgcatcaactgccgccagcccttcatcttctccgcctcttcctacgacgtgctacacctggttgagttctacctggaggaagggatcactgatgaagaagccatctccctcatcgacctggaggtgctgagacccaagcgggatgacagacagctagagattgcaaacaacagctcccagattctgcggctagtggagaccaaggactccatcggagatgaggacccgttcacagctaagctgagctttgagcaaggtggctcagagttcgtgccagtggtggtgagccggctggtgctgcgctccatgagccgccgggatgtcctcatcaagcgatggcccccacccctgaggtggcaatacttccgctcactgctgcctgacgcctccattaccatgtgcccctcctgcttccagatgttccattctgaggactatgagttgctggtgcttcagcatggctgctgcccctactgccgcaggtgcaaggatgaccctggcccatgaccagcatcctggggacggcctgcaccctctgcccgccttggggtctgctgggctgtgaaggagaataaagagttaaactgtcagaatgtgtttcttgcccagatgaagtttgtgttttgtggggggggccttgtgtaaccacggaattcctatttatggcatttcatgccttgtaaatagcaccaggagatgaggaagagaatgtacatatattttctaaggaaaaaaatctgttactttca

SEQ ID NO: 144239 - DNA, 4414 bp, Homo sapiens
  Payload ID: 8503
  Gene Symbol: IFT122
  Gene Name: intraflagellar transport 122
  Uniprot ID: Q9HBG6
  ENST ID: ENST00000431818
  CDS Start-End: 897-4172
attctcgaggaagacgcaccgcccccacacgccccgaccaatcgctcgcgctctggttgcgctggcgccttaggggctccagtgccaccattgcttttgctgcttttctggctttccctttcggacatgcgcgctcggagcaaggcgccctcgcactcagcttaccgcgcatgtacgttgccaggggtaacgcaggtagccaaagtggcttgtggagtggcgaccgttagtgaggcggttgctgagacagacgctgaggcgggtaggaggagcccgagccgtaagggaagccgtgatgagggccgtgttgacgtggagagataaagccgagcactgtataaatgacatcgcatttaagcctgatggaactcaactgattttggctgccggaagcagattactggtttatgacacctctgatggcaccttacttcagcccctcaagggacacaaagacactgtgtactgtgtggcatatgcgaaggatggaaatgaaagctcttcagtagcttgtttgggtcatgcagctggtcagtgagatctctaggaattctgacccagagactctgagcccaaagcttatgcttttcatcaccatcacctgctacctaccaggatgagggaggagtgatggaaatagcaagcgctttgcttctggatcagctgacaaaagcgttattatctggacatcaaaactggaaggcattctgaagtacacgcacaatgatgctatacaatgtgtctcctacaatcctattactcatcaactggcatcttgttcctccagtgactttgggttgtggtctcctgaacagaagtctgtctccaaacacaaatcaagcagcaagatcatctgctgcagctggacaaatgatggtcagtacctggcgctggggatgttcaatgggatcatcagcatacggaacaaaaatggcgaggagaaagtaaagatcgagcggccggggggctccctctcgccaatatggtccatctgctggaacccttcaagccgatgggagagtttctggatgaacagagagaatgaggatgccgaggatgtcattgtcaacagatatattcaggaaatcccttccactctgaagtcagcagtgtacagtagtcagggtagtgaggcagaggaggaagaaccagaggaagaggacgacagtcccagggacgacaacttagaggaacgtaatgacatcctggctgtggctgactggggacagaaagtttccttctaccagctgagtggaaaacagattggaaaggatcgggcactgaactttgacccctgctgcatcagctactttactaaaggcgagtacattttgctggggggttcagacaagcaagtatctcttttcaccaaggatggagtgcggcttgggactgttggggagcagaactcctgggtgtggacgtgtcaagcgaaaccggattccaactatgtggtggtcggctgccaggacggcaccatttccttctaccagcttattttcagcacagtccatgggctttacaaggaccgctatgcctacagggatagcatgactgacgtcattgtgcagcacctgatcactgagcagaaagttcggattaaatgcaaagagcttgtcaagaagattgccatctacagaaatcgattggctatccaactgccagagaaaatcctcatctatgagttgtattcagaggacttatcagacatgcattaccgggtaaaggagaagattatcaagaagtttgagtgcaacctcctggtggtgtgtgccaatcacatcatcctgtgccaggagaaacggctgcagtgcctgtccttcagcggagtgaaggagcgggagtggcagatggagtctctcattcgttacatcaaggtgatcggtggccctcctggaagagaaggcctcttagtggggctgaagaatggacagatcctgaagatcttcgtggacaatctctttgctatcgtcctgctgaagcaggccacagctgtgcgctgcttggacatgagtgcctcccgtaagaagctggccgtggtagatgaaaatgacacttgcctggtgtatgacatcgacaccaaggagctgctttttcaggaaccaaacgccaacagtgtagcttggaacacccagtgtgaggacatgctctgcttctcgggaggaggctacctcaacatcaaagccagcaccttccctgtgcaccggcagaagctgcagggctttgtggtcggctacaatggctccaagatcttctgcctccatgtcttctccatttctgccgtggaggtgccgcagtccgctcccatgtaccagtacctggataggaaactgttcaaggaagcctaccagattgcttgcttgggtgtcacagacactgattggcgtgaactggccatggaagcgctagaaggtttagattttgaaacagcaaagaaggccttcatcagagtacaagacctccgatatttagagctcatcagcagcattgaggagaggaagaagcggggagagaccaacaatgacctgtttctggcagatgtgttttcctaccaggggaagttccatgaggccgccaaactgtacaagaggagtgggcacgagaacctcgcgcttgaaatgtacaccgacctctgcatgtttgagtatgccaaggatttccttggatctggagaccccaaagaaacaaagatgctaatcaccaaacaggctgactgggccagaaatatcaaggagcccaaagccgccgtggagatgtacatctcagcaggagagcacgtcaaggccatcgagatctgtggtgaccatggctgggttgacatgttgatcgacatcgcccgcaaactggacaaggctgagcgcgagcccctgctgctgtgcgctacctacctcaagaagctggacagccctggctatgctgctgagacctacctgaagatgggtgacctcaagtccctggtgcagctgcacgtggagacccagcgctgggatgaggcctttgctttgggtgagaagcatcctgagtttaaggatgacatctacatgccgtatgctcagtggctagcagagaacgatcgctttgaggaagcccagaaagcgttccacaaggctgggcgacagagagaagcggtccaggtgctggagcagctcacaaacaatgccgtggcggagagcaggtttaatgatgctgcctattattactggatgctgtccatgcagtgcctcgatatagctcaagatcctgcccagaaggacacaatgcttggcaagttctaccacttccagcgtttggcagagctgtaccatggttaccatgccatccatcgccacacggaagatccgttcagtgtccatcgtcctgaaactcttttcaacatctccaggttcctgctgcacagcctgcccaaggacaccccctcgggcatctctaaagtgaaaatactcttcaccttggccaagcagagcaaggccctcggtgcctacaggctggcccggcacgcctatgacaagctgcgtggcctgtacatccctgccagattccaaaagtccattgagctgggtaccctgaccatccgcgccaagcccttccacgacagtgaggagttggtgcccttgtgctaccgctgctccaccaacaacccgctgctcaacaacctgggcaacgtctgcatcaactgccgccagcccttcatcttctccgcctcttcctacgacgtgctacacctggttgagttctacctggaggaagggatcactgatgaagaagccatctccctcatcgacctggaggtgctgagacccaagcgggatgacagacagctagagattgcaaacaacagctcccagattctgcggctagtggagaccaaggactccatcggagatgaggacccgttcacagctaagctgagctttgagcaaggtggctcagagttcgtgccagtggtggtgagccggctggtgctgcgctccatgagccgccgggatgtcctcatcaagcgatggcccccacccctgaggtggcaatacttccgctcactgctgcctgacgcctccattaccatgtgcccctcctgcttccagatgttccattctgaggactatgagttgctggtgcttcagcatggctgctgcccctactgccgcaggtgcaaggatgaccctggcccatgaccagcatcctggggacggcctgcaccctctgcccgccttggggtctgctgggctgtgaaggagaataaagagttaaactgtcagaatgtgtttcttgcccagatgaagtttgtgttttgtggggggggccttgtgtaaccacggaattcctatttatggcatttcatgccttgtaaatagcaccaggagatgaggaagagaatgtacatatattttctaaggaaaaaaatctgttactttca

SEQ ID NO: 144240 - DNA, 329 bp, Homo sapiens
  Payload ID: 8503
  Gene Symbol: IFT122
  Gene Name: intraflagellar transport 122
  ENST ID: ENST00000508826
  CDS Start-End: 1-329
tataaatgacatcgcatttaagcctgatggaactcaactgattttggctgccggaagcagattactggtttatgacacctctgatggcaccttacttcagcccctcaagggacacaaagacactgtgcacaatgatgctatacaatgtgtctcctacaatcctattactcatcaactggcatcttgttcctccagtgactttgggttgtggtctcctgaacagaagtctgtctccaaacacaaatcaagcagcaagatcatctgctgcagctggacaaatgatggtcagtacctggcgctggggatgttcaatgggatcatcagcatac

SEQ ID NO: 144241 - DNA, 4057 bp, Homo sapiens
  Payload ID: 8503
  Gene Symbol: IFT122
  Gene Name: intraflagellar transport 122
  ENST ID: ENST00000512220
  CDS Start-End: 99-341
agccaaagtggcttgtggagtggcgaccgttagtgaggcggttgctgagacagacgctgaggcgggtaggaggagcccgagccgtaagggaagccgtgatgagggccgtgttgacgtggagagataaagccgagcactgtataaatgacatcgcatttaagcctgatggaactcaactgattttggctgccggaagcagattactggtttatgacacctctgatggcaccttacttcagcccctcaagggacacaaagacactgtgtactgtgtggcatatgcgaaggatggaaatgaaagctcttcagtagcttgtttgggtcatgcagctggtcagtgagatctctaggaattctgacccagagactctgagcccaaagcttatgcttttcatcaccatcacctgctacctaccaggatgagggaggagtgatggaaatagcaagcgctttgcttctggatcagctgacaaaagcgttattatctggacatcaaaactggaaggcattctgaagtacacgcacaatgatgctatacaatgtgtctcctacaatcctattactcatcaactggcatcttgttcctccagtgactttgggttgtggtctcctgaacagaagtctgtctccaaacacaaatcaagcagcaagatcatctgctgcagctggacaaatgatggtcagtacctggcgctggggatgttcaatgggatcatcagcatacggaacaaaaatggcgaggagaaagtaaagatcgagcggccggggggctccctctcgccaatatggtccatctgctggaacccttcaagccgatgggagagtttctggatgaacagagagaatgaggatgccgaggatgtcattgtcaacagatatattcaggaaatcccttccactctgaagtcagcagtgtacagtagtcagggtagtgaggcagaggaggaagaaccagaggaagaggacgacagtcccagggacgacaacttagaggaacgtaatgacatcctggctgtggctgactggggacagaaagtttccttctaccagctgagtggaaaacagattggaaaggatcgggcactgaactttgacccctgctgcatcagctactttactaaaggcgagtacattttgctggggggttcagacaagcaagtatctcttttcaccaaggatggagtgcggcttgggactgttggggagcagaactcctgggtgtggacgtgtcaagcgaaaccggattccaactatgtggtggtcggctgccaggacggcaccatttccttctaccagcttattttcagcacagtccatgggctttacaaggaccgctatgcctacagggatagcatgactgacgtcattgtgcagcacctgatcactgagcagaaagttcggattaaatgcaaagagcttgtcaagaagattgccatctacagaaatcgattggctatccaactgccagagaaaatcctcatctatgagttgtattcagaggacttatcagacatgcattaccgggtaaaggagaagattatcaagaagtttgagtgcaacctcctggtggtgtgtgccaatcacatcatcctgtgccaggagaaacggctgcagtgcctgtccttcagcggagtgaaggagcgggagtggcagatggagtctctcattcgttacatcaaggtgatcggtggccctcctggaagagaaggcctcttagtggggctgaagaatggacagatcctgaagatcttcgtggacaatctctttgctatcgtcctgctgaagcaggccacagctgtgcgctgcttggacatgagtgcctcccgtaagaagctggccgtggtagatgaaaatgacacttgcctggtgtatgacatcgacaccaaggagctgctttttcaggaaccaaacgccaacagtgtagcttggaacacccagtgtgaggacatgctctgcttctcgggaggaggctacctcaacatcaaagccagcaccttccctgtgcaccggcagaagctgcagggctttgtggtcggctacaatggctccaagatcttctgcctccatgtcttctccatttctgccgtggaggtgccgcagtccgctcccatgtaccagtacctggataggaaactgttcaaggaagcctaccagattgcttgcttgggtgtcacagacactgattggcgtgaactggccatggaagcgctagaaggtttagattttgaaacagcaaagaaggccttcatcagagtacaagacctccgatatttagagctcatcagcagcattgaggagaggaagaagcggggagagaccaacaatgacctgtttctggcagatgtgttttcctaccaggggaagttccatgaggccgccaaactgtacaagaggagtgggcacgagaacctcgcgcttgaaatgtacaccgacctctgcatgtttgagtatgccaaggatttccttggatctggagaccccaaagaaacaaagatgctaatcaccaaacaggctgactgggccagaaatatcaaggagcccaaagccgccgtggagatgtacatctcagcaggagagcacgtcaaggccatcgagatctgtggtgaccatggctgggttgacatgttgatcgacatcgcccgcaaactggacaaggctgagcgcgagcccctgctgctgtgcgctacctacctcaagaagctggacagccctggctatgctgctgagacctacctgaagatgggtgacctcaagtccctggtgcagctgcacgtggagacccagcgctgggatgaggcctttgctttgggtgagaagcatcctgagtttaaggatgacatctacatgccgtatgctcagtggctagcagagaacgatcgctttgaggaagcccagaaagcgttccacaaggctgggcgacagagagaagcggtccaggtgctggagcagctcacaaacaatgccgtggcggagagcaggtttaatgatgctgcctattattactggatgctgtccatgcagtgcctcgatatagctcaagatcctgcccagaaggacacaatgcttggcaagttctaccacttccagcgtttggcagagctgtaccatggttaccatgccatccatcgccacacggaagatccgttcagtgtccatcgtcctgaaactcttttcaacatctccaggttcctgctgcacagcctgcccaaggacaccccctcgggcatctctaaagtgaaaatactcttcaccttggccaagcagagcaaggccctcggtgcctacaggctggcccggcacgcctatgacaagctgcgtggcctgtacatccctgccagattccaaaagtccattgagctgggtaccctgaccatccgcgccaagcccttccacgacagtgaggagttggtgcccttgtgctaccgctgctccaccaacaacccgctgctcaacaacctgggcaacgtctgcatcaactgccgccagcccttcatcttctccgcctcttcctacgacgtgctacacctggttgagttctacctggaggaagggatcactgatgaagaagccatctccctcatcgacctggaggtgctgagacccaagcgggatgacagacagctagagattgcaaacaacagctcccagattctgcggctagtggagaccaaggactccatcggagatgaggacccgttcacagctaagctgagctttgagcaaggtggctcagagttcgtgccagtggtggtgagccggctggtgctgcgctccatgagccgccgggatgtcctcatcaagcgatggcccccacccctgaggtggcaatacttccgctcactgctgcctgacgcctccattaccatgtgcccctcctgcttccagatgttccattctgaggactatgagttgctggtgcttcagcatggctgctgcccctactgccgcaggtgcaaggatgaccctggcccatgaccagcatcctggggacggcctgcaccctctgcccgccttggggtctgctgggctgtgaaggagaataaagagttaaactgtc

SEQ ID NO: 144242 - DNA, 3541 bp, Homo sapiens
  Payload ID: 8503
  Gene Symbol: IFT122
  Gene Name: intraflagellar transport 122
  Uniprot ID: Q9HBG6
  ENST ID: ENST00000504021
  CDS Start-End: 95-3451
aaagtggcttgtggagtggcgaccgttagtgaggcggttgctgagacagacgctgaggcgggtaggaggagcccgagccgtaagggaagccgtgatgagggccgtgttgacgtggagagataaagccgagcactgtataaatgacatcgcatttaagcctgatggaactcaactgattttggctgccggaagcagattactggtttatgacacctctgatggcaccttacttcagcccctcaagggacacaaagacactgtgtactgtgtggcatatgcgaaggatgtattgtgcattgaagggttgtggtctcctgaacagaagtctgtctccaaacacaaatcaagcagcaagatcatctgctgcagctggacaaatgatggtcagtacctggcgctggggatgttcaatgggatcatcagcatacggaacaaaaatggcgaggagaaagtaaagatcgagcggccggggggctccctctcgccaatatggtccatctgctggaacccttcaagagaggaacgtaatgacatcctggctgtggctgactggggacagaaagtttccttctaccagctgagtggaaaacagattggaaaggatcgggcactgaactttgacccctgctgcatcagctactttactaaaggcgagtacattttgctggggggttcagacaagcaagtatctcttttcaccaaggatggagtgcggcttgggactgttggggagcagaactcctgggtgtggacgtgtcaagcgaaaccggattccaactatgtggtggtcggctgccaggacggcaccatttccttctaccagcttattttcagcacagtccatgggctttacaaggaccgctatgcctacagggatagcatgactgacgtcattgtgcagcacctgatcactgagcagaaagttcggattaaatgcaaagagcttgtcaagaagattgccatctacagaaatcgattggctatccaactgccagagaaaatcctcatctatgagttgtattcagaggacttatcagacatgcattaccgggtaaaggagaagattatcaagaagtttgagtgcaacctcctggtggtgtgtgccaatcacatcatcctgtgccaggagaaacggctgcagtgcctgtccttcagcggagtgaaggagcgggagtggcagatggagtctctcattcgttacatcaaggtgatcggtggccctcctggaagagaaggcctcttagtggggctgaagaatggacagatcctgaagatcttcgtggacaatctctttgctatcgtcctgctgaagcaggccacagctgtgcgctgcttggacatgagtgcctcccgtaagaagctggccgtggtagatgaaaatgacacttgcctggtgtatgacatcgacaccaaggagctgctttttcaggaaccaaacgccaacagtgtagcttggaacacccagtgtgaggacatgctctgcttctcgggaggaggctacctcaacatcaaagccagcaccttccctgtgcaccggcagaagctgcagggctttgtggtcggctacaatggctccaagatcttctgcctccatgtcttctccatttctgccgtggaggtgccgcagtccgctcccatgtaccagtacctggataggaaactgttcaaggaagcctaccagattgcttgcttgggtgtcacagacactgattggcgtgaactggccatggaagcgctagaaggtttagattttgaaacagcaaagaaggagaggaagaagcggggagagaccaacaatgacctgtttctggcagatgtgttttcctaccaggggaagttccatgaggccgccaaactgtacaagaggagtgggcacgagaacctcgcgcttgaaatgtacaccgacctctgcatgtttgagtatgccaaggatttccttggatctggagaccccaaagaaacaaagatgctaatcaccaaacaggctgactgggccagaaatatcaaggagcccaaagccgccgtggagatgtacatctcagcaggagagcacgtcaaggccatcgagatctgtggtgaccatggctgggttgacatgttgatcgacatcgcccgcaaactggacaaggctgagcgcgagcccctgctgctgtgcgctacctacctcaagaagctggacagccctggctatgctgctgagacctacctgaagatgggtgacctcaagtccctggtgcagctgcacgtggagacccagcgctgggatgaggcctttgctttgggtgagaagcatcctgagtttaaggatgacatctacatgccgtatgctcagtggctagcagagaacgatcgctttgaggaagcccagaaagcgttccacaaggctgggcgacagagagaagcggtccaggtgctggagcagctcacaaacaatgccgtggcggagagcaggtttaatgatgctgcctattattactggatgctgtccatgcagtgcctcgatatagctcaagcagatcctgcccagaaggacacaatgcttggcaagttctaccacttccagcgtttggcagagctgtaccatggttaccatgccatccatcgccacacggaagatccgttcagtgtccatcgtcctgaaactcttttcaacatctccaggttcctgctgcacagcctgcccaaggacaccccctcgggcatctctaaagtgaaaatactcttcaccttggccaagcagagcaaggccctcggtgcctacaggctggcccggcacgcctatgacaagctgcgtggcctgtacatccctgccagattccaaaagtccattgagctgggtaccctgaccatccgcgccaagcccttccacgacagtgaggagttggtgcccttgtgctaccgctgctccaccaacaacccgctgctcaacaacctgggcaacgtctgcatcaactgccgccagcccttcatcttctccgcctcttcctacgacgtgctacacctggttgagttctacctggaggaagggatcactgatgaagaagccatctccctcatcgacctggaggtgctgagacccaagcgggatgacagacagctagagattgcaaacaacagctcccagattctgcggctagtggagaccaaggactccatcggagatgaggacccgttcacagctaagctgagctttgagcaaggtggctcagagttcgtgccagtggtggtgagccggctggtgctgcgctccatgagccgccgggatgtcctcatcaagcgatggcccccacccctgaggtggcaatacttccgctcactgctgcctgacgcctccattaccatgtgcccctcctgcttccagatgttccattctgaggactatgagttgctggtgcttcagcatggctgctgcccctactgccgcaggtgcaaggatgaccctggcccatgaccagcatcctggggacggcctgcaccctctgcccgccttggggtctgctgggctgtgaaggagaataaagagttaaactgtcagaatgtg

SEQ ID NO: 144243 - DNA, 584 bp, Homo sapiens
  Payload ID: 8503
  Gene Symbol: IFT122
  Gene Name: intraflagellar transport 122
  ENST ID: ENST00000511498
  CDS Start-End: 295-584
gttctgattcctgatgtcctgtcctggaataactgaaaatctgggctaaaaatgctaaaatgcattcagaatatggtgattttatcctgagagagttaatactacttctctaccttcaatggctgaggggaggctgacagttattctttaaattgtgtggaaaccaagacagtgaatggtgacctttactctgggttgtggtctcctgaacagaagtctgtctccaaacacaaatcaagcagcaagatcatctgctgcagctggacaaatgatggtcagtacctggcgctggggatgttcaatgggatcatcagcatacggaacaaaaatggcgaggagaaagtaaagatcgagcggccggggggctccctctcgccaatatggtccatctgctggaacccttcaagagaggaacgtaatgacatcctggctgtggctgactggggacagaaagtttccttctaccagctgagtggaaaacagattggaaaggatcgggcactgaactttgacccctgctgcatcagctactttactaaaggcgagtacattttgctggggggttcagacaagcaagtatctct

SEQ ID NO: 144244 - DNA, 962 bp, Homo sapiens
  Payload ID: 8503
  Gene Symbol: IFT122
  Gene Name: intraflagellar transport 122
  ENST ID: ENST00000515783
  CDS Start-End: 1-962
tataaatgacatcgcatttaagcctgatggaactcaactgattttggctgccggaagcagattactggtttatgacacctctgatggcaccttacttcagcccctcaagggacacaaagacactgtgtactgtgtggcatatgcgaaggatgggttgtggtctcctgaacagaagtctgtctccaaacacaaatcaagcagcaagatcatctgctgcagagaggaacgtaatgacatcctggctgtggctgactggggacagaaagtttccttctaccagctgagtggaaaacagattggaaaggatcgggcactgaactttgacccctgctgcatcagctactttactaaaggcgagtacattttgctggggggttcagacaagcaagtatctcttttcaccaaggatggagtgcggcttgggactgttggggagcagaactcctgggtgtggacgtgtcaagcgaaaccggattccaactatgtggtggtcggctgccaggacggcaccatttccttctaccagcttattttcagcacagtccatgggctttacaaggaccgctatgcctacagggatagcatgactgacgtcattgtgcagcacctgatcactgagcagaaagttcggattaaatgcaaagagcttgtcaagaagattgccatctacagaaatcgattggctatccaactgccagagaaaatcctcatctatgagttgtattcagaggacttatcagacatgcattaccgggtaaaggagaagattatcaagaagtttgagtgcaacctcctggtggtgtgtgccaatcacatcatcctgtgccaggagaaacggctgcagtgcctgtccttcagcggagtgaaggagcgggagtggcagatggagtctctcattcgttacatcaaggtgatcggtggccctcctggaagagaaggcctcttagtggggctgaagaatg

SEQ ID NO: 144245 - DNA, 418 bp, Homo sapiens
  Payload ID: 8503
  Gene Symbol: IFT122
  Gene Name: intraflagellar transport 122
  ENST ID: ENST00000510524
  CDS Start-End: 1-337
tataaatgacatcgcatttaagcctgatggaactcaactgattttggctgccggaagcagattactggtttatgacacctctgatggcaccttacttcagcccctcaagggacacaaagacactgtgtactgtgtggcatatgcgaaggatggcaagcgctttgcttctggatcagctgacaaaagcgttattatctggacatcaaaactggaaggcattctgaagtacacagtcttgctctgttgcccaggctggagtgcagtggcacgatctcggctcaccgcaagctccacctcccaggttcacgccattctcctgcctcagcctcccgagtagctgggactataggcgctcaccaccatgccaggcacaatgatgctatacaatgtgtctcctacaatcctattactcatcaac

SEQ ID NO: 144246 - DNA, 296 bp, Homo sapiens
  Payload ID: 8503
  Gene Symbol: IFT122
  Gene Name: intraflagellar transport 122
  ENST ID: ENST00000514275
  CDS Start-End: 1-296
tataaatgacatcgcatttaagcctgatggaactcaactgattttggctgccggaagcagattactggtttatgacacctctgatggcaccttacttcagcccctcaagggacacaaagacactgtgtactgtgtggcatatgcgaaggatggcacaatgatgctatacaatgtgtctcctacaatcctattactcatcaactggcatcttgttcctccagtgactttgggttgtggtctcctgaacagaagtctgtctccaaacacaaatcaagcagcaagatcatctgctgcag

SEQ ID NO: 144247 - DNA, 734 bp, Homo sapiens
  Payload ID: 8503
  Gene Symbol: IFT122
  Gene Name: intraflagellar transport 122
  ENST ID: ENST00000512157
  CDS Start-End: 1-734
tataaatgacatcgcatttaagcctgatggaactcaactgattttggctgccggaagcagattactggtttatgacacctctgatggcaccttacttcagcccctcaagggacacaaagacactgtgtactgtgtggcatatgcgaaggatggcaagcgctttgcttctggatcagctgacaaaagcgttattatctggacatcaaaactggaaggcattctgaagtacacgcacaatgatgctatacaatgtgtctcctacaatcctattactcatcaactggcatcttgttcctccagtgactttgggttgtggtctcctgaacagaagtctgtctccaaacacaaatcaagcagcaagatcatctgctgcagagaggaacgtaatgacatcctggctgtggctgactggggacagaaagtttccttctaccagctgagtggaaaacagattggaaaggatcgggcactgaactttgacccctgctgcatcagctactttactaaaggcgagtacattttgctggggggttcagacaagcaagtatctcttttcaccaaggatggagtgcggcttgggactgttggggagcagaactcctgggtgtggacgtgtcaagcgaaaccggattccaactatgtggtggtcggctgccaggacggcaccatttccttctaccagcttattttcagcacagtccatgggctttacaaggaccgctatgcctacaggg

SEQ ID NO: 144248 - DNA, 1141 bp, Homo sapiens
  Payload ID: 8503
  Gene Symbol: IFT122
  Gene Name: intraflagellar transport 122
  ENST ID: ENST00000509522
  CDS Start-End: 1-1141
gaaggcctcttagtggggctgaagaatggacagatcctgaagatcttcgtggacaatctctttgctatcgtcctgctgaagcaggccacagctgtgcgctgcttggacatgagtgcctcccgtaagaagctggccgtggtagatgaaaatgacacttgcctggtgtatgacatcgacaccaaggagctgctttttcaggaaccaaacgccaacagtgtagcttggaacacccagtgtgaggacatgctctgcttctcgggaggaggctacctcaacatcaaagccagcaccttccctgtgcaccggcagaagctgcagggctttgtggtcggctacaatggctccaagatcttctgcctccatgtcttctccatttctgccgtggaggtgccgcagtccgctcccatgtaccagtacctggataggaaactgttcaaggaagcctaccagattgcttgcttgggtgtcacagacactgattggcgtgaactggccatggaagcgctagaaggtttagattttgaaacagcaaagaaggagaggaagaagcggggagagaccaacaatgacctgtttctggcagatgtgttttcctaccaggggaagttccatgaggccgccaaactgtacaagaggagtgggcacgagaacctcgcgcttgaaatgtacaccgacctctgcatgtttgagtatgccaaggatttccttggatctggagaccccaaagaaacaaagatgctaatcaccaaacaggctgactgggccagaaatatcaaggagcccaaagccgccgtggagatgtacatctcagcaggagagcacgtcaaggccatcgagatctgtggtgaccatggctgggttgacatgttgatcgacatcgcccgcaaactggacaaggctgagcgcgagcccctgctgctgtgcgctacctacctcaagaagctggacagccctggctatgctgctgagacctacctgaagatgggtgacctcaagtccctggtgcagctgcacgtggagacccagcgctgggatgaggcctttgctttgggtgagaagcatcctgagtttaaggatgacatctacatgccgtatgctcagtggctagcagagaacgatcgctttgaggaagcccagaaag

SEQ ID NO: 144249 - DNA, 3824 bp, Homo sapiens
  Payload ID: 8503
  Gene Symbol: IFT122
  Gene Name: intraflagellar transport 122
  Uniprot ID: Q9HBG6
  ENST ID: ENST00000507564
  CDS Start-End: 120-3824
gttgccaggggtaacgcaggtagccaaagtggcttgtggagtggcgaccgttagtgaggcggttgctgagacagacgctgaggcgggtaggaggagcccgagccgtaagggaagccgtgatgagggccgtgttgacgtggagagataaagccgagcactgtataaatgacatcgcatttaagcctgatggaactcaactgattttggctgccggaagcagattactggtttatgacacctctgatggcaccttacttcagcccctcaagggacacaaagacactgtgtactgtgtggcatatgcgaaggatggcaagcgctttgcttctggatcagctgacaaaagcgttattatctggacatcaaaactggaaggcattctgaagtacacatcttggtctgtgatgtcttcattgcacctccatcttccatttctgggcctccacaaaacagtaagagtaacagccacagataaagcacctaaaggccaaggtgggaggattgattgcttgaggccaagcgttcaaaaccaacctggccaaaagcacaatgatgctatacaatgtgtctcctacaatcctattactcatcaactggcatcttgttcctccagtgactttgggttgtggtctcctgaacagaagtctgtctccaaacacaaatcaagcagcaagatcatctgctgcagctggacaaatgatggtcagtacctggcgctggggatgttcaatgggatcatcagcatacggaacaaaaatggcgaggagaaagtaaagatcgagcggccggggggctccctctcgccaatatggtccatctgctggaacccttcaagagaggaacgtaatgacatcctggctgtggctgactggggacagaaagtttccttctaccagctgagtggaaaacagattggaaaggatcgggcactgaactttgacccctgctgcatcagctactttactaaaggcgagtacattttgctggggggttcagacaagcaagtatctcttttcaccaaggatggagtgcggcttgggactgttggggagcagaactcctgggtgtggacgtgtcaagcgaaaccggattccaactatgtggtggtcggctgccaggacggcaccatttccttctaccagcttattttcagcacagtccatgggctttacaaggaccgctatgcctacagggatagcatgactgacgtcattgtgcagcacctgatcactgagcagaaagttcggattaaatgcaaagagcttgtcaagaagattgccatctacagaaatcgattggctatccaactgccagagaaaatcctcatctatgagttgtattcagaggacttatcagacatgcattaccgggtaaaggagaagattatcaagaagtttgagtgcaacctcctggtggtgtgtgccaatcacatcatcctgtgccaggagaaacggctgcagtgcctgtccttcagcggagtgaaggagcgggagtggcagatggagtctctcattcgttacatcaaggtgatcggtggccctcctggaagagaaggcctcttagtggggctgaagaatggacagatcctgaagatcttcgtggacaatctctttgctatcgtcctgctgaagcaggccacagctgtgcgctgcttggacatgagtgcctcccgtaagaagctggccgtggtagatgaaaatgacacttgcctggtgtatgacatcgacaccaaggagctgctttttcaggaaccaaacgccaacagtgtagcttggaacacccagtgtgaggacatgctctgcttctcgggaggaggctacctcaacatcaaagccagcaccttccctgtgcaccggcagaagctgcagggctttgtggtcggctacaatggctccaagatcttctgcctccatgtcttctccatttctgccgtggaggtgccgcagtccgctcccatgtaccagtacctggataggaaactgttcaaggaagcctaccagattgcttgcttgggtgtcacagacactgattggcgtgaactggccatggaagcgctagaaggtttagattttgaaacagcaaagaaggccttcatcagagtacaagacctccgatatttagagctcatcagcagcattgaggagaggaagaagcggggagagaccaacaatgacctgtttctggcagatgtgttttcctaccaggggaagttccatgaggccgccaaactgtacaagaggagtgggcacgagaacctcgcgcttgaaatgtacaccgacctctgcatgtttgagtatgccaaggatttccttggatctggagaccccaaagaaacaaagatgctaatcaccaaacaggctgactgggccagaaatatcaaggagcccaaagccgccgtggagatgtacatctcagcaggagagcacgtcaaggccatcgagatctgtggtgaccatggctgggttgacatgttgatcgacatcgcccgcaaactggacaaggctgagcgcgagcccctgctgctgtgcgctacctacctcaagaagctggacagccctggctatgctgctgagacctacctgaagatgggtgacctcaagtccctggtgcagctgcacgtggagacccagcgctgggatgaggcctttgctttgggtgagaagcatcctgagtttaaggatgacatctacatgccgtatgctcagtggctagcagagaacgatcgctttgaggaagcccagaaagcgttccacaaggctgggcgacagagagaagcggtccaggtgctggagcagctcacaaacaatgccgtggcggagagcaggtttaatgatgctgcctattattactggatgctgtccatgcagtgcctcgatatagctcaagcagatcctgcccagaaggacacaatgcttggcaagttctaccacttccagcgtttggcagagctgtaccatggttaccatgccatccatcgccacacggaagatccgttcagtgtccatcgtcctgaaactcttttcaacatctccaggttcctgctgcacagcctgcccaaggacaccccctcgggcatctctaaagtgaaaatactcttcaccttggccaagcagagcaaggccctcggtgcctacaggctggcccggcacgcctatgacaagctgcgtggcctgtacatccctgccagattccaaaagtccattgagctgggtaccctgaccatccgcgccaagcccttccacgacagtgaggagttggtgcccttgtgctaccgctgctccaccaacaacccgctgctcaacaacctgggcaacgtctgcatcaactgccgccagcccttcatcttctccgcctcttcctacgacgtgctacacctggttgagttctacctggaggaagggatcactgatgaagaagccatctccctcatcgacctggaggtgctgagacccaagcgggatgacagacagctagagattgcaaacaacagctcccagattctgcggctagtggagaccaaggactccatcggagatgaggacccgttcacagctaagctgagctttgagcaaggtggctcagagttcgtgccagtggtggtgagccggctggtgctgcgctccatgagccgccgggatgtcctcatcaagcgatggcccccacccctgaggtggcaatacttccgctcactgctgcctgacgcctccattaccatgtgcccctcctgcttccagatgttccattctgaggactatgagttgctggtgcttcagcatggctgctgcccctactgccgcaggtgcaaggatgaccctggcccatga

SEQ ID NO: 144250 - DNA, 350 bp, Homo sapiens
  Payload ID: 8503
  Gene Symbol: IFT122
  Gene Name: intraflagellar transport 122
  ENST ID: ENST00000509195
  CDS Start-End: 1-139
tataaatgacatcgcatttaagcctgatggaactcaactgattttggctgccggaagcagattactggcaagcgctttgcttctggatcagctgacaaaagcgttattatctggacatcaaaactggaaggcattctgaagtacacgcacaatgatgctatacaatgtgtctcctacaatcctattactcatcaactggcatcttgttcctccagtgactttgggttgtggtctcctgaacagaagtctgtctccaaacacaaatcaagcagcaagatcatctgctgcagctggacaaatgatggtcagtacctggcgctggggatgttcaatgggatcatcagcatacg

SEQ ID NO: 144251 - DNA, 469 bp, Homo sapiens
  Payload ID: 8503
  Gene Symbol: IFT122
  Gene Name: intraflagellar transport 122
  ENST ID: ENST00000502304
  CDS Start-End: 1-208
tataaatgacatcgcatttaagcctgatggaactcaactgattttggctgccggaagcagattactggtttatgacacctctgatggcaccttacttcagcccctcaagggacacaaagacactgtgtactgtgtggcatatgcgaaggatgtagagacggggtttcaccgtgttggccaggatggtctcgatctcctgacctcgtgatccacccgcctcagccctccaaagtgctgggattacaggcaagcgctttgcttctggatcagctgacaaaagcgttattatctggacatcaaaactggaaggcattctgaagtacacgcacaatgatgctatacaatgtgtctcctacaatcctattactcatcaactggcatcttgttcctccagtgactttgggttgtggtctcctgaacagaagtctgtctccaaacacaaatcaagcagcaagatcatctgctgcag

SEQ ID NO: 144252 - DNA, 445 bp, Homo sapiens
  Payload ID: 8503
  Gene Symbol: IFT122
  Gene Name: intraflagellar transport 122
  ENST ID: ENST00000502456
  CDS Start-End: 1-202
tataaatgacatcgcatttaagcctgatggaactcaactgattttggctgccggaagcagattactggtttatgacacctctgatggcaccttacttcagcccctcaagggacacaaagacactgtgtactgtgtggcatatgcgaaggatggaaatgaaagctcttcagtagcttgtttgggtcatgcagctggtcagtgagatctctaggaattctgacccagagactctgagcccaaagcttatgcttttcatcaccatcacctgctacctaccaggatgagggaggagtgatggaaatagcaagcgctttgcttctggatcagctgacaaaagcgttattatctggacatcaaaactggaaggcattctgaagtacacggttgtggtctcctgaacagaagtctgtctccaaacacaaatcaagcagcaagatcatctgct

SEQ ID NO: 144253 - DNA, 590 bp, Homo sapiens
  Payload ID: 8503
  Gene Symbol: IFT122
  Gene Name: intraflagellar transport 122
  ENST ID: ENST00000507221
  CDS Start-End: 76-590
atgcatctggttctttccatggctctgaaaacagtcttctttttttcccttgatgaaatcctgcagtccgctcccatgtaccagtacctggataggaaactgttcaaggaagcctaccagattgcttgcttgggtgtcacagacactgattggcgtgaactggccatggaagcgctagaaggtttagattttgaaacagcaaagaaggagaggaagaagcggggagagaccaacaatgacctgtttctggcagatgtgttttcctaccaggggaagttccatgaggccgccaaactgtacaagaggagtgggcacgagaacctcgcgcttgaaatgtacaccgacctctgcatgtttgagtatgccaaggatttccttggatctggagaccccaaagaaacaaagatgctaatcaccaaacaggctgactgggccagaaatatcaaggagcccaaagccgccgtggagatgtacatctcagcaggagagcacgtcaaggccatcgagatctgtggtgaccatggctgggttgacatgttgatcgacatcgcccgcaaactggacaaggctgagcgcgagcccctgctgct

SEQ ID NO: 144254 - DNA, 2987 bp, Homo sapiens
  Payload ID: 8504
  Gene Symbol: IFT140
  Gene Name: intraflagellar transport 140
  Uniprot ID: Q96RY7
  ENST ID: ENST00000361339
  CDS Start-End: 500-2470
gtcccagaggagaggccagggatgccgggtgcgggacagatccctcgtctcgcctgttgcttttaagcctggtggcccccggggcctggaggctggtactgagcgactattgcctgccctggggacttcacaccccccagccatccagttgcccccaggaccataggtacccccaggaccataggaaccacaagcctccccccgcccgtgtgttccaggcctgcccccgccacgggaatgctgccctcaaaaggggggcagatatcacaggattgctgggaaggggagagacccgtgtgcctggagggagcaagttcacccagacctgcagggccagggacctgtacttggaggacctcggggccagggacctgtacttggagggccttggggccagggacctgtacttggaggacctcggggccagggacctgtacttggaggacctcgaggccaggtcattcttaggtggcaagaaggtgaggccgtctgggagaacatggcgcgcatgtgcgtgaagacccagcggctggacgtggccaaggtgtgcctggggaacatgggccatgcccgcggggcccgagcgctgcgtgaggcggagcaggagccggagctagaggcccgcgtggccgtgctggccacgcagctgggcatgctggaggacgccgagcagctgtacaggaagtgcaagcgccacgacctcctgaacaagttctaccaggctgcgggccggtggcaggaggccctccaggtagccgagcaccacgatcgcgtgcacctgcgcagcacctaccaccgctatgccgggcacctggaggccagcgccgactgcagccgggccctcagttactacgagaagtcggacacgcaccgcttcgaggtgcccaggatgctgtcggaggacctgccgtccctggagctctacgtgaataaaatgaaggataagaccctgtggcggtggtgggcgcagtacctggagagccagggcgagatggacgccgcgctgcactactacgagctggcccgggaccacttctccctggtccgcatccactgcttccagggcaatgtccagaaggctgcgcaaatagccaacgagacaggaaacctggcggcctcctaccacctcgcccgccagtacgagagccaggaggaggtcgggcaggcggtgcacttctacacccgggcacaggccttcaagaatgccatccgcctgtgcaaggagaacggcctggacgaccagctcatgaacttggccctgctgagctcccccgaggacatgatcgaggcggcccgatactacgaggagaagggcgtgcagatggacagggcggtcatgctgtaccacaaggctggccacttctccaaggccctggagctggcctttgccacccagcagtttgtggccctacagctcatagcagaggacctggatgagacgtcagaccctgcgctcctggcccgctgctccgacttcttcatcgagcacagtcagtacgagagggcggtagagctgctgctggctgccaggaagtatcaggaagccctgcagctgtgcctggggcagaacatgagcatcaccgaggagatggcggaaaagatgaccgtggccaaggactcctcggacctgcctgaggagtcgcggcgggagctgctggagcagatagcagactgctgcatgcgccagggcagctaccacctggccaccaagaagtacacgcaggccggcaacaagctgaaggccatgagggcgctgctcaaatccggagacacggagaaaatcacgttcttcgcgagcgtgtccaggcagaaggaaatctacatcatggctgctaactacctgcagtccctggactggcggaaggagccggagatcatgaagaacatcatcggcttctacaccaaggggcgggccctggacctcctggctggcttttatgacgcttgtgcccaggtggagattgatgaataccagaactacgacaaagcccacggggcgctgaccgaggcctacaagtgcctggccaaggccaaggccaagagccccctggaccaggagaccaggctggcgcagctgcagagcaggatggcactggtgaagaggttcatccaggcccgcaggacgtacacagaggaccccaaggagtccatcaagcagtgtgagctgctcctggaggaaccagacctggacagcaccatccgcatcggggacgtctatggcttcctggtggagcactacgtgcggaaggaggaataccagacggcctacagattcctggaggagatgcggcggcggcttcccttggccaacatgtcctactacgtgagcccgcaggccgtggacgccgtgcaccgggggctgggtctcccactgccacgcaccgtccccgagcaggtccgccacaacagcatggaggacgccagggagctggacgaggaggtggtggaagaggcagatgacgacccctgaggggcctgggccccaggaccagcgtgctgctgcagaaaggcatcttctggaatttttttgtcagctgtggcaaagccagcatttttgctgggaaaaaacatgtctgtgttggaatacgcgacagagctgggcgagaacgcagcggcccgggccggcggagggtgtgacccgtctgcaccttgctctgtcccacctgcctctgggtgcccggcagctccactagatttttggattcattcctttgaagggagtcgggttcacccttccatcgtattctcccaactacacattgtaaagcctgagaaacttctagaacctcaggaagctgcagctggagggctggggcacctgcccccctgctccccacacatcatatcctccccatactcctgcagggcccacggctcctgagcaacagctgggacacccgggccttggcggctgcaccccctgctaggctctgcccaccggccaccaacactcctgtaattccaataaagcagtttattttctgaga

SEQ ID NO: 144255 - DNA, 4023 bp, Homo sapiens
  Payload ID: 8504
  Gene Symbol: IFT140
  Gene Name: intraflagellar transport 140
  ENST ID: ENST00000397417
  CDS Start-End: 62-682
aacgcgcggcggctcagcggcctggcagaggtttcagcgctgaggaggcctgagttccgtcatggccctctattatgaccaccagatagaagccccggatgcagcagggtcaccctcatttatcagctggcaccctgtccatccattcttggcagttgcttacatcagcacaacctcaacaggcagcgtggatatttacctggagcaaggggagtgcgtgccagatacacacgtcgagaggccgttccgggttgcttccctgtgctggcacccgacgcggctggtgctggctgtgggctgggagactggagaagtgacggtgtttaacaagcaggacaaggagcagcacacgatgcccctgacacacacagccgacatcaccgtgctcctggggttccaggaagaacctgctggcagtgaacagcgtcatctccgtggccatcctcagcgagcgggccatgtcgtcacacttccaccagcaagtggccgccatgcaggtctccccgagtctgctgaatgtgtgcttcctgtccacgggggtcgcacacagcctgcgcaccgacatgcacatcagtggagtgtttgccaccaaggatgctgtcgcagtctggaacggaaggcaggtggcgatcttcgagctttctggagccgcgatacggagtgcagggaccttcttgtgtgagacgcctgtgttagcaatgcatgaagaaaacgtttacacggtggagtcaaaccgagttcaagttcgaacctggcaggggactgtcaaacaactcctccttttctcggagactgaggggaatccctgcttcttggacatctgtgggaatttcctggttgtagggacagacttggctcactttaaaagctttgatctttcccgaagagaggccaaagcacactgtagctgcaggagcctggcggagctggtccctggggtggggggcatcgcttctctgcggtgcagcagcagcgggagcaccatcagcatcctccccagcaaggctgacaacagccctgattccaaaatctgcttctacgatgttgaaatggacacagtgaccgtctttgacttcaagactggacaaattgatcggagagagacgctgtcctttaatgagcaagagactaataagagccacctctttgtggatgagggactgaaaaattatgttcccgtgaaccacttctgggaccagagtgagccccggctgtttgtatgcgaagccgtgcaggagacgccgcgctcccagcctcagtctgcaaacgggcagccccaagatgggcgcgctggccctgcggcagatgttttgatcctgtccttcttcatttccgaagagcacggcttcctgcttcatgagagcttcccccggcctgccacctcccacagtctcctggggatggaagtgccttattactacttcacaagaaagcccgaagaagcagacagagaagacgaggtggagcctgggtgccaccacatccctcagatggtgtccaggagacccctgcgagactttgtggggctggaggactgcgacaaggccacccgggacgccatgctccacttcagcttctttgtcaccataggagacatggacgaagccttcaaatccatcaagctcatcaaaagtgaggccgtctgggagaacatggcgcgcatgtgcgtgaagacccagcggctggacgtggccaaggaggacgccgagcagctgtacaggaagtgcaagcgccacgacctcctgaacaagttctaccaggctgcgggccggtggcaggaggccctccaggtagccgagcaccacgatcgcgtgcacctgcgcagcacctaccaccgctatgccgggcacctggaggccagcgccgactgcagccgggccctcagttactacgagaagtcggacacgcaccgcttcgaggtgcccaggatgctgtcggaggacctgccgtccctggagctctacgtgaataaaatgaaggataagaccctgtggcggtggtgggcgcagtacctggagagccagggcgagatggacgccgcgctgcactactacgagctggcccgggaccacttctccctggtccgcatccactgcttccagggcaatgtccagaaggctgcgcaaatagccaacgagacaggaaacctggcggcctcctaccacctcgcccgccagtacgagagccaggaggaggtcgggcaggcggtgcacttctacacccgggcacaggccttcaagaatgccatccgcctgtgcaaggagaacggcctggacgaccagctcatgaacttggccctgctgagctcccccgaggacatgatcgaggcggcccgatactacgaggagaagggcgtgcagatggacagggcggtcatgctgtaccacaaggctggccacttctccaaggccctggagctggcctttgccacccagcagtttgtggccctacagctcatagcagaggacctggatgagacgtcagaccctgcgctcctggcccgctgctccgacttcttcatcgagcacagtcagtacgagagggcggtagagctgctgctggctgccaggaagtatcaggaagccctgcagctgtgcctggggcagaacatgagcatcaccgaggagatggcggaaaagatgaccgtggccaaggactcctcggacctgcctgaggagtcgcggcgggagctgctggagcagatagcagactgctgcatgcgccagggcagctaccacctggccaccaagaagtacacgcaggccggcaacaagctgaaggccatgagggcgctgctcaaatccggagacacggagaaaatcacgttcttcgcgagcgtgtccaggcagaaggaaatctacatcatggctgctaactacctgcagtccctggactggcggaaggagccggagatcatgaagaacatcatcggcttctacaccaaggggcgggccctggacctcctggctggcttttatgacgcttgtgcccaggtggagattgatgaataccagaactacgacaaagcccacggggcgctgaccgaggcctacaagtgcctggccaaggccaaggccaagagccccctggaccaggagaccaggctggcgcagctgcagagcaggatggcactggtgaagaggttcatccaggcccgcaggacgtacacagaggaccccaaggagtccatcaagcagtgtgagctgctcctggaggaaccagacctggacagcaccatccgcatcggggacgtctatggcttcctggtggagcactacgtgcggaaggaggaataccagacggcctacagattcctggaggagatgcggcggcggcttcccttggccaacatgtcctactacgtgagcccgcaggccgtggacgccgtgcaccgggggctgggtctcccactgccacgcaccgtccccgagcaggtccgccacaacagcatggaggacgccagggagctggacgaggaggtggtggaagaggcagatgacgacccctgaggggcctgggccccaggaccagcgtgctgctgcagaaaggcatcttctggaatttttttgtcagctgtggcaaagccagcatttttgctgggaaaaaacatgtctgtgttggaatacgcgacagagctgggcgagaacgcagcggcccgggccggcggagggtgtgacccgtctgcaccttgctctgtcccacctgcctctgggtgcccggcagctccactagatttttggattcattcctttgaagggagtcgggttcacccttccatcgtattctcccaactacacattgtaaagcctgagaaacttctagaacctcaggaagctgcagctggagggctggggcacctgcccccctgctccccacacatcatatcctccccatactcctgcagggcccacggctcctgagcaacagctgggacacccgggccttggcggctgcaccccctgctaggctctgcccaccggccaccaacactcctgtaattccaataaagcagtttattttctg

SEQ ID NO: 144256 - DNA, 5270 bp, Homo sapiens
  Payload ID: 8504
  Gene Symbol: IFT140
  Gene Name: intraflagellar transport 140
  Uniprot ID: Q96RY7
  ENST ID: ENST00000426508
  CDS Start-End: 365-4753
agacagccaataggccagggcccgtgctgtgattggccgcagcagtgttgacggatacgtgagaagaaaacggcgtggtagctcggagtgtggaatcgggcgcgaacctgagttctgagaagtgtggaagcacgtctgaggcaagcggaataacctggcccccgacgctcgggcctcggagctgcacgtgcgtgcccgatcgccttcggctctttccggccgctcggggcgcttcgggagtcctcggggccgcctcgctcaccttcggctatttccgcgttcctggcgcgccgttgtcccggcaacgcgcggcggctcagcggcctggcagaggtttcagcgctgaggaggcctgagttccgtcatggccctctattatgaccaccagatagaagccccggatgcagcagggtcaccctcatttatcagctggcaccctgtccatccattcttggcagttgcttacatcagcacaacctcaacaggcagcgtggatatttacctggagcaaggggagtgcgtgccagatacacacgtcgagaggccgttccgggttgcttccctgtgctggcacccgacgcggctggtgctggctgtgggctgggagactggagaagtgacggtgtttaacaagcaggacaaggagcagcacacgatgcccctgacacacacagccgacatcaccgtgctccgttggagccccagtggaaactgcctgctgtctggggacaggcttggtgtcttgctcttgtggaggttggaccaaaggggccgagtgcaagggacgcctctgctgaaacacgagtatgggaaacacctcacgcactgcatcttccggctcccccctcctggcgaggacctggttcagttggcaaaggcagctgtgagcggtgatgagaaagccctggacatgtttaactggaagaagagcagttctggaagtttgctgaagatggggtctcacgaggggctgttgttctttgtcagtctgatggacgggacagtgcactatgtggatgagaagggcaagaccactcaggtggtgtccgcagacagcacgattcagatgctgttctacatggagaagagggaggcactggtggtggtcacagagaacctccggctgtccctgtacacggtgcctcctgagggcaaagcagaagaagtgatgaaggtcaagctgagcgggaaaaccggccgccgggcagacatcgctttgattgaaggcagccttctcgtgatggccgtcggggaggctgccctcagattctgggacatagaacgaggagagaattatatactgagtccagatgagaagtttggctttgagaaaggagagaatatgaactgtgtgtgttactgtaaagtcaaaggtcttctggccgctggtaccgacagagggcgagtagccatgtggaggaaagtaccagacttcctgggcagccccggggcagagggcaaggacaggtgggcccttcagacccctaccgagctccaaggaaacatcacgcaaatccagtggggttccaggaagaacctgctggcagtgaacagcgtcatctccgtggccatcctcagcgagcgggccatgtcgtcacacttccaccagcaagtggccgccatgcaggtctccccgagtctgctgaatgtgtgcttcctgtccacgggggtcgcacacagcctgcgcaccgacatgcacatcagtggagtgtttgccaccaaggatgctgtcgcagtctggaacggaaggcaggtggcgatcttcgagctttctggagccgcgatacggagtgcagggaccttcttgtgtgagacgcctgtgttagcaatgcatgaagaaaacgtttacacggtggagtcaaaccgagttcaagttcgaacctggcaggggactgtcaaacaactcctccttttctcggagactgaggggaatccctgcttcttggacatctgtgggaatttcctggttgtagggacagacttggctcactttaaaagctttgatctttcccgaagagaggccaaagcacactgtagctgcaggagcctggcggagctggtccctggggtggggggcatcgcttctctgcggtgcagcagcagcgggagcaccatcagcatcctccccagcaaggctgacaacagccctgattccaaaatctgcttctacgatgttgaaatggacacagtgaccgtctttgacttcaagactggacaaattgatcggagagagacgctgtcctttaatgagcaagagactaataagagccacctctttgtggatgagggactgaaaaattatgttcccgtgaaccacttctgggaccagagtgagccccggctgtttgtatgcgaagccgtgcaggagacgccgcgctcccagcctcagtctgcaaacgggcagccccaagatgggcgcgctggccctgcggcagatgttttgatcctgtccttcttcatttccgaagagcacggcttcctgcttcatgagagcttcccccggcctgccacctcccacagtctcctggggatggaagtgccttattactacttcacaagaaagcccgaagaagcagacagagaagacgaggtggagcctgggtgccaccacatccctcagatggtgtccaggagacccctgcgagactttgtggggctggaggactgcgacaaggccacccgggacgccatgctccacttcagcttctttgtcaccataggagacatggacgaagccttcaaatccatcaagctcatcaaaagtgaggccgtctgggagaacatggcgcgcatgtgcgtgaagacccagcggctggacgtggccaaggtgtgcctggggaacatgggccatgcccgcggggcccgagcgctgcgtgaggcggagcaggagccggagctagaggcccgcgtggccgtgctggccacgcagctgggcatgctggaggacgccgagcagctgtacaggaagtgcaagcgccacgacctcctgaacaagttctaccaggctgcgggccggtggcaggaggccctccaggtagccgagcaccacgatcgcgtgcacctgcgcagcacctaccaccgctatgccgggcacctggaggccagcgccgactgcagccgggccctcagttactacgagaagtcggacacgcaccgcttcgaggtgcccaggatgctgtcggaggacctgccgtccctggagctctacgtgaataaaatgaaggataagaccctgtggcggtggtgggcgcagtacctggagagccagggcgagatggacgccgcgctgcactactacgagctggcccgggaccacttctccctggtccgcatccactgcttccagggcaatgtccagaaggctgcgcaaatagccaacgagacaggaaacctggcggcctcctaccacctcgcccgccagtacgagagccaggaggaggtcgggcaggcggtgcacttctacacccgggcacaggccttcaagaatgccatccgcctgtgcaaggagaacggcctggacgaccagctcatgaacttggccctgctgagctcccccgaggacatgatcgaggcggcccgatactacgaggagaagggcgtgcagatggacagggcggtcatgctgtaccacaaggctggccacttctccaaggccctggagctggcctttgccacccagcagtttgtggccctacagctcatagcagaggacctggatgagacgtcagaccctgcgctcctggcccgctgctccgacttcttcatcgagcacagtcagtacgagagggcggtagagctgctgctggctgccaggaagtatcaggaagccctgcagctgtgcctggggcagaacatgagcatcaccgaggagatggcggaaaagatgaccgtggccaaggactcctcggacctgcctgaggagtcgcggcgggagctgctggagcagatagcagactgctgcatgcgccagggcagctaccacctggccaccaagaagtacacgcaggccggcaacaagctgaaggccatgagggcgctgctcaaatccggagacacggagaaaatcacgttcttcgcgagcgtgtccaggcagaaggaaatctacatcatggctgctaactacctgcagtccctggactggcggaaggagccggagatcatgaagaacatcatcggcttctacaccaaggggcgggccctggacctcctggctggcttttatgacgcttgtgcccaggtggagattgatgaataccagaactacgacaaagcccacggggcgctgaccgaggcctacaagtgcctggccaaggccaaggccaagagccccctggaccaggagaccaggctggcgcagctgcagagcaggatggcactggtgaagaggttcatccaggcccgcaggacgtacacagaggaccccaaggagtccatcaagcagtgtgagctgctcctggaggaaccagacctggacagcaccatccgcatcggggacgtctatggcttcctggtggagcactacgtgcggaaggaggaataccagacggcctacagattcctggaggagatgcggcggcggcttcccttggccaacatgtcctactacgtgagcccgcaggccgtggacgccgtgcaccgggggctgggtctcccactgccacgcaccgtccccgagcaggtccgccacaacagcatggaggacgccagggagctggacgaggaggtggtggaagaggcagatgacgacccctgaggggcctgggccccaggaccagcgtgctgctgcagaaaggcatcttctggaatttttttgtcagctgtggcaaagccagcatttttgctgggaaaaaacatgtctgtgttggaatacgcgacagagctgggcgagaacgcagcggcccgggccggcggagggtgtgacccgtctgcaccttgctctgtcccacctgcctctgggtgcccggcagctccactagatttttggattcattcctttgaagggagtcgggttcacccttccatcgtattctcccaactacacattgtaaagcctgagaaacttctagaacctcaggaagctgcagctggagggctggggcacctgcccccctgctccccacacatcatatcctccccatactcctgcagggcccacggctcctgagcaacagctgggacacccgggccttggcggctgcaccccctgctaggctctgcccaccggccaccaacactcctgtaattccaataaagcagtttattttctgaga

SEQ ID NO: 144257 - DNA, 643 bp, Homo sapiens
  Payload ID: 8504
  Gene Symbol: IFT140
  Gene Name: intraflagellar transport 140
  ENST ID: ENST00000569646
  CDS Start-End: 282-643
gaggtgagtggccttagggctagggcggccgacccaggtccttaggagccaggccggggtttggggccgaggatgtgaccggtggcgggcgtcgggaccctcccgtctcctcccacgatcccggcgccgccgagtccccgcggcccctcgcgagtcccatcgaggctggggcgggcttggcgcggggtccaggtcgctcgtcggactatggctgtcgcccccgcccggcctcgaatcgcggctgattccggtttcagcgctgaggaggcctgagttccgtcatggccctctattatgaccaccagatagaagccccggatgcagcagggtcaccctcatttatcagctggcaccctgtccatccattcttggcagttgcttacatcagcacaacctcaacaggcagcgtggatatttacctggagcaaggggagtgcgtgccagatacacacgtcgagaggccgttccgggttgcttccctgtgctggcacccgacgcggctggtgctggctgtgggctgggagactggagaagtgacggtgtttaacaagcaggacaaggagcagcacacgatgcccctgacacacacagccgacatcaccgtgctccgttggagccccagtggaaactgcctgctgtctgg

SEQ ID NO: 144258 - DNA, 452 bp, Homo sapiens
  Payload ID: 8504
  Gene Symbol: IFT140
  Gene Name: intraflagellar transport 140
  ENST ID: ENST00000569812
  CDS Start-End: 112-452
atgggcttaacagattctttcccaaaagctggtttgatggaggcacttgtagaggctctggagacgctggacgcctgaaagtttcagcgctgaggaggcctgagttccgtcatggccctctattatgaccaccagatagaagccccggatgcagcagggtcaccctcatttatcagctggcaccctgtccatccattcttggcagttgcttacatcagcacaacctcaacaggcagcgtggatatttacctggagcaaggggagtgcgtgccagatacacacgtcgagaggccgttccgggttgcttccctgtgctggcacccgacgcggctggtgctggctgtgggctgggagactggagaagtgacggtgtttaacaagcaggacaaggagcagcacacgatgcccctgacacacacagccgacatcaccgtgctccgttggagccccag

SEQ ID NO: 144259 - DNA, 414 bp, Homo sapiens
  Payload ID: 8504
  Gene Symbol: IFT140
  Gene Name: intraflagellar transport 140
  ENST ID: ENST00000568837
  CDS Start-End: 1-378
gatgaataccagaactacgacaaagcccacggggcgctgaccgaggcctacaagtgcctggccaaggccaaggccaagagccccctggaccaggagaccaggctggcgcagctgcagagcaggatggcactggtgaagaggttcatccaggcccgcaggacgtacacagaggaccccaaggagtccatcaagcagtgtgagctgctcctggaggaaccagacctggacagcaccatccgcatcggggacgtctatggcttcctggtggagcactacgtgcggaaggaggaataccagacggtgaggcctgagtgctgctcactagcagcatcccgccacacaaggctcctgaaacgaaggcttaacggctcaaactgaggctgtgtgtggcggctcactcctgtaatcccagca

SEQ ID NO: 144260 - DNA, 5415 bp, Homo sapiens
  Payload ID: 8505
  Gene Symbol: IFT172
  Gene Name: intraflagellar transport 172
  Uniprot ID: Q9UG01
  ENST ID: ENST00000260570
  CDS Start-End: 105-5354
gtcgcataagcgtcagtgcctgtcgctgcggctgcgtggcgggttgtccaggtaaccacgggagttgtcgctgtctaggagcatctgaaagacaggtgtgcgtcatgcacttgaagcacctgaggaccctgctgagccctcaggatggagctgcaaaggtgacctgcatggcttggtcccagaacaatgccaaatttgctgtctgcacagtggaccgagtggtcttgctgtatgatgaacatggagaacggagagataaattctccaccaaaccagctgacatgaagtatggcaggaagagctatatggtgaagggcatggctttttctcctgattccactaaaattgccataggacagactgacaacatcatctatgtctacaagattggagaagattggggtgacaagaaagtcatctgcaacaagttcatccagacgagtgctgtcacttgtctgcaatggccggcagaatacatcattgtctttggactggctgaagggaaggttcgtttagcaaacaccaaaactaataaatcatctaccatctatgggacagagtcttacgtggtgtccctgacaacaaattgctctgggaaaggaattctctctggtcatgcagatggtaccatcgttaggtatttctttgatgatgaaggctctggagagtcacaggggaagttggttaaccacccgtgtccaccctatgccttggcatgggcaaccaatagcatcgtggctgcaggctgtgatcggaaaattgtagcctatggaaaagaaggtcacatgctacaaacttttgattatagccgtgaccctcaggagcgggagttcaccacagctgtatcaagtcctgggggccagtctgttgtgctaggaagttatgacaggcttcgggtgttcaactggatccctcgaagaagcatctgggaagaggcaaagcccaaggagattaccaatttatacaccatcactgccttggcctggaagcgggatggctcacggctctgtgtgggcacactatgtggtggggtggaacagtttgactgctgcctccgaaggagtatttacaagaacaagtttgagttgacgtatgtgggacctagccaggtgattgtgaagaacctgtcatcaggaacccgagtggtgctcaagtcacactatggctatgaggtggaagaggtgaaaatcctaggaaaggaacgttacttggtggctcacacatcagaaacactgctgctgggggacctgaacactaatcggcttagtgagatagcctggcaaggatctggtggcaatgagaagtatttctttgaaaatgagaatgtatgcatgatcttcaatgccggagagctaaccctggtggaatatgggaataatgacaccctgggttctgtacgcactgaattcatgaacccccacctcatcagtgttcgtattaatgagaggtgtcagcgaggaacagaagataataagaaattggcttatcttattgatattaagactattgctatagtggatctgattggtggctacaacattggcaccgtcagccatgagagccgtgtggattggctggaacttaatgagactggacacaagctcctcttcagggaccggaaacttcgtttgcatctgtatgatattgaaagctgctctaagacaatgatcctcaacttctgctcctatatgcagtgggtcccaggaagtgacgtgctggtagctcagaaccgaaacagtctgtgtgtatggtacaacattgaggcacctgagagagtcaccatgttcactattaggggtgatgttataggtctggagcggggcgggggaaagaccgaggtgatggtgatggaaggtgtgactactgttgcctacacattggatgagggcctcatcgagtttggaacagccattgatgatggcaactacatccgggcaacagccttcttagagactctggaaatgaccccagaaacagaggcaatgtggaaaaccttgagtaaactggcactagaggcaaggcaactacacattgcggagaggtgcttttctgctttgggccaagtagcaaaagctcgattcctgcatgagaccaatgagattgcagatcaagtatcccgggaatatggcggagaaggaacagacttttatcaggtccgagcacgtctagccatgctggaaaagaactacaaactggctgaaatgatctttttggaacagaatgctgtggaggaggccatgggcatgtaccaggagctacaccgttgggatgagtgtatcgctgtggctgaagccaaggggcacccagccctggagaagctacgtcgtagttactaccagtggctgatggacacacagcaagaggagcgagcaggtgaactacaggagagccaaggggatgggctagcagccatcagcctctacctcaaagctgggctccctgccaaagctgctcggctggtgctgacccgagaggaactgctagccaacacagagctggtagaacacatcactgcagcccttatcaagggggaactctacgaaagggcaggtgatctctttgagaagattcacaatccacagaaggccctggagtgctaccgtaaaggcaacgcattcatgaaagcggtagagctggctcgattggccttcccagtggaggtggtgaaactagaggaggcatggggggaccacctggtgcagcagaagcagcttgatgcagccattaatcactacatcgaagccaggtgctccattaaggcaattgaggccgccctgggtgcccgccagtggaagaaggcaatttatatattagatctacaggaccggaacactgcatccaaatactatcctctcgtggcccaacactatgcatccctgcaggagtatgagattgctgaggagctctatactaagggagatcggacaaaagatgccatagacatgtacacccaggctggtcgttgggaacaagcccacaagctggcgatgaaatgcatgagaccagaagatgtgtcagtgctatacatcactcaggcccaggaaatggagaagcagggcaagtaccgtgaggctgaaaggctatatgtgacagtacaagagcctgatcttgccatcaccatgtacaaaaagcacaagttgtatgatgacatgatccgcctggtagggaagcaccatccagatctcctcagtgatacacacctacatctgggcaaggagctggaggctgaaggccgactacaggaggctgagtaccactacctcgaggcccaggaatggaaggcaacagtgaacatgtaccgggccagtgggctttgggaagaggcctacagggtggccagaactcaaggaggggctaatgcccacaaacacgtggcctatctgtgggcaaagagcctgggaggagaggctgcagttagactgcttaataagctgggactcctggaagctgctgttgaccacgctgcagacaattgctcctttgaatttgcgtttgaactctctcggctggccctcaagcacaaaacccccgaggttcatctcaaatatgctatgttcctggaggatgagggtaaattcgaagaggctgaagctgaattcatcagagctggtaaacccaaggaggcagtcctcatgtttgtccataaccaggattgggaggcagctcagcgtgtggctgaggctcacgaccctgacagtgtcgccgaggtgcttgtgggacaggcccggggggccttggaggagaaggactttcagaaagcagaagggctgctgctccgggcccagagaccaggcctggccctcaattattataaggaggctggattatggagtgacgctctgcgcatctgcaaggactatgtgcccagccagctggaggctctgcaggaagaatatgagcgggaagctactaagaagggggccaggggtgtggagggatttgtggaacaagctcgacactgggagcaggctggagagtacagccgtgccgtggactgctacctcaaagtgcgagactctggaaacagcggcctggcggagaagtgctggatgaaggcagctgaactctccatcaagtttctgcctccccaacgtaatatggaagtcgttctggctgtaggaccccagctgattggaattggaaagcacagtgcagctgcagagctctatctgaatctggaccttgtcaaggaagcaatcgatgctttcatcgagggtgaggagtggaacaaggcgaagcgtgtagctaaggagttagatcccaggtatgaagactatgtggaccagcattataaagagttcctcaagaatcagggcaaagtggactcgctggtgggtgtggatgtgatagctgctttggacctgtatgtggagcagggccagtgggacaagtgcattgaaacagctaccaagcagaactacaagattctgcacaagtatgtggctttgtatgcaactcacttgatccgggagggtagctctgcccaggcattggccctgtatgtacagcacggagcccctgctaacccacagaacttcaatatctacaaaaggatcttcactgacatggtgagctctcctggaaccaactgtgccgaggcctatcatagctgggctgatcttcgagatgtcctcttcaacctgtgtgaaaacctggtgaagtccagtgaggcaaactctccagcccatgaggagttcaagacgatgctgctgatcgctcattactatgccacgcgctctgcagcccagagtgtcaaacagctggaaaccgtggctgccaggctttctgtttcactcttgcgtcacacccagctactacctgtagacaaagccttctatgaagcaggcattgctgccaaggcagttggctgggataacatggcattcatcttcctcaatcgctttttggacctgaccgatgcaatcgaggaagggactctagatggccttgaccactctgattttcaggatacagacattccctttgaggtgccactcccagctaagcagcatgtaccggaggctgagagagaagaggttcgagactgggtgcttacagtctccatggaccagcggctggagcaggttctgcctcgggatgagcgtggcgcctacgaggcctccctagtggcagcgagcactggtgttcgagccctgccctgccttattacaggataccccattctgaggaacaaaattgaatttaagcggccagggaaggctgctaacaaggacaactggaataaattccttatggccatcaagacctcccacagcccagtgtgccaggacgtgctgaaattcatcagtcagtggtgtggagggctccccagcaccagcttttcctttcagtagttggtagagctgaggaagagttagggcctctccctcattaaagttttataaataattgaga

SEQ ID NO: 144261 - DNA, 2207 bp, Homo sapiens
  Payload ID: 8505
  Gene Symbol: IFT172
  Gene Name: intraflagellar transport 172
  Uniprot ID: Q9UG01
  ENST ID: ENST00000359466
  CDS Start-End: 121-1719
cgcgtgttgcgctccggtcgcataagcgtcagtgcctgtcgctgcggctgcgtggcgggttgtccaggtaaccacgggagttgtcgctgtctaggagcatctgaaagacaggtgtgcgtcatgcacttgaagcacctgaggaccctgctgagccctcaggatggagctgcaaaggtgacctgcatggcttggtcccagaacaatgccaaatttgctgtctgcacagtggaccgagtggtcttgctgtatgatgaacatggagaacggagagataaattctccaccaaaccagctgacatgaagtatggcaggaagagctatatggtgaagggcatggctttttctcctgattccactaaaattgccataggacagactgacaacatcatctatgtctacaagattggagaagattggggtgacaagaaagtcatctgcaacaagttcatccagacgagtgctgtcacttgtctgcaatggccggcagaatacatcattgtctttggactggctgaagggaaggttcgtttagcaaacaccaaaactaataaatcatctaccatctatgggacagagtcttacgtggtgtccctgacaacaaattgctctgggaaaggaattctctctggtcatgcagatggtaccatcgttaggtatttctttgatgatgaaggctctggagagtcacaggggaagttggttaaccacccgtgtccaccctatgccttggcatgggcaaccaatagcatcgtggctgcaggctgtgatcggaaaattgtagcctatggaaaagaaggtcacatgctacaaacttttgattatagccgtgaccctcaggagcgggagttcaccacagctgtatcaagtcctgggggccagtctgttgtgctaggaagttatgacaggcttcgggtgttcaactggatccctcgaagaagcatctgggaagaggcaaagcccaaggagattaccaatttatacaccatcactgccttggcctggaagcgggatggctcacggctctgtgtgggcacactatgtggtggggtggaacagtttgactgctgcctccgaaggagtatttacaagaacaagtttgagttgacgtatgtgggacctagccaggtgattgtgaagaacctgtcatcaggaacccgagtggtgctcaagtcacactatggctatgaggtggaagaggtgaaaatcctaggaaaggaacgttacttggtggctcacacatcagaaacactgctgctgggggacctgaacactaatcggcttagtgagatagcctggcaaggatctggtggcaatgagaagtatttctttgaaaatgagaatgtatgcatgatcttcaatgccggagagctaaccctggtggaatatgggaataatgacaccctgggttctgtacgcactgaattcatgaacccccacctcatcagtgttcgtattaatgagaggtgtcagcgaggaacagaagataataagaaattggcttatcttattgatattaagactattgctatagtggatctgattggtggctacaacattggcaccgtcagccatgagagccgtgtggattggctggaacttaatgagactggacacaagctcctcttcagggaccggaaacttcgtgtgagaagagctactaaggccttaggcattggctggcccacagagggtgtgagacaagctgccaccagggactgagggaggcaggatggagcacattgtctttgctgtgtcatcaacatggcagaaggcacagaagaatcaacattctctgtagctgataccaaaactgatagcaaaacccatcctttattacctctttttttttttttttggagacagtgtctcactctgtcacccaggctggagtgcagtggtacaatctgggctcactgcaacttctgcctcccgggttcaagtgattctcctgcctcagcctccccagtagctgggactacaggcacgtgccaccacacctagataatttttgtatttttagtagagatgggttttcaccatgttggccaggctggtctcgaactcctgacctcctggcctcaggtgatctgcctgcctctgcctctcaaagtgctgggattacaggtgttgagccatgcgcccagcaatcctgtatgacctcagaggtgattgtattatggcaacaaagtcaagaagggagtttggaa

SEQ ID NO: 144262 - DNA, 569 bp, Homo sapiens
  Payload ID: 8505
  Gene Symbol: IFT172
  Gene Name: intraflagellar transport 172
  ENST ID: ENST00000420854
  CDS Start-End: 1-489
aacttcaatatctacaaaaggatcttcactgacatggtgagctctcctggaaccaactgtgccgaggcctatcatagctgggctgatcttcgagatgtcctcttcaacctgtgtgaaaacctggtgaagtccagtgaggcaaactctccagcccatgaggagttcaagacgatgctgctgatcgctcattactatgccacgcgctctgcagcccagagtgtcaaacagctggaaaccgtggctgccaggctttctgtttcactcttgcgtcacacccagctactacctgtagacaaagccttctatgaagcaggcattgctgccaaggcagttggctgggataacatggcattcatcttcctcaatcgctttttggacctgaccgatgcaatcgaggaagggactctagatggccttgaccactctgattttcaggatacagacattccctttgaggtgccactcccagctaagcagcatgtaccgtgaaagtagaagcaaaatagaaagaaaaggctgtgactgcatcccccaatccaaggaggattcgtggctaaaagctggaggct

SEQ ID NO: 144263 - DNA, 760 bp, Homo sapiens
  Payload ID: 8505
  Gene Symbol: IFT172
  Gene Name: intraflagellar transport 172
  ENST ID: ENST00000450564
  CDS Start-End: 1-291
gctcagcgtgtggctgaggctcacgaccctgacagtgtcgccgaggtgcttgtgggacaggcccggggggccttggaggagaaggactttcagaaagcagaagggctgctgctccgggcccagagaccaggcctggccctcaattattataaggggtgtggagggatttgtggaacaagctcgacactgggagcaggctggagagtacagccgtgccgtggactgctacctcaaagtgcgagactctggaaacagcggcctggcggagaagtgctggatgaaggcagctgaactctccatcaagtttctgcctccccaacgtaatatggaagtcgttctggctgtaggaccccagctgattggaattggaaagcacagtgcagctgcagagctctatctgaatctggaccttgtcaaggaagcaatcgatgctttcatcgagggtgaggagtggaacaaggcgaagcgtgtagctaaggagttagatcccaggtatgaagactatgtggaccagcattataaagagttcctcaagaatcagggcaaagtggactcgctggtgggtgtggatgtgatagctgctttggacctgtatgtggagcagggccagtgggacaagtgcattgaaacagctaccaagcagaactacaagattctgcacaagtatgtggctttgtatgcaactcacttgatccgggagggtagctctgcccaggcattggccctgtatgtacagcacggagcccctgctaacccacag

SEQ ID NO: 144264 - DNA, 690 bp, Homo sapiens
  Payload ID: 8505
  Gene Symbol: IFT172
  Gene Name: intraflagellar transport 172
  ENST ID: ENST00000443889
  CDS Start-End: 1-589
ctctcggctggccctcaagcacaaaacccccgaggttcatctcaaatatgctatgttcctggaggatgagggtaaattcgaagaggctgaagctgaattcatcagagctggtaaacccaaggaggcagtcctcatgtttgtccataaccaggattgggaggcagctcagcgtgtggctgaggctcacgaccctgacagtgtcgccgaggtgcttgtgggacaggcccggggggccttggaggagaaggactttcagaaagcagaagggctgctgctccgggcccagagaccaggcctggccctcaattattataaggaggctggattatggagtgacgctctgcgcatctgcaaggactatgtgcccagccagctggaggctctgcaggaagaatatgagcgggaagctactaagaagggggccaggggtgtggagggatttgtggaacaagctcgacactgggagcaggctggagagtacagccgtgccgtggactgctacctcaaagtgcgagactctggaaacagcggcctggcggagaagtgctggatgaaggtagcaggaatctatggagtgcctgctggatgatagagccagaacctctgaaggctataaaagtggatataagacagagccctgacagccaaaagttaggggaattagaccaataaatggctcaattactatca

SEQ ID NO: 144265 - DNA, 1982 bp, Homo sapiens
  Payload ID: 8505
  Gene Symbol: IFT172
  Gene Name: intraflagellar transport 172
  ENST ID: ENST00000416524
  CDS Start-End: 284-1819
acgtgtgaccttgcgacgcgtgttgcgctccggtcgcataagcgtcagtgcctgtcgctgcggctgcgtggcgggttgtccaggtaaccacgggagttgtcgctgtctaggagcatctgaaagacaggtgtgcgtcatgcacttgaagcacctgaggaccctgctgagccctcagcccaaactcctttgcctggcttcaaagacttcctgagctggcctgtttttcctgccttaccccgtctattctactatttataaggatggagctgcaaaggtgacctgcatggcttggtcccagaacaatgccaaatttgctgtctgcacagtggaccgagtggtcttgctgtatgatgaacatggagaacggagagataaattctccaccaaaccagctgacatgaagtatggcaggaagagctatatggtgaagggcatggctttttctcctgattccactaaaattgccataggacagactgacaacatcatctatgtctacaagattggagaagattggggtgacaagaaagtcatctgcaacaagttcatccagacgagtgctgtcacttgtctgcaatggccggcagaatacatcattgtctttggactggctgaagggaaggttcgtttagcaaacaccaaaactaataaatcatctaccatctatgggacagagtcttacgtggtgtccctgacaacaaattgctctgggaaaggaattctctctggtcatgcagatggtaccatcgttaggtatttctttgatgatgaaggctctggagagtcacaggggaagttggttaaccacccgtgtccaccctatgccttggcatgggcaaccaatagcatcgtggctgcaggctgtgatcggaaaattgtagcctatggaaaagaaggtcacatgctacaaacttttgattatagccgtgaccctcaggagcgggagttcaccacagctgtatcaagtcctgggggccagtctgttgtgctaggaagttatgacaggcttcgggtgttcaactggatccctcgaagaagcatctgggaagaggcaaagcccaaggagattaccaatttatacaccatcactgccttggcctggaagcgggatggctcacggctctgtgtgggcacactatgtggtggggtggaacagtttgactgctgcctccgaaggagtatttacaagaacaagtttgagttgacgtatgtgggacctagccaggtgattgtgaagaacctgtcatcaggaacccgagtggtgctcaagtcacactatggctatgaggtggaagaggtgaaaatcctaggaaaggaacgttacttggtggctcacacatcagaaacactgctgctgggggacctgaacactaatcggcttagtgagatagcctggcaaggatctggtggcaatgagaagtatttctttgaaaatgagaatgtatgcatgatcttcaatgccggagagctaaccctggtggaatatgggaataatgacaccctgggttctgtacgcactgaattcatgaacccccacctcatcagtgttcgtattaatgagaggtgtcagcgaggaacagaagataataagaaattggcttatcttattgatattaagactattgctatagtggatctgattggtggctacaacattggcaccgtcagccatgagagccgtgtggattggctggaacttaatgagactggacacaagctcctcttcagggaccggaaacttcgtgtgagaagagctactaaggccttaggcattggctggcccacagagggtgtgagacaagctgccaccagggactgagggaggcaggatggagcacattgtctttgctgtgtcatcaacatggcagaaggcacagaagaatcaacattctctgtagctgataccaaaactgatagcaaaacccatcctttattacctctttttttttttttttggagacagtgtctcactctgtcaccca

SEQ ID NO: 144266 - DNA, 1723 bp, Homo sapiens
  Payload ID: 8505
  Gene Symbol: IFT172
  Gene Name: intraflagellar transport 172
  ENST ID: ENST00000509128
  CDS Start-End: 1-973
gcttgtgggacaggcccggggggccttggaggagaaggactttcagaaagcagaagggctgctgctccgggcccagagaccaggcctggccctcaattattataaggaggctggattatggagtgacgctctgcgcatctgcaaggactatgtgcccagccagctggaggctctgcaggaagaatatgagcgggaagctactaagaagggggccaggggtgtggagggatttgtggaacaagctcgacactgggagcaggctggagagtacagccgtgccgtggactgctacctcaaagtgcgagactctggaaacagcggcctggcggagaagtgctggatgaaggcagctgaactctccatcaagtttctgcctccccaacgtaatatggaagtcgttctggctgtaggaccccagctgattggaattggaaagcacagtgcagctgcagagctctatctgaatctggaccttgtcaaggaagcaatcgatgctttcatcgagggtgaggagtggaacaaggcgaagcgtgtagctaaggagttagatcccaggtatgaagactatgtggaccagcattataaagagttcctcaagaatcagggcaaagtggactcgctggtgggtgtggatgtgatagctgctttggacctgtatgtggagcagggccagtgggacaagtgcattgaaacagctaccaagcagaactacaagattctgcacaagtatgtggctttgtatgcaactcacttgatccgggagggtagctctgcccaggcattggccctgtatgtacagcacggagcccctgctaacccacagaacttcaatatctacaaaaggatcttcactgacatggtgagctctcctggaaccaactgtgccgaggcctatcatagctgggctgatcttcgagatgtcctcttcaacctggctgtgctgtctccctcctctagtgtgaaaacctggtgaagtccagtgaggcaaactctccagcccatgaggagttcaagacgatgctgctgatcgctcattactatgccacgcgctctgcagcccagagtgtcaaacagctggaaaccgtggctgccaggctttctgtttcactcttgcgtcacacccagctactacctgtagacaaagccttctatgaagcaggcattgctgccaaggcagttggctgggataacatggcattcatcttcctcaatcgctttttggacctgaccgatgcaatcgaggaagggactctagatggccttgaccactctgattttcaggatacagacattccctttgaggtgccactcccagctaagcagcatgtaccggaggctgagagagaagaggttcgagactgggtgcttacagtctccatggaccagcggctggagcaggttctgcctcgggatgagcgtggcgcctacgaggcctccctagtggcagcgagcactggtgttcgagccctgccctgccttattacaggataccccattctgaggaacaaaattgaatttaagcggccagggaaggctgctaacaaggacaactggaataaattccttatggccatcaagacctcccacagcccagtgtgccaggacgtgctgaaattcatcagtcagtggtgtggagggctccccagcaccagcttttcctttcagtagttggtagagctgaggaagagttagggcctctccctcattaaagttttataaataa

SEQ ID NO: 144267 - DNA, 974 bp, Homo sapiens
  Payload ID: 8506
  Gene Symbol: IFT20
  Gene Name: intraflagellar transport 20
  Uniprot ID: Q8IY31
  ENST ID: ENST00000357896
  CDS Start-End: 133-579
ggtaaacaggctctgtatccgtggcagcggccgtggcaggctggctgggtaccggctgtcgctgacccaggagaagctgcctgtctacatcagcctgggctgcagcgcgctgccgccgcggggccggcagccatggccaaggacatcctgggtgaagcagggctacactttgatgaactgaacaagctgagggtgttggacccagaggttacccagcagaccatagagctgaaggaagagtgcaaagactttgtggacaaaattggccagtttcagaaaatagttggtggtttaattgagcttgttgatcaacttgcaaaagaagcagaaaatgaaaagatgaagagtcttgctgtgtcacccaggctggagtgcactggtgcaatctcggctcactgcaagctctgcctctcagattcaagcgattctcccacctcaccctcccgagtaggtgggactacaggccatcggtgctcggaacttgctcaaatctatagcaaagcagagagaagctcaacagcagcaacttcaagccctaatagcagaaaagaaaatgcagctagaaaggtatcgggttgaatatgaagctttgtgtaaagtagaagcagaacaaaatgaatttattgaccaatttatttttcagaaatgaactgaaaatttcgcttttatagtaggaaggcaaaacaaaaaaaagcctctcaaaaccaaaaaaacctctgtagcattccagcggcttgaccaatgacctatgtcacaagaggtggcgtgtaaggaatgcagccccctgaagacagcactacaagtctgggggagccagttttaacatcagtgcacagctgctgctggtggccctgcagtgtacgttctcacctcttatgcttagttggaactaagcagtttgtaaactttcatccttttttttgtaaattcacaaagctttggaaggagaagcaataaatttttgttttcaaatg

SEQ ID NO: 144268 - DNA, 825 bp, Homo sapiens
  Payload ID: 8506
  Gene Symbol: IFT20
  Gene Name: intraflagellar transport 20
  Uniprot ID: Q8IY31
  ENST ID: ENST00000395418
  CDS Start-End: 104-502
gccgtggcaggctggctgggtaccggctgtcgctgacccaggagaagctgcctgtctacatcagcctgggctgcagcgcgctgccgccgcggggccggcagccatggccaaggacatcctgggtgaagcagggctacactttgatgaactgaacaagctgagggtgttggacccagaggttacccagcagaccatagagctgaaggaagagtgcaaagactttgtggacaaaattggccagtttcagaaaatagttggtggtttaattgagcttgttgatcaacttgcaaaagaagcagaaaatgaaaagatgaaggccatcggtgctcggaacttgctcaaatctatagcaaagcagagagaagctcaacagcagcaacttcaagccctaatagcagaaaagaaaatgcagctagaaaggtatcgggttgaatatgaagctttgtgtaaagtagaagcagaacaaaatgaatttattgaccaatttatttttcagaaatgaactgaaaatttcgcttttatagtaggaaggcaaaacaaaaaaaagcctctcaaaaccaaaaaaacctctgtagcattccagcggcttgaccaatgacctatgtcacaagaggtggcgtgtaaggaatgcagccccctgaagacagcactacaagtctgggggagccagttttaacatcagtgcacagctgctgctggtggccctgcagtgtacgttctcacctcttatgcttagttggaactaagcagtttgtaaactttcatccttttttttgtaaattcacaaagctttggaaggagaagcaataaatttttgttttcaaa

SEQ ID NO: 144269 - DNA, 557 bp, Homo sapiens
  Payload ID: 8506
  Gene Symbol: IFT20
  Gene Name: intraflagellar transport 20
  ENST ID: ENST00000577498
  CDS Start-End: 301-557
agcggccgtggcaggctggctgggtaccggctgtcgctgacccaggagaagctgcctgtctacatcagcctgggctgcagcgcgctgccgccgcggggccggcaggaagagaatgacccaactttgattcccaattcagctgaactatgtgctcttcagggcgggcaccgtgttgcattcatctttgtacccccagcatctagcagtgttggcatgtagtaggcactcaagaaatgtgtgttgaatgaacgatgcctgtgacaagcaagcggactttattctttcctgacccttgctcctatgacacacctcctcctgactgccactgtcactccttcagagcagaactcctctagggaacctggatgggaaacagccatggccaaggacatcctgggtgaagcagggctacactttgatgaactgaacaagctgagggtgttggacccagaggttacccagcagaccatagagctgaaggaagagtgcaaagactttgtggacaaaattggccagtttcagaaaatagttggtggtttaattgagcttgttgatca

SEQ ID NO: 144270 - DNA, 852 bp, Homo sapiens
  Payload ID: 8506
  Gene Symbol: IFT20
  Gene Name: intraflagellar transport 20
  Uniprot ID: Q8IY31
  ENST ID: ENST00000585313
  CDS Start-End: 139-537
ccgtggcaggctggctgggtaccggctgtcgctgacccaggagaagctgcctgtctacatcagcctgggctgcagcgcgctgccgccgcggggccggcagagcagaactcctctagggaacctggatgggaaacagccatggccaaggacatcctgggtgaagcagggctacactttgatgaactgaacaagctgagggtgttggacccagaggttacccagcagaccatagagctgaaggaagagtgcaaagactttgtggacaaaattggccagtttcagaaaatagttggtggtttaattgagcttgttgatcaacttgcaaaagaagcagaaaatgaaaagatgaaggccatcggtgctcggaacttgctcaaatctatagcaaagcagagagaagctcaacagcagcaacttcaagccctaatagcagaaaagaaaatgcagctagaaaggtatcgggttgaatatgaagctttgtgtaaagtagaagcagaacaaaatgaatttattgaccaatttatttttcagaaatgaactgaaaatttcgcttttatagtaggaaggcaaaacaaaaaaaagcctctcaaaaccaaaaaaacctctgtagcattccagcggcttgaccaatgacctatgtcacaagaggtggcgtgtaaggaatgcagccccctgaagacagcactacaagtctgggggagccagttttaacatcagtgcacagctgctgctggtggccctgcagtgtacgttctcacctcttatgcttagttggaactaagcagtttgtaaactttcatccttttttttgtaaattcacaaagctttggaaggagaagcaataaatttttg

SEQ ID NO: 144271 - DNA, 787 bp, Homo sapiens
  Payload ID: 8506
  Gene Symbol: IFT20
  Gene Name: intraflagellar transport 20
  Uniprot ID: Q8IY31
  ENST ID: ENST00000579419
  CDS Start-End: 139-483
ccgtggcaggctggctgggtaccggctgtcgctgacccaggagaagctgcctgtctacatcagcctgggctgcagcgcgctgccgccgcggggccggcagagcagaactcctctagggaacctggatgggaaacagccatggccaaggacatcctgggtgaagcagggctacactttgatgaactgaacaagctgagggtgttggacccagaggttacccagcagaccatagagctgaaggaagagtgcaaagactttgtggacaaaattggccagtttcagaaaatagttggtggtttaattgagcttgttgatcaacttgcaaaagaagcagaaaatgaaaagatgaaggccatcggtgctcggaacttgctcaaatctatagcaaagcagagagaagctcaacagcagcaacttcaagccctaatagcagaaaagaaaatgcagctagaaagaaatgaactgaaaatttcgcttttatagtaggaaggcaaaacaaaaaaaagcctctcaaaaccaaaaaaacctctgtagcattccagcggcttgaccaatgacctatgtcacaagaggtggcgtgtaaggaatgcagccccctgaagacagcactacaagtctgggggagccagttttaacatcagtgcacagctgctgctggtggccctgcagtgtacgttctcacctcttatgcttagttggaactaagcagtttgtaaactttcatccttttttttgtaaattcacaaagctttggaaggagaagcaataaatttttgttttcaaatgg

SEQ ID NO: 144272 - DNA, 831 bp, Homo sapiens
  Payload ID: 8506
  Gene Symbol: IFT20
  Gene Name: intraflagellar transport 20
  ENST ID: ENST00000578985
  CDS Start-End: 263-661
gccgtggcaggctggctgggtaccggctgtcgctgacccaggagaagctgcctgtctacatcagcctgggctgcagcgcgctgccgccgcggggccggcagctgaactatgtgctcttcagggcgggcaccgtgttgcattcatctttgtacccccagcatctagcagtgttggcatgtagtaggcactcaagaaatgtgtgttgaatgaacgatgcctgtgacaagcaagcggactttattctttcctgacccttgctcctatgacacacctcctcctgactgccactgtcactccttcagagcagaactcctctagggaacctggatgggaaacagccatggccaaggacatcctgggtgaagcagggctacactttgatgaactgaacaagctgagggtgttggacccagaggttacccagcagaccatagagctgaaggaagagtgcaaagactttgtggacaaaattggccagtttcagaaaatagttggtggtttaattgagcttgttgatcaacttgcaaaagaagcagaaaatgaaaagatgaaggccatcggtgctcggaacttgctcaaatctatagcaaagcagagagaagctcaacagcagcaacttcaagccctaatagcagaaaagaaaatgcagctagaaaggtaagaagtcatgatgtaaagcaagttctttacacagctgaatttccactcttccttctggaatgatcacttcttgtccttattcttcatcattgttttcccaggaatagcatctcacttgtcatcctgatttgaagattttaaaaaataaaattacatttgatgggaaggaaa

SEQ ID NO: 144273 - DNA, 834 bp, Homo sapiens
  Payload ID: 8506
  Gene Symbol: IFT20
  Gene Name: intraflagellar transport 20
  ENST ID: ENST00000578122
  CDS Start-End: 258-683
ggcaggctggctgggtaccggctgtcgctgacccaggagaagctgcctgtctacatcagcctgggctgcagcgcgctgccgccgcggggccggcagctgaactatgtgctcttcagggcgggcaccgtgttgcattcatctttgtacccccagcatctagcagtgttggcatgtagtaggcactcaagaaatgtgtgttgaatgaacgatgcctgtgacaagcaagcggactttattctttcctgacccttgctcctatgacacacctcctcctgactgccactgtcactccttcagagcagaactcctctagggaacctggatgggaaacagccatggccaaggacatcctgggtgaagcagggctacactttgatgaactgaacaagctgagggtgttggacccagaggttacccagcagaccatagagctgaaggaagagtgcaaagactttgtggacaaaattggccagtttcagaaaatagttggtggtttaattgagcttgttgatcaacttgcaaaagaagcagaaaatgaaaagatgaaggccatcggtgctcggaacttgctcaaatctatagcaaagcagagagaagctcaacagcagcaacttcaagccctaatagcagaaaagaaaatgcagctagaaaggaatagcatctcacttgtcatcctgatttgaagattttaaaaaataaaattacatttgatgggaaggaaatagaaaacttgttaatatcaaaccacctctagtagtttgagcatgaaagggtccacgaagttggctggctctctgaaagaagactttcctagggctggagatttctcatggg

SEQ ID NO: 144274 - DNA, 611 bp, Homo sapiens
  Payload ID: 8506
  Gene Symbol: IFT20
  Gene Name: intraflagellar transport 20
  ENST ID: ENST00000578009
  CDS Start-End: 1-216
gacatcctgggtgaagcagggctacactttgatgaactgaacaagctgagggtgttggacccagaggttacccagcagaccatagagctgaaggaagagtgcaaagactttgtggacaaaattggccagtttcagaaaatagttggtggtttaattgagcttgttgatcaacttgcaaaagaagcagaaaatgaaaagatgaaggtatcgggttgaatatgaagctttgtgtaaagtagaagcagaacaaaatgaatttattgaccaatttatttttcagaaatgaactgaaaatttcgcttttatagtaggaaggcaaaacaaaaaaaagcctctcaaaaccaaaaaaacctctgtagcattccagcggcttgaccaatgacctatgtcacaagaggtggcgtgtaaggaatgcagccccctgaagacagcactacaagtctgggggagccagttttaacatcagtgcacagctgctgctggtggccctgcagtgtacgttctcacctcttatgcttagttggaactaagcagtttgtaaactttcatccttttttttgtaaattcacaaagctttggaaggagaagcaataaatttttgttttcaaatg

SEQ ID NO: 144275 - DNA, 1071 bp, Homo sapiens
  Payload ID: 8506
  Gene Symbol: IFT20
  Gene Name: intraflagellar transport 20
  Uniprot ID: Q8IY31
  ENST ID: ENST00000585089
  CDS Start-End: 272-748
gtggcagcggccgtggcaggctggctgggtaccggctgtcgctgacccaggagaagctgcctgtctacatcagcctgggctgcagcgcgctgccgccgcggggccggcagctgaactatgtgctcttcagggcgggcaccgtgttgcattcatctttgtacccccagcatctagcagtgttggcatgtagtaggcactcaagaaatgtgtgttgaatgaacgatgcctgtgacaagcaagcggactttattctttcctgacccttgctcctatgacacacctcctcctgactgccactgtcactccttcagagcagaactcctctagggaacctggatgggaaacagccatggccaaggacatcctgggtgaagcagggctacactttgatgaactgaacaagctgagggtgttggacccagaggttacccagcagaccatagagctgaaggaagagtgcaaagactttgtggacaaaattggccagtttcagaaaatagttggtggtttaattgagcttgttgatcaacttgcaaaagaagcagaaaatgaaaagatgaaggccatcggtgctcggaacttgctcaaatctatagcaaagcagagagaagctcaacagcagcaacttcaagccctaatagcagaaaagaaaatgcagctagaaaggtatcgggttgaatatgaagctttgtgtaaagtagaagcagaacaaaatgaatttattgaccaatttatttttcagaaatgaactgaaaatttcgcttttatagtaggaaggcaaaacaaaaaaaagcctctcaaaaccaaaaaaacctctgtagcattccagcggcttgaccaatgacctatgtcacaagaggtggcgtgtaaggaatgcagccccctgaagacagcactacaagtctgggggagccagttttaacatcagtgcacagctgctgctggtggccctgcagtgtacgttctcacctcttatgcttagttggaactaagcagtttgtaaactttcatccttttttttgtaaattcacaaagctttggaaggagaagcaataaatttttgttttcaaa

SEQ ID NO: 144276 - DNA, 774 bp, Homo sapiens
  Payload ID: 8506
  Gene Symbol: IFT20
  Gene Name: intraflagellar transport 20
  ENST ID: ENST00000588477
  CDS Start-End: 153-377
aggaaggtagtgacgtcataggtaaacaggctctgtatccgtggcagcggccgtggcaggctggctgggtaccggctgtcgctgacccaggagaagctgcctgtctacatcagcctgggctgcagcgcgctgccgccgcggggccggcagccatggccaaggacatcctgggtgaagcagggctacactttgatgaactgaacaagctgagggtgttggacccagaggttacccagcagaccatagagctgaaggaagagtgcaaagactttgtggacaaaattggccagtttcagaaaatagttggtggtttaattgagcttgttgatcaacttgcaaaagaagcagaaaatgaaaagatgaaggtatcgggttgaatatgaagctttgtgtaaagtagaagcagaacaaaatgaatttattgaccaatttatttttcagaaatgaactgaaaatttcgcttttatagtaggaaggcaaaacaaaaaaaagcctctcaaaaccaaaaaaacctctgtagcattccagcggcttgaccaatgacctatgtcacaagaggtggcgtgtaaggaatgcagccccctgaagacagcactacaagtctgggggagccagttttaacatcagtgcacagctgctgctggtggccctgcagtgtacgttctcacctcttatgcttagttggaactaagcagtttgtaaactttcatccttttttttgtaaattcacaaagctttggaaggagaagcaataaatttttgttttcaaatggc

SEQ ID NO: 144277 - DNA, 1130 bp, Homo sapiens
  Payload ID: 8507
  Gene Symbol: IFT22
  Gene Name: intraflagellar transport 22
  Uniprot ID: Q9H7X7
  ENST ID: ENST00000315322
  CDS Start-End: 95-652
tccgtcgccatggaaacgaaagcggccaagtagagctccgtcctgacgcgccgcctcccgtgggctccggccggctaagccgcggcggacaactatgctgaaagccaagatcctcttcgtggggccttgcgagagtggaaaaactgttttggccaactttctgacagaatcttctgacatcactgaatacagcccaacccaaggagtgaggatcctagaatttgagaacccgcatgttaccagcaacaacaaaggcacgggctgtgaattcgagctatgggactgtggtggcgatgctaagtttgagtcctgctggccggccctgatgaaggatgctcatggagtggtgatcgtcttcaatgctgacatcccaagccaccggaaggaaatggagatgtggtattcctgctttgtccaacagccgtccttacaggacacacagtgtatgctaattgcacaccacaaaccaggctctggagatgataaaggaagcctgtctttgtcgccacccttgaacaagctgaagctggtgcactcaaacctggaagatgaccctgaggagatccggatggaattcataaagtatttaaaaagcataatcaactccatgtctgagagcagagacagggaggagatgtcaattatgacctagccagccttcacctgggactgccacatccccagtgaaatcagcatgtttctcggtgcagatctgaaatcacatccagctcctgatgttttcttctccctctgactgcagaggaagtgttcctacctgcaggaaggcacctgtcacacagggcgttcactcagaccatctgtgctctgccctgagttcagttgagaaaatcctattatcaaatttggatttcctggccccagaacttcccaaagacctgtaaaatggagggatttaccacctcacatatgtccagttaaacagtttgtggacttgtaaccgtcgcagcccaatgatacaacagtagtttaatcacgtgtattggcttgaatgtgattttcattccttgattcacccaacaaataccgactggctgagcacctgctgtgtgtgcactgctgttctagctgctgaccatagacagcataaatgaaaaagacagaaattccca

SEQ ID NO: 144278 - DNA, 933 bp, Homo sapiens
  Payload ID: 8507
  Gene Symbol: IFT22
  Gene Name: intraflagellar transport 22
  ENST ID: ENST00000430911
  CDS Start-End: 89-202
gccatggaaacgaaagcggccaagtagagctccgtcctgacgcgccgcctcccgtgggctccggccggctaagccgcggcggacaactatgctgaaagccaagatcctcttcgtggggccttgcgagcaaagacctttatttgcactcattttcacagagtggaaaaactgttttggccaactttctgacagaatcttctgacatcactgaatacagcccaacccaaggagtgaggatcctagaatttgagaacccgcatgttaccagcaacaacaaaggcacgggctgtgaattcgagctatgggactgtggtggcgatgctaagtttgagtcctgctggccggccctgatgaaggatgctcatggagtggtgatcgtcttcaatgctgacatcccaagccaccggaaggaaatggagatgtggtattcctgctttgtccaacagccgtccttacaggacacacagtgtatgctaattgcacaccacaaaccaggctctggagatgataaaggaagcctgtctttgtcgccacccttgaacaagctgaagctggtgcactcaaacctggaagatgaccctgaggagatccggatggaattcataaagtatttaaaaagcataatcaactccatgtctgagagcagagacagggaggagatgtcaattatgacctagccagccttcacctgggactgccacatccccagtgaaatcagcatgtttctcggtgcagatctgaaatcacatccagctcctgatgttttcttctccctctgactgcagaggaagtgttcctacctgcaggaaggcacctgtcacacagggcgttcactcagaccatctgtgctctgccctgagttcagttgagaaaatcctattatcaaatttggatttcctggccccagaacttcccaaagacctgtaaaatgga

SEQ ID NO: 144279 - DNA, 875 bp, Homo sapiens
  Payload ID: 8507
  Gene Symbol: IFT22
  Gene Name: intraflagellar transport 22
  Uniprot ID: Q9H7X7
  ENST ID: ENST00000437644
  CDS Start-End: 69-536
caagtagagctccgtcctgacgcgccgcctcccgtgggctccggccggctaagccgcggcggacaactatgctgaaagccaagatcctcttcgtggggccttgcgagagtggaaaaactgttttggccaactttctgacagaatcttctgacatcactgaatacagcccaacccaaggagtgaggtttgagtcctgctggccggccctgatgaaggatgctcatggagtggtgatcgtcttcaatgctgacatcccaagccaccggaaggaaatggagatgtggtattcctgctttgtccaacagccgtccttacaggacacacagtgtatgctaattgcacaccacaaaccaggctctggagatgataaaggaagcctgtctttgtcgccacccttgaacaagctgaagctggtgcactcaaacctggaagatgaccctgaggagatccggatggaattcataaagtatttaaaaagcataatcaactccatgtctgagagcagagacagggaggagatgtcaattatgacctagccagccttcacctgggactgccacatccccagtgaaatcagcatgtttctcggtgcagatctgaaatcacatccagctcctgatgttttcttctccctctgactgcagaggaagtgttcctacctgcaggaaggcacctgtcacacagggcgttcactcagaccatctgtgctctgccctgagttcagttgagaaaatcctattatcaaatttggatttcctggccccagaacttcccaaagacctgtaaaatggagggatttaccacctcacatatgtccagttaaacagtttgtggacttgtaaccgtcgcagcccaatgatacaacagtagtttaa

SEQ ID NO: 144280 - DNA, 1785 bp, Homo sapiens
  Payload ID: 8507
  Gene Symbol: IFT22
  Gene Name: intraflagellar transport 22
  Uniprot ID: Q9H7X7
  ENST ID: ENST00000422177
  CDS Start-End: 86-643
atggaaacgaaagcggccaagtagagctccgtcctgacgcgccgcctcccgtgggctccggccggctaagccgcggcggacaactatgctgaaagccaagatcctcttcgtggggccttgcgagagtggaaaaactgttttggccaactttctgacagaatcttctgacatcactgaatacagcccaacccaaggagtgaggatcctagaatttgagaacccgcatgttaccagcaacaacaaaggcacgggctgtgaattcgagctatgggactgtggtggcgatgctaagtttgagtcctgctggccggccctgatgaaggatgctcatggagtggtgatcgtcttcaatgctgacatcccaagccaccggaaggaaatggagatgtggtattcctgctttgtccaacagccgtccttacaggacacacagtgtatgctaattgcacaccacaaaccaggctctggagatgataaaggaagcctgtctttgtcgccacccttgaacaagctgaagctggtgcactcaaacctggaagatgaccctgaggagatccggatggaattcataaagtatttaaaaagcataatcaactccatgtctgagagcagagacagggaggagatgtcaattatgacctagccagccttcacctgggactgccacatccccagtgaaatcagcatgtttctcggtgcagatctgaaatcacatccagctcctgatgttttcttctccctctgactgcagaggaagtgttcctacctgcaggaaggcacctgtcacacagggcgttcactcagaccatctgtgctctgccctgagttcagttgagaaaatcctattatcaaatttggatttcctggccccagaacttcccaaagacctgtaaaatggagggatttaccacctcacatatgtccagttaaacagtttgtggacttgtaaccgtcgcagcccaatgatacaacagtagtttaatcacgtgtattggcttgaatgtgattttcattccttgattcacccaacaaataccgactggctgagcacctgctgtgtgtgcactgctgttctagctgctgaccatagacagcataaatgaaaaagacagaaattcccaccttcgtggaactctccattttcctaaatgttaggttggtgcaaaactaatcgtggtttttgccatttttaatttttaatggcaaaagccactattacttttgcaccaacctaataggccgattcagaaacttgagtgcaatgtcttggatatgcaaaaaagaaaatcaaaacgcattcttcattctctataagagttctaggcggggcgtggtggctcacacttgtaatcccagcactttgggaggccaaggcaggcggatcacttgaggccaggagttcaagaccagcctggccaacatggcaaaatcccatctctactaaaaatacaaaaattcacagggtgtgttggcacacgcctgtaataccagctactcaggtggctgaggcataagaattgcttgagcctgggaggcagagattgcactgagccgagatcgcgccactatactccagcctgggcaacagacatcctgtctcaaataaattaaattacattaaatgtttaagaagaagtctaaataagtttcatatgctgccctccctcagataatgagggaacctggggtacttaaaatgccaaatgaacgtatacttgatccttattcatagattttgtatttgagaatttgcctactcactaaaatatgtttgtaacccccaaa

SEQ ID NO: 144281 - DNA, 1657 bp, Homo sapiens
  Payload ID: 8507
  Gene Symbol: IFT22
  Gene Name: intraflagellar transport 22
  Uniprot ID: Q9H7X7
  ENST ID: ENST00000517481
  CDS Start-End: 372-698
aagtagagctccgtcctgacgcgccgcctcccgtgggctccggccggctaagccgcggcggacaactatgctgaaagccaagatcctcttcgtggggccttgcgagaccttgattccaaccactgcccggaggaggtagtggaggcgagcccggtgttaatgagccccgaaggcccaagagtggaaaaactgttttggccaactttctgacagaatcttctgacatcactgaatacagcccaacccaaggagtgaggatcctagaatttgagaacccgcatgttaccagcaacaacaaaggcacgggctgtgaattcgagctatgggactgtggtggcgatgctaagtttgagtcctgctggccggccctgatgaaggatgctcatggagtggtgatcgtcttcaatgctgacatcccaagccaccggaaggaaatggagatgtggtattcctgctttgtccaacagccgtccttacaggacacacagtgtatgctaattgcacaccacaaaccaggctctggagatgataaaggaagcctgtctttgtcgccacccttgaacaagctgaagctggtgcactcaaacctggaagatgaccctgaggagatccggatggaattcataaagtatttaaaaagcataatcaactccatgtctgagagcagagacagggaggagatgtcaattatgacctagccagccttcacctgggactgccacatccccagtgaaatcagcatgtttctcggtgcagatctgaaatcacatccagctcctgatgttttcttctccctctgactgcagaggaagtgttcctacctgcaggaaggcacctgtcacacagggcgttcactcagaccatctgtgctctgccctgagttcagttgagaaaatcctattatcaaatttggatttcctggccccagaacttcccaaagacctgtaaaatggagggatttaccacctcacatatgtccagttaaacagtttgtggacttgtaaccgtcgcagcccaatgatacaacagtagtttaatcacgtgtattggcttgaatgtgattttcattccttgattcacccaacaaataccgactggctgagcacctgctgtgtgtgcactgctgttctagctgctgaccatagacagcataaatgaaaaagacagaaattcccaccttcgtggaactctccattttcctaaatgttaggttggtgcaaaactaatcgtggtttttgccatttttaatttttaatggcaaaagccactattacttttgcaccaacctaataggccgattcagaaacttgagtgcaatgtcttggatatgcaaaaaagaaaatcaaaacgcattcttcattctctataagagttctaggcggggcgtggtggctcacacttgtaatcccagcactttgggaggccaaggtgggcggatcatgaggtcaggagatcgagaccatcctgaccaacgtggtgaaaccccatctctactaaaaatagaaaaatcagctgggtgtggtgccgcgtgcctgtaatcccagctacttgggaggctgaggcataagaattgtttgagcccgggagacagaggttgcagtgagccaagattgcgccactgtactccagcttgggcaacagagcaagactccatctc

SEQ ID NO: 144282 - DNA, 917 bp, Homo sapiens
  Payload ID: 8507
  Gene Symbol: IFT22
  Gene Name: intraflagellar transport 22
  Uniprot ID: Q9H7X7
  ENST ID: ENST00000498704
  CDS Start-End: 210-536
gtcctgacgcgccgcctcccgtgggctccggccggctaagccgcggcggacaactatgctgaaagccaagatcctcttcgtggggccttgcgaggatcctagaatttgagaacccgcatgttaccagcaacaacaaaggcacgggctgtgaattcgagctatgggactgtggtggcgatgctaagtttgagtcctgctggccggccctgatgaaggatgctcatggagtggtgatcgtcttcaatgctgacatcccaagccaccggaaggaaatggagatgtggtattcctgctttgtccaacagccgtccttacaggacacacagtgtatgctaattgcacaccacaaaccaggctctggagatgataaaggaagcctgtctttgtcgccacccttgaacaagctgaagctggtgcactcaaacctggaagatgaccctgaggagatccggatggaattcataaagtatttaaaaagcataatcaactccatgtctgagagcagagacagggaggagatgtcaattatgacctagccagccttcacctgggactgccacatccccagtgaaatcagcatgtttctcggtgcagatctgaaatcacatccagctcctgatgttttcttctccctctgactgcagaggaagtgttcctacctgcaggaaggcacctgtcacacagggcgttcactcagaccatctgtgctctgccctgagttcagttgagaaaatcctattatcaaatttggatttcctggccccagaacttcccaaagacctgtaaaatggagggatttaccacctcacatatgtccagttaaacagtttgtggacttgtaaccgtcgcagcccaatgatacaacagtagtttaatcacgtgtattggcttgaatgtgattttcattccttgattca

SEQ ID NO: 144283 - DNA, 2272 bp, Homo sapiens
  Payload ID: 8507
  Gene Symbol: IFT22
  Gene Name: intraflagellar transport 22
  Uniprot ID: Q9H7X7
  ENST ID: ENST00000621899
  CDS Start-End: 179-505
gtcggccctgcgggcctctctccgtcgccatggaaacgaaagcggccaagtagagctccgtcctgacgcgccgcctcccgtgggctccggccggctaagccgcggcggacaactatgctgaaagccaagatcctcttcgtggggccttgcgaggtttgagtcctgctggccggccctgatgaaggatgctcatggagtggtgatcgtcttcaatgctgacatcccaagccaccggaaggaaatggagatgtggtattcctgctttgtccaacagccgtccttacaggacacacagtgtatgctaattgcacaccacaaaccaggctctggagatgataaaggaagcctgtctttgtcgccacccttgaacaagctgaagctggtgcactcaaacctggaagatgaccctgaggagatccggatggaattcataaagtatttaaaaagcataatcaactccatgtctgagagcagagacagggaggagatgtcaattatgacctagccagccttcacctgggactgccacatccccagtgaaatcagcatgtttctcggtgcagatctgaaatcacatccagctcctgatgttttcttctccctctgactgcagaggaagtgttcctacctgcaggaaggcacctgtcacacagggcgttcactcagaccatctgtgctctgccctgagttcagttgagaaaatcctattatcaaatttggatttcctggccccagaacttcccaaagacctgtaaaatggagggatttaccacctcacatatgtccagttaaacagtttgtggacttgtaaccgtcgcagcccaatgatacaacagtagtttaatcacgtgtattggcttgaatgtgattttcattccttgattcacccaacaaataccgactggctgagcacctgctgtgtgtgcactgctgttctagctgctgaccatagacagcataaatgaaaaagacagaaattcccaccttcgtggaactctccattttcctaaatgttaggttggtgcaaaactaatcgtggtttttgccatttttaatttttaatggcaaaagccactattacttttgcaccaacctaataggccgattcagaaacttgagtgcaatgtcttggatatgcaaaaaagaaaatcaaaacgcattcttcattctctataagagttctaggcggggcgtggtggctcacacttgtaatcccagcactttgggaggccaaggtgggcggatcatgaggtcaggagatcgagaccatcctgaccaacgtggtgaaaccccatctctactaaaaatagaaaaatcagctgggtgtggtgccgcgtgcctgtaatcccagctacttgggaggctgaggcataagaattgtttgagcccgggagacagaggttgcagtgagccaagattgcgccactgtactccagcttgggcaacagagcaagactccatctcaaaaaaaaaagagttctagcccaggagcggtggctcacacttgtaatcccagcactttgggatgctaaggcaggcggatcacttgaggccaggagttcaagaccagcctggccaacatggcaaaatcccatctctactaaaaatacaaaaattcacagggtgtgttggcacacgcctgtaataccagctactcaggtggctgaggcataagaattgcttgagcctgggaggcagagattgcactgagccgagatcgcgccactatactccagcctgggcaacagacatcctgtctcaaataaattaaattacattaaatgtttaagaagaagtctaaataagtttcatatgctgccctccctcagataatgagggaacctggggtacttaaaatgccaaatgaacgtatacttgatccttattcatagattttgtatttgagaatttgcctactcactaaaatatgtttgtaacccccaaatcaatactgtggcactttctcagttattcgcagacacacagagacaaaaaatttgaagtgcctggctgggcgtggtggctcacgcctgtaatcccagcactttgggaggccgaggcaggcggatcacaaggtccagagatcgagaccatcctggccaacatggtgaaaccccgtctctactaaaaatacaaaaattagctgggcatggtggggcatgcctgtagtcccagctactcagaagggtgaggcagaattgcctgaacccgcgaggcggagactgcagtgagccgagatcgcaccactgcactccagcctggtgacagagca

SEQ ID NO: 144284 - DNA, 1113 bp, Homo sapiens
  Payload ID: 8508
  Gene Symbol: IFT27
  Gene Name: intraflagellar transport 27
  Uniprot ID: Q9BW83
  ENST ID: ENST00000340630
  CDS Start-End: 447-1004
aatcgagggtcagcgaggaggaggaggaggcggggcaggtgggctatggttgcttggagagtgcatccggcccggtacttgtgatcggaggagagccggatcgtccttccttgaaccctctgggtagggctgtgctgaggggctgggcggggagcacaggccgtgtccgctcgcttgcaccttttcagactgccgtgtcaggcctcgagccgggcccacctggagccctcccctgcccacccgcccccagcgcccgatatccgcccccggcccagaagggccgggctcggtcatccccagtcccgtcgcggccactgacccttgagatcagccctcccctccccaccttcccgtcccaggccagcccagggcccgaagcccacccactcgcgtctctagcagccgctcttgtcctctgggtacggctcgcgggagtgttggttaccatggtgaagctggcagccaaatgcatcctggcagacccagcagtgggcaagaccgccctggcacagatcttccgcagtgatggagcccatttccagaaaagctacaccctgacaacaggaatggatttggtggtgaagacagtgccagttcctgacacgggagacagtgtggaactcttcatttttgactctgctggcaaggagctgttttcggaaatgctggataaattgtgggagagtcccaatgtcttatgtctcgtctatgatgtgaccaatgaagaatccttcaacaactgcagcaagtggctggagaaggctcggtcacaggctccaggcatctctctcccaggtgttttagttgggaacaagacagacctggccggcagacgagcagtggactcagctgaggcccgggcatgggcgctgggccagggcctggaatgttttgaaacatccgtgaaagagatggaaaacttcgaagcccctttccactgccttgccaagcagttccaccagctgtaccgggagaaggtggaggttttccgggccctggcatgacgagctggagcagatcgtgctgcacaaccggagaagacagaattacctctgctcttttaatatataatgatggctttaaataaaattaggagaaaatgtcgaagcagca

SEQ ID NO: 144285 - DNA, 531 bp, Homo sapiens
  Payload ID: 8508
  Gene Symbol: IFT27
  Gene Name: intraflagellar transport 27
  ENST ID: ENST00000430701
  CDS Start-End: 183-531
ggcggggcaggtgggctatggttgcttggagagtgcatccggcccggtacttgtgatcggaggagagccggatcgtccttccttgaaccctctgggccagcccagggcccgaagcccacccactcgcgtctctagcagccgctcttgtcctctgggtacggctcgcgggagtgttggttaccatggtgaagctggcagccaaatgcatcctggcagacccagcagtgggcaagaccgccctggcacagatcttccgcagtgatggagcccatttccagaaaagctacaccctgacaacaggaatggatttggtggtgaagacagtgccagttcctgacacgggagacagtgtggaactcttcatttttgactctgctggcaaggagctgttttcggaaatgctggataaattgtgggagagtcccaatgtcttatgtctcgtctatgatgtgaccaatgaagaatccttcaacaactgcagcaagtggctggagaaggctcggtcacaggctccaggcatctctctcccag

SEQ ID NO: 144286 - DNA, 946 bp, Homo sapiens
  Payload ID: 8508
  Gene Symbol: IFT27
  Gene Name: intraflagellar transport 27
  ENST ID: ENST00000417951
  CDS Start-End: 397-946
tgcttggagagtgcatccggcccggtacttgtgatcggaggagagccggatcgtccttccttgaaccctctgggtagggctgtgctgaggggctgggcggggagcacaggccgtgtccgctcgcttgcaccttttcagactgccgtgtcaggcctcgagccgggcccacctggagccctcccctgcccacccgcccccagcgcccgatatccgcccccggcccagaagggccgggctcggtcatccccagtcccgtcgcggccactgacccttgagatcagccctcccctccccaccttcccgtcccaggccagcccagggcccgaagcccacccactcgcgtctctagcagccgctcttgtcctctgggtacggctcgcgggagtgttggttaccatggtgaagctggcagccaaatgcatcctggcagttcctgtggataaaaggcttagccgtgcagaagtgtgctctggctgttgtgaggtttgcagatcagtctcatggacctgtgccctgcccgcggcctcagaacaagttcccgtgagaggagacccagcagtgggcaagaccgccctggcacagatcttccgcagtgatggagcccatttccagaaaagctacaccctgacaacaggaatggatttggtggtgaagacagtgccagttcctgacacgggagacagtgtggaactcttcatttttgactctgctggcaaggagctgttttcggaaatgctggataaattgtgggagagtcccaatgtcttatgtctcgtctatgatgtgaccaatgaagaatccttcaacaactgcagcaagtggctggagaaggctcggtcacaggctccaggcatctctctcccaggtgttttagttgggaacaagacagacctggccggcagacgagcagtggactcagctgaggcccgggcatgggcgctgggcc

SEQ ID NO: 144287 - DNA, 1095 bp, Homo sapiens
  Payload ID: 8508
  Gene Symbol: IFT27
  Gene Name: intraflagellar transport 27
  Uniprot ID: Q9BW83
  ENST ID: ENST00000433985
  CDS Start-End: 427-987
gaggaggaggcggggcaggtgggctatggttgcttggagagtgcatccggcccggtacttgtgatcggaggagagccggatcgtccttccttgaaccctctgggtagggctgtgctgaggggctgggcggggagcacaggccgtgtccgctcgcttgcaccttttcagactgccgtgtcaggcctcgagccgggcccacctggagccctcccctgcccacccgcccccagcgcccgatatccgcccccggcccagaagggccgggctcggtcatccccagtcccgtcgcggccactgacccttgagatcagccctcccctccccaccttcccgtcccaggccagcccagggcccgaagcccacccactcgcgtctctagcagccgctcttgtcctctgggtacggctcgcgggagtgttggttaccatggtgaagctggcagccaaatgcatcctggcaggagacccagcagtgggcaagaccgccctggcacagatcttccgcagtgatggagcccatttccagaaaagctacaccctgacaacaggaatggatttggtggtgaagacagtgccagttcctgacacgggagacagtgtggaactcttcatttttgactctgctggcaaggagctgttttcggaaatgctggataaattgtgggagagtcccaatgtcttatgtctcgtctatgatgtgaccaatgaagaatccttcaacaactgcagcaagtggctggagaaggctcggtcacaggctccaggcatctctctcccaggtgttttagttgggaacaagacagacctggccggcagacgagcagtggactcagctgaggcccgggcatgggcgctgggccagggcctggaatgttttgaaacatccgtgaaagagatggaaaacttcgaagcccctttccactgccttgccaagcagttccaccagctgtaccgggagaaggtggaggttttccgggccctggcatgacgagctggagcagatcgtgctgcacaaccggagaagacagaattacctctgctcttttaatatataatgatggctttaaataaaattaggagaaaatgtcgaagcagc

SEQ ID NO: 144288 - DNA, 813 bp, Homo sapiens
  Payload ID: 8508
  Gene Symbol: IFT27
  Gene Name: intraflagellar transport 27
  ENST ID: ENST00000440696
  CDS Start-End: 662-813
gaggagagggagataaagccagtaggtgagagatgagcttggaggaggtgactgctattgcagatagaattggtggagaggcccctgggaagaagaatccttgggtcacagacaggtattctgcgatggagatggagcatagcatttggaaagagatttcagaatgatgaacacagcctcagacttcttgcttcccacaaatgcagagacccttccaccccccacgccccacacaaaaaagtattcaggtggaagctgtcaacccaggttgggtcagttggacaggtgactctgcctgtcagtgccagtcacacttctttaccttcaagacttcaaagtaaattccagtttggaagtgacagcttttccccatagggcgtgtttcagtggaagagcgtcagttccgtttccagggccccaaagccctctgtaagttctgttaccttctgggtcagttcctgtggataaaaggcttagccgtgcagaagtgtgctctggctgttgtgaggtttgcagatcagtctcatggacctgtgccctgcccgcggcctcagaacaagttcccgtgagaggagacccagcagtgggcaagaccgccctggcacagatcttccgcagtgatggagcccatttccagaaaagctacaccctgacaacaggaatggatttggtggtgaagacagtgccagttcctgacacgggagacagtgtggaactcttcatttttgactctgctggcaaggagctgttttcggaaatgctggataaattgtgggagagtcccaatgtcttatgtctcgtctatgatgtgac

SEQ ID NO: 144289 - DNA, 660 bp, Homo sapiens
  Payload ID: 8508
  Gene Symbol: IFT27
  Gene Name: intraflagellar transport 27
  ENST ID: ENST00000415653
  CDS Start-End: 1-388
cagtgatggagcccatttccagaaaagctacaccctgacaacaggaatggatttggtggtgaagacagtgccagttcctgacacgggagacagtgtggaactcttcatttttgactctgctggcaaggagctgttttcggaaatgctggataaattgtgggagagtcccaatgtcttatgtctcgtctatgatgtgaccaatgaagaatccttcaacaactgcagcaagtggctggagaaggctcggtcacaggctccaggcatctctctcccaggtgttttagttgggaacaagacagacctggccggcagacgagcagtggactcagctgaggcccgggcatgggcgctgggccagggcctggaatgttttgaaacatccgtgtgaccatcctgcctacccaaaggaggtccctacaaacaagtgcaagaacaatccgcgctgatcactgccctcccagaaagagatggaaaacttcgaagcccctttccactgccttgccaagcagttccaccagctgtaccgggagaaggtggaggttttccgggccctggcatgacgagctggagcagatcgtgctgcacaaccggagaagacagaattacctctgctcttttaatatataatgatggctttaaataaaattaggagaaaatgtc

SEQ ID NO: 144290 - DNA, 816 bp, Homo sapiens
  Payload ID: 8509
  Gene Symbol: IFT43
  Gene Name: intraflagellar transport 43
  Uniprot ID: Q96FT9
  ENST ID: ENST00000238628
  CDS Start-End: 6-647
cggagatggaggatttgctcgacttggacgaggagcttcgctacagcttggctacctccagggccaagatgggtcgccgagctcaacaggagtcagcgcaggccgagaatcacctcaatggcaagaattcctctttgactctgactggagagacttcctctgctaaattacctcgctgccgacagggaggctgggcaggtgattccgtgaaggcttcgaacggtacccaaacaggcaaacaacagctggatctgaacgcatgctatcacaaaacgcatcacagagatttggggctggcttcattggaagaggcagatattcctatcattccggatctggaggaagtacaggaagaagactttgttttgcaggtggcagcccctcccagcatccagataaagcgggtgatgacctaccgtgacctggacaatgacctcatgaagtactcagccattcagacactggatggggagatcgacctgaaactcctcaccaaagtgctcgcgccggagcacgaagtccgggaggatgatgtcggctgggactgggaccatctgttcactgaggtgtcctcagaggtcctcactgagtgggacccactgcagacggagaaggaggaccctgcggggcaggccaggcacacctgagcccgtcacccatgctctagacatgaagaaatgcaatgagcttaaagctaaagaagcttgtaagcagctccgaatttttacctggaatattttgtaataaaaatatttatattcagtcaaccacattggataattcaattgcaataaattgcttattctgtgccatctc

SEQ ID NO: 144291 - DNA, 833 bp, Homo sapiens
  Payload ID: 8509
  Gene Symbol: IFT43
  Gene Name: intraflagellar transport 43
  Uniprot ID: Q96FT9
  ENST ID: ENST00000314067
  CDS Start-End: 35-661
ggtttccaggaagtgacgtcaggcggccgcggagatggaggatttgctcgacttggacgaggagcttcgctacagcttggctacctccagggccaagatgggtcgccgagctcaacaggagtcagcgcaggccgagaatcacctcaatggcaagaattcctctttgactctgactggagagacttcctctgctaaattacctcgctgccgacagggaggctgggcaggtgattccgtgaaggcttcgaagtttaggaggaaggcttctgaagaaatagaagatttccgcctcagaccacagagcctgaatggatcagattatggaggagatattcctatcattccggatctggaggaagtacaggaagaagactttgttttgcaggtggcagcccctcccagcatccagataaagcgggtgatgacctaccgtgacctggacaatgacctcatgaagtactcagccattcagacactggatggggagatcgacctgaaactcctcaccaaagtgctcgcgccggagcacgaagtccgggaggatgatgtcggctgggactgggaccatctgttcactgaggtgtcctcagaggtcctcactgagtgggacccactgcagacggagaaggaggaccctgcggggcaggccaggcacacctgagcccgtcacccatgctctagacatgaagaaatgcaatgagcttaaagctaaagaagcttgtaagcagctccgaatttttacctggaatattttgtaataaaaatatttatattcagtcaaccacattggataattcaattgcaataaattgcttattctgtgccatctcctc

SEQ ID NO: 144292 - DNA, 1014 bp, Homo sapiens
  Payload ID: 8509
  Gene Symbol: IFT43
  Gene Name: intraflagellar transport 43
  Uniprot ID: Q96FT9
  ENST ID: ENST00000542766
  CDS Start-End: 18-644
gtcaggcggccgcggagatggaggatttgctcgacttggacgaggagcttcgctacagcttggctacctccagggccaagatgggtcgccgagctcaacaggagtcagcgcaggccgagaatcacctcaatggcaagaattcctctttgactctgactggagagacttcctctgctaaattacctcgctgccgacagggaggctgggcaggtgattccgtgaaggcttcgaagtttaggaggaaggcttctgaagaaatagaagatttccgcctcagaccacagagcctgaatggatcagattatggaggagatattcctatcattccggatctggaggaagtacaggaagaagactttgttttgcaggtggcagcccctcccagcatccagataaagcgggtgatgacctaccgtgacctggacaatgacctcatgaagtactcagccattcagacactggatggggagatcgacctgaaactcctcaccaaagtgctcgcgccggagcacgaagtccgggaggatgatgtcggctgggactgggaccatctgttcactgaggtgtcctcagaggtcctcactgagtgggacccactgcagacggagaaggaggaccctgcggggcaggccaggcacacctgagcccgtcacccatgctctagacatgaagaaatgcaatgagcttaaagctaaagaagctttctcttcttggaaaatgtatcacaagtgaaggagaacagcttttaaaccagctgataggaactcagaactcgcggccttgttgcggagcatgtgggagagttcgattcaggcggagaaggagtgggcactcctactgaaagctgttcacttctcgggaggtttcaaacagttgcctgctggggttctggggcggggcctcccttcccgtgggtgctctgggccctttgtgaccttagtgacgcagcactgccacctgcatcataggcttccaggcagctgcagcggagggaggaggcggcgggagggataa

SEQ ID NO: 144293 - DNA, 848 bp, Homo sapiens
  Payload ID: 8509
  Gene Symbol: IFT43
  Gene Name: intraflagellar transport 43
  Uniprot ID: Q96FT9
  ENST ID: ENST00000556742
  CDS Start-End: 4-345
gagatggaggatttgctcgacttggacgaggagcttcgctacagcttggctacctccagggccaagatgggtcgccgagctcaacaggagtcagcgcaggccgagaatcacctcaatggcaagaattcctctttgactctgactggagagacttcctctgctaaattacctcgctgccgacagggaggctgggcaggtgattccgtgaaggcttcgaagtttaggaggaaggcttctgaagaaatagaagagtacgtttccagtattcttattcttatggtatcctatgttgatcttggtcaacagtgcagtcttggtggtcatgatctgttccacctatgttgaacactgtgttagaagtctggggctagaattattgatgcctgctgaatccaaggtttggttaatcccgcttcctcaactgaaggtctggaccctggcattgatgcccatgtcctatctcccactgtgtggttttagaattatatgtccaggtatcagggtactggcccatgccttctgcattattgatatagatgggcagaagcaataccagcttctaagccttgccttctcataagacttatatcagaaaagaaagaagttttctagataaaggtgctgtgaaggtagggccacccagtttcctactcccaggggcggaagctgcattcatgtcatagcctctgtgatgctgtcctctggaatagtgcatcgcacagcctgtgcaaccacacacggcacacccagtggcctaattaggtttgactaagttgacagagaaaaacaggttcagggacattttcatctaggagaaagaatggatacaataaacatttgggatgttc

SEQ ID NO: 144294 - DNA, 460 bp, Homo sapiens
  Payload ID: 8509
  Gene Symbol: IFT43
  Gene Name: intraflagellar transport 43
  ENST ID: ENST00000555370
  CDS Start-End: 6-104
cggagatggaggatttgctcgacttggacgaggagcttcgctacagcttggctacctccagccccgagtgcgaacttccccagaacagatcgatcacagggtgataggggagccccggccggggtcgcactcgctcccatcctagagtttttcctttgggacacctcgtcgcagaagttcctgcaaaagccgcactgttttatgcatggaagggagagggccaagatgggtcgccgagctcaacaggagtcagcgcaggccgagaatcacctcaatggcaagaattcctctttgactctgactggagagacttcctctgctaaattacctcgctgccgacagggaggctgggcaggtgattccgtgaaggcttcgaagtttaggaggaaggcttctgaagaaatagaagatttccgcctcagaccacagagcctgaatggatcagattatggaggaggta

SEQ ID NO: 144295 - DNA, 1819 bp, Homo sapiens
  Payload ID: 8510
  Gene Symbol: IFT46
  Gene Name: intraflagellar transport 46
  Uniprot ID: Q9NQC8
  ENST ID: ENST00000264020
  CDS Start-End: 379-1446
gtgactccttgatcttcttcctgcgtggagagccttcgcgggtgaggcttaacgcgcaggaggtctcacgagagtggaagcaactctcgcgaattttaaaatttatctttttgcctagcgactgacaacaggctggttgcttggcgtggaatcctaaagtggcctggctttgagactggagtgagaccccagccctaggctggggttctttccattatagaggagacggattcagaagggctacagaccaaggttgttgaaaaccagacatatgatgagcgtctagagattaacgactccgaagaggttgcaagtatttatactccaaccccaagacaccaaggacttcctcgttctgcccatcttcctaacaaggctatggctgataacagcagtgatgagtgtgaagaggaaaataacaaggtcctaagggagggcatgccacaggctccaggccacagaggcaaagacatggaccctgttccacctgcccctgcaagtctcaagtgccaccagaccccttctcatgtacttgagagggtgggatggtacagagagagccagaagcacagaaaggagaagaagaagacctcacagttgacacctcaacggggctttagtgaaaatgaggatgacgatgatgatgatgatgattcatctgaaactgattctgattctgatgatgatgatgaagagcatggagcccctctggaaggggcctatgaccctgcagactatgagcatttgccagtttctgctgaaattaaggaactcttccagtacatcagtaggtacacacctcagttgattgacctggaccacaaactgaagcctttcattcctgattttatcccagctgtcggggatattgatgcattcttaaaggtcccacgtcctgatggaaagcctgacaaccttggcctattggtattggatgaaccttctacaaagcagtcagaccctacggtgctctcactctggttaacagagaattctaagcagcacaacatcacacaacatatgaaagtaaaaagcctagaagatgcagaaaagaatcccaaagccattgacacgtggattgagagcatctctgaattacaccgttctaagccccctgcgactgtgcactacaccaggcccatgcccgacattgacacgctgatgcaggaatggtccccggagtttgaagagcttttgggcaaggtaagcctgcccacggcagagattgattgcagcctggcagagtacattgacatgatctgtgccattctagacatccctgtctacaagagtcggatccagtccctccatctgctcttttccctctactcagaattcaagaactcacagcattttaaagctctcgctgaaggcaagaaagcattcactccttcatccaattccacctcccaagctggagacatggagacattaaccttcagctgagacacttcccaagctgctgtttcaaggctgagctggcccctctgccccagctgagatggacagatcgttgtcagctacttgatgtccttgcccatgccacagcttggctcaggggcagtgcatgtcctgctgccctctctgccagagggcacagaacatgtttgtttaatgaacctgcctgcctcagattgctgtccccggggagttaatgcatctacaccactgtggggatttgagttataagaattggaatttctgagatcccatggaggttagattgggaggaaagcttaaaagatgtcctttttgtgagagggatggaattgttttctttcattcgtaaagttagtgagtaaagattttataaatcaaa

SEQ ID NO: 144296 - DNA, 1722 bp, Homo sapiens
  Payload ID: 8510
  Gene Symbol: IFT46
  Gene Name: intraflagellar transport 46
  Uniprot ID: Q9NQC8
  ENST ID: ENST00000264021
  CDS Start-End: 420-1334
tagacaaacaggcgacttggccgcccagagaggctttatccgtgactccttgatcttcttcctgcgtggagagccttcgcgggtgaggcttaacgcgcaggaggtctcacgagagtggaagcaactctcgcgaattttaaaatttatctttttgcctagcgactgacaacaggctggttgcttggcgtggaatcctaaagtggcctggctttgagactggagtgagaccccagccctaggctggggttctttccattatagaggagacggattcagaagggctacagaccaaggttgttgaaaaccagacatatgatgagcgtctagagattaacgactccgaagaggttgcaagtatttatactccaaccccaagacaccaaggacttcctcgttctgcccatcttcctaacaaggctatggctgataacagcagtgatgagtgtgaagaggaaaataacaaggagaagaagaagacctcacagttgacacctcaacggggctttagtgaaaatgaggatgacgatgatgatgatgatgattcatctgaaactgattctgattctgatgatgatgatgaagagcatggagcccctctggaaggggcctatgaccctgcagactatgagcatttgccagtttctgctgaaattaaggaactcttccagtacatcagtaggtacacacctcagttgattgacctggaccacaaactgaagcctttcattcctgattttatcccagctgtcggggatattgatgcattcttaaaggtcccacgtcctgatggaaagcctgacaaccttggcctattggtattggatgaaccttctacaaagcagtcagaccctacggtgctctcactctggttaacagagaattctaagcagcacaacatcacacaacatatgaaagtaaaaagcctagaagatgcagaaaagaatcccaaagccattgacacgtggattgagagcatctctgaattacaccgttctaagccccctgcgactgtgcactacaccaggcccatgcccgacattgacacgctgatgcaggaatggtccccggagtttgaagagcttttgggcaaggtaagcctgcccacggcagagattgattgcagcctggcagagtacattgacatgatctgtgccattctagacatccctgtctacaagagtcggatccagtccctccatctgctcttttccctctactcagaattcaagaactcacagcattttaaagctctcgctgaaggcaagaaagcattcactccttcatccaattccacctcccaagctggagacatggagacattaaccttcagctgagacacttcccaagctgctgtttcaaggctgagctggcccctctgccccagctgagatggacagatcgttgtcagctacttgatgtccttgcccatgccacagcttggctcaggggcagtgcatgtcctgctgccctctctgccagagggcacagaacatgtttgtttaatgaacctgcctgcctcagattgctgtccccggggagttaatgcatctacaccactgtggggatttgagttataagaattggaatttctgagatcccatggaggttagattgggaggaaagcttaaaagatgtcctttttgtgagagggatggaattgttttctttcattcgtaaagttagtgagtaaagattttataaatcaaatgctctattatattg

SEQ ID NO: 144297 - DNA, 1566 bp, Homo sapiens
  Payload ID: 8510
  Gene Symbol: IFT46
  Gene Name: intraflagellar transport 46
  ENST ID: ENST00000530872
  CDS Start-End: 261-1154
cgactgacaacaggctggttgcttggcgtggaatcctaaagtggcctggctttgagactggagtgagaccccagccctaggctggggttctttccattatagaggagacggattcagaagggctacagaccaaggttgttgaaaaccagacatatgatgagcgtctagagattaacgactccgaagaggttgcaagtatttatactccaaccccaagacaccaaggacttcctcgttctgcccatcttcctaacaaggctatggctgataacagcagtgatgagtgtgaagaggaaaataacaaggtcctaagggagggcatgccacaggctccaggccacagaggcaaagacatggaccctgttccacctgcccctgcaagtctcaagtgccaccagaccccttctcatgtacttgagagggtgggatggtacagagagagccagaagcacagaaaggagaagaagaagacctcacagttgacacctcaacggggctttagtgaaaatgaggatgacgatgatgatgatgatgattcatctgaaactgattctgattctgatgatgatgatgaagagcatggagcccctctggaaggggcctatgaccctgcagactatgagcatttgccagtttctgctgaaattaaggaactcttccagtacatcagtaggtacacacctcagttgattgacctggaccacaaactgaagcctttcattcctgattttatcccagctgtcggggatattgatgcattcttaaaggtcccacgtcctgatggaaagcctgacaaccttggcctattggtattggatgaaccttctacaaagcagtcagaccctacggtgctctcactctggttaacagagaattctaagcagcacaacatcacacaacatatgaaagtaaaaagcctagaagatgcagaaaagaatcccaaagccattgacacgtggattgagagcatctctgaattacaccgttctaagccccctgcgactgtgcactacaccaggcccatgcccgacattgacacgctgatgcaggaatggtccccggagtttgaagagcttttgggcaaggtaagcctgcccacggcagagattgattgcagcctggcagagtacattgacatgatctgtgcattttaaagctctcgctgaaggcaagaaagcattcactccttcatccaattccacctcccaagctggagacatggagacattaaccttcagctgagacacttcccaagctgctgtttcaaggctgagctggcccctctgccccagctgagatggacagatcgttgtcagctacttgatgtccttgcccatgccacagcttggctcaggggcagtgcatgtcctgctgccctctctgccagagggcacagaacatgtttgtttaatgaacctgcctgcctcagattgctgtccccggggagttaatgcatctacaccactgtggggatttgagttataagaattggaatttctgagatcccatggaggttagattgggaggaaagcttaaaagatgtcctttttgtgagagggatggaat

SEQ ID NO: 144298 - DNA, 774 bp, Homo sapiens
  Payload ID: 8510
  Gene Symbol: IFT46
  Gene Name: intraflagellar transport 46
  ENST ID: ENST00000534114
  CDS Start-End: 298-774
cgggcacgacgacagatggactggagtcagctccatcggatctccaggagaccgggcacaggaggccacactgctccccgagcccggagcaaaagcactctgccctagaccctcagggcggggctcctccggcccctgccccaggcccgccgacaaggagagacgaccaaggttgttgaaaaccagacatatgatgagcgtctagagattaacgactccgaagaggttgcaagtatttatactccaaccccaagacaccaaggacttcctcgttctgcccatcttcctaacaaggctatggctgataacagcagtgatgagtgtgaagaggaaaataacaaggtcctaagggagggcatgccacaggctccaggccacagaggcaaagacatggaccctgttccacctgcccctgcaagtctcaagtgccaccagaccccttctcatgtacttgagagggtgggatggtacagagagagccagaagcacagaaaggagaagaagaagacctcacagttgacacctcaacggggctttagtgaaaatgaggatgacgatgatgatgatgatgattcatctgaaactgattctgattctgatgatgatgatgaagagcatggagcccctctggaaggggcctatgaccctgcagactatgagcatttgccagtttctgctgaaattaaggaactcttccagtacatcagtaggtacacacctcagttgattgacctggaccacaaactgaagcctttcattcctgattttatccca

SEQ ID NO: 144299 - DNA, 776 bp, Homo sapiens
  Payload ID: 8510
  Gene Symbol: IFT46
  Gene Name: intraflagellar transport 46
  ENST ID: ENST00000534156
  CDS Start-End: 193-776
ctttattcccccaagaaacttaggtgggatcctatctgcaagataagggtgaaagtggagaccaaggttgttgaaaaccagacatatgatgagcgtctagagattaacgactccgaagaggttgcaagtatttatactccaaccccaagacaccaaggacttcctcgttctgcccatcttcctaacaaggctatggctgataacagcagtgatgagtgtgaagaggaaaataacaaggagaagaagaagacctcacagttgacacctcaacggggctttagtgaaaatgaggatgacgatgatgatgatgatgattcatctgaaactgattctgattctgatgatgatgatgaagagcatggagcccctctggaaggggcctatgaccctgcagactatgagcatttgccagtttctgctgaaattaaggaactcttccagtacatcagtaggtacacacctcagttgattgacctggaccacaaactgaagcctttcattcctgattttatcccagctgtcggggatattgatgcattcttaaaggtcccacgtcctgatggaaagcctgacaaccttggcctattggtattggatgaaccttctacaaagcagtcagaccctacggtgctctcactctggttaacagagaattctaagcagcacaacatcacacaacatatgaaagtaaaaagcctagaagatgcagaaaagaatcccaaagccattgacacgtggattgagagcatctctgaattacaccgttctaagccccc

SEQ ID NO: 144300 - DNA, 830 bp, Homo sapiens
  Payload ID: 8510
  Gene Symbol: IFT46
  Gene Name: intraflagellar transport 46
  ENST ID: ENST00000528378
  CDS Start-End: 508-830
gattaacagaaggaccagaacctccggagacaggcccagcctgctgagcctaagcgccagggaaccggcgggacagcatcagttccgaggtccgcagcctgggacccgcaccaccaccacgaagttctcgcagagcaaaaacgccgggccgtctcaggggcaggtcccagcaaacgagggagtccagctggttggggggtggtgcggaagcgggcacgacgacagatggactggagtcagctccatcggatctccaggagaccgggcacaggaggccacactgctccccgagcccggagcaaaagcactctgccctagaccctcagggcggggctcctccggcccctgccccaggcccgccgacaaggagagacgaccaaggttgttgaaaaccagacatatgatgagcgtctagagattaacgactccgaagaggttgcaagtatttatactccaaccccaagacaccaaggacttcctcgttctgcccatcttcctaacaaggctatggctgataacagcagtgatgagtgtgaagaggaaaataacaaggagaagaagaagacctcacagttgacacctcaacggggctttagtgaaaatgaggatgacgatgatgatgatgatgattcatctgaaactgattctgattctgatgatgatgatgaagagcatggagcccctctggaaggggcctatgaccctgcagactatgagcatttgccagtttctgctgaaattaaggaactcttccagtacatcagtaggtacacacctcagttgattgacctggaccacaaactgaagcctttcattcctgattttatccc

SEQ ID NO: 144301 - DNA, 553 bp, Homo sapiens
  Payload ID: 8510
  Gene Symbol: IFT46
  Gene Name: intraflagellar transport 46
  ENST ID: ENST00000533918
  CDS Start-End: 369-553
acaggaggccacactgctccccgagcccggagcaaaagcactctgccctagaccctcagggcggggctcctccggcccctgccccaggcccgccgacaaggagagacgcgactgacaacaggctggttgcttggcgtggaatcctaaagtggcctggctttgagactggagtgagaccccagccctaggctggggttctttccattatagaggagacggattcagaagggctacagaccaaggttgttgaaaaccagacatatgatgagcgtctagagattaacgactccgaagaggttgcaagtatttatactccaaccccaagacaccaaggacttcctcgttctgcccatcttcctaacaaggctatggctgataacagcagtgatgagtgtgaagaggaaaataacaaggagaagaagaagacctcacagttgacacctcaacggggctttagtgaaaatgaggatgacgatgatgatgatgatgattcatctgaaactgattctgattctgatgatgatgatgaagagcatggagcccctctggaagg

SEQ ID NO: 144302 - DNA, 1182 bp, Homo sapiens
  Payload ID: 8510
  Gene Symbol: IFT46
  Gene Name: intraflagellar transport 46
  ENST ID: ENST00000531939
  CDS Start-End: 594-1182
acaggctctcactctgttgcccgggctggagtgcagcagcatgaacactggacactgctcactgcagcctcgaactcctgggtttaagcagacctcctgcgtcagcctcccgagtagctgggaccacaggcgcatggcatcacacccagctaattttttttctttttttttttttgtagatgggatcttgccatattgtccagtctaggctcaaactcctgggctcaagtgatcctcctgcctccccttcccaaagtgttgggattataggcatgagccactgcccctggccagagtttatattatttatgtaatggcagataatttgaatagtataatgtctaacccaatgccttaagcacagtaatgtttagtaaatatatcttgaattgaactggcagagccatgactagaattcagtctcctgtctctttagccagatgttccaataaaccttgttttataaaatggttagagcataaaatattaaaaactaaaaaatacttgtttttaaaaatcattttaacaataatctaaaggaaaaactttttttctaaggacttcctcgttctgcccatcttcctaacaaggctatggctgataacagcagtgatgagtgtgaagaggaaaataacaaggagaagaagaagacctcacagttgacacctcaacggggctttagtgaaaatgaggatgacgatgatgatgatgatgattcatctgaaactgattctgattctgatgatgatgatgaagagcatggagcccctctggaaggggcctatgaccctgcagactatgagcatttgccagtttctgctgaaattaaggaactcttccagtacatcagtaggtacacacctcagttgattgacctggaccacaaactgaagcctttcattcctgattttatcccagctgtcggggatattgatgcattcttaaaggtcccacgtcctgatggaaagcctgacaaccttggcctattggtattggatgaaccttctacaaagcagtcagaccctacggtgctctcactctggttaacagagaattctaagcagcacaacatcacacaacatatgaaagtaaaaagcctagaagatgcagaaaagaatcccaaagccattgacacgtggattgagagcatctctgaattacaccgttctaagccccctgcga

SEQ ID NO: 144303 - DNA, 1757 bp, Homo sapiens
  Payload ID: 8511
  Gene Symbol: IFT52
  Gene Name: intraflagellar transport 52
  Uniprot ID: Q9Y366
  ENST ID: ENST00000373030
  CDS Start-End: 131-1444
agcgctgcgtcctgggccacgcctcccggcgcaccgacgcgcctctccggttactaagcggccttggatacctggccgcgggatgctgggcggcgtcaggtgagcggtggtcgctgggcctcaggtaaccatggagaaagagctgcggagcaccattcttttcaatgcctacaaaaaggagatatttaccaccaacaatggctacaaatccatgcagaaaaaacttcggagtaattggaagattcagagcttaaaagatgaaatcacatctgagaagttaaatggagtgaaactgtggattacagctgggccaagggaaaaatttactgcagctgagtttgaaatcctgaagaaatatcttgacactggtggagatgtctttgtgatgctaggagaaggtggagaatccagatttgacaccaatattaactttttactagaagaatatggaatcatggttaataatgatgctgtggttagaaatgtatatcacaaatatttccatcctaaagaagctctagtttccagtggagtcttgaacagggaaattagccgagctgcaggaaaggctgtgcctgggatcattgatgaggaaagcagtggaaacaatgcccaggctctcacctttgtgtatccttttggtgccacattgagtgtcatgaaaccagcagtggcggttctgtctacaggttctgtctgcttcccacttaacagacccattttggctttctatcactcaaagaaccaaggtgggaagctggcagtgcttggttcatgtcacatgttcagtgatcaatatttggacaaagaagaaaacagcaaaatcatggatgttgttttccagtggctcacgacaggagacatccacctaaaccagattgatgctgaggacccagagatttctgactacatgatgctgccctacacagccaccctatcaaagcggaatcgagagtgtctccaggagagtgatgagatcccaagggactttaccaccctcttcgacctgtccatcttccagctggataccacctccttccacagcgtcatcgaggctcacgagcagctaaatgtgaaacatgaaccactccagctcatccagcctcagtttgagacgccgctgccaacccttcagcctgcggtttttcctcccagtttccgggagttaccacctcctcctctggagctatttgatttagatgaaacgttctcctctgagaaggcacggctggctcagattaccaataagtgtactgaagaagacctggaattttatgtcaggaagtgtggtgatattcttggagtaaccagtaaactaccaaaggaccaacaggatgccaaacatatccttgagcacgtcttcttccaagtggtggagttcaagaaattgaaccaggaacatgacatcgatacaagtgaaacagcattccagaacaatttctgaagaccatgcctcttgaagctttttctgcctcctgattctctctttgtaaactattttcaaattgtttttcaactccttatcaaaattgtttatacactctttcctccatgagctctggaaggtatatgcatcttctgtaatactcagataggtataagatttttcacaaaatccttatgtaagatacattccatttttaaaaattaaatgtatggttgcatctgtctttttataccctatgaaacagtcttgatttttttttctcaaccccagttctggatttgagtcttttatcaaagacataattaactct

SEQ ID NO: 144304 - DNA, 1599 bp, Homo sapiens
  Payload ID: 8511
  Gene Symbol: IFT52
  Gene Name: intraflagellar transport 52
  Uniprot ID: Q9Y366
  ENST ID: ENST00000373039
  CDS Start-End: 47-1360
ggccttggatacctggccgcgggatgctgggcggcgtcaggtaaccatggagaaagagctgcggagcaccattcttttcaatgcctacaaaaaggagatatttaccaccaacaatggctacaaatccatgcagaaaaaacttcggagtaattggaagattcagagcttaaaagatgaaatcacatctgagaagttaaatggagtgaaactgtggattacagctgggccaagggaaaaatttactgcagctgagtttgaaatcctgaagaaatatcttgacactggtggagatgtctttgtgatgctaggagaaggtggagaatccagatttgacaccaatattaactttttactagaagaatatggaatcatggttaataatgatgctgtggttagaaatgtatatcacaaatatttccatcctaaagaagctctagtttccagtggagtcttgaacagggaaattagccgagctgcaggaaaggctgtgcctgggatcattgatgaggaaagcagtggaaacaatgcccaggctctcacctttgtgtatccttttggtgccacattgagtgtcatgaaaccagcagtggcggttctgtctacaggttctgtctgcttcccacttaacagacccattttggctttctatcactcaaagaaccaaggtgggaagctggcagtgcttggttcatgtcacatgttcagtgatcaatatttggacaaagaagaaaacagcaaaatcatggatgttgttttccagtggctcacgacaggagacatccacctaaaccagattgatgctgaggacccagagatttctgactacatgatgctgccctacacagccaccctatcaaagcggaatcgagagtgtctccaggagagtgatgagatcccaagggactttaccaccctcttcgacctgtccatcttccagctggataccacctccttccacagcgtcatcgaggctcacgagcagctaaatgtgaaacatgaaccactccagctcatccagcctcagtttgagacgccgctgccaacccttcagcctgcggtttttcctcccagtttccgggagttaccacctcctcctctggagctatttgatttagatgaaacgttctcctctgagaaggcacggctggctcagattaccaataagtgtactgaagaagacctggaattttatgtcaggaagtgtggtgatattcttggagtaaccagtaaactaccaaaggaccaacaggatgccaaacatatccttgagcacgtcttcttccaagtggtggagttcaagaaattgaaccaggaacatgacatcgatacaagtgaaacagcattccagaacaatttctgaagaccatgcctcttgaagctttttctgcctcctgattctctctttgtaaactattttcaaattgtttttcaactccttatcaaaattgtttatacactctttcctccatgagctctggaaggtatatgcatcttctgtaatactcagataggtataagatttttcacaaaatccttatgtaagatacattccatttttaaaaattaaatgtatggttgcatctgtctttttatacccta

SEQ ID NO: 144305 - DNA, 3203 bp, Homo sapiens
  Payload ID: 8512
  Gene Symbol: IFT57
  Gene Name: intraflagellar transport 57
  Uniprot ID: Q9NWB7
  ENST ID: ENST00000264538
  CDS Start-End: 249-1538
atgaggggcggggctgcttcccgaccaccatttccacagaggcagggcaagaagagggccacaggtgacgtcattcaggaaagccgccctgattggagggaaggaggcggagtctagtttccctggtgacggattgtccggtggtcgcctggtaaccggtcgtggctgtactggcggcggcagggctggcggcttaggccgcagaggtctgtgggcctgagcccacgctggactctgtccgttctgcgatgactgctgctctggccgtcgtcacgacgtcgggtttggaagatggggtgcctaggtcccgtggcgaagggaccggggaagtggtcttggagcgggggcccggcgcggcctaccacatgttcgtggtgatggaggacttggtggagaagctgaagctgctccgctacgaggaggagttcctccggaagagcaacctgaaggccccgtccagacactattttgcactgcctaccaaccctggcgaacagttctacatgttttgtactcttgctgcttggttgattaataaagcgggacgtccctttgagcagcctcaagaatatgatgaccctaatgcaacaatatctaacatactatccgagcttcggtcatttggaagaactgcagattttcctccttcaaaattaaagtcaggttatggagaacatgtatgctatgttcttgattgcttcgctgaagaagcattgaaatatattggtttcacctggaaaaggccaatatacccagtagaagaattagaagaagaaagcgttgcagaagatgatgcagaattaacattaaataaagtggatgaagaatttgtggaagaagagacagataatgaagaaaactttattgatctcaacgttttaaaggcccagacatatcacttggatatgaacgagactgccaaacaagaagatattttggaatccacaacagatgctgcagaatggagcctagaagtggaacgtgtactaccgcaactgaaagtcacgattaggactgacaataaggattggagaatccatgttgaccaaatgcaccagcacagaagtggaattgaatctgctctaaaggagaccaagggatttttggacaaactccataatgaaattactaggactttggaaaagatcagcagccgagaaaagtacatcaacaatcagcttgagaatttggttcaagaatatcgtgcagctcaagcccagctgagtgaggcaaaggagcgataccagcagggaaatggaggagtgacggaaagaaccagactcctctctgaggttatggaagaattagaaaaggtaaaacaagaaatggaagaaaagggcagcagcatgactgatggtgctcctttggtgaagattaaacagagcttaacaaaactgaagcaagaaactgtagagatggacattagaattggcattgtggaacacacactactccaatcaaagctgaaggagaagtccaacatgactaggaacatgcatgccacagttattccagaaccagcaacaggcttttattaaaacatactggttttcatgtttctgattagttgggttttttatatcaaactatatttcatgttgcatagatttcaaaacataattttatgttcaatgggtatttttttacatatacatactcacatattatatcatggtgattatgatggttaaagcctttacactgaatgtaatgtttaataaagaaattacaaattctcactttctaagaagctttcactaatcattacctatgttaaagctcccacctggtggctcatttttcatagcattccttgtgtaagccaaggtatatgacctgcgttttctgcagatgctgctgctgtcacaacatgaactgctgacacagtcctttaccttgctccacctctgcagtgatcataagtgctttgtgcccagaggccactgaagatggtaggcaggattctttccaagaacccaaactgcctttgcctcagctttatggttacctaaaattgccactttttttaggttaaaaaaaacttcagtatcctcattaacatttgaagttggtttcttatgaatatttcgtggctaaaatgattttatagggaatctatcttctaggatctaagccactaaataaaaggataaatgaatgatgataagtcagtcactcatgtttgactctgttcttagaatgaagagaaggtgcatatgcatgtctcaatttctacctttttctgtggtatcggctatactagggaaccattttgtagaagaaggaacgatgacaggtcgcatgaagatcagcctctagtactgatgatctttacttatgcatcttcctgagcaactttctaggctaggatttctaaattggtgaaaaaagcagcattagagtgccagaattagcactggggaaaactggccaggggaacacaaagcaggagacagcctgcgttaattttttttttttaataattttcaaaagcagtggtagaaaatttgataagaatgctttatgtttaggacaacaaaaataattttaaaaagttattttttaccctaatacttttctccactgaatattattatttttttcttagctttttctttctagatgtattccccaacatgctcacatacacagatctttccctttccttactagacctctctttagtttaagataagtttagacaggagaaagtgtatgtaaactacctgaaaggatgacaatcaatacaatgacaaatatgccagtttatttaatttgtttaaaaaaaaaaaggcagaaaacccaccatgggaaaataagcattttttaaaatctgaagttgctcttttcctgtgtggtctttgggaggagtctaatacaaaaactgaaaacctttggtcctgggaatttattttcatggctgttgtcatggctgagtagttttttgatgaattcaatcaatgcagagaacgcttttagataaatcagaactctccttaaaatgcatttcaatcagaagcaaagtacacccattatttatgcagacatgtaaaaaatctaaaaattcttgcaatgagtagtataagccacctatttttacttccttctctgaaatattccagttaactcagcttgggttctgtgctcctcctctcttcctatagaacactgtgcataccttgaataaagagcttattatacta

SEQ ID NO: 144306 - DNA, 526 bp, Homo sapiens
  Payload ID: 8512
  Gene Symbol: IFT57
  Gene Name: intraflagellar transport 57
  ENST ID: ENST00000492106
  CDS Start-End: 54-526
aggccgcagaggtctgtgggcctgagcccacgctggactctgtccgttctgcgatgactgctgctctggccgtcgtcacgacgtcgggtttggaagatggggtgcctaggtcccgtggcgaagggaccggggaagtggtcttggagcgggggcccggcgcggcctaccacatgttcgtggtgatggaggacttggtggagaagctgaagctgctccgctacgaggaggagttcctccggaagagcaacctgaaggccccgtccaggtgggtgccggcgtccccgagcgcccgggtgcctgctagcccccagggagatgccctccttggtcctgctgggaaccagtttcgtgagagcggacactattttgcactgcctaccaaccctggcgaacagttctacatgttttgtactcttgctgcttggttgattaataaagcgggacgtccctttgagcagcctcaagaatatgatgaccctaatgcaacaatatctaacatactatccgagcttcggtcatttgtaag

SEQ ID NO: 144307 - DNA, 931 bp, Homo sapiens
  Payload ID: 8512
  Gene Symbol: IFT57
  Gene Name: intraflagellar transport 57
  ENST ID: ENST00000478157
  CDS Start-End: 114-359
gtccggtggtcgcctggtaaccggtcgtggctgtactggcggcggcagggctggcggcttaggccgcagaggtctgtgggcctgagcccacgctggactctgtccgttctgcgatgactgctgctctggccgtcgtcacgacgtcgggtttggaagatggggtgcctaggtcccgtggcgaagggaccggggaagtggtcttggagcgggggcccggcgcggcctaccacatgttcgtggtgatggaggacttggtggagaagctgaagctgctccgctacgaggaggagttcctccggaagagcaacctgaaggccccgtccagggaagaactgcagattttcctccttcaaaattaaagtcaggttatggagaacatgtatgctatgttcttgattgcttcgctgaagaagcattgaaatatattggtttcacctggaaaaggccaatatacccagtagaagaattagaagaagaaagcgttgcagaagatgatgcagaattaacattaaataaagtggatgaagaatttgtggaagaagagacagataatgaagaaaactttattgatctcaacgttttaaaggcccagacatatcacttggatatgaacgagactgccaaacaagaagatattttggaatccacaacagatgctgcagaatggagcctagaagtggaacgtgtactaccgcaactgaaagtcacgattaggactgacaataaggattggagaatccatgttgaccaaatgcaccagcacagaagtggaattgaatctgctctaaaggagaccaagggatttttggacaaactccataatgaaattactaggactttggaaaagatcagcagccgagaaaagtacatcaacaatcagcttgagaatttggttcaagaatatcgtgcagctcaagcccagctgagtgag

SEQ ID NO: 144308 - DNA, 2160 bp, Homo sapiens
  Payload ID: 8513
  Gene Symbol: IFT74
  Gene Name: intraflagellar transport 74
  Uniprot ID: Q96LB3
  ENST ID: ENST00000380062
  CDS Start-End: 164-1966
atcccgcccccgttgccgggatacgccgcggcgcacggcagttagtgggtaggcctgagagccgaggaaaactgagcgtgggcctcagaaagaagttaaggcacccgcgagccgggcaactgccctccttccgcgccggcggagcgattaaagtgaagaaacaatggccagcaatcacaaatcttcagcagctcgccctgtttcaagaggtggagttgggttaacaggaaggcctccttctgggatacgacccctatcaggaaatattcgagtggcaactgcaatgccacctgggacagcaagaccaggttctcgtggttgtcccatagggactggtggagttctgtcttctcaaatcaaagttgcccatcgccctgtaacacaacaaggtttgactggaatgaaaactgggacgaaaggtccccagaggcaaattttagacaaatcttactatcttgggcttcttagaagtaaaataagtgaacttacaactgaagttaataaacttcagaagggaatagaaatgtacaatcaagagaattcagtatatttgtcatatgaaaagagggctgagactttagctgttgagataaaagagcttcaaggacaactagcagactacaacatgttggtagataaacttaataccaacactgaaatggaagaagtaatgaatgattacaatatgcttaaagctcaaaatgatcgagaaacacaaagtttggatgtcatatttactgaaagacaagcgaaagaaaaacaaatcagaagtgtcgaagaagaaattgaacaggaaaaacaagcaacagatgacattatcaaaaatatgtcttttgaaaaccaagtcaagtacctagagatgaaaaccacaaatgagaaactgttacaggaattagatacacttcaacaacaattggattcacagaacatgaaaaaagagagcctggaagcagaaatagctcactcccaggtgaaacaggaggcggtattgctgcatgaaaaactttatgagttggagtcccatcgagatcaaatgattgcagaagacaaaagcataggatctccaatggaagagagagagaaattacttaagcagattaaagatgataatcaggaaatagccagcatggaaagacagttaacagatacaaaagaaaagataaatcagtttattgaagaaattagacaacttgacatggatttagaggaacaccaaggtgaaatgaaccagaaatacaaggagctaaagaaaagggaggaacatatggacacttttattgagacttttgaggaaacaaagaatcaggaactgaaacgaaaggcacagatagaagccaacattgttgcactcttggagcactgcagtcgaaatataaatcgtatagaacagatatcctctatcaccaatcaagagctaaagatgatgcaggatgacctcaattttaaatctactgaagtgcagaaatcacaaagtacagctcagaatttgacttcagacattcaacgtctgcagttggatctgcagaaaatggagcttctagaaagtaagatgactgaagaacagcattctctaaaaagcaaaattaagcaaatgacaactgatctggagatatataatgatttgccagctttaaaatcatcaggtgaagaaaagataaagaaattacatcaggagagaatgatattatcaacccacagaaatgcctttaagaaaataatggagaagcaaaacatagagtatgaggcactaaaaacacaattgcaagaaaatgagacacattctcagcttacaaatttggagagaaagtggcaacaccttgagcaaaataattttgcgatgaaagaattcatagcaaccaagagtcaagagagtgattaccagccaattaagaaaaatgtgaccaagcagattgcagagtacaataaaaccatcgtggatgctttacatagcaccagcggaaactgagtttaagtccactgaaagtctctaaggaagtatcctcttgctgctaaacttggtacaagttgactaccaaaaaaaaaaaaagcttacttttggagtttacctaaaatttctgaatgttataatttttgtggcctcttttaagaatgatattttaaaatagtaaatagttcaataaatggtttgcatattaaaaa

SEQ ID NO: 144309 - DNA, 2119 bp, Homo sapiens
  Payload ID: 8513
  Gene Symbol: IFT74
  Gene Name: intraflagellar transport 74
  Uniprot ID: Q96LB3
  ENST ID: ENST00000433700
  CDS Start-End: 128-1930
tcgtcatggccagtgtctgtctggcgcccggtgcccaggcactgtgcgagaccagtccgcaggggcgactcggagagcgccgggccgcggcgggagaagagcctgcagcgattaaagtgaagaaacaatggccagcaatcacaaatcttcagcagctcgccctgtttcaagaggtggagttgggttaacaggaaggcctccttctgggatacgacccctatcaggaaatattcgagtggcaactgcaatgccacctgggacagcaagaccaggttctcgtggttgtcccatagggactggtggagttctgtcttctcaaatcaaagttgcccatcgccctgtaacacaacaaggtttgactggaatgaaaactgggacgaaaggtccccagaggcaaattttagacaaatcttactatcttgggcttcttagaagtaaaataagtgaacttacaactgaagttaataaacttcagaagggaatagaaatgtacaatcaagagaattcagtatatttgtcatatgaaaagagggctgagactttagctgttgagataaaagagcttcaaggacaactagcagactacaacatgttggtagataaacttaataccaacactgaaatggaagaagtaatgaatgattacaatatgcttaaagctcaaaatgatcgagaaacacaaagtttggatgtcatatttactgaaagacaagcgaaagaaaaacaaatcagaagtgtcgaagaagaaattgaacaggaaaaacaagcaacagatgacattatcaaaaatatgtcttttgaaaaccaagtcaagtacctagagatgaaaaccacaaatgagaaactgttacaggaattagatacacttcaacaacaattggattcacagaacatgaaaaaagagagcctggaagcagaaatagctcactcccaggtgaaacaggaggcggtattgctgcatgaaaaactttatgagttggagtcccatcgagatcaaatgattgcagaagacaaaagcataggatctccaatggaagagagagagaaattacttaagcagattaaagatgataatcaggaaatagccagcatggaaagacagttaacagatacaaaagaaaagataaatcagtttattgaagaaattagacaacttgacatggatttagaggaacaccaaggtgaaatgaaccagaaatacaaggagctaaagaaaagggaggaacatatggacacttttattgagacttttgaggaaacaaagaatcaggaactgaaacgaaaggcacagatagaagccaacattgttgcactcttggagcactgcagtcgaaatataaatcgtatagaacagatatcctctatcaccaatcaagagctaaagatgatgcaggatgacctcaattttaaatctactgaagtgcagaaatcacaaagtacagctcagaatttgacttcagacattcaacgtctgcagttggatctgcagaaaatggagcttctagaaagtaagatgactgaagaacagcattctctaaaaagcaaaattaagcaaatgacaactgatctggagatatataatgatttgccagctttaaaatcatcaggtgaagaaaagataaagaaattacatcaggagagaatgatattatcaacccacagaaatgcctttaagaaaataatggagaagcaaaacatagagtatgaggcactaaaaacacaattgcaagaaaatgagacacattctcagcttacaaatttggagagaaagtggcaacaccttgagcaaaataattttgcgatgaaagaattcatagcaaccaagagtcaagagagtgattaccagccaattaagaaaaatgtgaccaagcagattgcagagtacaataaaaccatcgtggatgctttacatagcaccagcggaaactgagtttaagtccactgaaagtctctaaggaagtatcctcttgctgctaaacttggtacaagttgactaccaaaaaaaaaaaaagcttacttttggagtttacctaaaatttctgaatgttataatttttgtggcctcttttaagaatgatattttaaaatagtaaatagttcaataaatggtttgcatatt

SEQ ID NO: 144310 - DNA, 1462 bp, Homo sapiens
  Payload ID: 8513
  Gene Symbol: IFT74
  Gene Name: intraflagellar transport 74
  Uniprot ID: Q96LB3
  ENST ID: ENST00000429045
  CDS Start-End: 58-1176
gcgagccgggcaactgccctccttccgcgccggcggagcgattaaagtgaagaaacaatggccagcaatcacaaatcttcagcagctcgccctgtttcaagaggtggagttgggttaacaggaaggcctccttctgggatacgacccctatcaggaaatattcgagtggcaactgcaatgccacctgggacagcaagaccaggttctcgtggttgtcccatagggactggtggagttctgtcttctcaaatcaaagttgcccatcgccctgtaacacaacaaggtttgactggaatgaaaactgggacgaaaggtccccagaggcaaattttagacaaatcttactatcttgggcttcttagaagtaaaataagtgaacttacaactgaagttaataaacttcagaagggaatagaaatgtacaatcaagagaattcagtatatttgtcatatgaaaagagggctgagactttagctgttgagataaaagagcttcaaggacaactagcagactacaacatgttggtagataaacttaataccaacactgaaatggaagaagtaatgaatgattacaatatgcttaaagctcaaaatgatcgagaaacacaaagtttggatgtcatatttactgaaagacaagcgaaagaaaaacaaatcagaagtgtcgaagaagaaattgaacaggaaaaacaagcaacagatgacattatcaaaaatatgtcttttgaaaaccaagtcaagtacctagagatgaaaaccacaaatgagaaactgttacaggaattagatacacttcaacaacaattggattcacagaacatgaaaaaagagagcctggaagcagaaatagctcactcccaggtgaaacaggaggcggtattgctgcatgaaaaactttatgagttggagtcccatcgagatcaaatgattgcagaagacaaaagcataggatctccaatggaagagagagagaaattacttaagcagattaaagatgataatcaggaaatagccagcatggaaagacagttaacagatacaaaagaaaagataaatcagtttattgaagaaattagacaacttgacatggatttagaggaacaccaagatcctaccaactatggatggaaaatacttgaaaaaaatacaggaagtttcaaaaagcaagtttgaacctgccatgtgctaagcactatgctgaatccatttgaactgaagaataccctgctatagcctcccattgtttcacagatcttcagtctctctctagcacccactgtttgagcagtgttcatctggcattttattcattggctacttgtgttcactctttgcttctgtgaaaaaaaaaagactcctaaaaatcaattatatggtgaaagaaatcccttacagactaagagagagcgtaaagtgctgtctctcaacaagaaaataaaattcttagatcttttgaaaa

SEQ ID NO: 144311 - DNA, 2163 bp, Homo sapiens
  Payload ID: 8513
  Gene Symbol: IFT74
  Gene Name: intraflagellar transport 74
  Uniprot ID: Q96LB3
  ENST ID: ENST00000443698
  CDS Start-End: 172-1974
gacgccgatgcggagctgagctggctttcctccagggctctggactccctgctgagcaagagagaaagaggcccgcccttccaccaggacgcctgaccctggggtccttcccaaacccgggtctcttccgactccgggcccaacagtttgtgcgattaaagtgaagaaacaatggccagcaatcacaaatcttcagcagctcgccctgtttcaagaggtggagttgggttaacaggaaggcctccttctgggatacgacccctatcaggaaatattcgagtggcaactgcaatgccacctgggacagcaagaccaggttctcgtggttgtcccatagggactggtggagttctgtcttctcaaatcaaagttgcccatcgccctgtaacacaacaaggtttgactggaatgaaaactgggacgaaaggtccccagaggcaaattttagacaaatcttactatcttgggcttcttagaagtaaaataagtgaacttacaactgaagttaataaacttcagaagggaatagaaatgtacaatcaagagaattcagtatatttgtcatatgaaaagagggctgagactttagctgttgagataaaagagcttcaaggacaactagcagactacaacatgttggtagataaacttaataccaacactgaaatggaagaagtaatgaatgattacaatatgcttaaagctcaaaatgatcgagaaacacaaagtttggatgtcatatttactgaaagacaagcgaaagaaaaacaaatcagaagtgtcgaagaagaaattgaacaggaaaaacaagcaacagatgacattatcaaaaatatgtcttttgaaaaccaagtcaagtacctagagatgaaaaccacaaatgagaaactgttacaggaattagatacacttcaacaacaattggattcacagaacatgaaaaaagagagcctggaagcagaaatagctcactcccaggtgaaacaggaggcggtattgctgcatgaaaaactttatgagttggagtcccatcgagatcaaatgattgcagaagacaaaagcataggatctccaatggaagagagagagaaattacttaagcagattaaagatgataatcaggaaatagccagcatggaaagacagttaacagatacaaaagaaaagataaatcagtttattgaagaaattagacaacttgacatggatttagaggaacaccaaggtgaaatgaaccagaaatacaaggagctaaagaaaagggaggaacatatggacacttttattgagacttttgaggaaacaaagaatcaggaactgaaacgaaaggcacagatagaagccaacattgttgcactcttggagcactgcagtcgaaatataaatcgtatagaacagatatcctctatcaccaatcaagagctaaagatgatgcaggatgacctcaattttaaatctactgaagtgcagaaatcacaaagtacagctcagaatttgacttcagacattcaacgtctgcagttggatctgcagaaaatggagcttctagaaagtaagatgactgaagaacagcattctctaaaaagcaaaattaagcaaatgacaactgatctggagatatataatgatttgccagctttaaaatcatcaggtgaagaaaagataaagaaattacatcaggagagaatgatattatcaacccacagaaatgcctttaagaaaataatggagaagcaaaacatagagtatgaggcactaaaaacacaattgcaagaaaatgagacacattctcagcttacaaatttggagagaaagtggcaacaccttgagcaaaataattttgcgatgaaagaattcatagcaaccaagagtcaagagagtgattaccagccaattaagaaaaatgtgaccaagcagattgcagagtacaataaaaccatcgtggatgctttacatagcaccagcggaaactgagtttaagtccactgaaagtctctaaggaagtatcctcttgctgctaaacttggtacaagttgactaccaaaaaaaaaaaaagcttacttttggagtttacctaaaatttctgaatgttataatttttgtggcctcttttaagaatgatattttaaaatagtaaatagttcaataaatggtttgcatatt

SEQ ID NO: 144312 - DNA, 652 bp, Homo sapiens
  Payload ID: 8513
  Gene Symbol: IFT74
  Gene Name: intraflagellar transport 74
  ENST ID: ENST00000519968
  CDS Start-End: 128-652
tcgtcatggccagtgtctgtctggcgcccggtgcccaggcactgtgcgagaccagtccgcaggggcgactcggagagcgccgggccgcggcgggagaagagcctgcagcgattaaagtgaagaaacaatggccagcaatcacaaatcttcagcagctcgccctgtttcaagaggtggagttgggttaacaggaaggcctccttctgggatacgacccctatcaggaaatattcgagtggcaactgcaatgccacctgggacagcaagaccaggttctcgtggttgtcccatagggactggtggagttctgtcttctcaaatcaaagttgcccatcgccctgtaacacaacaaggtttgactggaatgaaaactgggacgaaaggtccccagaggcaaattttagacaaatcttactatcttgggcttcttagaagtaaaataagtgaacttacaactgaagttaataaacttcagaagggaatagaaatgtacaatcaagagaattcagtatatttgtcatatgaaaagagggctgagactttagctgttgagataaaagagcttcaaggacaactagcagactacaacatgttggtagataaacttaataccaacactgaaatggaagaagtaatgaatgattacaatatg

SEQ ID NO: 144313 - DNA, 563 bp, Homo sapiens
  Payload ID: 8513
  Gene Symbol: IFT74
  Gene Name: intraflagellar transport 74
  ENST ID: ENST00000517444
  CDS Start-End: 184-563
gtcccaaccgccgacgccgatgcggagctgagctggctttcctccagggctctggactccctgctgagcaagagagaaagaggcccgcccttccaccaggacgcctgaccctggggtccttcccaaacccgggtctcttccgactccgggcccaacagtttgtgcgattaaagtgaagaaacaatggccagcaatcacaaatcttcagcagctcgccctgtttcaagaggtggagttgggttaacaggaaggcctccttctgggatacgacccctatcaggaaatattcgagtggcaactgcaatgccacctgggacagcaagaccaggttctcgtggttgtcccatagggactggtggagttctgtcttctcaaatcaaagttgcccatcgccctgtaacacaacaaggtttgactggaatgaaaactgggacgaaaggtccccagaggcaaattttagacaaatcttactatcttgggcttcttagaagtaaaataagtgaacttacaactgaagttaataaacttcagaagggaatagaaatgtacaatcaagagaattc

SEQ ID NO: 144314 - DNA, 563 bp, Homo sapiens
  Payload ID: 8513
  Gene Symbol: IFT74
  Gene Name: intraflagellar transport 74
  ENST ID: ENST00000518614
  CDS Start-End: 125-563
agttagtgggtaggcctgagagccgaggaaaactgagcgtgggcctcagaaagaagttaaggcacccgcgagccgggcaactgccctccttccgcgccggcggagcgattaaagtgaagaaacaatggccagcaatcacaaatcttcagcagctcgccctgtttcaagaggtggagttgggttaacaggaaggcctccttctgggatacgacccctatcaggaaatattcgagtggcaactgcaatgccacctgggacagcaagaccaggttctcgtggttgtcccatagggactggtggagttctgtcttctcaaatcaaagttgcccatcgccctgtaacacaacaaggtttgactggaatgaaaactgggacgaaaggtccccagaggcaaattttagacaaatcttactatcttgggcttcttagacggagttttgcttgtcacccaagctggagtgcaatgatgggatctcacgtcactgcaacttccaccgcctggattcaagtgattctcttgcctcagcctcgtgcctgtaatctaagtaaaataagtgaactta

SEQ ID NO: 144315 - DNA, 652 bp, Homo sapiens
  Payload ID: 8513
  Gene Symbol: IFT74
  Gene Name: intraflagellar transport 74
  ENST ID: ENST00000517866
  CDS Start-End: 211-652
gggtcatctacagaggactagagagccagtcttttcctaaataaggaaaggaatgtgagctggggctgtggcatgcctgggcatgtagtaaaatcagaaagaagaaaaaaggagaagaaaggcagggggtacctggaattagagaataagtagctgagcaggctatttgaagagaaaccttgccatatctcacatcttttatatcttctcatgcctatgccacctgggacagcaagaccaggttctcgtggttgtcccatagggactggtggagttctgtcttctcaaatcaaagttgcccatcgccctgtaacacaacaaggtttgactggaatgaaaactgggacgaaaggtccccagaggcaaattttagacaaatcttactatcttgggcttcttagaagtaaaataagtgaacttacaactgaagttaataaacttcagaagggaatagaaatgtacaatcaagagaattcagtatatttgtcatatgaaaagagggctgagactttagctgttgagataaaagagcttcaaggacaactagcagactacaacatgttggtagataaacttaataccaacactgaaatggaagaagtaatgaatgattacaatatgcttaaagctcaaaatgatcgagaaacacaaa

SEQ ID NO: 144316 - DNA, 4306 bp, Homo sapiens
  Payload ID: 8514
  Gene Symbol: IFT80
  Gene Name: intraflagellar transport 80
  Uniprot ID: Q9P2H3
  ENST ID: ENST00000326448
  CDS Start-End: 434-2767
gcgcatgcgcgaactcctggcgggacctacgcggtagaagtttctactaagtgaaaaggaagagcgagggattcttttctctgtggtctacagcagcagcactattattaaaaatatttggaaagacaacctggcaagttttgaaaaagatttttttaaaaacggtagggttccgctcacagtgggaggcggggctcagtggtccagaaacgcctcttcagaagagggcgggctcgccgagaggcggggtctcgggcccactcggatgacgtgccgcgtagaagtatcgcgggaagaggaagggagcgtaactcttagaagtcactatggtgacggggaggtaccaggtatttgagagcaatcgccaccgctttcctggaacttgagtaaatacaatcaagtggcatcttaaatttttgctggaagtggagtcatgagactaaagatatctcttttaaaagaaccaaagcatcaagaattagtaagctgtgtgggctggactactgctgaagagctgtattcatgtagtgatgatcaccagatagtgaagtggaacttgttaaccagtgaaacaactcaaatagtaaagcttcctgatgatatttaccctattgattttcactggtttccaaaaagtttgggtgtaaagaaacaaacccaggcagaaagctttgtcctcacaagttctgatggtaaatttcatctgatttccaagttaggaagagtggaaaaaagtgtagaagctcactgtggagcagtacttgcaggaagatggaattatgaaggaacagcattagttacagttggagaagatggacaaataaaaatttggtcaaagactgggatgcttagatcaactttagctcagcaaggaacaccagtgtattcagtagcgtggggccctgattcagaaaaggttctttatacagcaggcaagcagctaatcattaaacctcttcaaccaaatgctaaagttttgcagtggaaagctcatgatggcattattttaaaagtagattggaactcggtcaatgatcttattttatctgctggtgaagactgtaaatataaggtatgggatagttacggccgcccactgtacaattcacaacctcatgagcatcccattacttcagttgcctgggctccagatggagaattatttgctgttggatcgtttcatactttacgcttgtgtgataaaactgggtggtcatatgcattagaaaaacccaacactggcagcatatttaatattgcatggtctatcgatggcactcagattgctggagcctgtggaaatggacatgtcgtttttgcacatgtggtggaacaacattgggagtggaaaaattttcaagtaacattaacgaaaagaagagccatgcaggttcgtaatgttcttaatgatgcagtggatttactggaattccgtgatagagtcattaaagcatctttgaactatgcacacttagttgtttcaacgtctcttcaatgttacgtgttctccacgaagaactggaacacaccaattatatttgatctcaaagaaggaactgttagtttgattctgcaggcagaaagacattttcttcttgtagatggtagtagtatctatttatattcatatgaagggcgctttatttcatctccaaaatttcctggaatgagaacagatattctgaatgcacagactgtgtctttgagtaatgataccatagcaataagagacaaagctgatgaaaaaataatcttcctctttgaggcatcaaccggaaagccgttaggtgatggaaagtttctttctcataagaatgaaatcttggaaattgctctggatcaaaaaggacttaccaatgatagaaaaattgctttcattgataaaaatagagatctctgtatcacttctgtgaaacgatttgggaaggaagaacaaattatcaagcttggaacaatggtgcatactttggcatggaacgatacatgcaatatcctttgtggacttcaagatactcgatttatagtgtggtattaccccaatacagtttatgtggacagagacattttgcctaaaacattatatgaaagggatgcaagtgaatttagtaaaaatccccatattgtgagttttgttggaaatcaagtaactattagaagagctgatggctccctggttcacatcagcataacaccatatcctgctattctccatgaatatgtaagcagttcaaaatgggaagatgctgtgagactttgtcgctttgttaaggagcaaaccatgtgggcttgtctagctgctatggcagttgctaatcgagatatgactactgcagaaatagcctatgcagcaattggtgaaattgataaggttcagtacatcaattctataaaaaatcttccatctaaagaatcaaaaatggcccacatactactgtttagtgggaacatacaggaggctgaaatagtacttcttcaggctggccttgtttatcaagcaatccagatcaatattaatctctacaactgggaaagggcactggaattggctgtaaaatacaaaacacatgttgatacagttcttgcttaccgtcaaaagtttttggagacatttggtaaacaggaaactaataaacgatacttgcattatgcagaaggtctccaaatagattgggagaaaatcaaagccaaaattgagatggaaattacaaaagaaagagagcaatcatcaagcagccaatccagcaagagtataggtttaaagccctaaatgccatgcgtatctttaagaaattttatcttttgaaacacgttctgattaaccaagggtaagcatgttttggttgctaaagaaaaaagcataatctttaaccgagtataagtacttgctgtgtatttagtgtaaaagtacatgcagaaagatgaaacacaaagtaattgatgtatttctatcttttatattttttagtccaataattagcaaaatattactatgtacttaagagatacctgtgtagtgtcgattatatgtcagttttttgcccattacttcatccctaaatcttcagcatgaacaaatattaatgtcgataataaaacattggactctttgaaatgtatgttaccattaatttctatttgacctctaaattgtaaaatgcctccaaaagtttatttatagaacaaaaatacatgaggatggatttgtacaaatgtataaaatgccactatttatacaccaagttcatagcagcattactggaatagcaaaagatggaaacagctcaagtgtctatcatgaatggataaacaaatgtgctataatacatacaatggaatattatttagctttaaaaaggaatgaaattctgataaatactacctcaggataaaccttgaaaacactatgctaagtgaaataagccagacacaaaaggccaaatatgatgccacttttatgaggtaccagcataggcaagttcacagaaacagaaaggagaatagtggttgccagggactgcagggaggaggaaatggggggtggggttattgtttaacgagtacatagtttctgtttgggatgaacaaattctggaaatggatagcgatgatggttgctcaacattttgaatgttaatgccactaaattgtacccataaaaatggttaaaatggtaaattttgttatgtatattttatcataatttaaaaaatatatctagaatgggcaagaaggattctcctcattcctctcttgacttgagaatgatcagtcaataggccctgaagtctgaatttgtgaaaatttccttgggtgacaaacttgtttgattactctatttagtgtatcccaaagttattaccacataatcttttaaacaataaaacaaataccccttagaaagtcttctgcaaacccatttctgaaaatggtacattatagggtgggtatagatgcatagatatgggattatgtatgatatatatatatatacacacacacacaaagggatagagagattacctctcttaacccccattttaattactatgtctaggttttttaaataaaaatcttttctttttaacatgtttcttttcttttccggaatattggaatattctgttcttgatccagatgaaatctgattgagcagtgtacttacaagttgtactgtgtatgtgtttcctatattgttatatttcaataagaagcttaaaatgtttaaaaataaatggttaaaaggttttatgttatgtatattttaccacaataaatgcaaaaaataaaaagtctgtgttctaaacaa

SEQ ID NO: 144317 - DNA, 567 bp, Homo sapiens
  Payload ID: 8514
  Gene Symbol: IFT80
  Gene Name: intraflagellar transport 80
  ENST ID: ENST00000468218
  CDS Start-End: 442-567
aactcttagaagtcactatggtgacggggaggtaccaggtatttgagagcaatcgccaccgctttcctggaacttgagtaaatacaatcaagtggcatcttaaatttttgctggaagtggagtcatgagactaaagatatctcttttaaaagaaccaaagctggtttccaaaaagtttgggtgtaaagaaacaaacccaggcagaaagctttgtcctcacaagttctgatggtgtggtatatttattggcacatcgtttctgaagcatagacatatacccagaccataggtaaatttcatctgatttccaagttaggaagagtggaaaaaagtgtagaagctcactgtggagcagtacttgcaggaagatggaattatgaaggaacagcattagttacagttggagaagatggacaaataaaaatttggtcaaagactgggatgcttagatcaactttagctcagcaaggaacaccagtgtattcagtagcgtggggccctgattcagaaaaggttctttatacagcaggcaagcagctaatcattaaacctcttcaaccaaatgct

SEQ ID NO: 144318 - DNA, 554 bp, Homo sapiens
  Payload ID: 8514
  Gene Symbol: IFT80
  Gene Name: intraflagellar transport 80
  ENST ID: ENST00000483325
  CDS Start-End: 1-369
gttcgtaatgttcttaatgatgcagtggatttactggaattccgtgatagagtcattaaagcatctttgaactatgcacacttagttgtttcaacgtctcttcaatgttacgtgttctccacgaagaactggaacacaccaattatatttgatctcaaagaaggaactgttagtttgattctgcaggcagaaagacattttcttcttgtagatggtagtagtatctatttatattcatatgaagggcgctttatttcatctccaaaatttcctggaatgagaacagatattctgaatgcacagactgtgtctttgagtaatgataccatagcaataagagacaaagctgatgaaaaaagccttctctgagagaagacttttggtaatttttttttaaaggacttcctttttggctaagaaagaggaaaacagaatggaataatatagtatccagatggcagacagaattaagataactataaattgtgaaaataatagtaatttggaagccagatttttgttttcaataaacttaagattgaaagtccctgtga

SEQ ID NO: 144319 - DNA, 539 bp, Homo sapiens
  Payload ID: 8514
  Gene Symbol: IFT80
  Gene Name: intraflagellar transport 80
  ENST ID: ENST00000486856
  CDS Start-End: 442-539
agaagtcactatggtgacggggaggtaccaggtatttgagagcaatcgccaccgctttcctggaacttgagtaaatacaatcaagtggcatcttaaatttttgctggaagtggagtcatgagactaaagatatctcttttaaaagaaccaaagcatatccttttaatgcttataaatcttattggattttcttaattatagtattgttaaaagtttctctattttatatcctagttgaagaatagattttttttttcattcctttagtggctgtttacctaaattgttttaaagtatttaagatcatgtgttttaggaagagtggaaaaaagtgtagaagctcactgtggagcagtacttgcaggaagatggaattatgaaggaacagcattagttacagttggagaagatggacaaataaaaatttggtcaaagactgggatgcttagatcaactttagctcagcaaggaacaccagtgtattcagtagcgtggggccctgattcagaaaaggttctttatacagcaggcaagcagct

SEQ ID NO: 144320 - DNA, 4044 bp, Homo sapiens
  Payload ID: 8514
  Gene Symbol: IFT80
  Gene Name: intraflagellar transport 80
  Uniprot ID: Q9P2H3
  ENST ID: ENST00000483465
  CDS Start-End: 589-2511
tgcaggtctgtgaaagaataggtaaataaattgaaagtaagggctgagaaatttttgtagcaatttgacattgttataatgtccaatttttctaatattttatttttattgtatcttacgaaatatccatatgcaatggattcgaaataaagaaaaatctggtccttcatcagaactaggaaagcactgatttaaacatttggtcagacattttaaattgaattagtaagctgtgtgggctggactactgctgaagagctgtattcatgtagtgatgatcaccagatagtgaagtggaacttgttaaccagtgaaacaactcaaatagtaaagcttcctgatgatatttaccctattgattttcactggtttccaaaaagtttgggtgtaaagaaacaaacccaggcagaaagctttgtcctcacaagttctgatggtaaatttcatctgatttccaagttaggaagagtggaaaaaagtgtagaagctcactgtggagcagtacttgcaggaagatggaattatgaaggaacagcattagttacagttggagaagatggacaaataaaaatttggtcaaagactgggatgcttagatcaactttagctcagcaaggaacaccagtgtattcagtagcgtggggccctgattcagaaaaggttctttatacagcaggcaagcagctaatcattaaacctcttcaaccaaatgctaaagttttgcagtggaaagctcatgatggcattattttaaaagtagattggaactcggtcaatgatcttattttatctgctggtgaagactgtaaatataaggtatgggatagttacggccgcccactgtacaattcacaacctcatgagcatcccattacttcagttgcctgggctccagatggagaattatttgctgttggatcgtttcatactttacgcttgtgtgataaaactgggtggtcatatgcattagaaaaacccaacactggcagcatatttaatattgcatggtctatcgatggcactcagattgctggagcctgtggaaatggacatgtcgtttttgcacatgtggtggaacaacattgggagtggaaaaattttcaagtaacattaacgaaaagaagagccatgcaggttcgtaatgttcttaatgatgcagtggatttactggaattccgtgatagagtcattaaagcatctttgaactatgcacacttagttgtttcaacgtctcttcaatgttacgtgttctccacgaagaactggaacacaccaattatatttgatctcaaagaaggaactgttagtttgattctgcaggcagaaagacattttcttcttgtagatggtagtagtatctatttatattcatatgaagggcgctttatttcatctccaaaatttcctggaatgagaacagatattctgaatgcacagactgtgtctttgagtaatgataccatagcaataagagacaaagctgatgaaaaaataatcttcctctttgaggcatcaaccggaaagccgttaggtgatggaaagtttctttctcataagaatgaaatcttggaaattgctctggatcaaaaaggacttaccaatgatagaaaaattgctttcattgataaaaatagagatctctgtatcacttctgtgaaacgatttgggaaggaagaacaaattatcaagcttggaacaatggtgcatactttggcatggaacgatacatgcaatatcctttgtggacttcaagatactcgatttatagtgtggtattaccccaatacagtttatgtggacagagacattttgcctaaaacattatatgaaagggatgcaagtgaatttagtaaaaatccccatattgtgagttttgttggaaatcaagtaactattagaagagctgatggctccctggttcacatcagcataacaccatatcctgctattctccatgaatatgtaagcagttcaaaatgggaagatgctgtgagactttgtcgctttgttaaggagcaaaccatgtgggcttgtctagctgctatggcagttgctaatcgagatatgactactgcagaaatagcctatgcagcaattggtgaaattgataaggttcagtacatcaattctataaaaaatcttccatctaaagaatcaaaaatggcccacatactactgtttagtgggaacatacaggaggctgaaatagtacttcttcaggctggccttgtttatcaagcaatccagatcaatattaatctctacaactgggaaagggcactggaattggctgtaaaatacaaaacacatgttgatacagttcttgcttaccgtcaaaagtttttggagacatttggtaaacaggaaactaataaacgatacttgcattatgcagaaggtctccaaatagattgggagaaaatcaaagccaaaattgagatggaaattacaaaagaaagagagcaatcatcaagcagccaatccagcaagagtataggtttaaagccctaaatgccatgcgtatctttaagaaattttatcttttgaaacacgttctgattaaccaagggtaagcatgttttggttgctaaagaaaaaagcataatctttaaccgagtataagtacttgctgtgtatttagtgtaaaagtacatgcagaaagatgaaacacaaagtaattgatgtatttctatcttttatattttttagtccaataattagcaaaatattactatgtacttaagagatacctgtgtagtgtcgattatatgtcagttttttgcccattacttcatccctaaatcttcagcatgaacaaatattaatgtcgataataaaacattggactctttgaaatgtatgttaccattaatttctatttgacctctaaattgtaaaatgcctccaaaagtttatttatagaacaaaaatacatgaggatggatttgtacaaatgtataaaatgccactatttatacaccaagttcatagcagcattactggaatagcaaaagatggaaacagctcaagtgtctatcatgaatggataaacaaatgtgctataatacatacaatggaatattatttagctttaaaaaggaatgaaattctgataaatactacctcaggataaaccttgaaaacactatgctaagtgaaataagccagacacaaaaggccaaatatgatgccacttttatgaggtaccagcataggcaagttcacagaaacagaaaggagaatagtggttgccagggactgcagggaggaggaaatggggggtggggttattgtttaacgagtacatagtttctgtttgggatgaacaaattctggaaatggatagcgatgatggttgctcaacattttgaatgttaatgccactaaattgtacccataaaaatggttaaaatggtaaattttgttatgtatattttatcataatttaaaaaatatatctagaatgggcaagaaggattctcctcattcctctcttgacttgagaatgatcagtcaataggccctgaagtctgaatttgtgaaaatttccttgggtgacaaacttgtttgattactctatttagtgtatcccaaagttattaccacataatcttttaaacaataaaacaaataccccttagaaagtcttctgcaaacccatttctgaaaatggtacattatagggtgggtatagatgcatagatatgggattatgtatgatatatatatatatacacacacacacaaagggatagagagattacctctcttaacccccattttaattactatgtctaggttttttaaataaaaatcttttctttttaacatgtttcttttcttttccggaatattggaatattctgttcttgatccagatgaaatctgattgagcagtgtacttacaagttgtactgtgtatgtgtttcctatattgttatatttcaataagaagcttaaaatgtttaaaaataaatggttaaaaggttttatgttatgtatattttaccacaataaatgcaaaaaataaaaagtctgtgttct

SEQ ID NO: 144321 - DNA, 610 bp, Homo sapiens
  Payload ID: 8514
  Gene Symbol: IFT80
  Gene Name: intraflagellar transport 80
  ENST ID: ENST00000489004
  CDS Start-End: 247-610
atcgcgggaagaggaagggagcgtaactcttagaagtcactatggtgacggggaggtaccaggtatttgagagcaatcgccaccgctttcctggaacttgaggctggagtgcagtggtgtgatctcggtttactgcaacctccacctcctgagttccagcgattctcctgcctcagcctcctgagtagctgggattacagtaaatacaatcaagtggcatcttaaatttttgctggaagtggagtcatgagactaaagatatctcttttaaaagaaccaaagcatcaagaattagtaagctgtgtgggctggactactgctgaagagctgtattcatgtagtgatgatcaccagatagtgaagtggaacttgttaaccagtgaaacaactcaaatagtaaagcttcctgatgatatttaccctattgattttcactggtttccaaaaagtttgggtgtaaagaaacaaacccaggcagaaagctttgtcctcacaagttctgatggtaaatttcatctgatttccaagttaggaagagtggaaaaaagtgtagaagctcactgtggagcagtacttgcaggaagatggaattatgaaggaacagcattag

SEQ ID NO: 144322 - DNA, 574 bp, Homo sapiens
  Payload ID: 8514
  Gene Symbol: IFT80
  Gene Name: intraflagellar transport 80
  ENST ID: ENST00000482317
  CDS Start-End: 118-405
agaagtcactatggtgacggggaggtaccaggtatttgagagcaatcgccaccgctttcctggaacttgagtaaatacaatcaagtggcatcttaaatttttgctggaagtggagtcatgagactaaagatatctcttttaaaagaaccaaagcatcaagaattagtaagctgtgtgggctggactactgctgaagagctgtattcatgtagtgatgatcaccagatagtgaagtggaacttgttaaccagtgaaacaactcaaatagtaaagcttcctgatgatatttaccctattgattttcactggtttccaaaaagtttgggtgtaaagaaacaaacccaggcagaaagctttgtcctcacaagttctgatgatttttcaaatgtaatttctttcaggtaaatttcatctgatttccaagttaggaagagtggaaaaaagtgtagaagctcactgtggagcagtacttgcaggaagatggaattatgaaggaacagcattagttacagttggagaagatggacaaataaaaatttggtcaaagactgggatgcttagatcaactttagct

SEQ ID NO: 144323 - DNA, 860 bp, Homo sapiens
  Payload ID: 8514
  Gene Symbol: IFT80
  Gene Name: intraflagellar transport 80
  ENST ID: ENST00000465537
  CDS Start-End: 495-860
tatggtgacggggaggtaccaggtatttgagagcaatcgccaccgctttcctggaacttgagtaaatacaatcaagtggcatcttaaatttttgctggaagtggagtcatgagactaaagatcaagaattagtaagctgtgtgggctggactactgctgaagagctgtattcatgtagtgatgatcaccagatagtgaagtggaacttgttaaccagtgaaacaactcaaatagtaaagcttcctgatgatatttaccctattgattttcactggtttccaaaaagtttgggtgtaaagaaacaaacccaggcagaaagctttgtcctcacaagttctgatggtaaatttcatctgatttccaagttaggaagagtggaaaaaagtgtagaagctcactgtggagcagtacttgcaggaagatggaattatgaaggaacagcattagttacagttggagaagatggacaaataaaaatttggtcaaagactgggatgcttagatcaactttagctcagcaaggaacaccagtgtattcagtagcgtggggccctgattcagaaaaggttctttatacagcaggcaagcagctaatcattaaacctcttcaaccaaatgctaaagttttgcagtggaaagctcatgatggcattattttaaaagtagattggaactcggtcaatgatcttattttatctgctggtgaagactgtaaatataaggtatgggatagttacggccgcccactgtacaattcacaacctcatgagcatcccattacttcagttgcctgggctccagatggagaattatttgctgttggatcgtttcatactttacgcttgtgtgataaaactggg

SEQ ID NO: 144324 - DNA, 529 bp, Homo sapiens
  Payload ID: 8514
  Gene Symbol: IFT80
  Gene Name: intraflagellar transport 80
  ENST ID: ENST00000475677
  CDS Start-End: 298-529
attgtcgctcctgcgcatgcgcgaactcctggcgggacctacgcggtagaagtttctactaagtgaaaaggaagagcgagggattcttttctctgtggtctacagcagcagcactattattaaaaatatttggaaagacaacctggtaaatttcatctgatttccaagttaggaagagtggaaaaaagtgtagaagctcactgtggagcagtacttgcaggaagatggaattatgaaggaacagcattagttacagttggagaagatggacaaataaaaatttggtcaaagactgggatgcttagatcaactttagctcagcaaggaacaccagtgtattcagtagcgtggggccctgattcagaaaaggttctttatacagcaggcaagcagctaatcattaaacctcttcaaccaaatgctaaagttttgcagtggaaagctcatgatggcattattttaaaagtagattggaactcggtcaatgatcttattttatctgctggtgaagactgtaaatataaggtat

SEQ ID NO: 144325 - DNA, 542 bp, Homo sapiens
  Payload ID: 8514
  Gene Symbol: IFT80
  Gene Name: intraflagellar transport 80
  ENST ID: ENST00000478536
  CDS Start-End: 350-542
attgtcgctcctgcgcatgcgcgaactcctggcgggacctacgcggtagaagtttctactaagtgaaaaggaagagcgagggattcttttctctgtggtctacagcagcagcactattattaaaaatatttggaaagacaacctgctcatcagccatcattaatgttagtgtattttatgtgtggcccaagacaattcttcctccaatgtggcctagggaagccgaaagattggacacccctgataaagtaaacggccatactgtttgctgtggctaagcctttgagtccgtgcctggaaatgtaaatacaatcaagtggcatcttaaatttttgctggaagtggagtcatgagactaaagatatctcttttaaaagaaccaaagcatcaagaattagtaagctgtgtgggctggactactgctgaagagctgtattcatgtagtgatgatcaccagatagtgaagtggaacttgttaaccagtgaaacaactcaaatagtaaagcttcctgatgatatttaccctattgattttcactggt

SEQ ID NO: 144326 - DNA, 719 bp, Homo sapiens
  Payload ID: 8514
  Gene Symbol: IFT80
  Gene Name: intraflagellar transport 80
  ENST ID: ENST00000498409
  CDS Start-End: 181-719
tgcgcatgcgcgaactcctggcgggacctacgcggtagaagtttctactaagtgaaaaggaagagcgagggattcttttctctgtggtctacagcagcagcactattattaaaaatatttggaaagacaacctgtaaatacaatcaagtggcatcttaaatttttgctggaagtggagtcatgagactaaagatatctcttttaaaagaaccaaagcatcaagaattagtaagctgtgtgggctggactactgctgaagagctgtattcatgtagtgatgatcaccagatagtgaagtggaacttgttaaccagtgaaacaactcaaatagtaaagcttcctgatgatatttaccctattgattttcactggtttccaaaaagtttgggtgtaaagaaacaaacccaggcagaaagctttgtcctcacaagttctgatggtaaatttcatctgatttccaagttaggaagagtggaaaaaagtgtagaagctcactgtggagcagtacttgcaggaagatggaattatgaaggaacagcattagttacagttggagaagatggacaaataaaaatttggtcaaagactgggatgcttagatcaactttagctcagcaaggaacaccagtgtattcagtagcgtggggccctgattcagaaaaggttctttatacagcaggcaagcagctaatcattaaacctcttcaaccaaatgctaa

SEQ ID NO: 144327 - DNA, 382 bp, Homo sapiens
  Payload ID: 8514
  Gene Symbol: IFT80
  Gene Name: intraflagellar transport 80
  ENST ID: ENST00000484963
  CDS Start-End: 1-168
tatgaaggaacagcattagttacagttggagaagatggacaaataaaaatttggtcaaagactgggatgcttagatcaactttagctcagcaaggaacaccagtgtattcagtagcgtggggccctgattcagaaaaggttctttatacagcagtggaaagctcatgatggcattattttaaaagtagattggaactcggtcaatgatcttattttatctgctggtgaagactgtaaatataaggtatgggatagttacggccgcccactgtacaattcacaacctcatgagcatcccattacttcagttgcctgggctccagatggagaattatttgctgttggatcgtttcatactttacgcttgtgtgataaaactggg

SEQ ID NO: 144328 - DNA, 687 bp, Homo sapiens
  Payload ID: 8514
  Gene Symbol: IFT80
  Gene Name: intraflagellar transport 80
  ENST ID: ENST00000472555
  CDS Start-End: 1-209
gtaaatataaggtatgggatagttacggccgcccactgtacaattcacaacctcatgagcatcccattacttcagttgcctgggctccagatggagaattatttgctgttggatcgtttcatactttacgcttgtgtgataaaactgggtttttattccatcagatgaaagactataaacaagcaaaagtaacatattttaaatggtaatgagtgctataaaaattaagctgggcgaaggagatggcattttttaaatgagatgatcaggaaatataaaaacaaatatagaaactaattgtacattactggatgtggtcatatgcattagaaaaacccaacactggcagcatatttaatattgcatggtctatcgatggcactcagattgctggagcctgtggaaatggacatgtcgtttttgcacatgtggtggaacaacattgggagtggaaaaattttcaagtaacattaacgaaaagaagagccatgcaggttcgtaatgttcttaatgatgcagtggatttactggaattccgtgatagagtcattaaagcatctttgaactatgcacacttagttgtttcaacgtctcttcaatgttacgtgttctccacgaagaactggaacacaccaattatatttgatctcaaagaaggaactgttagtttgattctgcaggcagaaa

SEQ ID NO: 144329 - DNA, 3073 bp, Homo sapiens
  Payload ID: 8514
  Gene Symbol: IFT80
  Gene Name: intraflagellar transport 80
  Uniprot ID: Q9P2H3
  ENST ID: ENST00000496589
  CDS Start-End: 806-2728
actcggatgacgtgccgcgtagaagtatcgcgggaagaggaagggagcgtaactcttagaagtcactatggtgacggggaggtaccaggtatttgagagcaatcgccaccgctttcctggaacttgagtaaatacaatcaagtggcatcttaaatttttgctggaagtggagtcatgagactaaagatatctcttttaaaagaaccaaagcatatccttttaatgcttataaatcttattggattttcttaattatagtattgttaaaagtttctctattttatatcctagttgaagaatagattttttttttcattcctttagtggctgtttacctaaattgttttaaagtatttaagatcatgtgttaaaaatctggtccttcatcagaactaggaaagcactgatttaaacatttggtcagacattttaaattgaattagtaagctgtgtgggctggactactgctgaagagctgtattcatgtagtgatgatcaccagatagtgaagtggaacttgttaaccagtgaaacaactcaaatagtaaagcttcctgatgatatttaccctattgattttcactggtttccaaaaagtttgggtgtaaagaaacaaacccaggcagaaagctttgtcctcacaagttctgatggtaaatttcatctgatttccaagttaggaagagtggaaaaaagtgtagaagctcactgtggagcagtacttgcaggaagatggaattatgaaggaacagcattagttacagttggagaagatggacaaataaaaatttggtcaaagactgggatgcttagatcaactttagctcagcaaggaacaccagtgtattcagtagcgtggggccctgattcagaaaaggttctttatacagcaggcaagcagctaatcattaaacctcttcaaccaaatgctaaagttttgcagtggaaagctcatgatggcattattttaaaagtagattggaactcggtcaatgatcttattttatctgctggtgaagactgtaaatataaggtatgggatagttacggccgcccactgtacaattcacaacctcatgagcatcccattacttcagttgcctgggctccagatggagaattatttgctgttggatcgtttcatactttacgcttgtgtgataaaactgggtggtcatatgcattagaaaaacccaacactggcagcatatttaatattgcatggtctatcgatggcactcagattgctggagcctgtggaaatggacatgtcgtttttgcacatgtggtggaacaacattgggagtggaaaaattttcaagtaacattaacgaaaagaagagccatgcaggttcgtaatgttcttaatgatgcagtggatttactggaattccgtgatagagtcattaaagcatctttgaactatgcacacttagttgtttcaacgtctcttcaatgttacgtgttctccacgaagaactggaacacaccaattatatttgatctcaaagaaggaactgttagtttgattctgcaggcagaaagacattttcttcttgtagatggtagtagtatctatttatattcatatgaagggcgctttatttcatctccaaaatttcctggaatgagaacagatattctgaatgcacagactgtgtctttgagtaatgataccatagcaataagagacaaagctgatgaaaaaataatcttcctctttgaggcatcaaccggaaagccgttaggtgatggaaagtttctttctcataagaatgaaatcttggaaattgctctggatcaaaaaggacttaccaatgatagaaaaattgctttcattgataaaaatagagatctctgtatcacttctgtgaaacgatttgggaaggaagaacaaattatcaagcttggaacaatggtgcatactttggcatggaacgatacatgcaatatcctttgtggacttcaagatactcgatttatagtgtggtattaccccaatacagtttatgtggacagagacattttgcctaaaacattatatgaaagggatgcaagtgaatttagtaaaaatccccatattgtgagttttgttggaaatcaagtaactattagaagagctgatggctccctggttcacatcagcataacaccatatcctgctattctccatgaatatgtaagcagttcaaaatgggaagatgctgtgagactttgtcgctttgttaaggagcaaaccatgtgggcttgtctagctgctatggcagttgctaatcgagatatgactactgcagaaatagcctatgcagcaattggtgaaattgataaggttcagtacatcaattctataaaaaatcttccatctaaagaatcaaaaatggcccacatactactgtttagtgggaacatacaggaggctgaaatagtacttcttcaggctggccttgtttatcaagcaatccagatcaatattaatctctacaactgggaaagggcactggaattggctgtaaaatacaaaacacatgttgatacagttcttgcttaccgtcaaaagtttttggagacatttggtaaacaggaaactaataaacgatacttgcattatgcagaaggtctccaaatagattgggagaaaatcaaagccaaaattgagatggaaattacaaaagaaagagagcaatcatcaagcagccaatccagcaagagtataggtttaaagccctaaatgccatgcgtatctttaagaaattttatcttttgaaacacgttctgattaaccaagggtaagcatgttttggttgctaaagaaaaaagcataatctttaaccgagtataagtacttgctgtgtatttagtgtaaaagtacatgcagaaagatgaaacacaaagtaattgatgtatttctatcttttatattttttagtccaataattagcaaaatattactatgtacttaagagatacctgtgtagtgtcgattatatgtcagttttttgcccattacttcatccctaaatcttcagcatgaacaaatattaatgtcgataataaaacattggactctttgaaa

SEQ ID NO: 144330 - DNA, 579 bp, Homo sapiens
  Payload ID: 8514
  Gene Symbol: IFT80
  Gene Name: intraflagellar transport 80
  ENST ID: ENST00000478370
  CDS Start-End: 482-579
aactcttagaagtcactatggtgacggggaggtaccaggtatttgagagcaatcgccaccgctttcctggaacttgaggctggagtgcagtggtgtgatctcggtttactgcaacctccacctcctgagttccagcgattctcctgcctcagcctcctgagtagctgggattacagtaaatacaatcaagtggcatcttaaatttttgctggaagtggagtcatgagactaaagatatctcttttaaaagaaccaaagctggtttccaaaaagtttgggtgtaaagaaacaaacccaggcagaaagctttgtcctcacaagttctgatggtaaatttcatctgatttccaagttaggaagagtggaaaaaagtgtagaagctcactgtggagcagtacttgcaggaagatggaattatgaaggaacagcattagttacagttggagaagatggacaaataaaaatttggtcaaagactgggatgcttagatcaactttagctcagcaaggaacaccagtgtattcagtagcgtggggccctgattcagaaaaggttctttatacagcaggcaagcagct

SEQ ID NO: 144331 - DNA, 3108 bp, Homo sapiens
  Payload ID: 8515
  Gene Symbol: IFT81
  Gene Name: intraflagellar transport 81
  Uniprot ID: Q8WYA0
  ENST ID: ENST00000242591
  CDS Start-End: 507-2537
tgggagcggtctagagcccgggcgcctcctggggggtggggaaacggtttcgtgaggagaatttgaggtaacctcgccaactcgcggtcggaagctcctctgaaccccgaaataggagagagctcccgtcctctctcggtcctgatgcagcacctcgcaagtggaaggggtcgtcgcggttaagcccccggataggggaatcgggccccttctgggattcgagcggatccaggccgctccctggagggatgaactgtcgaggggcccagggcagcccccgctagaggcccggtcgggtgtggggtcccctgtcccctgtcccgagcccggggagggggacactatttctggtactcccaggaggctgcgggtcgatgctcgtgccagcctgggacccaggcagcacggtttctctcccaaattgtgccagagaacacgcacgtcctggttttcattgttccccgcctcctgcgactcgtttgtggttaaaattataagacctaattatgagtgatcaaattaaattcattatggacagtctcaataaggagccctttaggaagaactataatttaatcacgtttgattccttggagccaatgcaactattacaagttctcagtgatgttctggctgagattgacccaaagcaacttgtggatatcagagaggagatgccagagcagacagccaaacgaatgttgagccttcttggtattcttaagtacaaaccttcaggaaatgccacagatatgagtacttttcgtcagggtttggtgattggaagtaaacctgtaatttacccagtgctccactggcttcttcagaggactaatgaactgaagaaaagagcatatttagctcgttttttaataaaacttgaggtaccaagtgagtttcttcaggatgaaactgtggctgacaccaataaacagtatgaagagttaatggaagcctttaaaactttgcataaagaatatgagcagctcaagatatctggattttctacagcagaaataagaaaggatatcagtgcaatggaagaagaaaaggatcagctcattaagagagttgaacatttgaagaaaagggttgagacagctcagaatcatcaatggatgcttaaaatagcaaggcaacttcgagttgaaaaagagagagaagaatatcttgcacaacagaaacaggaacaaaagaatcagctatttcatgcagtgcaaagattgcaaagagtacaaaaccagctgaaaagcatgcgccaagctgcagcagatgcaaagcctgaaagtttaatgaagaggctagaggaggagataaaatttaatttatatatggtaactgaaaaatttcctaaagaattagaaaataagaaaaaggaattacattttttacaaaaagtagtttcagagccagctatgggccattctgatcttcttgaacttgaatctaaaataaatgaaataaacacagaaattaaccagttgattgaaaagaaaatgatgagaaatgagcccattgaaggcaaactctcactgtataggcaacaggcatctatcatttcccgtaaaaaagaagccaaagctgaggaacttcaggaggccaaggagaagttagccagcctagagagagaagcatcagtaaagagaaatcagacccgtgaatttgatggtactgaagttttaaagggagatgagttcaaacgatatgtcaataaacttcgaagcaagagtacagttttcaaaaagaagcatcagataatagctgaacttaaagctgaattcggtcttttgcagaggactgaagaacttcttaagcaacgtcatgaaaatattcaacaacaactgcaaactatggaggagaaaaagggtatatctggatatagttacacccaagaagagctagaaagagtatctgcactgaagagtgaagttgatgaaatgaaaggacgaacattggatgatatgtctgaaatggtgaaaaaactgtattcattggtatctgaaaagaagtcagctcttgcctcagttataaaagagctacgacagttgcgtcaaaaatatcaagaactgacccaggagtgtgatgaaaagaaatcccagtatgatagctgtgcagcaggcctcgaaagcaatcggtccaaattagaacaggaagttagaagactccgtgaagaatgtcttcaagaagaaagtagataccattatacaaattgtatgattaagaacctagaagttcaacttcgtcgtgctactgatgagatgaaggcatatatctcttctgatcaacaagaaaaaagaaaggcaattagggaacagtataccaaaaatactgctgaacaagaaaaccttggaaagaaacttcgggaaaaacaaaaagttatacgagaaagtcatggtccaaatatgaaacaagcaaaaatgtggcgtgatttggaacaattaatggaatgtaagaaacagtgctttctgaaacaacaaagccaaacttccattggtcaggtaattcaggagggtggggaggaccggctaatactgtgaattcttgtgtcatcgtttggggttttacttgataccactagctataagcctaatctcataatgtatttcttttttgaaactgatttgtatagcattttgttttcagaagagccattctttattaagttttcatagaaaataatgttaaggtagatttagtttgaatgttttttcatatgaaaaagaggcttttattcttttccatagtttagacatcactggcgtcttctgagttttatgagacaggaaactaagtttactatctgtaaatgtaaacatatgtccattaagaaacatgtagtttttttttagaatgtaataacccagtggcttactgtttttcttaatctcttttaaaaaaactttagaagaatcttttaggaactaatatctcttgttctgaagaaacatttatctgacgttcagcagttcctacagttttacttcagtttatttttcttctgtaaaatgcaagaaaatttaatattttgactaacatgtcttttctgtttgtatcatttaaaggcaaataaacttggtacgtatttcatatctatttaaaaaatgtata

SEQ ID NO: 144332 - DNA, 3048 bp, Homo sapiens
  Payload ID: 8515
  Gene Symbol: IFT81
  Gene Name: intraflagellar transport 81
  Uniprot ID: Q8WYA0
  ENST ID: ENST00000361948
  CDS Start-End: 549-1844
gtaactctacggcctagcaaccgttgccaaggagctcgactctgggagcggtctagagcccgggcgcctcctggggggtggggaaacggtttcgtgaggagaatttgaggtaacctcgccaactcgcggtcggaagctcctctgaaccccgaaataggagagagctcccgtcctctctcggtcctgatgcagcacctcgcaagtggaaggggtcgtcgcggttaagcccccggataggggaatcgggccccttctgggattcgagcggatccaggccgctccctggagggatgaactgtcgaggggcccagggcagcccccgctagaggcccggtcgggtgtggggtcccctgtcccctgtcccgagcccggggagggggacactatttctggtactcccaggaggctgcgggtcgatgctcgtgccagcctgggacccaggcagcacggtttctctcccaaattgtgccagagaacacgcacgtcctggttttcattgttccccgcctcctgcgactcgtttgtggttaaaattataagacctaattatgagtgatcaaattaaattcattatggacagtctcaataaggagccctttaggaagaactataatttaatcacgtttgattccttggagccaatgcaactattacaagttctcagtgatgttctggctgagattgacccaaagcaacttgtggatatcagagaggagatgccagagcagacagccaaacgaatgttgagccttcttggtattcttaagtacaaaccttcaggaaatgccacagatatgagtacttttcgtcagggtttggtgattggaagtaaacctgtaatttacccagtgctccactggcttcttcagaggactaatgaactgaagaaaagagcatatttagctcgttttttaataaaacttgaggtaccaagtgagtttcttcaggatgaaactgtggctgacaccaataaacagtatgaagagttaatggaagcctttaaaactttgcataaagaatatgagcagctcaagatatctggattttctacagcagaaataagaaaggatatcagtgcaatggaagaagaaaaggatcagctcattaagagagttgaacatttgaagaaaagggttgagacagctcagaatcatcaatggatgcttaaaatagcaaggcaacttcgagttgaaaaagagagagaagaatatcttgcacaacagaaacaggaacaaaagaatcagctatttcatgcagtgcaaagattgcaaagagtacaaaaccagctgaaaagcatgcgccaagctgcagcagatgcaaagcctgaaagtttaatgaagaggctagaggaggagataaaatttaatttatatatggtaactgaaaaatttcctaaagaattagaaaataagaaaaaggaattacattttttacaaaaagtagtttcagagccagctatgggccattctgatcttcttgaacttgaatctaaaataaatgaaataaacacagaaattaaccagttgattgaaaagaaaatgatgagaaatgagcccattgaaggcaaactctcactgtataggcaacaggcatctatcatttcccgtaaaaaagaagccaaagctgaggaacttcaggaggccaaggagaagttagccagcctagagagagaagcatcagtaaagagaaatcagacccgtgaatttgatggtactgaagttttaaagggagatgagagacaggatctcactctgtcacccaggctggagtgcggtggtgtgatcatggcttactgcagcctgaaactcctaggctcaagtgatcctcctacctcagcctcctgagaagctcggactacaggcacgagccaccatgcccagctaattttctttttttgttttgttttgtagagatgtggtctcactatgtttcccaggctggtcttaaactcccggcctcaagcagtcctcccacttcggcctcctgaagtgttaggattacaggcgtgagcctgcgcctggctgtaattactatacccagtttttacagataaaggatctgagacatgcagaggttttaagctgacttgcctgacaccccattgctagtaagtagtagaaccaggagttggatttagcagtctggctgtagagtcatcaatagtttgcacatgacagaaagctggaagaaatagtcaacctgaaacacatgatggaattataattcagaatcatcttggtagataggggcactgtgcttaaacaaaatgccattaatgggattataataaatataatgtggtagaattcaagttttgtttgccaattcaacacatcatctgttactaacgcagctttaaaaaatgcataaacgattatactacattaatttttttaaaaagtatcctgtttatggtctgattatgcctggagtattattttatatttttgacttcatgttttaagagacaatcatgccagagtcccacatgagggtgactaaaatggacaaaaagtctggaaactttcatatcaataattgattatgtattaactgaaacaaaagactagagaaagacacagtgggaattgattatgtattaactgaggaataaaagactgaagaaagacataataaatagttaaaggattatggaaaagatggtgttcagaaaaaaattaacatgcaggcctgagactgctatccctagaaaggtctgcttgcaaagttggcccttggctggcatctgggggaacttggttcttggatggattcctgccattcactgataagaatggctcaccttgcctaaagtatatgaagagtgtgctttatgtcgagctcctgcttgcttgcctctttctttgtctttctttcttttccttcctcccttccttccttccttccttccttccttccttccttccttccttccttccttccttcctctctctctctctttctttctttcttctttctggaattttggtacaggctaggcagaatgtgcctagatgatcagctcctagtaaaaaccttgagaactaa

SEQ ID NO: 144333 - DNA, 2694 bp, Homo sapiens
  Payload ID: 8515
  Gene Symbol: IFT81
  Gene Name: intraflagellar transport 81
  ENST ID: ENST00000550156
  CDS Start-End: 1-1873
aatgcaactattacaagttctcagtgatgttctggctgagattgacccaaagcaacttgtggatatcagagaggagatgccagagcagacagccaaacgaatgttgagccttcttggtattcttaagtacaaaccttcaggaaatgccacagatatgagtacttttcgtcagggtttggtgattggaagtaaacctgtaatttacccagtgctccactggcttcttcagaggactaatgaactgaagaaaagagcatatttagctcgttttttaataaaacttgaggtaccaagtgagtttcttcaggatgaaactgtggctgacaccaataaacagtatgaagagttaatggaagcctttaaaactttgcataaagaatatgagcagctcaagatatctggattttctacagcagaaataagaaaggatatcagtgcaatggaagaagaaaaggatcagctcattaagagagttgaacatttgaagaaaagggttgagacagctcagaatcatcaatggatgcttaaaatagcaaggcaacttcgagttgaaaaagagagagaagaatatcttgcacaacagaaacaggaacaaaagaatcagctatttcatgcagtgcaaagattgcaaagagtacaaaaccagctgaaaagcatgcgccaagctgcagcagatgcaaagcctgaaagtttaatgaagaggctagaggaggagataaaatttaatttatatatggtaactgaaaaatttcctaaagaattagaaaataagaaaaaggaattacattttttacaaaaagtagtttcagagccagctatgggccattctgatcttcttgaacttgaatctaaaataaatgaaataaacacagaaattaaccagttgattgaaaagaaaatgatgagaaatgagcccattgaaggcaaactctcactgtataggcaacaggcatctatcatttcccgtaaaaaagaagccaaagctgaggaacttcaggaggccaaggagaagttagccagcctagagagagaagcatcagtaaagagaaatcagacccgtgaatttgatggtactgaagttttaaagggagatgagttcaaacgatatgtcaataaacttcgaagcaagagtacagttttcaaaaagaagcatcagataatagctgaacttaaagctgaattcggtcttttgcagaggactgaagaacttcttaagcaacgtcatgaaaatattcaacaacaactgcaaactatggaggagaaaaagggtatatctggatatagttacacccaagaagagctagaaagagtatctgcactgaagagtgaagttgatgaaatgaaaggacgaacattggatgatatgtctgaaatggtgaaaaaactgtattcattggtatctgaaaagaagtcagctcttgcctcagttataaaagagctacgacagttgcgtcaaaaatatcaagaactgacccaggagtgtgatgaaaagaaatcccagtatgatagctgtgcagcaggcctcgaaagcaatcggtccaaattagaacaggaagttagaagactccgtgaagaatgtcttcaagaagaaagtagataccattatacaaattgtatgattaagaacctagaagttcaacttcgtcgtgctactgatgagatgaaggcatatatctcttctgatcaacaagaaaaaagaaaggcaattagggaacagtataccaaaaatactgctgaacaagaaaaccttggaaagagacggaatctcactctgttgcccaggctggagtgcagtggcacaatcttggctcactctgccttccagtacagatgggatttcaccatgttggccaggctggtctcgaactcctgacttcaggtgatctgcccacctatatagcatgagtcctgttttccacttgaaactccaagcatacctgacatataacagaaacttcgggaaaaacaaaaagttatacgagaaagtcatggtccaaatatgaaacaagcaaaaatgtggcgtgatttggaacaattaatggaatgtaagaaacagtgctttctgaaacaacaaagccaaacttccattggtcaggtaattcaggagggtggggaggaccggctaatactgtgaattcttgtgtcatcgtttggggttttacttgataccactagctataagcctaatctcataatgtatttcttttttgaaactgatttgtatagcattttgttttcagaagagccattctttattaagttttcatagaaaataatgttaaggtagatttagtttgaatgttttttcatatgaaaaagaggcttttattcttttccatagtttagacatcactggcgtcttctgagttttatgagacaggaaactaagtttactatctgtaaatgtaaacatatgtccattaagaaacatgtagtttttttttagaatgtaataacccagtggcttactgtttttcttaatctcttttaaaaaaactttagaagaatcttttaggaactaatatctcttgttctgaagaaacatttatctgacgttcagcagttcctacagttttacttcagtttatttttcttctgtaaaatgcaagaaaatttaatattttgactaacatgtcttttctgtttgtatcatttaaaggcaaataaacttggtacgtatttcatatctattta

SEQ ID NO: 144334 - DNA, 1171 bp, Homo sapiens
  Payload ID: 8515
  Gene Symbol: IFT81
  Gene Name: intraflagellar transport 81
  ENST ID: ENST00000546374
  CDS Start-End: 74-1171
gcccgggcgcctcctggggggtggggaaacggtttcgtgaggagaatttgagttaaaattataagacctaattatgagtgatcaaattaaattcattatggacagtctcaataaggagccctttaggaagaactataatttaatcacgtttgattccttggagccaatgcaactattacaagttctcagtgatgttctggctgagattgacccaaagcaacttgtggatatcagagaggagatgccagagcagacagccaaacgaatgttgagccttcttggtattcttaagtacaaaccttcaggaaatgccacagatatgagtacttttcgtcagggtttggtgattggaagtaaacctgtaatttacccagtgctccactggcttcttcagaggactaatgaactgaagaaaagagcatatttagctcgttttttaataaaacttgaggtaccaagtgagtttcttcaggatgaaactgtggctgacaccaataaacaggatatcagtgcaatggaagaagaaaaggatcagctcattaagagagttgaacatttgaagaaaagggttgagacagctcagaatcatcaatggatgcttaaaatagcaaggcaacttcgagttgaaaaagagagagaagaatatcttgcacaacagaaacaggaacaaaagaatcagctatttcatgcagtgcaaagattgcaaagagtacaaaaccagctgaaaagcatgcgccaagctgcagcagatgcaaagcctgaaagtttaatgaagaggctagaggaggagataaaatttaatttatatatggtaactgaaaaatttcctaaagaattagaaaataagaaaaaggaattacattttttacaaaaagtagtttcagagccagctatgggccattctgatcttcttgaacttgaatctaaaataaatgaaataaacacagaaattaaccagttgattgaaaagaaaatgatgagaaatgagcccattgaaggcaaactctcactgtataggcaacaggcatctatcatttcccgtaaaaaagaagccaaagctgaggaacttcaggaggccaaggagaagttagccagcctagagagagaagcatcagtaaagagaaatcagacccgtgaatttgatggtactgaagttttaaagggagatgag

SEQ ID NO: 144335 - DNA, 2710 bp, Homo sapiens
  Payload ID: 8515
  Gene Symbol: IFT81
  Gene Name: intraflagellar transport 81
  Uniprot ID: Q8WYA0
  ENST ID: ENST00000552912
  CDS Start-End: 131-2161
gtaactctacggcctagcaaccgttgccaaggagctcgactctgggagcggtctagagcccgggcgcctcctggggggtggggaaacggtttcgtgaggagaatttgagttaaaattataagacctaattatgagtgatcaaattaaattcattatggacagtctcaataaggagccctttaggaagaactataatttaatcacgtttgattccttggagccaatgcaactattacaagttctcagtgatgttctggctgagattgacccaaagcaacttgtggatatcagagaggagatgccagagcagacagccaaacgaatgttgagccttcttggtattcttaagtacaaaccttcaggaaatgccacagatatgagtacttttcgtcagggtttggtgattggaagtaaacctgtaatttacccagtgctccactggcttcttcagaggactaatgaactgaagaaaagagcatatttagctcgttttttaataaaacttgaggtaccaagtgagtttcttcaggatgaaactgtggctgacaccaataaacagtatgaagagttaatggaagcctttaaaactttgcataaagaatatgagcagctcaagatatctggattttctacagcagaaataagaaaggatatcagtgcaatggaagaagaaaaggatcagctcattaagagagttgaacatttgaagaaaagggttgagacagctcagaatcatcaatggatgcttaaaatagcaaggcaacttcgagttgaaaaagagagagaagaatatcttgcacaacagaaacaggaacaaaagaatcagctatttcatgcagtgcaaagattgcaaagagtacaaaaccagctgaaaagcatgcgccaagctgcagcagatgcaaagcctgaaagtttaatgaagaggctagaggaggagataaaatttaatttatatatggtaactgaaaaatttcctaaagaattagaaaataagaaaaaggaattacattttttacaaaaagtagtttcagagccagctatgggccattctgatcttcttgaacttgaatctaaaataaatgaaataaacacagaaattaaccagttgattgaaaagaaaatgatgagaaatgagcccattgaaggcaaactctcactgtataggcaacaggcatctatcatttcccgtaaaaaagaagccaaagctgaggaacttcaggaggccaaggagaagttagccagcctagagagagaagcatcagtaaagagaaatcagacccgtgaatttgatggtactgaagttttaaagggagatgagttcaaacgatatgtcaataaacttcgaagcaagagtacagttttcaaaaagaagcatcagataatagctgaacttaaagctgaattcggtcttttgcagaggactgaagaacttcttaagcaacgtcatgaaaatattcaacaacaactgcaaactatggaggagaaaaagggtatatctggatatagttacacccaagaagagctagaaagagtatctgcactgaagagtgaagttgatgaaatgaaaggacgaacattggatgatatgtctgaaatggtgaaaaaactgtattcattggtatctgaaaagaagtcagctcttgcctcagttataaaagagctacgacagttgcgtcaaaaatatcaagaactgacccaggagtgtgatgaaaagaaatcccagtatgatagctgtgcagcaggcctcgaaagcaatcggtccaaattagaacaggaagttagaagactccgtgaagaatgtcttcaagaagaaagtagataccattatacaaattgtatgattaagaacctagaagttcaacttcgtcgtgctactgatgagatgaaggcatatatctcttctgatcaacaagaaaaaagaaaggcaattagggaacagtataccaaaaatactgctgaacaagaaaaccttggaaagaaacttcgggaaaaacaaaaagttatacgagaaagtcatggtccaaatatgaaacaagcaaaaatgtggcgtgatttggaacaattaatggaatgtaagaaacagtgctttctgaaacaacaaagccaaacttccattggtcaggtaattcaggagggtggggaggaccggctaatactgtgaattcttgtgtcatcgtttggggttttacttgataccactagctataagcctaatctcataatgtatttcttttttgaaactgatttgtatagcattttgttttcagaagagccattctttattaagttttcatagaaaataatgttaaggtagatttagtttgaatgttttttcatatgaaaaagaggcttttattcttttccatagtttagacatcactggcgtcttctgagttttatgagacaggaaactaagtttactatctgtaaatgtaaacatatgtccattaagaaacatgtagtttttttttagaatgtaataacccagtggcttactgtttttcttaatctcttttaaaaaaactttagaagaatcttttaggaactaatatctcttgttctgaagaaacatttatctgacgttcagcagttcctacagttttacttcagtttatttttcttctgtaaaatgcaagaaaatttaatattttgactaacatgtcttttctgtttgtatcatttaaaggcaaataaacttggtacgtatttc

SEQ ID NO: 144336 - DNA, 549 bp, Homo sapiens
  Payload ID: 8515
  Gene Symbol: IFT81
  Gene Name: intraflagellar transport 81
  ENST ID: ENST00000551273
  CDS Start-End: 1-314
agcagctcaagatatctggattttctacagcagaaataagaaaggatatcagtgcaatggaagaagaaaaggatcagctcattaagagagttgaacatttgaagaaaagggttgagacagctcagaatcatcaatggatgcttaaaatagcaaggcaacttcgagttgaaaaagagagagaagaatatcttgcacaacagaaacaggaacaaaagaatcagctatttcatgcagtgcaaagattgcaaagagtacaaaaccagctgaaaagcatgcgccaagctgcagcagatgcaaagcctgaaaataaatgaaataaacacagaaattaaccagttgattgaaaagaaaatgatgagaaatgagcccattgaaggcaaactctcactgtataggcaacaggcatctatcatttcccgtaaaaaagaagccaaagctgaggaacttcaggaggccaaggagaagttagccagcctagagagagaagcatcagtaaagagaaatcagacccgtgaatttgatggtactgaagttttaaagggagatgag

SEQ ID NO: 144337 - DNA, 2856 bp, Homo sapiens
  Payload ID: 8516
  Gene Symbol: IFT88
  Gene Name: intraflagellar transport 88
  Uniprot ID: Q13099
  ENST ID: ENST00000351808
  CDS Start-End: 195-2669
cgcaccacccccttcccgccgcgctctctcccgcccccgcgcttccggccccgcccgcccccgcgcggaggactgtgggagcggcttccttggattccgcgcttggcaacggctcggcgtcgcgctttggccaaccgctgcgtcgtccctgggcccgaataactgtcgcccgcttccctcagcgtgaggtacaaatgatgcaaaatgtgcacctggctccagagacagatgaagatgatctttattccggctataatgactacaatccaatctatgatatcgaggaattggagaatgatgcagcttttcagcaagctgtgaggactagtcatggcagaagacctccaataactgctaaaatatcaagcacggcagttactagacctatagctactggatatgggtccaagacatctctggcatcatcaataggaagaccaatgacaggggctattcaggatggagttactagacccatgacagcagtgagagcagctggttttaccaaagcagctttgagaggctctgcatttgacccccttagtcagtcaaggggccctgcttcccctttggaagccaagaaaaaagatagcccagaggaaaaaataaagcaattagagaaggaagtaaatgagttggtagaagaaagctgtattgccaatagttgtggagacttaaaattggccttagaaaaggcaaaagatgcaggaagaaaagagagagtcctggtgagacagcgagaacaagttacaactccagaaaatatcaatttggatttaacttactcagttcttttcaatttggccagtcagtattcagttaatgaaatgtatgccgaagcacttaacacttatcaagttatagtcaaaaataagatgtttagcaatgcaggaatattgaaaatgaatatgggaaatatctatttaaagcaaagaaattattccaaagccattaaattctaccgaatggcattagaccaagttccaagtgtcaataagcaaatgaggattaaaataatgcagaatattggagttacatttattcaggctggtcagtattcagatgctattaattcatatgagcacataatgagcatggcaccaaatctgaaggcaggctacaacctaactatctgttattttgctattggagaccgagaaaaaatgaagaaggcattccaaaaattgattactgttccattagaaattgatgaagataaatatatttcaccaagtgatgatcctcatactaacttagtaactgaagctataaaaaatgatcacctcaggcaaatggaacgtgaaaggaaagccatggcagaaaaatatattatgacatctgcaaaactcattgctcctgtaattgaaacatcttttgctgcaggttatgattggtgcgtggaagtggtgaaagcttctcaatatgtagagctagccaatgatctggaaataaacaaagcagttacatacttgagacaaaaagactataaccaagctgtagagatcttaaaagtgttggaaaaaaaggacagtagagtgaaaagtgcagctgcaaccaatctctcagccctgtattatatgggaaaggattttgcacaagccagcagctatgcagatatagctgtgaactctgatagatataatccagcagctcttactaataaagggaatacagtttttgcaaatggtgattatgagaaggccgctgaattctataaagaggctctaagaaatgattcttcttgtactgaagcactttataatattggccttacctatgagaaactaaatcggctagatgaggctttggactgtttcctgaaacttcacgcaatcctacgaaacagtgccgaagttctttaccagatagcaaatatatatgaattaatggaaaatcccagtcaagctattgaatggctaatgcaggtggtcagtgttattccaaccgatcctcaagttttatctaagctaggagaattatatgatcgtgaaggagataaatctcaagcatttcaatattactatgagtcatataggtattttccttgtaatattgaagtcattgagtggcttggagcctattacattgacacccaattttgggaaaaagctattcagtactttgaaagagcttctcttatacagcctacacaagtgaaatggcagctgatggtagctagttgtttcagaagaagtggtaactaccaaaaagcattagatacttacaaagatactcacagaaaatttccagaaaatgtcgaatgtctgcgtttcttagttcgtctctgcacagatcttggattaaaagatgctcaagaatatgccagaaaactgaagaggttggaaaaaatgaaagaaataagggaacagcgcataaagtcaggcagagatggcagtgggggctcccgtggcaaaagagaaggaagtgctagcggtgatagtggccagaactatagtgccagtagtaaaggtgaacgactaagtgccagactcagagctttacctgggacaaatgaaccttatgaaagtagcagtaacaaagaaatagatgcctcctatgtggacccacttggccctcaaatagaacgaccaaaaactgcagccaagaaaaggatcgatgaggatgattttgctgatgaagaattaggagatgatttgcttccagaataatattcactttaatatttattaaaggaaagaaattgccttatgagatcatcctcatgttaaaccttggattaaatatctaacctgtaattattttttttcactgtcaaaacttaagtaagtgtattctattctgtatgtatgcatttaagttgtttttttcttttaaggaataaaaacaggtaaaact

SEQ ID NO: 144338 - DNA, 3091 bp, Homo sapiens
  Payload ID: 8516
  Gene Symbol: IFT88
  Gene Name: intraflagellar transport 88
  Uniprot ID: Q13099
  ENST ID: ENST00000319980
  CDS Start-End: 328-2829
ggactgtgggagcggcttccttggattccgcgcttggcaacggctcggcgtcgcgctttggccaaccgctgcgtcgtccctgggcccgaataactgtcgcccgcttccctcagcgtgaggtgaagcacttcaaattgcctgatgaaagttgaatcaggaatgaagataaaagtacacaacaatgcagaaagcggtacttagcctcacaaagatggaaacattccaaaaacgtgaaaaactgcagtaggcttcttggaagtagaccaagggtgtccaatctttggcttccctgggccacatcggaagaagaattgtcttgggccacacatgaaattcacaaacactaaggtacaaatgatgcaaaatgtgcacctggctccagagacagatgaagatgatctttattccggctataatgactacaatccaatctatgatatcgaggaattggagaatgatgcagcttttcagcaagctgtgaggactagtcatggcagaagacctccaataactgctaaaatatcaagcacggcagttactagacctatagctactggatatgggtccaagacatctctggcatcatcaataggaagaccaatgacaggggctattcaggatggagttactagacccatgacagcagtgagagcagctggttttaccaaagcagctttgagaggctctgcatttgacccccttagtcagtcaaggggccctgcttcccctttggaagccaagaaaaaagatagcccagaggaaaaaataaagcaattagagaaggaagtaaatgagttggtagaagaaagctgtattgccaatagttgtggagacttaaaattggccttagaaaaggcaaaagatgcaggaagaaaagagagagtcctggtgagacagcgagaacaagttacaactccagaaaatatcaatttggatttaacttactcagttcttttcaatttggccagtcagtattcagttaatgaaatgtatgccgaagcacttaacacttatcaagttatagtcaaaaataagatgtttagcaatgcaggaatattgaaaatgaatatgggaaatatctatttaaagcaaagaaattattccaaagccattaaattctaccgaatggcattagaccaagttccaagtgtcaataagcaaatgaggattaaaataatgcagaatattggagttacatttattcaggctggtcagtattcagatgctattaattcatatgagcacataatgagcatggcaccaaatctgaaggcaggctacaacctaactatctgttattttgctattggagaccgagaaaaaatgaagaaggcattccaaaaattgattactgttccattagaaattgatgaagataaatatatttcaccaagtgatgatcctcatactaacttagtaactgaagctataaaaaatgatcacctcaggcaaatggaacgtgaaaggaaagccatggcagaaaaatatattatgacatctgcaaaactcattgctcctgtaattgaaacatcttttgctgcaggttatgattggtgcgtggaagtggtgaaagcttctcaatatgtagagctagccaatgatctggaaataaacaaagcagttacatacttgagacaaaaagactataaccaagctgtagagatcttaaaagtgttggaaaaaaaggacagtagagtgaaaagtgcagctgcaaccaatctctcagccctgtattatatgggaaaggattttgcacaagccagcagctatgcagatatagctgtgaactctgatagatataatccagcagctcttactaataaagggaatacagtttttgcaaatggtgattatgagaaggccgctgaattctataaagaggctctaagaaatgattcttcttgtactgaagcactttataatattggccttacctatgagaaactaaatcggctagatgaggctttggactgtttcctgaaacttcacgcaatcctacgaaacagtgccgaagttctttaccagatagcaaatatatatgaattaatggaaaatcccagtcaagctattgaatggctaatgcaggtggtcagtgttattccaaccgatcctcaagttttatctaagctaggagaattatatgatcgtgaaggagataaatctcaagcatttcaatattactatgagtcatataggtattttccttgtaatattgaagtcattgagtggcttggagcctattacattgacacccaattttgggaaaaagctattcagtactttgaaagagcttctcttatacagcctacacaagtgaaatggcagctgatggtagctagttgtttcagaagaagtggtaactaccaaaaagcattagatacttacaaagatactcacagaaaatttccagaaaatgtcgaatgtctgcgtttcttagttcgtctctgcacagatcttggattaaaagatgctcaagaatatgccagaaaactgaagaggttggaaaaaatgaaagaaataagggaacagcgcataaagtcaggcagagatggcagtgggggctcccgtggcaaaagagaaggaagtgctagcggtgatagtggccagaactatagtgccagtagtaaaggtgaacgactaagtgccagactcagagctttacctgggacaaatgaaccttatgaaagtagcagtaacaaagaaatagatgcctcctatgtggacccacttggccctcaaatagaacgaccaaaaactgcagccaagaaaaggatcgatgaggatgattttgctgatgaagaattaggagatgatttgcttccagaataatattcactttaatatttattaaaggaaagaaattgccttatgagatcatcctcatgttaaaccttggattaaatatctaacctgtaattattttttttcactgtcaaaacttaagtaagtgtattctattctgtatgtatgcatttaagttgtttttttcttttaaggaataaaaacaggtaaaactaatactttaggccagtgacttccttagctttttgaaaacattgacacacaggaagaaataaatttcataacacaa

SEQ ID NO: 144339 - DNA, 575 bp, Homo sapiens
  Payload ID: 8516
  Gene Symbol: IFT88
  Gene Name: intraflagellar transport 88
  ENST ID: ENST00000389373
  CDS Start-End: 426-575
cgcgcttggcaacggctcggcgtcgcgctttggccaaccgctgcgtcgtccctgggcccgaataactgtcgcccgcttccctcagcgtgaggtgaagcacttcaaattgcctgatgaaagttgaatcaggaatgaagataaaagtacacaacaatgcagaaagcggtacttagcctcacaaagatggaaacattccaaaaacgtgaagtactgttgtcccaagattctttctaagcctaaaattacacttttactagtccgattttctggttgtgagttttttttgtttgttttttttttttcgagaaactgcagtaggcttcttggaagtagaccaagggtgtccaatctttggcttccctgggccacatcggaagaagaattgtcttgggccacacatgaaattcacaaacactaaggtacaaatgatgcaaaatgtgcacctggctccagagacagatgaagatgatctttattccggctataatgactacaatccaatctatgatatcgaggaattggagaatgatgcagcttttcagcaagctgtgaggactagtcatggcagaagacct

SEQ ID NO: 144340 - DNA, 2590 bp, Homo sapiens
  Payload ID: 8516
  Gene Symbol: IFT88
  Gene Name: intraflagellar transport 88
  ENST ID: ENST00000537103
  CDS Start-End: 1-1105
ggccttagaaaaggcaaaagatgcaggaagaaaagagagagtcctggtgagacagcgagaacaagttacaactccagaaaatatcaatttggatttaacttactcagttcttttcaatttggccagtcagtattcagttaatgaaatgtatgccgaagcacttaacacttatcaagttatagtcaaaaataagatgtttagcaatgcaggaatattgaaaatgaatatgggaaatatctatttaaagcaaagaaattattccaaagccattaaattctaccgaatggcattagaccaagttccaagtgtcaataagcaaatgaggattaaaataatgcagaatattggagttacatttattcaggctgaccgagaaaaaatgaagaaggcattccaaaaattgattactgttccattagaaattgatgaagataaatatatttcaccaagtgatgatcctcatactaacttagtaactgaagctataaaaaatgatcacctcaggcaaatggaacgtgaaaggaaagccatggcagaaaaatatattatgacatctgcaaaactcattgctcctgtaattgaaacatcttttgctgcaggttatgattggtgcgtggaagtggtgaaagcttctcaatatgtagagctagccaatgatctggaaataaacaaagcagttacatacttgagacaaaaagactataaccaagctgtagagatcttaaaagtgttggaaaaaaaggacagtagagtgaaaagtgcagctgcaaccaatctctcagccctgtattatatgggaaaggattttgcacaagccagcagctatgcagatatagctgtgaactctgatagatataatccagcagctcttactaataaagggaatacagtttttgcaaatggtgattatgagaaggccgctgaattctataaagaggctctaagaaatgattcttcttgtactgaagcactttataatattggccttacctatgagaaactaaatcggctagatgaggctttggactgtttcctgaaacttcacgcaatcctacgaaacagtgccgaagttctttaccagatagcaaatatgtatcttatttgaaaaccttagggacagttattaattctctcaattggtgattgaagatcaattattaaataagtttaactaatgaagtaattgatgaggataatatttgaagtaagtgatgaggataatctggcagattattgtgtgataaatatcatttgagtaatcctattttaagatgtagtttgcatcgaaagaggaattaatggttaaaactattatttattaaattttgaaaataactgaagtaattaggacattttcggtacatataagccattcattgaaagtcaatttggtgctttagaacgttgtattaattctgaagcttgtagggtatcattgaagcactaacttactaaataaaatactgtttattactgattactattgattgaatttggataatttttcttacttttttagctggcctgtagatataatgaggtctccaaagactgttaccctctaaaattatgtaattcttcatatgaactcattcattctgttcatttaatagtcatttattgaatgtatactatgtgtatcagtattatgtttcaaactcaggggaatgtagaactacaaaatgttgcgctaatatcagtttcttccacaacacttagctttcttaataagccctgctcttggttagaaaagcagaaatgtgttaatgtttttaatgcttttcatgctatttgaaaagcacttttaatttctctccttattttggtaagctttggccacaacattgggaagagttaaacatcttaggtagattttcaacttactgttatcttggtttaaattttatacaaatatgtttagaaaattttatatgttgtgaggtgtaccattaataattttaagtactatctgctgtacttttgataaagaattttattgaaaaattttagttttaggccaggcacagtagctcacacctgtaatcccagcactttgggaggccaaggcaggcggatcatttgaagtcaggagttcgagaccagcctggccatcatggtgaaaccccatctctactaaaaatacaaaaattagccgggtgttgtggcaggcacctgtaatcccagttactcccgaggctgaggcaggagaatcacttgaacctgggaggcagaggttgcagtgagccaagatagtgccactgtactccagcctaggtgcagagctagactatctcaaaaaaaaattagttttagagcagatagcatcatagttactcctgttagtctttttgttctgttttgttcatttaatttctctgaaactgccagtgtcattatcttttaccacccagttcatgatcagcttggatccagtcaagcaactgatgtatttgagactgtttgagtacattttcttttttttttttcttgtggtatcacacttgtcatcgttaaaaacagtagatcttctggtgtcactcttgtcaccattgaaaacaatgcttctttttcaataaactttgaattggaa

SEQ ID NO: 144341 - DNA, 713 bp, Homo sapiens
  Payload ID: 8517
  Gene Symbol: INIP
  Gene Name: INTS3 and NABP interacting protein
  ENST ID: ENST00000374234
  CDS Start-End: 187-354
agcgcagcgggggcgggaaggttgtagtgccgcgagttgagctcctcttgcctaagtggtcgcgccccctttaagagcagcgattgtaaggagaggcggtcccggtgtcctcgggtcccaggttttcaaaacaaaaatagagttgcaatcttggcagaactggacaaagagaaaagaaaactacttatgcagaaccagtcttcaacaaatcatcctggagctagcatgctcatgcacattcatctggatacttcatcactcaagactctgcatttgggaaccttattcttcctgttttacctcgccttgacccagaatgaagaaaacatttgcgatggaaaagtgactttgtaatatcaaatgccaaagctactatcattcagtgctacatgaactgtgactttaagaattttggtgaactttgatattttttgtttgtctgaaagaaaggaatgtgtaagtgaaagctgaaagaagaataaccaggatgatgagagctgtggaagctgtatcgtccaaggaattgattatgtaccgtgactgtaacttttttgtaatgctgtttaactctcaatcagactgtgaactggatggtcacgaagtcattccccaactcctagcaagtttgactgaatatatcatgtccacagtagattttcaagaatcatttatagtacttaactttaaagaaacaaggctgcttttaaaaaatg

SEQ ID NO: 144342 - DNA, 874 bp, Homo sapiens
  Payload ID: 8517
  Gene Symbol: INIP
  Gene Name: INTS3 and NABP interacting protein
  ENST ID: ENST00000374236
  CDS Start-End: 229-453
ggggtttccgctccctggggcgcacgtcagtcaggaggcggaagcgcagcgggggcgggaaggttgtagtgccgcgagttgagctcctcttgcctaagtggtcgcgccccctttaagagcagcgattgtaaggagaggcggtcccggtgtcctcgggtcccaggttttcaaaacaaaaatagagttgcaatcttggcagaactggacaaagagaaaagaaaactacttatgcagaaccagtcttcaacaaatcatcctggagctagcattgcactctcgagaccctctcttaataaggacttccgggatcacgctgagcagcagcatattgcagcccaacagaaggcagctttgcagcatgctcatgcacattcatctggatacttcatcactcaagactctgcatttgggaaccttattcttcctgttttacctcgccttgacccagaatgaagaaaacatttgcgatggaaaagtgactttgtaatatcaaatgccaaagctactatcattcagtgctacatgaactgtgactttaagaattttggtgaactttgatattttttgtttgtctgaaagaaaggaatgtgtaagtgaaagctgaaagaagaataaccaggatgatgagagctgtggaagctgtatcgtccaaggaattgattatgtaccgtgactgtaacttttttgtaatgctgtttaactctcaatcagactgtgaactggatggtcacgaagtcattccccaactcctagcaagtttgactgaatatatcatgtccacagtagattttcaagaatcatttatagtacttaactttaaagaaacaaggctgcttttaaaaaatgaactaataggcttaaatcaattgcatcc

SEQ ID NO: 144343 - DNA, 4233 bp, Homo sapiens
  Payload ID: 8517
  Gene Symbol: INIP
  Gene Name: INTS3 and NABP interacting protein
  Uniprot ID: Q9NRY2
  ENST ID: ENST00000374242
  CDS Start-End: 307-621
tttggaaaaaaaagtgacgtctgcactgaggtggccgctaaagtgcgaatcacgacgggcggtggccgttgggtcccggcgggaggcggggtttccgctccctggggcgcacgtcagtcaggaggcggaagcgcagcgggggcgggaaggttgtagtgccgcgagttgagctcctcttgcctaagtggtcgcgccccctttaagagcagcgattgtaaggagaggcggtcccggtgtcctcgggtcccaggtgattgtgaagtgctgaccaattgccactggacatacttgaaacaaaataggaaaatggcagcaaactcttcaggacaaggttttcaaaacaaaaatagagttgcaatcttggcagaactggacaaagagaaaagaaaactacttatgcagaaccagtcttcaacaaatcatcctggagctagcattgcactctcgagaccctctcttaataaggacttccgggatcacgctgagcagcagcatattgcagcccaacagaaggcagctttgcagcatgctcatgcacattcatctggatacttcatcactcaagactctgcatttgggaaccttattcttcctgttttacctcgccttgacccagaatgaagaaaacatttgcgatggaaaagtgactttgtaatatcaaatgccaaagctactatcattcagtgctacatgaactgtgactttaagaattttggtgaactttgatattttttgtttgtctgaaagaaaggaatgtgtaagtgaaagctgaaagaagaataaccaggatgatgagagctgtggaagctgtatcgtccaaggaattgattatgtaccgtgactgtaacttttttgtaatgctgtttaactctcaatcagactgtgaactggatggtcacgaagtcattccccaactcctagcaagtttgactgaatatatcatgtccacagtagattttcaagaatcatttatagtacttaactttaaagaaacaaggctgcttttaaaaaatgaactaataggcttaaatcaattgcatccatatttgctgtttataggattgctatcagtataccttttgcgtttatagtcaacatgtatcatcctgaaatattctttctggacttataactacttccccctttttcactttaaaacaaacctcaagaataaattactaaccagtcttaaccatcttttataaacatatgctcttataaatgttgtgactagatgcaattaaaaataatagggaatgtggtaggtttttaatttgtacatcctcttatttagtgttaccacataaatgatgagtttgtgtggttctgttttccatttttgttctaactgaaaactttttggctgggcacggtgcctcatgcctgtaatcccagcactttgggaggccaaggcgggcagatcacttgagatcaggagtttgagaccagcctggccaacatggtgaaaccctgtctctactaaaagtataaaaaattagccatgtgtggtggcacacgcctgtaatcccagctactcaggaggctgaggcaggagaatcgcttgaacctgggaggcaggggttgcagtgagctgagacggtgtcactgcactccagcctgggtgacagtgagtctttgtctcaaagaaaaaaagaaaaagaaaacttatgcaagtcgagctcctttttaattaagtaggaagggattaggttaagaaagtctctcaacatgacccatctttagcagtatctggggtgcttatttaagtatgcagtcccactaccctaccctagtcctacagaattagaatctgattcaaaataaagtctgaaaaccatgagatagagaattctatgaaatatcttgtacagattttcgtgatatatttatacacgcatgggtttgtagatccctgaaacttagaggtcatttagctaaaatctacattttttttaacttttaataggattgaaatgatattttacactgtatcacagatacagtattttatataactttttgtaactgaccttatcttggccttgagtcccatcctctctggtggtagcgtaaaactgaaaattccagtttgggtcaatatttagtgaaagttctactttcttttcagagagtttgttcccccctttcttccttagatgttttcaaacacacagccccatcctactcaaaccaagtgaagcaagagtggacaattctagaattggctgtgccatgtaggttttttttagaatttgaactgatttccttcattttgatgaggtggcaactgtccccattgtaatggtcaccattgcagcgaggatagccttacttctgcggcgcagagctcctcagggggcctctggctcctgtccttcctcaggtccatccaactactccttgggcctccttatggtagccctcattgtcttgagttgatttcactaggtttctgttctctgtcatctgcaacataactgacatggttctaaatctgtctctaaggagataacacattagtatattttctacactattgaagcctctacctaatgtatgacttttgtagctcaggtaaagagatctttttaccagtgttatcgtttctagtctgtttgttagtcttcttttaaatagatatggcctaaatcctgtattcctggctaggaagcacttctctccacccctctgctttgagttacaaattcaattcaatttcctatgtatttattaatacctacagataaagtactgtgctttgggggacacaaaggtgactggtacctgctcttttaggaggtcaccgtgcagaggatcctattctggtacaccaatagttataaagcaagccacagcctaggcaacatagtgagacccctgtctctactaaaaaattaaaaaaaaaaaaaaaagattggctaggtgtgctggtgcatgcatagagtcccagccactcgggaggctgaggtgggaggattgcttgagcctgggaggttgaggctgcagtgggccatgattgcacaacttggcaacagagtgagaccctgtctctaaatcaatcaatcaagcgagccagaatgcagtagtggcctgagagaggcatcctggaacgcagtgcggtctggctaggcttagaagtattcatgtgatttttacctgacaagggaaggaagagctgctccacgtgcagagcaaggtttcagaatgagaggagaagagcaggcactgcagagggtgagggaaagggcagcagtggactgggaagccctcaggtggaggtcagcattgcttccctcagatcatgggtgaatttgaggaactcagttaatatctttgtatgttcctccctccataaggtgagaacaagcacatgctctgcccatgtcagaaattgtctagactagtgtttttcaaagtgcaaaagcctcaacccattactgagttgagaagccaacttaatggtttaacaggattgaccagcattttttccgaaaaaatcaaaaacatctgagtgtactgcatatagaaataggtggttttgcctcatgaatattctgtttctgtgtgttcctatattttactttgtattgtgttggttttttaagagacagtcctgctctgtcatccaggctggagtgcagtggtataatcatagctcactgcaagactccttgaatccctgggctcaagcaatcctcaacccttagcctcccaagtagctgagactacaggcacatgccaccatgcccagctaatttttttttttttttaatttttgtagagacagcatcttgctatgttgcccaggctggtcttgaactcttggcctcaagcagtcctctcgatcctcccaccttggcctcctaaagtgctgagattacaggtgtgagccactgcatctggcttacttattttgtctattgtctgttccactagtatgtaaagtcttagagagcaagaatttttgtttatttctttctcttcctcctttcctttcttcctcttttacttcgttcactactgtattccacataaaatatatttggcatatagtaggtgttcaatatgttgaaggaatgaaagaatttatagacttgagttgcaatataaaatgtatttttttttactgtgagttatggcaaaaaaagttttgaaagccgcttctaaataatgcagatgtcagtgctttgaccctggaataaaaactgaaatgacttagtgatttcaaaggca

SEQ ID NO: 144344 - DNA, 13233 bp, Homo sapiens
  Payload ID: 8518
  Gene Symbol: INTU
  Gene Name: inturned planar cell polarity protein
  Uniprot ID: Q9ULD6
  ENST ID: ENST00000335251
  CDS Start-End: 104-2932
acatggcctctgccccttcccaagcagaggcaacatggcggccttagcaagctatagctgcgagatttgaattactccactcgtagctattgcattcctgacgatggcctctgtggcttcgtgcgattcgcgtccgagctcagacgagctccctggagacccctcttcacaagaagaagatgaggactatgattttgaagatcgggtcagcgactcgggttcatattcctcagcgagtagcgattatgatgatcttgagcctgaatggctggacagtgtgcagaaaaatggagagctgttttatttggaattgagtgaggatgaagaagaaagcctccttcctgagacaccaactgtgaaccatgtcaggttcagtgaaaatgagattatcattgaagatgactacaaagaaagaaaaaagtatgaacccaaactcaagcagtttaccaaaattttaagaaggaaaagacttttacccaagcgctgcaataaaaaaaatagcaatgacaatggaccagtatccattctaaagcatcagtccaatcagaagacaggagtcattgtccaacagcgatacaaagatgtgaatgtttatgtaaaccccaaaaagctaactgttatcaaagccaaagagcagctcaagcttctggaagtgctggttggaattattcatcagaccaagtggagctggagaagaaccggaaagcagggtgatggagagaggcttgtggttcatggcctgctgccagggggatctgctatgaagagcggtcaggtactcattggtgatgtccttgttgctgtgaatgatgtcgatgttactactgaaaacatcgagagagttctgtcttgcattcctggacctatgcaggtgaaactgacatttgaaaatgcatatgatgtgaaaagggagacgtcccatccaagacagaaaaagacacagtccaacacaagtgatttagtcaagcttctctggggagaagaggttgaaggtatccagcagagtggcctaaacactcctcatatcattatgtatctcacactacagctcgactcagaaacctcaaaggaagagcaggaaattctttatcattatccaatgtctgaagcatctcagaaacttaaaagtgtgagagggatttttctcacactctgtgacatgctggaaaacgtaactgggacacaagttactagttcatccctccttttaaatggaaaacaaattcatgtggcttattggaaagaatctgacaagttgttgctaattggcctgcctgctgaagaagttcctcttcctcgtctaaggaacatgatagaaaatgtcatccaaaccttaaaatttatgtatggttctttagatagtgccttttgccagattgagaatgttcctcgtttggatcatttttttaacttgttctttcaaagagcacttcagcctgcgaaactgcattccagcgccagtcccagtgctcagcagtacgatgcttccagtgcagtacttttagacaacctccctggagtccggtggctcacacttccactggaaatcaagatggaattagacatggcattaagtgacttggaggctgcagattttgcagaactgtccgaggattactatgacatgaggcggctgtatacaattttggggtcttctctattttacaagggttatttgatatgcagtcatttgcccaaggatgatcttattgatattgccgtatactgtcgccactattgcctgctgcctttagcagcaaaacaaagaattggtcagttgatcatatggagagaagtgtttcctcagcatcacctccgacctttggcagactcaagcactgaagtctttccggaacctgaaggaagatattttttgctagttgttggcttgaaacattatatgctatgtgtactattagaagctggaggttgcgcatccaaagctattgggagtcctggaccagactgtgtatatgtggatcaagtcaaaacaactcttcaccagctggatggagtagattctcgcatagatgaacggctagcatcttctccagtcccctgtttgtcttgtgctgactggttccttactggatcacgtgaaaaaacagatagcttgaccacttcgcctattctcagtaggctacaaggtacttccaaagtagcaacttctccaacatgcagaagaacgctttttggtgactattccttaaagacacgcaagcctagtccttcctgtagtagtggaggatctgacaatggttgtgaaggtggagaagatgatggctttagcccccatactacaccggatgcagtacggaagcaaagagaatctcagggctctgatggtttagaagaaagtgggaccttgcttaaggtcactaaaaagaagtctactcttccaaatccatttcatttgggaaacttgaaaaaggaccttccagaaaaagaattagaaatatataacacagtgaaactgacatctggtcctgagaacacacttttccactacgttgccttagaaacagtgcaaggaatctttattactcctacccttgaagaggtggcacagctaagtggctctatccaccctcagctaataaagaatttccatcagtgttgtctttccattcgtgcagttttccaacagacattggtggaagagaaaaagaaaggactaaatagtggagaccattcagattctgcaaagtcagtgtcttctcttaaccctgttaaagaacatggtgtgttgtttgaatgttcacctggaaactggactgatcagaaaaaagcaccaccagttatggcttactgggtagtagggagactttttcttcatccaaaacctcaagaactttatgtctgttttcatgactcagtcacagaaattgccattgaaatagcttttaaattgttctttgggttaaccttgtagctgtgctttcttgatgcgtagaaacacgtgcatggaggatcaaacactgtcagaattgctgaaatcaatacacaaagagataaagtttagcttctttttactattcaatattgaacataatattgttaaatattgagatgaaatgctgttggatttgatacattaaatcttaatgtaatattgtaagacttttgagaatatacttgattaaaatgtgaaagaagggattgttaacttattgctattttggtatataatgttaatttattgactagtttgaaataatgtgaagtgttttttatatcagattaatataggaaatgtttattcttgaaaaatactcaatttgttgttgtttatttttctcaaaattcatactgatatctgatgaaatgattatgaaattgggagcaggtgaccaggtgctgtaactaagtagtgctatgaccatgagcaagtttttgtacctctctaagctcagagttttcatgtaaaatgagatgattgcattgaggtttcaaaaatacctcttaagtaaaatgtgcttttattttattttagttttagttttagttctggggtacatgtgcaggatgtgcaggttcgttacataggtaaacatgtgccatggcggtttgctccacctatcaacccatcacctaggtattaagcctagcatgcattagctatttttcctaatactctccctacccccacaacaggccctggtgtgcattgttcccctccctttgtccatgtgttctcatggtcagctcccacttataagtgagaacctacagtgtttggttttctgttcctgcattagtttgctgaggataatggcttccagcttcatccatgtccctgcagaggacatgatctcatacctttttgtggctgcatagtattccatggtgtatgtgtaccacattttctttatccagtctattgctgatgggcatttgggttgattccatgtctttgctattgtaaatagtgcttcaatgaacatatgtgtgcatatatatttgtaattgaatgatttatattactttgagtataaacccagtaatgggattgctgggtcaaatggcatttctggttctagatctttgaagaatcaccacactgtcttccacaatggttgaactaattcacattcccaccaacagtgtaaaagcgttcctatttcctcacagcctcgccagcatctgttatttcttgactttttaataatagccactctgactggtgtgagatgatatctcattgtggttttgatttgcatttctctaacaatcagtgatattgagcttttttttcatatgtttgttggctgcatgaatgtcttcttttgagaagtgtctgttcatgtcctttgcccagtttttaatgcggttctattttttcttgtaacttggtttgagttccttgtagatcctggatatcagatcattgttggatgaatagattgccaaaattttctcccactctgtaggttgcctgttcactctgatgatagtttcttttgctgtgcagaaggtctttaatttaactagatcccatttgtcaagttttgcttttgttgcagttgcttttgtgatttcatcatgaaatctttgcccatgctcatgtcttaaatggtattgcctagattttcttctagggattttatagttttgggctttacatttaagcctttattctatcttaattttttgtataaggtatgaggaatgggtccagtttctattttctgcatatggatagctagttctcccagcaccatttattaaataaggaatcctttccccattgcttgtttttctcaggtttgttgaagatcagatggttgtagatgtgcaatcttatttctgagttctctattctattccattggtctatgtgtcagtttttgtaccagtaccatgatgttttggttattgtacccttacagtacagtttgaagtttggtagtgtgatgcctccagctttgatcttttggcttaggattgccttggctatacaggctctttttttggttccatataaattttaaaatagttttttctaattctatgaagaatatcaatggtagtttaatgggaataacattgactctataaattactttgggcagtatggctattttcatgatattgattcttactgtctgtgagcatggaatatttttccatttgtttgtgtcctctctggtttccttgagccgtggtttgtagttctccttgaagaggtccttcacttcccttgttagctgtattcctaggtattttattctctttgaagcaattgtgagtaggagttcattcatgatttggatctctgcttgcctgttgttggtgtataggaatgctggtgacttctgcacaatgattttgtatcttgagactttgctgaagttgcttatcagcttaagaagcttttgggctgagacaatggggttttctagatataggataatgtcctctgcaaacaaagacattttgacttcctctcttcttctttgaataccctttatttctttctcttgcctgattgccctggccaggacttccaatactatgttgaatagtggtgagagaggtcatccttgtcttgtgctggttttcaaggggagtgcttccagcttttgcccattcggtatgatattggctgtgagtctgtcataaatggctcttattattttgaagtatgttccttcaatacctagtttattgagagtttttaacatgaaaggatgttgaattttattgaaggtgttttctgcatctattgagttaatcatgtggtctttgtctttagttctgtttgtgtgatgaattaagtttattgatttgcatatgttgaaccagcctcacatcccgggaatgaagccaacttgatcgtggtggataagctttttgatgtgctgctggattcagtttgccagtgttttattgagaatttttacattgatgttcatcagggatattggtctgaagttttctttttttgttgtatctctgccaggttttgatatcaggatgatgctggccttatagaatgagttagggaggagtctctccttttcatttgtttggaatagtttcagaagaagtggtatcagcttctttttgtatttctggcagaattcagctgtagatccatctggtcctgggctttttttggttggtagcctattaattactgcctcaatttcagaacttgttattggtctattcagtgattcaacttcttcctggttcagtcttgggagggtgtatgtgtccaggaatttatccatttcttctagattttcgagtttatttgcaccgagctgttatagtattgtctgatggttgtttatatttccatgggatcagtggtaatatcccctttatcattttttattgtgtctatttggttcttctctcttttcttctttattagtctagctaatagtctattttgttaatattttcaaaaaaaagcagcccctggattcatttattttttgaagggtttttcatgtctctagctccttcatttccactctgattttggttactttttgtcttctgctggcttttgggtttgtttgctcttggttcactagttcttttagttgtgatactagggtgtcgatttgagatctttctagctttttgatgtgggcatttagtgctataaatttccctcttaacactgctttagctatgccccagagattctggtacattgtctctttgttttcattggtttcaaagaacttcttgatttctctcttaatttcattatttacccaggagtcattcaggagcaggttgttcaatttccacgtagttttgtggttttgagtgactttcttactcttgagttccaatttgattgcgctgtgatctgagagactgtttgttattacttcagttctttagcatttgctgaggagtgctttacttctaattgtgtgatcaattttagagtaagtaccatgtggcactgagaagaatatatattctgttgtttgggggtggaaagatgtctagatatttatcaggtcccacttgatccagagctgaggtcaagtcctgaataactttgttaattttctgtctcgatgatctaatattgacagtggggtgttaaagtctcccactattattgtgtggaaatctaagtctctttttgggtctctaagaacttgttttatgaatctgagtgctcctatattaggtgcatatatatttaggatagttagctcttcttgttgaattgacccctttaccagtatgtaatgcctttgtcttttttttaatctttattcgtttaaagtctttgtcagaaactaggattgcagcctctcctttttctgttttccttttgcttggtagattttccttcatccttttattttgagtctatgtgtgtccttgcatgtgagatgggtctcttgaatacagcacactgatagagtttgactctatccagcttgccactctgcgtcttttatttggggcatttagtgcatttacatttaaggttaatattgttatgtgtgaattttatcctgacatcatgatgctagttgattattttgcagacttgtttatgtttttgcttcatagtgttactgatctgtgtatttcaatgtgttttttgtagcggctggtaacagtttttcctttccatattgagtgcttccttcaggagcacttgcaaggcaggcctggtggtgacgaattccctcagcatttgcttgtctgaaaaagattttatttctccttcacttatgaagcttagttcagccagatatgaaattctaggttggaaattctttcctttaagaatgttgaaaattggcccccaacctcttccagcttataaggtttctgctgagaggtctgctgttagtctgatgggcttccctttataagtgacctggcctatctctctgactgcccttaacattttttccttcatttcagtcttggagaatctgatgattatgtgtcttggggttgatctcatggagtattgtattggggttctctggatttcctgaatttgaatgttggcctgtcttgctaggttggggaagttttcctggatgatatccagaagtgtgttttccaacttggttccattcttctgtctctttcaggtatatctaccagtcgtaggttcagtcttttaacataatcccatagttctcagaggtttcattcattccttttcattcttttttctctaatcttgtctgcctgccttatttcagcaagatagtcttcaaactctgatatcctttcttccacttagtctatttggctatggatacttgtgtttccattataaagttctcatgtttttcagctccatcagatcatttacgttcctctccaaactggttattctgtttaacagctcctataatgttttattatggttcttagcttctttgcagtgagttagaacatattcccttagcttggtgaagttcgttatttcccatcttggatggatgattgacattcatccatctcagcctcagcccagttctgtgcccttgctagagacatgttgcaatcttttggaggagaagaggcactctggctttctgagttttccgtatccttgcattctttctcatcttcatgggtttatctacctttgatctttgagtctgctgacttttggatgaggtttttgtggtgtcttttttgttgatgttgttgcattctgtttttctttagtagtcaggcccctcttctgcagagctgctgcagtttgcctggggtccactctagaccctattcgcctgggtctctcgtcttccaggagatatcaccagtggaggctgcagaccagcaaagatggcagcctgctccttcctctgggagctctgtcccagaggggcactggcctgatgctagccggaatgctcctgtatgaagtgtctggagactcctgttgggaggtctcagtcagaaggagcggggtcagagaaccacttaaataagcagtctgtctgccccttgacagggtgggtgtgctacactggggggaatccccctcatctggactgccttgactctccagagccagcaggcagagaagactaagatcactgatccatgatacttcagccatccttcctcctaggggctcctcttggggttatcagcgttttgtccataaacccctggctggggatgctgagattcccacagggaggccctgtccagtgaagaggagtgaatctgggttccaccccatctcgccggcgctagcagcaagggaaagtggccaattgaagccgcagtgatggcggcctcccctcccttctcccccctctccttccccacttccagaactcagtcgtcttaggcagtttctagctggtgggggaggattccaagccagtgggttttagcttatagagttctgtgagagcaaggctgcttggctccctggcttcagccccctccccatgagagtggacagatctcctgcctcacgggagttcccagagccggagtatgcaaatactccagtgtctcagtgcctgctcaaagcggctgcccacccaagcagagatttgtgcttgggacccaaagctctggtagcattggctcaggagggaacctcctgatctacaagttgcaaggatctgtgggaaaagcctggttttcagggaggggaagcaaaatccttcaccatctcccttggctggacgagggagttcactttgctgcgtgcagttcctggatgggatcttgctccaccctgtttgcttgctctccgtgggtcatgccagccacctagcagtcccaataagagaacttcagtatctcaactgaagatgcagagttgactcacagttttcttccttcttggtgggagctgcagagcagagctgcctctctttgaccatctgggctctctgttctactttttttttttttttttttgcctcttgcatgttggtcacctcctaaattagtaatgtccaagtacttattccttatcagatacttttcgttaatttaactatcctagtacatacctcactgtggggaaagggggaaagatgaaaattaaacttactttttatttatttgattctctttaagtttcaggtaagctcaattttgactaggatatatatatgtgtgtgtgtgtatatatatgtattttttaaactatttgtcaactttatttttttttgtttgtttttgttaaaatacattcagcggctgggcttagtggctcacgcctgtaatctcaacactttgggaggctgaggcaggtggatcacttgagtccaggagttcaagaccagcctgagcaacatagcaaaaactccatctctacaaaaacaccaaaattagccgggtgtggtagcactctcttttaacagtcccagatacctgggaggctgaggtgggaagatcacctgagctcagtcggttgaggctgcagtgagctatgatcatgccactgcactctagcctgggcaacacagtgagaccctgtctcaaaaaaaaaaatcacattcaagtatatttcacatgcattttatataattcatgaatttcaggaaagctgcatgtaaatctttttttaaagctaaatcatgttaaagacactgaaaaagttaactaaaattctatggtgacttcttttataaaatactaatttttggccgggcacggtggtggctcacgcctgtaatcccagcactttgggaggccgaggcaggtggatcatgaggtcaggaattcgagaccagcctgaccaacatggtgaaaccccatctctactaaaaatacaaaaattagctgggcgtggtggtgtgcacctgtaatcctagctacctaggaggctgaggcaggagaatcgcttgaacccaggaagcagaggttgcagtgagccaagatcacaccaccgcacttctgcctgtggaacagaatgagactccgtctcaaaaaaaaaaaaaaaaatactaacttttatcttagaaatatagatcattatgcattgggttttttcaaagggggaacactttagtgaacaatagtttacttgacctttagttggaaaagaaaactaatggtggagaattttctttggctgggagaatttggtagattgagagaaaggaagaacatcaatactgcatttttacttgacatttaccctgtagatcctcctagaggttcgatgcccccaagacattccaacactgagctgtttcttctccaggtcttaagctttgaatacaagctataccagcacatctaaaatcggtctctacatttttccatcttaaatatgagctgtccagcttagtcaaaactaactgcaaaacactgggtgtaccatttgagtcatttggtcttaaaagaaacactattatcactgtgtcacagtttgagagattttcacttaagcatttaagttgcaaaccactacatatttgtcccattagtgactagtgggccttaattttggcattcaaattagggtaaaaaaccttggttcttgaaatgctacagaaaatagcttgaggccaggcacagttgctcacacctgtaactccagcactttggaaggctgaggcaggcagatcacttgaggtcaggcgtttgagaccaggctggtcaacatggtgaaaccctgtctctactaaaaatactaaaaaaaaaaaaaaaaaaaaaaaaattagccgggcatggtggcaggtgcctgaagtcccagctacttgggaggctgaggcaggagaatcacttgaacccaggaagcagaggctgcagtgagcctagctcgtgccactgccactccagcctgggcaacagaacgaggctctgtttaaaaaacaaaaaagcttgaaataccttccccttaagatcacaatattgtcatatgctaccatttgactcacaactgctgtcttaggactgcttatttacatatatatgtattaagacactttggttaaaacaatttattaaatgtcttaaatttctggatatgtccctgaaaataccatgaactacttctaatactgataattatgaataaacgtagctgttgatcacctcaggttttcatacaaactgaactaaggtagggttttatcataggggactttttgtttcatttaatgaaattttgatgtgttgaactgctttcctggtgtcagagaaacatgagaccatcgctcaataatggaaataaaaaggcagagcagactactgatcttaataaaaggaaaattatttgctgtatcgtagatgtgcactgtaatttccatgttaaagaggcactgcatttttaagaaataaaatcacacatcttattttttcatttctaaatggatattgaactaagctctgaaggcaaacttagctgcctatttttccaaatatgttcagaatcacatctgaaacatcaaactgattatcagacaataaagtgcctgttactttattaaataaagggggacaggatgacagtgcagatatcctagaaatatgctttagaagacatagaaacgttgttaaattggattttattagtatgcaaatgttcccttccaccaacaactattaatgtgaaaaactatatatagctagcattttttaaaatatcaaatactgtctcattatcatatgtttagcccccccaaaattacattttagactcttactttctctccctctcccctttctttagctcttgtttgtgtcttgccaaagaagtgtacctagtaagggaatgtttcttatttgtgccaagggactattgatgatgctgtataatggcaagatagcattttgtaatacctgcttttttatatttctaatacaaatgggcaaagctgtgaaaccaatttactaggtttttctgctttggacataattgtatgtgttaattctctctaaacagtgcctggcacatattacatgctataaaagtgttagctactactgctaccatttattattatcattattaaatatccattggttgaaaaaccaagtagtcagctaaatcatacctgctactgtacaaaatgtaggggaaaagctgagaaaaatcatttatcaataaacagttttcagaacaagaatttatactttggatatttttaaattgttaaatgttattgaaactttatgcaccaaaactgtatgaaataatttaattttgcagttgtgtttctatattctatgtaattaaagctacttttatactatattgatagttttaaataaaactggtttggaggtttgtttgca

SEQ ID NO: 144345 - DNA, 3006 bp, Homo sapiens
  Payload ID: 8518
  Gene Symbol: INTU
  Gene Name: inturned planar cell polarity protein
  Uniprot ID: Q9ULD6
  ENST ID: ENST00000503952
  CDS Start-End: 70-1377
atggcggccttagcaagctatagctgcgagatttgaattactccactcgtagctattgcattcctgacgatggcctctgtggcttcgtgcgattcgcgtccgagctcagacgagctccctggagacccctcttcacaagaagaagatgaggactatgattttgaagatcgggtcagcgactcgggttcatattcctcagcgagtagcgattatgatgatcttgagcctgaatggctggacagtgtgcagaaaaatggagagctgttttatttggaattgagtgaggatgaagaagaaagcctccttcctgagacaccaactgtgaaccatgtcaggttcagtgaaaatgagattatcattgaagatgactacaaagaaagaaaaaagtatgaacccaaactcaagcagtttaccaaaattttaagaaggaaaagacttttacccaagcgctgcaataaaaaaaatagcaatgacaatggaccagtatccattctaaagcatcagtccaatcagaagacaggagtcattgtccaacagcgatacaaagatgtgaatgtttatgtaaaccccaaaaagctaactgttatcaaagccaaagagcagctcaagcttctggaagtgctggttggaattattcatcagaccaagtggagctggagaagaaccggaaagcagggtgatggagagaggcttgtggttcatggcctgctgccagggggatctgctatgaagagcggtcaggtactcattggtgatgtccttgttgctgtgaatgatgtcgatgttactactgaaaacatcgagagagttctgtcttgcattcctggacctatgcaggtgaaactgacatttgaaaatgcatatgatgtgaaaagggagacgtcccatccaagacagaaaaagacacagtccaacacaagtgatttagtcaagcttctctggggagaagaggttgaaggtatccagcagagtggcctaaacactcctcatatcattatgtatctcacactacagctcgactcagaaacctcaaaggaagagcaggaaattctttatcattatccaatgtctgaagcatctcagaaacttaaaagtgtgagagggatttttctcacactctgtgacatgctggaaaacgtaactgggacacaagttactagttcatccctccttttaaatggaaaacaaattcatgtggcttattggaaagaatctgacaagttgttgctaattggcctgcctgctgaagaagttcctcttcctcgtctaaggaacatgatagaaaatgtcatccaaaccttaaaatttatgtatggttctttagatagtatcatgaaggaattttctgtgattgtgtcatctgggaaaattatctagtttgcagtgttctctagaggaactgctgaggaggcacatccctgtcaaacctgattgcttaccaacattttccagataaagcacttcagcctgcgaaactgcattccagcgccagtcccagtgctcagcagtacgatgcttccagtgcagtacttttagacaacctccctggagtccggtggctcacacttccactggaaatcaagatggaattagacatggcattaagtgacttggaggctgcagattttgcagaactgtccgaggattactatgacatgaggcggctgtatacaattttggggtcttctctattttacaagggttatttgatatgcagtcatttgcccaaggatgatcttattgatattgccgtatactgtcgccactattgcctgctgcctttagcagcaaaacaaagaattggtcagttgatcatatggagagaagtgtttcctcagcatcacctccgacctttggcagactcaagcactgaagtctttccggaacctgaaggaagatattttttgctagttgttggcttgaaacattatatgctatgtgtactattagaagctggaggttgcgcatccaaagctattgggagtcctggaccagactgtgtatatgtggatcaagtcaaaacaactcttcaccagctggatggagtagattctcgcatagatgaacggctagcatcttctccagtcccctgtttgtcttgtgctgactggttccttactggatcacgtgaaaaaacagatagcttgaccacttcgcctattctcagtaggctacaaggtacttccaaagtagcaacttctccaacatgcagaagaacgctttttggtgactattccttaaagacacgcaagcctagtccttcctgtagtagtggaggatctgacaatggttgtgaaggtggagaagatgatggctttagcccccatactacaccggatgcagtacggaagcaaagagaatctcagggctctgatggtttagaagaaagtgggaccttgcttaaggtcactaaaaagaagtctactcttccaaatccatttcatttgggaaacttgaaaaaggaccttccagaaaaagaattagaaatatataacacagtgaaactgacatctggtcctgagaacacacttttccactacgttgccttagaaacagtgcaaggaatctttattactcctacccttgaagaggtggcacagctaagtggctctatccaccctcagctaataaagaatttccatcagtgttgtctttccattcgtgcagttttccaacagacattggtggaagagaaaaagaaaggactaaatagtggagaccattcagattctgcaaagtcagtgtcttctcttaaccctgttaaagaacatggtgtgttgtttgaatgttcacctggaaactggactgatcagaaaaaagcaccaccagttatggcttactgggtagtagggagactttttcttcatccaaaacctcaagaactttatgtctgttttcatgactcagtcacagaaattgccattgaaatagcttttaaattgttctttgggttaaccttgtagctgtgctttcttgatgcgtagaaacacgtgcatggaggatcaa

SEQ ID NO: 144346 - DNA, 737 bp, Homo sapiens
  Payload ID: 8518
  Gene Symbol: INTU
  Gene Name: inturned planar cell polarity protein
  ENST ID: ENST00000504491
  CDS Start-End: 133-737
gcgcgtcggaggctggcacctccaggttcaccgcggcggccggagctgtgcgggggccagacggttcggcgggagccggggctgggacctgggtgacctgtcgtccgcccctgtagcgagtctccagtgggcatgtttcaggtgggcaggtccagcatccccaaacctgccccccgcagcctggaggacctggactcagtgcagcgtgtcctgttacacagtgatcttgagcctgaatggctggacagtgtgcagaaaaatggagagctgttttatttggaattgagtgaggatgaagaagaaagcctccttcctgagacaccaactgtgaaccatgtcaggttcagtgaaaatgagattatcattgaagatgactacaaagaaagaaaaaagtatgaacccaaactcaagcagtttaccaaaattttaagaaggaaaagacttttacccaagcgctgcaataaaaaaaatagcaatgacaatggaccagtatccattctaaagcatcagtccaatcagaagacaggagtcattgtccaacagcgatacaaagatgtgaatgtttatgtaaaccccaaaaagctaactgttatcaaagccaaagagcagctcaagcttctggaagtgctggttggaattattcatcagaccaagtggagctggagaagaaccggaaagcagggtgatggagagaggcttgtggttcatggcctgctgccagggggatctgctatgaa

SEQ ID NO: 144347 - DNA, 290 bp, Homo sapiens
  Payload ID: 8518
  Gene Symbol: INTU
  Gene Name: inturned planar cell polarity protein
  ENST ID: ENST00000506283
  CDS Start-End: 1-290
cttttagacaacctccctggagtccggtggctcacacttccactggaaatcaagatggaattagacatggcattaagtgacttggaggctgcagattttgcagaactgggttatttgatatgcagtcatttgcccaaggatgatcttattgatattgccgtatactgtcgccactattgcctgctgcctttagcagcaaaacaaagaattggtcagttgatcatatggagagaagtgtttcctcagcatcacctccgacctttggcagactcaagcactgaagtctttcc

SEQ ID NO: 144348 - DNA, 5740 bp, Homo sapiens
  Payload ID: 8518
  Gene Symbol: INTU
  Gene Name: inturned planar cell polarity protein
  Uniprot ID: Q9ULD6
  ENST ID: ENST00000503626
  CDS Start-End: 79-1305
agaggcaacatggcggccttagcaagctatagctgcgagatttgaattactccactcgtagctattgcattcctgacgatggcctctgtggcttcgtgcgattcgcgtccgagctcagacgagctccctggagacccctcttcacaagaagaagatgaggactatgattttgaagatcgggtcagcgactcgggttcatattcctcagcgagtagcgattatgatgatcttgagcctgaatggctggacagtgtgcagaaaaatggagagctgttttatttggaattgagtgaggatgaagaagaaagcctccttcctgagacaccaactgtgaaccatgtcaggttcagtgaaaatgagattatcattgaagatgactacaaagaaagaaaaaagtatgaacccaaactcaagcagtttaccaaaattttaagaaggaaaagacttttacccaagcgctgcaataaaaaaaatagcaatgacaatggaccagtatccattctaaagcatcagtccaatcagaagacaggagtcattgtccaacagcgatacaaagatgtgaatgtttatgtaaaccccaaaaagctaactgttatcaaagccaaagagcagctcaagcttctggaagtgctggttggaattattcatcagaccaagtggagctggagaagaaccggaaagcagggtgatggagagaggcttgtggttcatggcctgctgccagggggatctgctatgaagagcggtcaggtactcattggtgatgtccttgttgctgtgaatgatgtcgatgttactactgaaaacatcgagagagttctgtcttgcattcctggacctatgcaggtgaaactgacatttgaaaatgcatatgatgtgaaaagggagacgtcccatccaagacagaaaaagacacagtccaacacaagtgatttagtcaagcttctctggggagaagaggttgaaggtatccagcagagtggcctaaacactcctcatatcattatgtatctcacactacagctcgactcagaaacctcaaaggaagagcaggaaattctttatcattatccaatgtctgaagcatctcagaaacttaaaagtgtgagagggatttttctcacactctgtgacatgctggaaaacgtaactgggacacaagttactagttcatccctccttttaaatggaaaacaaattcatgtggcttattggaaagaatctgacaagttgttgctaattggcctgcctgctgaagaaattgagttaccaagctcagcccacactcatggggagaggaattaagcctcacttcttgaggggaagagtatcaaagaatttgtggacctattttaccatcacaaacaggaattccaaagatggctacagtgaaaaatatcaaaatgattatgttttgaagaaattacgtaatttcttggacttctgtttacttatttgtataatgggaataataagagctaccttataaaattcttaaaaggcttcaatgagaaaatagttcctcttcctcgtctaaggaacatgatagaaaatgtcatccaaaccttaaaatttatgtatggttctttagatagtatcatgaaggaattttctgtgattgtgtcatctgggaaaattatctagtttgcagtgttctctagaggaactgctgaggaggcacatccctgtcaaacctgattgcttaccaacattttccagataagtgagctacaaagagctgggcatccataaatagtgcttttaccttttactagtaaggaaagttttaaccaatgaagagtaagaatgtggttatgaactgcctctttaagtttactcaacagaagaaaactttgccatattttgccctaattgaagctttctgttttcataaaaccagagattatcaaagattaaatttttgcaatgattttcatacatataaatagtccattggagttgtcctacaaattccattagagtagactggggacagagggacttaatttctctttcatcttgaaatttatcttccattgatagtggaagtatctttttgatggcagcaaatttaactcttttctacttcaagtgagaatttaaagagcaaactacgataataaatgtgaagatccattgagttcttaaaaccaagaagcacagtgaatccaggatgttattaatagacattttgtaataaatttttataacaactttttttctgattatgaaagatattaagggccaattgtgaaaaattacaagaagaccaaaaagtgtagagacttgattatctttttaaagttgtgagctggttaattctctatgagccacagaaaactgactatatactaacagtttaacgttgtgaccaaattaaagctataacaatttccttcaccattccccactaattcatcagcaagtcctgatcagtctgtcttcaaaatctccaatctgtccatttctctttatctttattattgccctgtccagccactgctatctctcacacactacagtagcctcctaactggtctccttcccttcattcttgccacttgaactaattttcatatagcagcgtgatctttctacattattatctggttcctacctacccctctgacttcagatatcaaaccacacgtgcctcctttgcactgtattgcaaacaccctggcaaagcttttccccagcccagggcttttgtactttttcttcttgctggatctttctgacattggaatatcagctcaaatgccctttctcagagattcttctccaaccattcaacctaaaatagccaatctgtcacaccacccattcatattgtgctattttctgcatagtcctttatatgaatttgtgttttttactttttgttcatttgctgtctttctccattagaacataagcttcatgggagctcattgtcttttgtcttgatatttttactgccatacctccagcaatgagaatagtgcctggaatgtagtagtcactcaaatatttgttagatgaatcagcaaataattattttgatatgccgatagcatatgtacctgctattttgtcattcagtgagctgttccaataaatgcttgcagtcaatgctgtgttacttttatatggctaaaaccaagtatttcggttttttctgtcattttgttttttgagttctttaatgttataccttcagtagtaaagaggggaggaaataacttatgcttattatgtacttactgtttaccagtaaataataagcataataagaacttatgcttgttatgttctaggcattctgcatgtgagctagattgtattaaccctgtttttacagagttggaaaccaaagttagagaaaggttaggtgatttgcctgtgatagctacctagaaagagctgtgataagccagatctgttctattacaaagttcaaaatctctttatcattccacgttgcctgaaagatttcaggagttgtaaatggttaaaagacagtcagaggtaaaaacaacctacattttttacaaaaagggtacttcagccctttcttttataaatatgtcacttgtgttagccctgtggttcttccatagagccatctacttgatacacttgagagtaggttttagggtaaaaagtttggacagggtaaatttctttacacaatccgtcagtaacattctagcagcaattctattgaaggaagagaggagtgaggaagatagcctatgtagttgggaaagatccagttcccttaggagcacacaaaaaatgaccaccatttccatatgtcgttctaacttacagctcttatttctccagtgccttttgccagattgagaatgttcctcgtttggatcatttttttaacttgttctttcaaagagcacttcagcctgcgaaactgcattccagcgccagtcccagtgctcagcagtacgatgcttccagtgcagtacttttagacaacctccctggagtccggtggctcacacttccactggaaatcaagatggaattagacatggcattaagtgacttggaggctgcagattttgcagaactgtccgaggattactatgacatgaggcggctgtatacaattttggggtcttctctattttacaagggttatttgatatgcagtcatttgcccaaggatgatcttattgatattgccgtatactgtcgccactattgcctgctgcctttagcagcaaaacaaagaattggtcagttgatcatatggagagaagtgtttcctcagcatcacctccgacctttggcagactcaagcactgaagtctttccggaacctgaaggaagatattttttgctagttgttggcttgaaacattatatgctatgtgtactattagaagctggaggttgcgcatccaaagctattgggagtcctggaccagactgtgtatatgtggatcaagtcaaaacaactcttcaccagctggatggagtagattctcgcatagatgaacggctagcatcttctccagtcccctgtttgtcttgtgctgactggttccttactggatcacgtgaaaaaacagatagcttgaccacttcgcctattctcagtaggctacaaggtacttccaaagtagcaacttctccaacatgcagaagaacgctttttggtgactattccttaaagacacgcaagcctagtccttcctgtagtagtggaggatctgacaatggttgtgaaggtggagaagatgatggctttagcccccatactacaccggatgcagtacggaagcaaagagaatctcagggctctgatggtttagaagaaagtgggaccttgcttaaggtcactaaaaagaagtctactcttccaaatccatttcatttgggaaacttgaaaaaggaccttccagaaaaagaattagaaatatataacacagtgaaactgacatctggtcctgagaacacacttttccactacgttgccttagaaacagtgcaaggaatctttattactcctacccttgaagaggtggcacagctaagtggctctatccaccctcagctaataaagaatttccatcagtgttgtctttccattcgtgcagttttccaacagacattggtggaagagaaaaagaaaggactaaatagtggagaccattcagattctgcaaagtcagtgtcttctcttaaccctgttaaagaacatggtgtgttgtttgaatgttcacctggaaactggactgatcagaaaaaagcaccaccagttatggcttactgggtagtagggagactttttcttcatccaaaacctcaagaactttatgtctgttttcatgactcagtcacagaaattgccattgaaatagcttttaaattgttctttgggttaaccttgtagctgtgctttcttgatgcgtagaaacacgtgcatggaggatcaaacactgtcagaattgctgaaatcaatacacaaagagataaagtttagcttctttttactattcaatattgaacataatattgttaaatattgagatgaaatgctgttggatttgatacattaaatcttaatgtaatattgtaagacttttgagaatatacttgattaaaatgtgaaagaagggattgttaacttattgctattttggtatataatgttaatttattgactagtttgaaataatgtgaagtgttttttatatcagattaatataggaaatgtttattcttgaaaaat

SEQ ID NO: 144349 - DNA, 483 bp, Homo sapiens
  Payload ID: 8518
  Gene Symbol: INTU
  Gene Name: inturned planar cell polarity protein
  ENST ID: ENST00000510766
  CDS Start-End: 1-280
aaagacacgcaagcctagtccttcctgtagtagtggaggatctgacaatggttgtgaaggtggagaagatgatggctttagcccccatactacaccggatgcagtacggaagcaaagagaatctcagggctctgatggtttagaagaaagtgggaccttgcttaaggtcactaaaaagaagtctactcttccaaatccatttcatttgggaaacttgaaaaaggaccttccagaaaaagaattagaaatatataacacagtgaaaaaaagaaaggactaaatagtggagaccattcagattctgcaaagtcagtgtcttctcttaaccctgttaaagaacatggtgtgttgtttgaatgttcacctggaaactggactgatcagaaaaaagcaccaccagttatggcttactgggtagtagggagactttttcttcatccaaaacctcaagaactttatgtctgttttcatgactcagtcaca

SEQ ID NO: 144350 - DNA, 2968 bp, Homo sapiens
  Payload ID: 8519
  Gene Symbol: INVS
  Gene Name: inversin
  Uniprot ID: Q9Y283
  ENST ID: ENST00000262456
  CDS Start-End: 167-2854
cttttgaggggctcggctagcttcagcgccgtggggtctgacctggctggatatagtgtaccggcccggcaggaggggcggcccggtccgggttgcgcctcctggagccgcccccgggacgtcagtcctggaggaggcgagggttgctccggttgctaagaagactatgaacaagtcagagaacctgctgtttgctggttcatcattagcatcacaagtccatgctgctgccgttaatggagataagggtgctctacagaggctcatcgtaggaaactctgctcttaaagacaaagaagatcagtttgggagaacaccacttatgtattgcgtgttggctgacagattggattgtgcagatgctcttctgaaggcaggagcagatgtgaataaaactgaccatagccagagaacagccctccatcttgcagcccagaagggaaattatcgtttcatgaaactcttacttacacgcagagcaaactggatgcaaaaggatctggaagagatgactcctttgcacttgaccacccggcacaggagccctaagtgtttggcacttctgctgaagtttatggcaccaggagaagtggatacacaggataaaaacaagcaaacagctctgcattggagtgcctactacaataaccctgagcatgtgaagctgctcatcaagcatgattctaacattgggattcctgatgttgaaggcaagatcccacttcactgggcagccaaccataaagatccaagtgctgttcacacagtgagatgcattctggatgctgctccaacagagtctttactgaactggcaagactacgagggtcgaactcctcttcactttgcagttgctgatgggaatgtgaccgtggttgatgtcttgacctcatatgaaagctgcaatataacgtcttatgataacttatttcgaaccccactgcactgggcagctttattaggccatgcacagattgtccatctccttttagaaagaaataagtctggaactatcccatctgacagccaaggagccacacctttgcactatgctgctcagagtaactttgctgaaacggttaaagtgtttttaaaacatccttcagtgaaagatgattcagacctggaaggaagaacatcctttatgtgggcagctggcaaaggcagtgatgatgtccttagaactatgctgagcttaaaatcggacatagatattaacatggctgacaaatatggaggtacagctttgcatgctgctgctctttctggccatgtcagcaccgtgaagttattactggaaaataatgctcaagtagatgctactgatgttatgaaacatactccacttttccgagcctgtgagatgggacacaaagatgtgattcagacactcattaaaggtggagcaagggtagatctagttgaccaagatggacattctcttctacattgggcagcactgggaggaaatgctgatgtttgccagatattaatagaaaataagatcaatccaaatgtccaggattatgcaggaagaacccctttgcagtgtgcagcatatggaggctatatcaactgcatggcagttctcatggaaaacaatgcagaccctaacattcaagacaaagagggaagaacagctttgcattggtcctgcaacaatggataccttgatgccattaaattactgctagactttgctgctttccctaatcagatggaaaacaatgaagagagatacacaccccttgattatgctttgcttggtgagcgccatgaagtgatccagttcatgttggagcacggtgccctgtccatcgcagccatacaagacatcgccgccttcaaaatccaagctgtctacaaagggtacaaggtcagaaaagccttccgagacaggaaaaatctcctcatgaagcatgaacagttgagaaaagatgctgctgccaaaaagcgagaggaagaaaacaaacgaaaagaggcagaacagcaaaaaggaaggcggagcccagattcctgcagaccccaggcccttccctgtctgcctagcacccaggatgtgcccagcaggcagagccgggcccccagcaagcagcctcctgctggcaacgtggcccaaggccctgagccaagagacagcagaggatctccaggagggtctctaggcggagccctccagaaggagcagcatgtttcctcagatttgcagggaacaaactccagaaggccaaatgaaacagccagagaacattctaaaggccaatctgcttgtgtccacttcagacccaatgaaggcagtgatggaagcaggcatccaggagttccctctgttgagaagtccagagagctccgactgcagataattcagagagaacgaaggaggaaggagctgtttcgcaaaaagaacaaggcagcagcagtcatccagcgcgcctggcgaagctaccagctcaggaagcacctgtcccaccttcggcatatgaagcagcttggagctggagatgtggacagatggaggcaagagtctacagcattgctcctccaggtttggaggaaggaactggaactaaaattcccccaaaccactgcagtaagcaaggcccccaagagtccatccaagggcacctcaggcacaaagtccaccaagcactcagtgcttaagcaaatctatggttgttctcacgaagggaaaatacatcatcctacaagatctgtaaaagcctcttctgtgctgcgtctcaactcagtgagcaacctacagtgtatacatctccttgagaacagtggaagatcaaagaacttttcttataacctgcaatcagctactcagccaaaaaacaaaacaaaaccttgactgcctatggaggaagactgtgttcgggggagctggcatagctagtgcagagttcagattttctgctgataatcttttacaccttgggaaaactttaatatccgtacctgaagg

SEQ ID NO: 144351 - DNA, 3709 bp, Homo sapiens
  Payload ID: 8519
  Gene Symbol: INVS
  Gene Name: inversin
  Uniprot ID: Q9Y283
  ENST ID: ENST00000262457
  CDS Start-End: 186-3383
gccgaaagcctcgggcggccttttgaggggctcggctagcttcagcgccgtggggtctgacctggctggatatagtgtaccggcccggcaggaggggcggcccggtccgggttgcgcctcctggagccgcccccgggacgtcagtcctggaggaggcgagggttgctccggttgctaagaagactatgaacaagtcagagaacctgctgtttgctggttcatcattagcatcacaagtccatgctgctgccgttaatggagataagggtgctctacagaggctcatcgtaggaaactctgctcttaaagacaaagaagatcagtttgggagaacaccacttatgtattgcgtgttggctgacagattggattgtgcagatgctcttctgaaggcaggagcagatgtgaataaaactgaccatagccagagaacagccctccatcttgcagcccagaagggaaattatcgtttcatgaaactcttacttacacgcagagcaaactggatgcaaaaggatctggaagagatgactcctttgcacttgaccacccggcacaggagccctaagtgtttggcacttctgctgaagtttatggcaccaggagaagtggatacacaggataaaaacaagcaaacagctctgcattggagtgcctactacaataaccctgagcatgtgaagctgctcatcaagcatgattctaacattgggattcctgatgttgaaggcaagatcccacttcactgggcagccaaccataaagatccaagtgctgttcacacagtgagatgcattctggatgctgctccaacagagtctttactgaactggcaagactacgagggtcgaactcctcttcactttgcagttgctgatgggaatgtgaccgtggttgatgtcttgacctcatatgaaagctgcaatataacgtcttatgataacttatttcgaaccccactgcactgggcagctttattaggccatgcacagattgtccatctccttttagaaagaaataagtctggaactatcccatctgacagccaaggagccacacctttgcactatgctgctcagagtaactttgctgaaacggttaaagtgtttttaaaacatccttcagtgaaagatgattcagacctggaaggaagaacatcctttatgtgggcagctggcaaaggcagtgatgatgtccttagaactatgctgagcttaaaatcggacatagatattaacatggctgacaaatatggaggtacagctttgcatgctgctgctctttctggccatgtcagcaccgtgaagttattactggaaaataatgctcaagtagatgctactgatgttatgaaacatactccacttttccgagcctgtgagatgggacacaaagatgtgattcagacactcattaaaggtggagcaagggtagatctagttgaccaagatggacattctcttctacattgggcagcactgggaggaaatgctgatgtttgccagatattaatagaaaataagatcaatccaaatgtccaggattatgcaggaagaacccctttgcagtgtgcagcatatggaggctatatcaactgcatggcagttctcatggaaaacaatgcagaccctaacattcaagacaaagagggaagaacagctttgcattggtcctgcaacaatggataccttgatgccattaaattactgctagactttgctgctttccctaatcagatggaaaacaatgaagagagatacacaccccttgattatgctttgcttggtgagcgccatgaagtgatccagttcatgttggagcacggtgccctgtccatcgcagccatacaagacatcgccgccttcaaaatccaagctgtctacaaagggtacaaggtcagaaaagccttccgagacaggaaaaatctcctcatgaagcatgaacagttgagaaaagatgctgctgccaaaaagcgagaggaagaaaacaaacgaaaagaggcagaacagcaaaaaggaaggcggagcccagattcctgcagaccccaggcccttccctgtctgcctagcacccaggatgtgcccagcaggcagagccgggcccccagcaagcagcctcctgctggcaacgtggcccaaggccctgagccaagagacagcagaggatctccaggagggtctctaggcggagccctccagaaggagcagcatgtttcctcagatttgcagggaacaaactccagaaggccaaatgaaacagccagagaacattctaaaggccaatctgcttgtgtccacttcagacccaatgaaggcagtgatggaagcaggcatccaggagttccctctgttgagaagtccagaggtgagacagctggcgatgagcggtgtgcaaaggggaaaggcttcgtgaagcagccctcctgtatcagggtggctgggcctgatgagaaaggagaggactccaggcgggcagctgcaagccttccaccgcacgatagccactggaagcccagcaggcggcatgacacagaacccaaggccaaatgtgccccccagaaaaggcgcactcaagagctcagaggaggaaggtgctctccggctggttctagccgccctggcagtgcccggggggaggcggtccatgctgggcagaatcctccccaccatcgtacaccaagaaacaaagtgacacaagccaagctcacaggagggctctattcacatttgccacagagcacagaggagttgaggtcaggagctaggaggctggagacatctaccctgtccgaggactttcaggtatctaaggagactgatccagcacctggtcccctctctgggcagagtgtgaatattgaccttctccccgtagagctccgactgcagataattcagagagaacgaaggaggaaggagctgtttcgcaaaaagaacaaggcagcagcagtcatccagcgcgcctggcgaagctaccagctcaggaagcacctgtcccaccttcggcatatgaagcagcttggagctggagatgtggacagatggaggcaagagtctacagcattgctcctccaggtttggaggaaggaactggaactaaaattcccccaaaccactgcagtaagcaaggcccccaagagtccatccaagggcacctcaggcacaaagtccaccaagcactcagtgcttaagcaaatctatggttgttctcacgaagggaaaatacatcatcctacaagatctgtaaaagcctcttctgtgctgcgtctcaactcagtgagcaacctacagtgtatacatctccttgagaacagtggaagatcaaagaacttttcttataacctgcaatcagctactcagccaaaaaacaaaacaaaaccttgactgcctatggaggaagactgtgttcgggggagctggcatagctagtgcagagttcagattttctgctgataatcttttacaccttgggaaaactttaatatccgtacctgaaggctgattcacctaaaaatgtgttaactgaaagaaaatgtcagaatgtttcctttctgctcttacacagcattgttttgtcaatcaacacagcctgcactgaaaggacctgcatagactatgtctgtgcaaagtgcctgagtgtctgctttcacctcagtctgtacagttggaaatgagaattcataattaacagcaaaatctaaggaaaacta

SEQ ID NO: 144352 - DNA, 1654 bp, Homo sapiens
  Payload ID: 8519
  Gene Symbol: INVS
  Gene Name: inversin
  Uniprot ID: Q9Y283
  ENST ID: ENST00000374921
  CDS Start-End: 154-459
cggctagcttcagcgccgtggggtctgacctggctggatatagtgtaccggcccggcaggaggggcggcccggtccgggttgcgcctcctggagccgcccccgggacgtcagtcctggaggaggcgagggttgctccggttgctaagaagactatgaacaagtcagagaacctgctgtttgctggttcatcattagcatcacaagtccatgctgctgccgttaatggagataagggtgctctacagaggctcatcgtaggaaactctgctcttaaagacaaagaagatcagtttgggagaacaccacttatgtattgcgtgttggctgacagattggattgtgcagatgctcttctgaaggcaggagcagatgtgaataaaactgaccatagccagagaacagccctccatcttgcagcccagaaggcattgagaacaatcagcacaggcaggatctaagagactacaatcattcaaagaagagaaacacgtaaagtgagtaccacattcatcctggccttttcctttatgacattttccaaactggaatgcaaaagaatacaaccctaacaggaagcagcagccttaccaggctgaagaaactgaggcagagtttggagataatagtggctggaacttgaaagtcaaaatcctggagaggagggaattgcagagaaagaatgcaagaatctggatacaaattcctcacaagtttttaacagattcctaaactgtgcttgtatagggtggtgctctaagaaacctagtattaaacaacagctgggagactagacagctgagtagagattattttaaattatcctatattttcttttatgtttaaatctcttaatatataacacattgatttttgtatggggatccattctcattttaaagcatatggataactaattttcccaacacaacctagttcattaatttttggccatttagtatctgctctctgtcagttccaggcttttgtactacgaactccctatgcatttctgtttttttaaatgagggatcctgaatactagggagcctttgggaaatttgaaaataaaagttacatgatcagtgtattttagggggactaatatggcaactaaagctactttggaagagaaagagtggagatacatagattgctattatagttcaggccaatagagaggaattgggtttaagagatacattatggaggcagaagtgttcattcaacaagcgtttgttaaatatctactatgtaatcatgattatacaactagagagaatatgaaaaaaatgaattacgtatgttagcttatagatggatgctctcagtacccatccctattaatcgtcatttccctttgtttagtgaaccttctgatatattggatatcaaatatcctttccaagtattgtctgtcccacttaattctggtatccatgaatgcagaagtgtgctatttatgtaatcatgaacactcatgtatatgtgtataccttcattcattcaacatgtgttaaaactattatgtaacaggcatcatgttaggccttggaacacaaaggtgaacaacatgattcctgctcttaagttgcttacaaagatcatggatgaagatattaaatgataattaaagctgattgatctaccttgtaa

SEQ ID NO: 144353 - DNA, 3050 bp, Homo sapiens
  Payload ID: 8520
  Gene Symbol: INF2
  Gene Name: inverted formin, FH2 and WH2 domain containing
  ENST ID: ENST00000252527
  CDS Start-End: 1-2154
ggcatggaggaggtcatcgtggcccaggtggaccatggcttgggctcagcatgggtccccagccatcggcgggtgaacccacccacactgcgcatgaagaagctgaactggcagaagctgccatccaacgtggcacgtgagcacaactctatgtgggcgtccctgagcagccccgacgccgaggctgtggagcccgacttctccagcatcgagcgactattctccttccctgcagccaagcccaaggagcccaccatggtggccccccgggccaggaaggagcccaaggagatcactttcctcgatgccaagaagagcctgaacctcaacatcttcctgaagcaatttaagtgctccaacgaggaggtcgctgctatgatccgggctggagataccaccaagtttgatgtggaggttctcaaacaactccttaagctccttcccgagaagcacgagattgaaaacctgcgggcattcacagaggagcgagccaagctggccagcgccgaccacttctacctcctcctgctggccattccctgctaccagctgcgaatcgagtgcatgctgctgtgtgagggcgcggccgccgtgctggacatggtgcggcccaaggcccagctggtgctggctgcctgcgaaagcctgctcaccagccgccagctgcccatcttctgccagctgatcctgagaattgggaacttcctcaactacggcagccacaccggtgacgccgacggcttcaagatcagcacattgctgaagctcacggagaccaagtcccagcagaaccgcgtgacgctgctgcaccacgtgctggaggaagcggaaaagagccaccccgacctcctgcagctgccccgggacctggaacagccctcgcaagcagcagggatcaacctggagatcatccgctcagaggccagctccaacctgaagaagcttctggagaccgagcggaaggtgtctgcctccgtggccgaggtccaggagcagtacaccgagcgcctccaggccagcatctcggccttccgggcactggatgagctgtttgaggccatcgagcagaagcaacgggagctggccgactacctgtgtgaggacgcccagcagctgtccctggaggacacgttcagcaccatgaaggctttccgggaccttttcctccgcgccctgaaggagaacaaggaccggaaggagcaggcggcgaaggcagagaggaggaagcagcagctggcggaggaggaggcgcggcggcctcggggagaggacgggaagcctgtcaggaaggggcccgggaagcaggaggaggtgtgtgtcatcgatgccctgctggctgacatcaggaagggcttccagctgcggaagacagcccggggccgcggggacaccgacgggggcagcaaggcagcctccatggatcccccaagagccacagagcctgtggccaccagtaaccctgcaggagatcccgtgggcagcacgcgctgtcccgcctctgagcccggccttgatgctacaacagccagcgagtcccggggctgggaccttgtagacgccgtgacccccggccctcagcccaccctggagcagttggaggagggtggtccacggcccctggagaggcgttcttcctggtatgtggatgccagcgatgtcctaaccactgaggatccccagtgcccccagcccttggagggggcctggccggtgactctgggagatgctcaggccctgaagcccctcaagttctccagcaaccagccccctgcagccggaagttcaaggcaagatgccaaggatcccacgtccttgctgggcgtcctccaggccgaggccgacagcacaagtgaggggctggaggacgctgtccacagccgtggtgccagaccccctgcagcaggcccaggtggggatgaggacgaggacgaggaggacacggccccagagtccgcactggacacatccctggacaagtccttctccgaggatgcggtgaccgactcctcggggtcgggcacactccccagggcccggggccgggcctcaaaggggaccgggaagcgaaggaagaagcgtccctccaggagccaggaagaggttccccctgattctgatgataataaaacaaagaaactgtgtgtgatccagtaagaacattcctgcccctttttgtcttgtatgacattgacgttctggaagataacttcactttgggtttgcctgattgcgcccccaagcctcaggcccaggcccaaggccaagtgagagagcccaggccacaggacatgctgccattctgccaagagaggctcttctgggggccaggctgggactgggccccggaaaccaaaactccgtgccttacccagccggggccctcctggagccttcttggggtgttgtggctgggaacccgacaggcaccagtgccctgccaggcctggtgccctcctggaccgcctgcacgtgccagcctcccacctgcttcctaaaggcaaccctggcccacacccgcatgcgcccggtgcagcctgccaagggccagtcggggggtgctgcgtcctgccagtgtccaccacagctctgcctgcccttcagcccagcaaggtttaatcaaaatgcaatgctttgcaagtctttactgcttggaggtggctgagttgggggccctgggcaggggtaagctggcaggcagtgccatggcaggccagggtcccctcccatggggtctggcccccgttccagcatgtccagcccctgaagttggagtggggggcggtctgcctttgctgccactgccaggcctctgccctgcagctgaaacttggccatcacatcaacagaaaacccctcccagtgccagctgcccagcgtgggcaggccctggggacaatacaggtccacctgaggggctgcagggtgacacccagcagccgctgccccctcactgcccacccagcgagggcagcctacccgagcctgccccctgccaggtgtgtgccctgaggctggcggctggatgcgtggccaataaaaagcagacctag

SEQ ID NO: 144354 - DNA, 7578 bp, Homo sapiens
  Payload ID: 8520
  Gene Symbol: INF2
  Gene Name: inverted formin, FH2 and WH2 domain containing
  Uniprot ID: Q27J81
  ENST ID: ENST00000330634
  CDS Start-End: 144-3866
cgccccgcgcccgccaggagccaccgtccgagccttgcggagcgcggcagtgggcgccggctgcccgcagcccctgacccggccccggacggagcgccggccgcaccaccgccctctggccgttgcctcaccggctcggcaagatgtcggtgaaggagggcgcacagcgcaagtgggcagcgctgaaggagaagctggggccacaggattcggaccccacggaggccaacctggagagcgcggaccccgagctgtgcatccggctgctccagatgccctctgtggtcaactactccggcctgcgcaagcgcctggagggcagcgacggcggctggatggtgcagttcctggagcagagcggcctggacctgctgctggaggcgctggcgcggctgtcgggccgcggcgttgcacgtatctccgacgccctgctgcagctcacctgcgtcagctgcgtgcgcgccgtcatgaactcgcggcagggcatcgagtacatcctcagcaaccagggctacgtgcgccagctctcccaggccctggacacatccaacgtgatggtgaagaagcaggtgtttgagctactggctgccctgtgcatctactctcccgagggccacgtgctgaccctggacgccctggaccactacaagacggtgtgcagccagcagtaccgcttcagcattgtcatgaacgagctctccggcagcgacaacgtgccctacgtggtcaccctgcttagcgtgatcaacgccgtcatcttgggccccgaggacctgcgcgcgcgcacccagctgcggaacgagtttatcgggctgcagctgctggacgtcctggctcgcctgcgagacctggaggatgccgacctgctgatccagctggaggctttcgaggaggctaaggccgaggacgaggaggagctgctgcgagtctctggcggggtcgacatgagcagccaccaggaggtctttgcctccctgttccacaaggtgagctgctccccggtgtctgcccagctcctgtcggtgctgcagggcctcctgcacctggagcccaccctccgctccagccagctgctctgggaggccctggagagcctcgtgaaccgggccgtgctcctggccagcgatgcccaggaatgcaccctggaggaagtggttgagcggctcctgtctgtcaaggggcgacccagaccgagccccctggtcaaggcccataaaagcgtccaggccaacctagaccagagccagaggggcagctccccgcaaaacactacaacccccaagcccagcgtggagggccagcagccagcagcagctgctgcctgcgagcccgtggaccacgcccagagtgagagcatcctgaaagtttcgcagcccagagccctggagcagcaggcgtccaccccacccccacccccacccccacccctgctccctggttccagtgccgagccccctccccctcccccaccaccccccctgcccagtgtgggggctaaggccctcccaacagcacccccgcccccacccctgccaggcctgggggccatggcccccccagcacctcctctaccaccacccctgccaggctcctgtgagttcctgcccccaccacctccaccactcccgggcttgggatgcccgcccccacccccacccctgctgcctggtatgggctggggccctcctccacccccacctccactactgccctgcacctgcagcccccccgtggcgggaggcatggaggaggtcatcgtggcccaggtggaccatggcttgggctcagcatgggtccccagccatcggcgggtgaacccacccacactgcgcatgaagaagctgaactggcagaagctgccatccaacgtggcacgtgagcacaactctatgtgggcgtccctgagcagccccgacgccgaggctgtggagcccgacttctccagcatcgagcgactattctccttccctgcagccaagcccaaggagcccaccatggtggccccccgggccaggaaggagcccaaggagatcactttcctcgatgccaagaagagcctgaacctcaacatcttcctgaagcaatttaagtgctccaacgaggaggtcgctgctatgatccgggctggagataccaccaagtttgatgtggaggttctcaaacaactccttaagctccttcccgagaagcacgagattgaaaacctgcgggcattcacagaggagcgagccaagctggccagcgccgaccacttctacctcctcctgctggccattccctgctaccagctgcgaatcgagtgcatgctgctgtgtgagggcgcggccgccgtgctggacatggtgcggcccaaggcccagctggtgctggctgcctgcgaaagcctgctcaccagccgccagctgcccatcttctgccagctgatcctgagaattgggaacttcctcaactacggcagccacaccggtgacgccgacggcttcaagatcagcacattgctgaagctcacggagaccaagtcccagcagaaccgcgtgacgctgctgcaccacgtgctggaggaagcggaaaagagccaccccgacctcctgcagctgccccgggacctggaacagccctcgcaagcagcagggatcaacctggagatcatccgctcagaggccagctccaacctgaagaagcttctggagaccgagcggaaggtgtctgcctccgtggccgaggtccaggagcagtacaccgagcgcctccaggccagcatctcggccttccgggcactggatgagctgtttgaggccatcgagcagaagcaacgggagctggccgactacctgtgtgaggacgcccagcagctgtccctggaggacacgttcagcaccatgaaggctttccgggaccttttcctccgcgccctgaaggagaacaaggaccggaaggagcaggcggcgaaggcagagaggaggaagcagcagctggcggaggaggaggcgcggcggcctcggggagaggacgggaagcctgtcaggaaggggcccgggaagcaggaggaggtgtgtgtcatcgatgccctgctggctgacatcaggaagggcttccagctgcggaagacagcccggggccgcggggacaccgacgggggcagcaaggcagcctccatggatcccccaagagccacagagcctgtggccaccagtaaccctgcaggagatcccgtgggcagcacgcgctgtcccgcctctgagcccggccttgatgctacaacagccagcgagtcccggggctgggaccttgtagacgccgtgacccccggccctcagcccaccctggagcagttggaggagggtggtccacggcccctggagaggcgttcttcctggtatgtggatgccagcgatgtcctaaccactgaggatccccagtgcccccagcccttggagggggcctggccggtgactctgggagatgctcaggccctgaagcccctcaagttctccagcaaccagccccctgcagccggaagttcaaggcaagatgccaaggatcccacgtccttgctgggcgtcctccaggccgaggccgacagcacaagtgaggggctggaggacgctgtccacagccgtggtgccagaccccctgcagcaggcccaggtggggatgaggacgaggacgaggaggacacggccccagagtccgcactggacacatccctggacaagtccttctccgaggatgcggtgaccgactcctcggggtcgggcacactccccagggcccggggccgggcctcaaaggggaccgggaagcgaaggaagaagcgtccctccaggagccaggaaggcctcaggcccaggcccaaggccaagtgagagagcccaggccacaggacatgctgccattctgccaagagaggctcttctgggggccaggctgggactgggccccggaaaccaaaactccgtgccttacccagccggggccctcctggagccttcttggggtgttgtggctgggaacccgacaggcaccagtgccctgccaggcctggtgccctcctggaccgcctgcacgtgccagcctcccacctgcttcctaaaggcaaccctggcccacacccgcatgcgcccggtgcagcctgccaagggccagtcggggggtgctgcgtcctgccagtgtccaccacagctctgcctgcccttcagcccagcaaggtttaatcaaaatgcaatgctttgcaagtctttactgcttggaggtggctgagttgggggccctgggcaggggtaagctggcaggcagtgccatggcaggccagggtcccctcccatggggtctggcccccgttccagcatgtccagcccctgaagttggagtggggggcggtctgcctttgctgccactgccaggcctctgccctgcagctgaaacttggccatcacatcaacagaaaacccctcccagtgccagctgcccagcgtgggcaggccctggggacaatacaggtccacctgaggggctgcagggtgacacccagcagccgctgccccctcactgcccacccagcgagggcagcctacccgagcctgccccctgccaggtgtgtgccctgaggctggcggctggatgcgtggccaataaaaagcagacctagcccggtgtgcgactgtcgtgttcagaggctgcgggagtgggcggtggacgtgggctcccacaaacatggtgagcgctggacaggccccgtgtgaacactcactgttgaggggcccccaggccccgtgtgaacactcactgttgaggggtccctgggcccccaggcaccgtgtgagcattcactgttgagggtcccccagtcccccaggccaggggctgtccctggagccctcaggaggcagtaagaaacatctagaagagggcagacccagtggtgaaccgcatccaacagtggtgagatgggtgcagctctacaggggcgtaatttacaaaccaccagactccctggttatgtgtgtgctgcggtggtgtttgctctccagcagatcaagtttgtgcaatgatccattttgagaatctctccgtcaccccaagaagtcctctcgcacccatcagtccgaccccttccccgtgctcctccccagccctggcagccactcacctgcactccagacgctccagatgtcatgcatgtctcctggcttccttcggctgttttcacgcgccatcctcacggcaggctgtatcaggacttcattccatttcatggctgaagcacattccattgcatgcagggaccacattttgtttgtctgctcttctgtccatggacatctgggttgcttccagtttggggcttctgtgaatcctgctgctgtggacatttgcgtagtcctcgtgtggatgctgctgtggacgtctgcgtcgtcctcgtgtggatgctgctgtggacgtctgcgtcgtcctcgtgtggatgctgctgtggacgtctgcgtagtctcgtgtggatgctgctgtggacgtctgcgtcgtcctcgtgtggatgctgctgtggacatctgcgtagtctcgtgtggatgctgctgtgaacgtctgcgtagtctcgtgtggatgctgctgtggacgtctgcgtagtctcgtgtggatgctgctgtgcacgtctgcgtcgtcctcgtgtggatgctgctgtggacgtctgcgtcgtcctcgtgtggatgctgctgtggacgtctgcgtcgtcctcgtgtggatgctgctgtggacgtctgcgtcgtctcgtgtggatgctgctgtggacgtctgcgtcgtctcgtgtggatgctgctgtggacgtctgcgtcgtctcgtgtggatgctgctgtggacgtctgcgtcgtcctcgtgtggatgctgctgtggacgtctgcgtcgtctcgtgtggatgctgctgtggacgtctgcgtcgtcctcgtgtggatgctgctgtggacgtctgcgtcgtcctcgtgtggatgctgctgtggacgtctgcgtcgtcctcgtgtggatgctgctgtggacgtctgcgtcgtcctcctgtggatgctgctgtggacgtctgcgtcgtcctcgtgtggatgctgctgtggacgtctgcgtagtctcgtgtggatgctgctgtggacgtctgcgtagtctcgtgtggatgctgctgtggacgtctgcgtcgtcctcgatgctgctgtggacgtctgcgtcgtcctcgtgtggatgctgctatggacgtctgcgtagtctcgtgtggatgctgctgtggacgtctgcgtcgtcctcgtgtggatgctgctgtggacgtctgcgtagtctcgtgtggatgctgctgtggacgtctgcgtagtctcgtgtggatgctgctgtggacgtctgcgtcgtcctcgtgtggatgctgctgtggacgtctgcgtagtctcgtgtggatgctgctgtggacgtctgcgtcgtcctcgtgtggatgctgctgtggacgtctgtgtagtctcatgtggatgctgcgagttttcgttgctctggggtagattcgtagcggaggaacaactgggcgacacgctaagtttatgtttaactttttaagtaactgcctaactgttttccaaagcagctgcaccatttttcattcccatccatgctattgtttttcagttaaatagctccactcctccccctccccaccctccacagaactgccagtaaaactggactatggagtattgggtggggtcacctacaaggtcatctgcagcaagtgagaccatcgcccctcctgcctggagaggtgggactggggaccctgtgacaggaggagctgcccttcctggagcctggtttttctttttcctctgtgctccatgagaagtcagtttagtgggctacagccagcaaaggaaccaaaaccaacaggagctctgggggtgccttgcatggcgaggctccgtggctgcacgcgtgtatgcaggtggctgtgggtgtctgtgtgtcctgggccactgtgtgcgatggtcccactgggaggtgtggcccccaaagagtggaacccacaggtggacacacccatgcaccctcgttcttgcccaaggtcacacatcgagacagcagggcccagatggatggccccaagctcggtggctcccgtgctgcccacacctggggacaggcccactgtggggggtaaggggtggaggtgttctaattcgggctgagccgtgtgactggcaggggccccagctgttgggcctgggcaggactgtttttagaaaagccccaactccctgcccctacccgggcccgtggctatttatagtccgggcctggagaagtcagtgagtcactagcgttcgcctctgcagggtcagtccaagcccccttagtgaggtggtctagcatgtcccccagtcccccaagcctctatctgacatctgctagcccagagccccaggggtccccaggaagggctcagagctggtggccccccccaggccttggcagcacctccttgtctgatgggactttgtggttcctggtggacatttaacattgtcggtttctctcatctggaaacaaacctccatgacgctc

SEQ ID NO: 144355 - DNA, 4672 bp, Homo sapiens
  Payload ID: 8520
  Gene Symbol: INF2
  Gene Name: inverted formin, FH2 and WH2 domain containing
  Uniprot ID: Q27J81
  ENST ID: ENST00000392634
  CDS Start-End: 113-3862
gccttgcggagcgcggcagtgggcgccggctgcccgcagcccctgacccggccccggacggagcgccggccgcaccaccgccctctggccgttgcctcaccggctcggcaagatgtcggtgaaggagggcgcacagcgcaagtgggcagcgctgaaggagaagctggggccacaggattcggaccccacggaggccaacctggagagcgcggaccccgagctgtgcatccggctgctccagatgccctctgtggtcaactactccggcctgcgcaagcgcctggagggcagcgacggcggctggatggtgcagttcctggagcagagcggcctggacctgctgctggaggcgctggcgcggctgtcgggccgcggcgttgcacgtatctccgacgccctgctgcagctcacctgcgtcagctgcgtgcgcgccgtcatgaactcgcggcagggcatcgagtacatcctcagcaaccagggctacgtgcgccagctctcccaggccctggacacatccaacgtgatggtgaagaagcaggtgtttgagctactggctgccctgtgcatctactctcccgagggccacgtgctgaccctggacgccctggaccactacaagacggtgtgcagccagcagtaccgcttcagcattgtcatgaacgagctctccggcagcgacaacgtgccctacgtggtcaccctgcttagcgtgatcaacgccgtcatcttgggccccgaggacctgcgcgcgcgcacccagctgcggaacgagtttatcgggctgcagctgctggacgtcctggctcgcctgcgagacctggaggatgccgacctgctgatccagctggaggctttcgaggaggctaaggccgaggacgaggaggagctgctgcgagtctctggcggggtcgacatgagcagccaccaggaggtctttgcctccctgttccacaaggtgagctgctccccggtgtctgcccagctcctgtcggtgctgcagggcctcctgcacctggagcccaccctccgctccagccagctgctctgggaggccctggagagcctcgtgaaccgggccgtgctcctggccagcgatgcccaggaatgcaccctggaggaagtggttgagcggctcctgtctgtcaaggggcgacccagaccgagccccctggtcaaggcccataaaagcgtccaggccaacctagaccagagccagaggggcagctccccgcaaaacactacaacccccaagcccagcgtggagggccagcagccagcagcagctgctgcctgcgagcccgtggaccacgcccagagtgagagcatcctgaaagtttcgcagcccagagccctggagcagcaggcgtccaccccacccccacccccacccccacccctgctccctggttccagtgccgagccccctccccctcccccaccaccccccctgcccagtgtgggggctaaggccctcccaacagcacccccgcccccacccctgccaggcctgggggccatggcccccccagcacctcctctaccaccacccctgccaggctcctgtgagttcctgcccccaccacctccaccactcccgggcttgggatgcccgcccccacccccacccctgctgcctggtatgggctggggccctcctccacccccacctccactactgccctgcacctgcagcccccccgtggcgggaggcatggaggaggtcatcgtggcccaggtggaccatggcttgggctcagcatgggtccccagccatcggcgggtgaacccacccacactgcgcatgaagaagctgaactggcagaagctgccatccaacgtggcacgtgagcacaactctatgtgggcgtccctgagcagccccgacgccgaggctgtggagcccgacttctccagcatcgagcgactattctccttccctgcagccaagcccaaggagcccaccatggtggccccccgggccaggaaggagcccaaggagatcactttcctcgatgccaagaagagcctgaacctcaacatcttcctgaagcaatttaagtgctccaacgaggaggtcgctgctatgatccgggctggagataccaccaagtttgatgtggaggttctcaaacaactccttaagctccttcccgagaagcacgagattgaaaacctgcgggcattcacagaggagcgagccaagctggccagcgccgaccacttctacctcctcctgctggccattccctgctaccagctgcgaatcgagtgcatgctgctgtgtgagggcgcggccgccgtgctggacatggtgcggcccaaggcccagctggtgctggctgcctgcgaaagcctgctcaccagccgccagctgcccatcttctgccagctgatcctgagaattgggaacttcctcaactacggcagccacaccggtgacgccgacggcttcaagatcagcacattgctgaagctcacggagaccaagtcccagcagaaccgcgtgacgctgctgcaccacgtgctggaggaagcggaaaagagccaccccgacctcctgcagctgccccgggacctggaacagccctcgcaagcagcagggatcaacctggagatcatccgctcagaggccagctccaacctgaagaagcttctggagaccgagcggaaggtgtctgcctccgtggccgaggtccaggagcagtacaccgagcgcctccaggccagcatctcggccttccgggcactggatgagctgtttgaggccatcgagcagaagcaacgggagctggccgactacctgtgtgaggacgcccagcagctgtccctggaggacacgttcagcaccatgaaggctttccgggaccttttcctccgcgccctgaaggagaacaaggaccggaaggagcaggcggcgaaggcagagaggaggaagcagcagctggcggaggaggaggcgcggcggcctcggggagaggacgggaagcctgtcaggaaggggcccgggaagcaggaggaggtgtgtgtcatcgatgccctgctggctgacatcaggaagggcttccagctgcggaagacagcccggggccgcggggacaccgacgggggcagcaaggcagcctccatggatcccccaagagccacagagcctgtggccaccagtaaccctgcaggagatcccgtgggcagcacgcgctgtcccgcctctgagcccggccttgatgctacaacagccagcgagtcccggggctgggaccttgtagacgccgtgacccccggccctcagcccaccctggagcagttggaggagggtggtccacggcccctggagaggcgttcttcctggtatgtggatgccagcgatgtcctaaccactgaggatccccagtgcccccagcccttggagggggcctggccggtgactctgggagatgctcaggccctgaagcccctcaagttctccagcaaccagccccctgcagccggaagttcaaggcaagatgccaaggatcccacgtccttgctgggcgtcctccaggccgaggccgacagcacaagtgaggggctggaggacgctgtccacagccgtggtgccagaccccctgcagcaggcccaggtggggatgaggacgaggacgaggaggacacggccccagagtccgcactggacacatccctggacaagtccttctccgaggatgcggtgaccgactcctcggggtcgggcacactccccagggcccggggccgggcctcaaaggggaccgggaagcgaaggaagaagcgtccctccaggagccaggaagaggttccccctgattctgatgataataaaacaaagaaactgtgtgtgatccagtaaggcctcaggcccaggcccaaggccaagtgagagagcccaggccacaggacatgctgccattctgccaagagaggctcttctgggggccaggctgggactgggccccggaaaccaaaactccgtgccttacccagccggggccctcctggagccttcttggggtgttgtggctgggaacccgacaggcaccagtgccctgccaggcctggtgccctcctggaccgcctgcacgtgccagcctcccacctgcttcctaaaggcaaccctggcccacacccgcatgcgcccggtgcagcctgccaagggccagtcggggggtgctgcgtcctgccagtgtccaccacagctctgcctgcccttcagcccagcaaggtttaatcaaaatgcaatgctttgcaagtctttactgcttggaggtggctgagttgggggccctgggcaggggtaagctggcaggcagtgccatggcaggccagggtcccctcccatggggtctggcccccgttccagcatgtccagcccctgaagttggagtggggggcggtctgcctttgctgccactgccaggcctctgccctgcagctgaaacttggccatcacatcaacagaaaacccctcccagtgccagctgcccagcgtgggcaggccctggggacaatacaggtccacctgaggggctgcagggtgacacccagcagccgctgccccctcactgcccacccagcgagggcagcctacccgagcctgccccctgccaggtgtgtgccctgaggctggcggctggatgcgtggccaataaaaagcagacct

SEQ ID NO: 144356 - DNA, 1689 bp, Homo sapiens
  Payload ID: 8520
  Gene Symbol: INF2
  Gene Name: inverted formin, FH2 and WH2 domain containing
  Uniprot ID: Q27J81
  ENST ID: ENST00000398337
  CDS Start-End: 129-833
aggagccaccgtccgagccttgcggagcgcggcagtgggcgccggctgcccgcagcccctgacccggccccggacggagcgccggccgcaccaccgccctctggccgttgcctcaccggctcggcaagatgtcggtgaaggagggcgcacagcgcaagtgggcagcgctgaaggagaagctggggccacaggattcggaccccacggaggccaacctggagagcgcggaccccgagctgtgcatccggctgctccagatgccctctgtggtcaactactccggcctgcgcaagcgcctggagggcagcgacggcggctggatggtgcagttcctggagcagagcggcctggacctgctgctggaggcgctggcgcggctgtcgggccgcggcgttgcacgtatctccgacgccctgctgcagctcacctgcgtcagctgcgtgcgcgccgtcatgaactcgcggcagggcatcgagtacatcctcagcaaccagggctacgtgcgccagctctcccaggccctggacacatccaacgtgatggtgaagaagcaggtgtttgagctactggctgccctgtgcatctactctcccgagggccacgtgctgaccctggacgccctggaccactacaagacggtgtgcagccagcagtaccgcttcagcattgtcatgaacgagctctccggcagcgacaacgtgccctacgtggtcaccctgcttagcgtgatcaacgccgtcatcttgggccccgaggacctgcgcgcgcgcacccagctgcggaacgagtttatcgggctgcagctgctggacgtcctggctcgcctgcggtgagtccccactgtagcggtcctgccggctccccctcctgctcccaaggccaggcccacctgccctttggctcccagccacctcacctaagcagcacctccagatggcagggaggtggctccctcggagtaaccccaggggtccagccagaagccaggtctcaggctagaatccagctcactgtccctggcagctgcccacagaaactagggttgcagcagccatagaaaggacagaatgagctcatatcctttgcacaccgtggatggagctggaggccgtgatcctaagtgaaccaacccagaaacagaaaatgaaatgccaataagagggaactacagggtggttcacgtggacgcaagatggagacagggacacgggctccagggcgagagttgaaaaactacctacagggtacagtgttcgtcgctacttggtgtcaggcccactagaacaagggtccccaaccgccaggctgcggaccggtacctggcctattggaaccgggccacgcagcaggaagtgagcggtgggcgggcattcctgcctgagctgcacctcatgtcagatcagcactgcattagattctccagcgcacgcacgcgcgcaagggatccaggctgcgcgctcctcatgacaatctaatgcctgatgatcgggggtggaacagttttatccctaaaccattcccgtcaccccagtctatggaaaaattgtcttccacaaaaccagtccctggtgccaaaaaggctggggaccactgccctagaaggcaaatcgcctacgttacacagtgtaccatgtggcaaacacgcacatgtacccccgagtctaaaataaaaattttttaaaaaagaaa

SEQ ID NO: 144357 - DNA, 2956 bp, Homo sapiens
  Payload ID: 8520
  Gene Symbol: INF2
  Gene Name: inverted formin, FH2 and WH2 domain containing
  ENST ID: ENST00000617571
  CDS Start-End: 2528-2956
ggcatggaggaggtcatcgtggcccaggtggaccatggcttgggctcagcatgggtccccagccatcggcgggtgaacccacccacactgcgcatgaagaagctgaactggcagaagctgccatccaacgtggcacgtgagcacaactctatgtgggcgtccctgagcagccccgacgccgaggctgtggagcccgacttctccagcatcgagcgactattctccttccctgcagccaagcccaaggagcccaccatggtggccccccgggccaggaaggagcccaaggagatcactttcctcgatgccaagaagagcctgaacctcaacatcttcctgaagcaatttaagtgctccaacgaggaggtcgctgctatgatccgggctggagataccaccaagtttgatgtggaggttctcaaacaactccttaagctccttcccgagaagcacgagattgaaaacctgcgggcattcacagaggagcgagccaagctggccagcgccgaccacttctacctcctcctgctggccattccctgctaccagctgcgaatcgagtgcatgctgctgtgtgagggcgcggccgccgtgctggacatggtgcggcccaaggcccagctggtgctggctgcctgcgaaagtgagctccccatcccacctggtgccaggggctggtgagactcactccctgcccctcccagggcagccacaccggtgacgccgacggcttcaagatcagcacattgctgaagctcacggagaccaagtcccagcagaaccgcgtgacgctgctgcaccacgtgctggaggaagcggaaaagagccaccccgacctcctgcagctgccccgggacctggaacagccctcgcaagcagcagggatcaacctggagatcatccgctcagaggccagctccaacctgaagaagcttctggagaccgagcggaaggtgtctgcctccgtggccgaggtccaggagcagtacaccgagcgcctccaggccagcatctcggccttccgggcactggatgagctgtttgaggccatcgagcagaagcaacgggagctggccgactacctgtgtgaggacgcccagcagctgtccctggaggacacgttcagcaccatgaaggctttccgggaccttttcctccgcgccctgaaggagaacaaggaccggaaggagcaggcggcgaaggcagagaggaggaagcagcagctggcggaggaggaggcgcggcggcctcggggagaggacgggaagcctgtcaggaaggggcccgggaagcaggaggaggtgtgtgtcatcgatgccctgctggctgacatcaggaagggcttccagctgcggaagacagcccggggccgcggggacaccgacgggggcagcaaggcagcctccatggatcccccaagagccacagagcctgtggccaccagtaaccctgcaggagatcccgtgggcagcacgcgctgtcccgcctctgagcccggccttgatgctacaacagccagcgagtcccggggctgggaccttgtagacgccgtgacccccggccctcagcccaccctggagcagttggaggagggtggtccacggcccctggagaggcgttcttcctggtatgtggatgccagcgatgtcctaaccactgaggatccccagtgcccccagcccttggagggggcctggccggtgactctgggagatgctcaggccctgaagcccctcaagttctccagcaaccagccccctgcagccggaagttcaaggcaagatgccaaggatcccacgtccttgctgggcgtcctccaggccgaggccgacagcacaagtgaggggctggaggacgctgtccacagccgtggtgccagaccccctgcagcaggcccaggtggggatgaggacgaggacgaggaggacacggccccagagtccgcactggacacatccctggacaagtccttctccgaggatgcggtgaccgactcctcggggtcgggcacactccccagggcccggggccgggcctcaaaggggaccgggaagcgaaggaagaagcgtccctccaggagccaggaagaggttccccctgattctgatgataataaaacaaagaaactgtgtgtgatccagtaaggcctcaggcccaggcccaaggccaagtgagagagcccaggccacaggacatgctgccattctgccaagagaggctcttctgggggccaggctgggactgggccccggaaaccaaaactccgtgccttacccagccggggccctcctggagccttcttggggtgttgtggctgggaacccgacaggcaccagtgccctgccaggcctggtgccctcctggaccgcctgcacgtgccagcctcccacctgcttcctaaaggcaaccctggcccacacccgcatgcgcccggtgcagcctgccaagggccagtcggggggtgctgcgtcctgccagtgtccaccacagctctgcctgcccttcagcccagcaaggtttaatcaaaatgcaatgctttgcaagtctttactgcttggaggtggctgagttgggggccctgggcaggggtaagctggcaggcagtgccatggcaggccagggtcccctcccatggggtctggcccccgttccagcatgtccagcccctgaagttggagtggggggcggtctgcctttgctgccactgccaggcctctgccctgcagctgaaacttggccatcacatcaacagaaaacccctcccagtgccagctgcccagcgtgggcaggccctggggacaatacaggtccacctgaggggctgcagggtgacacccagcagccgctgccccctcactgcccacccagcgagggcagcctacccgagcctgccccctgccaggtgtgtgccctgaggctggcggctggatgcgtggccaataaaaagcagacctag

SEQ ID NO: 144358 - DNA, 2153 bp, Homo sapiens
  Payload ID: 8521
  Gene Symbol: IVL
  Gene Name: involucrin
  Uniprot ID: P07476
  ENST ID: ENST00000368764
  CDS Start-End: 65-1822
tcagcactccaccaaagcctctgcctcagccttactgtgagtctggttgacagtagcttctaagatgtcccagcaacacacactgccagtgaccctctcccctgccctcagtcaggagctcctcaagactgttcctcctccagtcaatacccatcaggagcaaatgaaacagccaactccactgcctcccccatgccagaaggtgcctgtcgagctcccagtggaggtcccatcaaagcaagaggaaaagcacatgactgctgtaaagggactgcctgagcaagaatgtgagcaacagcagaaggagccacaggagcaggagctgcagcaacagcactgggaacagcatgaggaatatcagaaagcagaaaacccagagcagcagcttaagcaggagaaaacacaaagggatcagcagctaaacaaacagctggaagaagagaagaagctcttagaccagcaactggatcaagagctagtcaagagagatgagcaactgggaatgaagaaagagcaactgttggagctcccagagcagcaggaggggcacctgaagcacctagagcagcaggagggacagctgaagcacccggagcagcaggaggggcagctggagctcccagagcagcaggaggggcagctggagctcccagagcagcaggaggggcagctggagctcccagagcagcaggaggggcagctggagctcccagagcagcaggaggggcagctggagctcccagagcagcaggaggggcagctggagctcccacagcagcaggaggggcagctggagctctctgagcagcaggaggggcagctggagctctctgagcagcaggagggacagctgaagcacctggagcaccaggaggggcagctggaggtcccagaggagcagatggggcagctgaagtacctggaacagcaggaggggcagctgaagcacctggatcagcaggagaagcagccagagctcccagagcagcagatggggcagctgaagcacctggagcagcaggaggggcagcctaagcatctggagcagcaggaggggcaactggagcagctggaggagcaggaggggcagctgaagcacctggagcagcaggaggggcagctggagcacctggagcaccaggaagggcagctggggctcccagagcagcaggtgctgcagctgaagcagctagagaagcagcaggggcagccaaagcacctggaggaggaggaggggcagctgaagcacctggtgcagcaggaggggcagctgaagcatctggtgcagcaggaggggcagctggagcagcaggagaggcaggtggagcacctggagcagcaggtggggcagctgaagcacctagaggagcaggagggacaactgaagcatctggagcagcagcaggggcagttggaggtcccagagcagcaggtggggcagccaaagaacctggagcaggaggagaagcaactggagctcccagagcagcaagagggccaggtgaagcacctggagaagcaggaggcacagctggagctcccagagcagcaggtaggacagccaaagcacctggaacagcaggaaaagcacctagagcacccagagcagcaggacggacaactaaaacatctggagcagcaggaggggcagctgaaggacctggagcagcagaaggggcagctggagcagcctgtgtttgccccagctccaggccaggtccaagacattcaaccagccctgcccacaaagggagaagtattgcttcctgtagagcaccagcagcagaagcaggaggtgcagtggccacccaaacataaataaccacccgcagtgtccagaggccctcagatcgtctcatacaagggaagagagagccactggctccacttatttcgggtccgctaggtggcccgtctcatctgtgaacttgactctgtccctctacatgtctctttaatggggtgagggtgggggagagagggaattattgtccagtgccaaccccaatgaccccaatcccaacctcaggtgagcagagcctctacttgagggactattgttactataggaatccttacttccccagtattgaagctgaatcagtgagtgtgtacaatgatacataataaatcctggaagtcttgggatccta

SEQ ID NO: 144359 - DNA, 7513 bp, Homo sapiens
  Payload ID: 8522
  Gene Symbol: IYD
  Gene Name: iodotyrosine deiodinase
  Uniprot ID: Q6PHW0
  ENST ID: ENST00000229447
  CDS Start-End: 141-1022
gaagagttctgcactttgttccttccctggcacacctgtgtctgcattccttctatctcccggcattctccactcctgtctctgtgtgtttaaaaaccggtgtgggaagtgtgcacgcctgtgacgtcagactccagaccatgtatttcctgactcccatcttggtagccattctctgcattttggttgtgtggatctttaaaaatgccgacagaagcatggagaaaaagaagggggagcctagaaccagggccgaagctcgcccctgggtggatgaagacttaaaagacagcagtgacctgcaccaagcagaagaagatgctgatgaatggcaagaatcagaagaaaatgttgaacacatccccttctctcataaccactatcctgagaaggaaatggttaagaggtctcaggaattttatgaacttctcaataagagacggtcagtcaggttcataagtaatgagcaagtcccaatggaagtcattgataatgtcatcagaacggcaggaacagccccgagtggggctcacacagagccctggaccttcgtggttgtgaaggacccagacgtgaagcacaagattcgaaagatcattgaggaggaagaggagatcaactacatgaaaaggatgggacatcgctgggtcacagacctcaagaaactgagaaccaactggattaaagagtacttggatactgcccctattttgattctcattttcaaacaagtacatggtttcgccgcaaatggcaagaaaaaagtccactactacaatgagatcagtgtttccatcgcttgtggcatcctgctagctgccctgcaggtaaataatggaatcaccatgcggcatcagactgcgaggcaccgccacctgattgagggtcctggaagaagcagcgaagcctgcagcaagctcagctcacaaggctgcccagaatgcaggtctggtgactgtcactaccactcctctcaactgtggccctcgactgagggtgctcctgggccgccccgcacatgaaaagctgctgatgctgctccccgtggggtaccccagcaaggaggccacggtgcctgacctcaagcgcaaacctctggaccagatcatggtgacagtgtaggcagggccccccaagggagtggcagggagatggcgcccctgcttttccctgagcctctcgcctgctcctcttgggtctcttggctgctctttctccaggtgtcaggtcccctcattgctcttctcaggtggccacactatgtcaagaagcctctccacactctgtggcacttccagtcccataaatcctgtttcttatccactttggaaatgcatgaacactttacaaagaacatgcccgggtttttacattttaaaagttattctagacaatcactattggcttttttcttttatttttaaaaaactcacatagaggagacaatcagaaatttaccatagtcccaagaattcagctacatgatgactcgaatttaaatttagattaatcaaatggtctcctgttctctgatttctggtggcttttagacactaatttttgagaactacttttttttttttaccaaacttcagggacactctgctagttttgaataagtaaccatcaaagttactaaaacatggccaggcgcagtggctcatgcctgtaatcccagcactttgggaggccgaggtgggcagattgcctgagctcaagagttcgagaccagcctggccaacatggtgaaaccccatctctactaaaaatacaaaaaattagctgggcatgcacttgtaattccagctactcaggaggctgaggcaagagaactgcttgaatccgggaggtagagattgcagtgagtcaagatgctgagatgccaccactgcactccagcctgggcaacagagcgagaacctgtctcaaaaaaaacaaaaacaaagttactaaaatgtcaccttcacagaacaggacagggtacccttgggtcgcacgggcctggctggcatgtaaacggtcagttgcactgcctagtggtttggtagatctgacttgtaagcagttcatagaagctgctcaatactcaagaatcttgcaagacagttattaaacattcatagcttgaaattgcccatggtgggagagtttacatcacaaccactacaaatcagcacttgctttcttcttcttaaagagagctgcttaccatacatagcacccacagtgtctcccttctcttctaccccaacccctgaaacacactgacccctattctccagatgacagcacagctgtttgggactgatagggtcacagttgccaggttgggaatgctagatgtagtcttcacccatcaccttctgtcgtcctcccaggggtgtcatatttacagaggcaaactcttacagcttggatgatttctcatcaagcaactctactcacctctttttcccctttccctgtgcgtttcttcttcttgtcctcattttccttgagaaaactctctctataaaaaatttccatagagtatgtggctgataaacaacagaaatttgtttctcacagttctggaggctggaagtccaaggtcggggtgccctcatggtcaggtgctggtgaggaccctgatctgggttgcagactgctgacttcttattgtgtcctcgtggtagaaagagggttagagcctctggcatgccttttataagggtactaatcccatcatgaggccccgtccttatgacctcatcacctcccaaaggaccccctcctaataccatcacattgggggttagggtttcaacatatgaattgcgggggacacaaacattccgtccatggcacctacttcatagggtttggcatgctgctcggtacatggttaacattcataaatggtgggggcccttactgtggtagaaaccattgtcactgcaaggcagccctgcttgggattcaggtgaacaaatgtaacgtgggtgggtgagggactccctcctcttcagagaagccctcctgtggctcaggggcagctgcagggccagatggagttggcctgcagggagtcagccttaccccatcagagaccaacttgaaagatttttttctctgtgtagttcgtgttatcaatctgatctgcagccaggttatttacttctgaagcattggagttatcgattgccattgccccatggttctcactctttgcaggcactcttcaaatttttattttaaaaattataatgcaaacatctggccatcaccttaaccaagtgacaaagtcctagcacaccattaatggtaggataactgacattaagtgttcctgctgggatgaattatgaagtattccttccaaagatgtcaatggaaactaatcgagtcttacacctaattttcagtttacagtaaatacagaggataaagaagttaatggcatggtggaataaccaaaatgtgtatcattctacaaaaaaataggcctggactatttaaggagtgagtgtcactgtgggaagaataagagggggactgtcttgtccttgctactcaaagagtggtcctgggcctgtatcatcattgggaccacctgggcgcttgttagaatcaaagactctcaggcctcacctagacatccagaatcaaaatctgcattttaacaagatgcccaggtgatctgcatgcctgttaaagtctgagctctgttgcagataaccagagacccaacaaccaaaggcaaagcgtaagccttgattggattttggtttaggaaaaatctcataggtataaaagacaactgggaatgttgaatgtggatctggtggtaggtgatattgttagtgatgtgagtgatgcctgctgaagtactgagagatgaagcatcatattgacaacttactccaggaaaaaaggtgtgtgtataggtgtgtgtttggagagtgtgagcgagaactaacatggtaaaatgttaggtggagcatatacagttctcattatactcttattttaaatttatatttgaacacagtcaaatctgaatggaaatacatttaaataagcatttctttcagtcatataagtaatttgcctaaaaatgccctctaagtccatcattaggttaagcgatttactgaaggtgcagatatcatgcttatttcattgggttgttttggaatgtcccccacttggagagtttgaggaatggaaatgagaatcggaggagaaataaggccagaggctcacattgcttgcagggaaccgactgagtaatgaagaagaggaaggaagcccttggaaggaacgtaaaatccatttcagcctgccgccccttggaatggagggtcttctagggaccagaaacaccagacacttcttctgccccaagcacaccccacactaatttctgctgcagcatcacgatcagggcaaatcagcacagccccccagccatcagtggtgtctagaaaagtaaggataattttcttccttctcactgcagccccaagctcttattaaccttcttttatgtgttcattaaatgcagtcatgtgacaactgtgttcaaagttagaaatagtggtcggggaggcttatagatcctcttgctgttctgaggccttaaaaccaaaaaaataatggaatgattgcatcactgcgaggaagtatacttaattaagaaagttgaaaatggtttgtgtcttactaataggactcacctgaagactctactttgccaagagggaatttttaactcaaagttgtgtcagccagcacggggtagagccatggtcctcatacttgctggcatccctcatctggtggtctgttaaagcacagattgctgggccgcaccctcagggtgtgtgattgtgtgattcagtattgctgggtggtgcccaaatgctccagttctaatgtattcccaggtgttgctgatgctggtgattgggtaccacattttgagaaccatggggcattggcaatcaacaaatgcaatgcttgtgacttgacgtgataaaagttcatttattgggcaggcaaagtcctctgcaggcctggaaaccctccgagacaattacttgcatggggtaacccagtaatactgtgggatgcaacttctagggcatggctgcctccttcctagaggcagcagggggagaaaacactggaagaggtcaccccaacaattccatcgtaccttggcctaggagtgacctcctcagtctcacaaccctttggctagaactagtcatgtgacctcacaggaggtggagcagtgtcgtcaatgttatcatccccctgcacctgcaaggaaggaggcccagatgtgtgtaggtgctggatgtctcttccccaaaacatataactctggatttggaaaacaaaactggatataacagaaaagaaaaggaggggagaaggaaagttgaagaaattggtgaaatcagaataggacagtgaaaggcataaagattttcttctgaaacgctaagatcggttgatatttgtctaatacagctttaaatagagtatcactttgggccaaagaaaattgatataaacatacataaagtggaactaagattgacttcttcctagacatctctgcctctgtccacaaaatggaaacttccatcaaggagtactggaggacagttcagtatttcttcttatttgctcctccctatgaaaggaagagtgacttctctgctgcatgatattgggggtaaatagttattgcacatttgctcaaaccccagcaaagtgcaccccattttaagccaaatttacaaacttacaaagatgatccaccaatagttttctctatttactttattcttgctctgtcacccaggctagaatgcagtggtgtgattatagctcactgcagcctccaacttctggactcaagtgatcctcccaccttagcttcccaggtagctgggatacaggtgcacgccaccacacccaggctagtttttctaaatattggagttcccaaagagtattcaaactgatgtgatattttaaaagacattttgtaagcatcttttaggaatatcagtaagtggaagaaaaacacatagttatcagtggatattatgccagagaggcatgagaaatataattttattttgctaggtatcagcagagtgccctcttataatttgtgtgaaatggaaacaaaggtaacatcgtgttttcaattcacacatatatacaagtaatgagaggtccagaagaaatgtggcttcagctctgctgctactgtgcctcccttctcctgccccactcagcccacaaaataggctggacactcaaaaaacgttgcgtttatctaccttttagagagggtgaatagcagagaactggaggtgggaatggtaaggaactcccagcagggtagtggagggaatgggctgacgcatctaaggctgatgccaggtctgctccctatctgggtggcctcagcaaatgacgtccagcacatccaggggcaggctcaagggagaacagcccccaaagctaagatcctgccaagctaaatacagtagttctaatgaaatgtgagaggctataatcccatttgggaaattcctaaaaagtcatgaggcaggggattggtttatgttattatcatgacctgagagtcatggctcagagccaaatgttcaggattgaattcaacagcatttaaatgtctttagagcaggatggaaatatgttagcaatgcctgcagagtgccaagtaaacgcaaaagccaatgagatcataaaggaagttgttagctaacctaggtggagtcgccaacttccttctactctaataattaaaaataaaaataatacttgggaggtaactggaataaaggttctaaaatcaaaaccctctgaagggtgaaaactgggagcctcctgttcccatagtaaccacagcactcagggcactgtctcccagcgctggagtactgtcttatgaccagagatcctaagcaacctctgctcatctgagttgtccaccatattgtgggcatgagtccttgacaatagtaaatagcacctctgttcccttattgggtaaatgattttccaactctgggaatgtgtagaattcattatggaaataatgcaataattcaaatccataatattgatactttcatgttaagtttaggactaatcttgtgtatgctccttaagtgatttgaatctttaaaaagcttatgattccaatttgaaatgtgaaattgattttacgtttgtgatttgaagttgaaaggtataagaatatttaacttagctcatgaaaagtattagactagatttactataagtttaatgtattagatttacaagagatgcttaaatatatgagaatgttttgtcttaattggttataatcttgtcatatcaatgatttgaagtgctaaaatagaaaattaaatatgataaattacacaagaagtttagaatgtttaaaagattttaataaacaaagcctataactaag

SEQ ID NO: 144360 - DNA, 8742 bp, Homo sapiens
  Payload ID: 8522
  Gene Symbol: IYD
  Gene Name: iodotyrosine deiodinase
  Uniprot ID: Q6PHW0
  ENST ID: ENST00000344419
  CDS Start-End: 141-1010
gaagagttctgcactttgttccttccctggcacacctgtgtctgcattccttctatctcccggcattctccactcctgtctctgtgtgtttaaaaaccggtgtgggaagtgtgcacgcctgtgacgtcagactccagaccatgtatttcctgactcccatcttggtagccattctctgcattttggttgtgtggatctttaaaaatgccgacagaagcatggagaaaaagaagggggagcctagaaccagggccgaagctcgcccctgggtggatgaagacttaaaagacagcagtgacctgcaccaagcagaagaagatgctgatgaatggcaagaatcagaagaaaatgttgaacacatccccttctctcataaccactatcctgagaaggaaatggttaagaggtctcaggaattttatgaacttctcaataagagacggtcagtcaggttcataagtaatgagcaagtcccaatggaagtcattgataatgtcatcagaacggcaggaacagccccgagtggggctcacacagagccctggaccttcgtggttgtgaaggacccagacgtgaagcacaagattcgaaagatcattgaggaggaagaggagatcaactacatgaaaaggatgggacatcgctgggtcacagacctcaagaaactgagaaccaactggattaaagagtacttggatactgcccctattttgattctcattttcaaacaagtacatggtttcgccgcaaatggcaagaaaaaagtccactactacaatgagatcagtgtttccatcgcttgtggcatcctgctagctgccctgcagaatgcaggtctggtgactgtcactaccactcctctcaactgtggccctcgactgagggtgctcctgggccgccccgcacatgaaaagctgctgatgctgctccccgtggggtaccccagcaaggaggccacggtgcctgacctcaagcgcaaacctctggaccagatcatggtgacagtgtaggcagggccccccaagggagtggcagggagatggcgcccctgcttttccctgagcctctcgcctgctcctcttgggtctcttggctgctctttctccaggtgtcaggtcccctcattgctcttctcaggtggccacactatgtcaagaagcctctccacactctgtggcacttccagtcccataaatcctgtttcttatccactttggaaatgcatgaacactttacaaagaacatgcccgggtttttacattttaaaagttattctagacaatcactattggcttttttcttttatttttaaaaaactcacatagaggagacaatcagaaatttaccatagtcccaagaattcagctacatgatgactcgaatttaaatttagattaatcaaatggtctcctgttctctgatttctggtggcttttagacactaatttttgagaactacttttttttttttaccaaacttcagggacactctgctagttttgaataagtaaccatcaaagttactaaaacatggccaggcgcagtggctcatgcctgtaatcccagcactttgggaggccgaggtgggcagattgcctgagctcaagagttcgagaccagcctggccaacatggtgaaaccccatctctactaaaaatacaaaaaattagctgggcatgcacttgtaattccagctactcaggaggctgaggcaagagaactgcttgaatccgggaggtagagattgcagtgagtcaagatgctgagatgccaccactgcactccagcctgggcaacagagcgagaacctgtctcaaaaaaaacaaaaacaaagttactaaaatgtcaccttcacagaacaggacagggtacccttgggtcgcacgggcctggctggcatgtaaacggtcagttgcactgcctagtggtttggtagatctgacttgtaagcagttcatagaagctgctcaatactcaagaatcttgcaagacagttattaaacattcatagcttgaaattgcccatggtgggagagtttacatcacaaccactacaaatcagcacttgctttcttcttcttaaagagagctgcttaccatacatagcacccacagtgtctcccttctcttctaccccaacccctgaaacacactgacccctattctccagatgacagcacagctgtttgggactgatagggtcacagttgccaggttgggaatgctagatgtagtcttcacccatcaccttctgtcgtcctcccaggggtgtcatatttacagaggcaaactcttacagcttggatgatttctcatcaagcaactctactcacctctttttcccctttccctgtgcgtttcttcttcttgtcctcattttccttgagaaaactctctctataaaaaatttccatagagtatgtggctgataaacaacagaaatttgtttctcacagttctggaggctggaagtccaaggtcggggtgccctcatggtcaggtgctggtgaggaccctgatctgggttgcagactgctgacttcttattgtgtcctcgtggtagaaagagggttagagcctctggcatgccttttataagggtactaatcccatcatgaggccccgtccttatgacctcatcacctcccaaaggaccccctcctaataccatcacattgggggttagggtttcaacatatgaattgcgggggacacaaacattccgtccatggcacctacttcatagggtttggcatgctgctcggtacatggttaacattcataaatggtgggggcccttactgtggtagaaaccattgtcactgcaaggcagccctgcttgggattcaggtgaacaaatgtaacgtgggtgggtgagggactccctcctcttcagagaagccctcctgtggctcaggggcagctgcagggccagatggagttggcctgcagggagtcagccttaccccatcagagaccaacttgaaagatttttttctctgtgtagttcgtgttatcaatctgatctgcagccaggttatttacttctgaagcattggagttatcgattgccattgccccatggttctcactctttgcaggcactcttcaaatttttattttaaaaattataatgcaaacatctggccatcaccttaaccaagtgacaaagtcctagcacaccattaatggtaggataactgacattaagtgttcctgctgggatgaattatgaagtattccttccaaagatgtcaatggaaactaatcgagtcttacacctaattttcagtttacagtaaatacagaggataaagaagttaatggcatggtggaataaccaaaatgtgtatcattctacaaaaaaataggcctggactatttaaggagtgagtgtcactgtgggaagaataagagggggactgtcttgtccttgctactcaaagagtggtcctgggcctgtatcatcattgggaccacctgggcgcttgttagaatcaaagactctcaggcctcacctagacatccagaatcaaaatctgcattttaacaagatgcccaggtgatctgcatgcctgttaaagtctgagctctgttgcagataaccagagacccaacaaccaaaggcaaagcgtaagccttgattggattttggtttaggaaaaatctcataggtataaaagacaactgggaatgttgaatgtggatctggtggtaggtgatattgttagtgatgtgagtgatgcctgctgaagtactgagagatgaagcatcatattgacaacttactccaggaaaaaaggtgtgtgtataggtgtgtgtttggagagtgtgagcgagaactaacatggtaaaatgttaggtggagcatatacagttctcattatactcttattttaaatttatatttgaacacagtcaaatctgaatggaaatacatttaaataagcatttctttcagtcatataagtaatttgcctaaaaatgccctctaagtccatcattaggttaagcgatttactgaaggtgcagatatcatgcttatttcattgggttgttttggaatgtcccccacttggagagtttgaggaatggaaatgagaatcggaggagaaataaggccagaggctcacattgcttgcagggaaccgactgagtaatgaagaagaggaaggaagcccttggaaggaacgtaaaatccatttcagcctgccgccccttggaatggagggtcttctagggaccagaaacaccagacacttcttctgccccaagcacaccccacactaatttctgctgcagcatcacgatcagggcaaatcagcacagccccccagccatcagtggtgtctagaaaagtaaggataattttcttccttctcactgcagccccaagctcttattaaccttcttttatgtgttcattaaatgcagtcatgtgacaactgtgttcaaagttagaaatagtggtcggggaggcttatagatcctcttgctgttctgaggccttaaaaccaaaaaaataatggaatgattgcatcactgcgaggaagtatacttaattaagaaagttgaaaatggtttgtgtcttactaataggactcacctgaagactctactttgccaagagggaatttttaactcaaagttgtgtcagccagcacggggtagagccatggtcctcatacttgctggcatccctcatctggtggtctgttaaagcacagattgctgggccgcaccctcagggtgtgtgattgtgtgattcagtattgctgggtggtgcccaaatgctccagttctaatgtattcccaggtgttgctgatgctggtgattgggtaccacattttgagaaccatggggcattggcaatcaacaaatgcaatgcttgtgacttgacgtgataaaagttcatttattgggcaggcaaagtcctctgcaggcctggaaaccctccgagacaattacttgcatggggtaacccagtaatactgtgggatgcaacttctagggcatggctgcctccttcctagaggcagcagggggagaaaacactggaagaggtcaccccaacaattccatcgtaccttggcctaggagtgacctcctcagtctcacaaccctttggctagaactagtcatgtgacctcacaggaggtggagcagtgtcgtcaatgttatcatccccctgcacctgcaaggaaggaggcccagatgtgtgtaggtgctggatgtctcttccccaaaacatataactctggatttggaaaacaaaactggatataacagaaaagaaaaggaggggagaaggaaagttgaagaaattggtgaaatcagaataggacagtgaaaggcataaagattttcttctgaaacgctaagatcggttgatatttgtctaatacagctttaaatagagtatcactttgggccaaagaaaattgatataaacatacataaagtggaactaagattgacttcttcctagacatctctgcctctgtccacaaaatggaaacttccatcaaggagtactggaggacagttcagtatttcttcttatttgctcctccctatgaaaggaagagtgacttctctgctgcatgatattgggggtaaatagttattgcacatttgctcaaaccccagcaaagtgcaccccattttaagccaaatttacaaacttacaaagatgatccaccaatagttttctctatttactttattcttgctctgtcacccaggctagaatgcagtggtgtgattatagctcactgcagcctccaacttctggactcaagtgatcctcccaccttagcttcccaggtagctgggatacaggtgcacgccaccacacccaggctagtttttctaaatattggagttcccaaagagtattcaaactgatgtgatattttaaaagacattttgtaagcatcttttaggaatatcagtaagtggaagaaaaacacatagttatcagtggatattatgccagagaggcatgagaaatataattttattttgctaggtatcagcagagtgccctcttataatttgtgtgaaatggaaacaaaggtaacatcgtgttttcaattcacacatatatacaagtaatgagaggtccagaagaaatgtggcttcagctctgctgctactgtgcctcccttctcctgccccactcagcccacaaaataggctggacactcaaaaaacgttgcgtttatctaccttttagagagggtgaatagcagagaactggaggtgggaatggtaaggaactcccagcagggtagtggagggaatgggctgacgcatctaaggctgatgccaggtctgctccctatctgggtggcctcagcaaatgacgtccagcacatccaggggcaggctcaagggagaacagcccccaaagctaagatcctgccaagctaaatacagtagttctaatgaaatgtgagaggctataatcccatttgggaaattcctaaaaagtcatgaggcaggggattggtttatgttattatcatgacctgagagtcatggctcagagccaaatgttcaggattgaattcaacagcatttaaatgtctttagagcaggatggaaatatgttagcaatgcctgcagagtgccaagtaaacgcaaaagccaatgagatcataaaggaagttgttagctaacctaggtggagtcgccaacttccttctactctaataattaaaaataaaaataatacttgggaggtaactggaataaaggttctaaaatcaaaaccctctgaagggtgaaaactgggagcctcctgttcccatagtaaccacagcactcagggcactgtctcccagcgctggagtactgtcttatgaccagagatcctaagcaacctctgctcatctgagttgtccaccatattgtgggcatgagtccttgacaatagtaaatagcacctctgttcccttattgggtaaatgattttccaactctgggaatgtgtagaattcattatggaaataatgcaataattcaaatccataatattgatactttcatgttaagtttaggactaatcttgtgtatgctccttaagtgatttgaatctttaaaaagcttatgattccaatttgaaatgtgaaattgattttacgtttgtgatttgaagttgaaaggtataagaatatttaacttagctcatgaaaagtattagactagatttactataagtttaatgtattagatttacaagagatgcttaaatatatgagaatgttttgtcttaattggttataatcttgtcatatcaatgatttgaagtgctaaaatagaaaattaaatatgataaattacacaagaagtttagaatgtttaaaagattttaataaacaaagcctataactaagactgatgctttaagggagtttggcttattcaacttgagttaatcaaacattaattaaagccccccttccccaaagagatttgttttatttatttgtttactagttttataaataggataataaaatgtgtgtatgaggtcagaatgcttttgacagaagtaatacaaacaaaaaaacctcactataacccaaacaaataagggattatttttccctcctagtgagaagtctggaggtagatattagatgctggtctattgcttcaatgaagttagtgccaaagtctcagtggttctcttggtctttcttcataaccaccggatgctgttatagcttcaccaatcacaacaagcacagtgcttggaacataataggtgctcaataaatattcagtacatattgaatgtgtgcagaaatatatctcaatctagtcataaaattttagaatgcaagatctgaaagggacatgggaatctgtgtttttaacgtgttccaggtgattctgctgaccaggtgagtatggtaaatgtggcaagtattctcaagtgagctcatcagtcccagggctgttagcaccttccatctgccaggccctccctggtctagaccttcagccttgaccttgccctgaaacgccaaactcttactcccagctgctttctctgtccctccacttagatgttagtaggcaccacaaccttttaatgctcaaaatactacttttgagtcctttccaccccttacttggcccctcaattcatactttttgggatggagcctcaaatccagaaatcttctgtattagtccattctcacactgctaataaagaatacctgagactgagtaatttataaaggaaggaggtttaattgattcacagttcagcatggctggggaggcctcaggaaacttacaatcatggcagaaagaaaagcaaacatgcccttcttcacatggtgacaggaagcagaagaatgacaactgagtgaatggggaaaccccttataaagccatcagatctcatgagaactcactcattctcatgagaataacatgggggaaactgcccccattattcaattatcccccatcagttctctcccatgacatgtggggattatgggaactacaatgcaagatgagatttgggtgaagacatagccaaaccatatcatcatcttaaatttctgtgattcttttattctgcacatccaaatccatgagcaagttatactgactttatctctgaatattgaccatgggaggggaacaaggagaagcagtgtgaacaggaaaagcatgctgcctgctgctgtgaataataacatatcttgctctga

SEQ ID NO: 144361 - DNA, 994 bp, Homo sapiens
  Payload ID: 8522
  Gene Symbol: IYD
  Gene Name: iodotyrosine deiodinase
  Uniprot ID: Q6PHW0
  ENST ID: ENST00000367335
  CDS Start-End: 80-823
ggcattctccactcctgtctctgtgtgtttaaaaaccggtgtgggaagtgtgcacgcctgtgacgtcagactccagaccatgtatttcctgactcccatcttggtagccattctctgcattttggttgtgtggatctttaaaaatgccgacagaagcatggagaaaaagaagggggagcctagaaccagggccgaagctcgcccctgggtggatgaagacttaaaagacagcagtgacctgcaccaagcagaagaagatgctgatgaatggcaagaatcagaagaaaatgttgaacacatccccttctctcataaccactatcctgagaaggaaatggttaagaggtctcaggaattttatgaacttctcaataagagacggtcagtcaggttcataagtaatgagcaagtcccaatggaagtcattgataatgtcatcagaacggcaggaacagccccgagtggggctcacacagagccctggaccttcgtggttgtgaaggacccagacgtgaagcacaagattcgaaagatcattgaggaggaagaggagatcaactacatgaaaaggatgggacatcgctgggtcacagacctcaagaaactgagaaccaactggattaaagagtacttggatactgcccctattttgattctcattttcaaacaagtacatggtttcgccgcaaatggcaagaaaaaagtccactactacaatgagatcagtgtttccatcgcttgtggcatcctgctagctgccctgcaggtttttggaaaaattatcctgaaggagctggcattgatttccttcctgaatctgtaagcaggtaaataatggaatcaccatgcggcatcagactgcgaggcaccgccacctgattgagggtcctggaagaagcagcgaagcctgcagcaagctcagctcacaaggctgcccagaatgcaggtctggtgactgtcactaccactcctctcaactgtggccctcgactga

SEQ ID NO: 144362 - DNA, 1180 bp, Homo sapiens
  Payload ID: 8522
  Gene Symbol: IYD
  Gene Name: iodotyrosine deiodinase
  ENST ID: ENST00000392255
  CDS Start-End: 36-848
gaagtgtgcacgcctgtgacgtcagactccagaccatgtatttcctgactcccatcttggtagccattctctgcattttggttgtgtggatctttaaaaatgccgacagaagcatggagaaaaagaagggggagcctagaaccagggccgaagctcgcccctgggtggatgaagacttaaaagacagcagtgacctgcaccaagcagaagaagatgctgatgaatggcaagaatcagaagaaaatgttgaacacatccccttctctcataaccactatcctgagaaggaaatggttaagaggtctcaggaattttatgaacttctcaataagagacggtcagtcaggttcataagtaatgagcaagtcccaatggaagtcattgataatgtcatcagaacggcaggaacagccccgagtggggctcacacagagccctggaccttcgtggttgtgaaggacccagacgtgaagcacaagattcgaaagatcattgaggaggaagaggagatcaactacatgaaaaggatgggacatcgctgggtcacagacctcaagaaactgagaaccaactggattaaagagtacttggatactgcccctattttgattctcattttcaaacaagtacatggtttcgccgcaaatggcaagaaaaaagtccactactacaatgagatcagtgtttccatcgcttgtggcatcctgctagctgccctgcaggtaaataatggaatcaccatgcggcatcagactgcgaggcaccgccacctgattgagggtcctggaagaagcagcgaagcctgcagcaagctcagctcacaaggctgcccaggtttctactgctagagacatacaaaattcagtatggagtaaaagctatgtcttgaaaaggaccaagatataaaatgacactaaattaaggtgtaaatattttctcaaaaaagtttaagacttggccaggtgcggtggctcacgcctctaatcccagcactttgggaggccaaggcgggcggatcacgaggtcaggagatcgagaccatcctggctaacatggtgaaacccggcctttactaaaaatacaaaaaatgagccaggcgtggtggcgggcgcctgtagtcccagctactcgggaggctgaggcaggagaatggcgtgaacctgggaggcggagcttgcag

SEQ ID NO: 144363 - DNA, 882 bp, Homo sapiens
  Payload ID: 8522
  Gene Symbol: IYD
  Gene Name: iodotyrosine deiodinase
  Uniprot ID: Q6PHW0
  ENST ID: ENST00000392256
  CDS Start-End: 80-823
ggcattctccactcctgtctctgtgtgtttaaaaaccggtgtgggaagtgtgcacgcctgtgacgtcagactccagaccatgtatttcctgactcccatcttggtagccattctctgcattttggttgtgtggatctttaaaaatgccgacagaagcatggagaaaaagaagggggagcctagaaccagggccgaagctcgcccctgggtggatgaagacttaaaagacagcagtgacctgcaccaagcagaagaagatgctgatgaatggcaagaatcagaagaaaatgttgaacacatccccttctctcataaccactatcctgagaaggaaatggttaagaggtctcaggaattttatgaacttctcaataagagacggtcagtcaggttcataagtaatgagcaagtcccaatggaagtcattgataatgtcatcagaacggcaggaacagccccgagtggggctcacacagagccctggaccttcgtggttgtgaaggacccagacgtgaagcacaagattcgaaagatcattgaggaggaagaggagatcaactacatgaaaaggatgggacatcgctgggtcacagacctcaagaaactgagaaccaactggattaaagagtacttggatactgcccctattttgattctcattttcaaacaagtacatggtttcgccgcaaatggcaagaaaaaagtccactactacaatgagatcagtgtttccatcgcttgtggcatcctgctagctgccctgcaggtttttggaaaaattatcctgaaggagctggcattgatttccttcctgaatctgtaagcagaatgcaggtctggtgactgtcactaccactcctctcaactgtggccctcgactga

SEQ ID NO: 144364 - DNA, 684 bp, Homo sapiens
  Payload ID: 8522
  Gene Symbol: IYD
  Gene Name: iodotyrosine deiodinase
  ENST ID: ENST00000425615
  CDS Start-End: 24-602
ggccaccttgagaagaagaggtgatgaaggaggcagatgctgatgaatggcaagaatcagaagaaaatgttgaacacatccccttctctcataaccactatcctgagaaggaaatggttaagaggtctcaggaattttatgaacttctcaataagagacggtcagtcaggttcataagtaatgagcaagtcccaatggaagtcattgataatgtcatcagaacggcaggaacagccccgagtggggctcacacagagccctggaccttcgtggttgtgaaggacccagacgtgaagcacaagattcgaaagatcattgaggaggaagaggagatcaactacatgaaaaggatgggacatcgctgggtcacagacctcaagaaactgagaaccaactggattaaagagtacttggatactgcccctattttgattctcattttcaaacaagtacatggtttcgccgcaaatggcaagaaaaaagtccactactacaatgagatcagtgtttccatcgcttgtggcatcctgctagctgccctgcaggtttttggaaaaattatcctgaaggagctggcattgatttccttcctgaatctgtaagcaggtaaataatggaatcaccatgcggcatcagactgcgaggcaccgccacctgattgagggtcctggaagaagcagcgaa

SEQ ID NO: 144365 - DNA, 551 bp, Homo sapiens
  Payload ID: 8522
  Gene Symbol: IYD
  Gene Name: iodotyrosine deiodinase
  ENST ID: ENST00000422583
  CDS Start-End: 1-270
ccctgggtggatgaagacttaaaagacagcagtgacctgcaccaagcagaagaagatgctgatgaatggcaagaatcagaagaaaatgttgaacacatccccttctctcataaccactatcctgagaaggaaatggttaagaggtctcaggaattttatgaacttctcaataagagacggaacagccccgagtggggctcacacagagccctggaccttcgtggttgtgaaggacccagacgtgaagcacaagattcgaaagatcattgaggaggaagaggagatcaactacatgaaaaggatgggacatcgctgggtcacagacctcaagaaactgagaaccaactggattaaagagtacttggatactgcccctattttgattctcattttcaaacaagtacatggtttcgccgcaaatggcaagaaaaaagtccactactacaatgagatcagtgtttccatcgcttgtggcatcctgctagctgccctgcagaatgcaggtctggtgactgtcactaccactcctctcaactgtggccctcgactga

SEQ ID NO: 144366 - DNA, 2158 bp, Homo sapiens
  Payload ID: 8522
  Gene Symbol: IYD
  Gene Name: iodotyrosine deiodinase
  ENST ID: ENST00000500320
  CDS Start-End: 36-890
gaagtgtgcacgcctgtgacgtcagactccagaccatgtatttcctgactcccatcttggtagccattctctgcattttggttgtgtggatctttaaaaatgccgacagaagcatggagaaaaagaagggggagcctagaaccagggccgaagctcgcccctgggtggatgaagacttaaaagacagcagtgacctgcaccaagcagaagaagatgctgatgaatggcaagaatcagaagaaaatgttgaacacatccccttctctcataaccactatcctgagaaggaaatggttaagaggtctcaggaattttatgaacttctcaataagagacggtcagtcaggttcataagtaatgagcaagtcccaatggaagtcattgataatgtcatcagaacggcaggaacagccccgagtggggctcacacagagccctggaccttcgtggttgtgaaggacccagacgtgaagcacaagattcgaaagatcattgaggaggaagaggagatcaactacatgaaaaggatgggacatcgctgggtcacagacctcaagaaactgagaaccaactggattaaagagtacttggatactgcccctattttgattctcattttcaaacaagtacatggtttcgccgcaaatggcaagaaaaaagtccactactacaatgagatcagtgtttccatcgcttgtggcatcctgctagctgccctgcaggtaaataatggaatcaccatgcggcatcagactgcgaggcaccgccacctgattgagggtcctggaagaagcagcgaagcctgcagcaagctcagctcacaaggctgcccaggtgcctctgcagcaggcagtctttttcactttgccattgagtttgctgccccctagctttcataaggcataatcccgagagtaggttatgattagtgatggaggaaagaaaaatctccatgaagcccgcatctccagtatggtgactgggtctgataagcgcgccatgcatgtcttgtagaggcagcttccagaacttcctggtcaggtttagaggtggtgatctgattggaaaagctggagaggggcaggcggggaagtgtctggaagctactcattgcttttacttagatgtttgttatttggaggcttggaaagaggtcgatggggtaccccttggccactgagtcccctatcaacgggcatcagcatctcactgggtggggatgctctgcttccatggttggctctgtagtcataggaacttgccgtggtggttgttgtttagaatataatatacaagcctttattaatatattaaataccaagagctagtcgtagctctataattttaaagtagtgatgaatgtaatgatattttaaaatatctataacaactgtaaaatgatatgaaaataactgtggatttcattggtgataaagtcatagatattgctaacactactgtggtttgctgcctacatttataaaggaagaaactgctaaatttcagttagatgttagtgaatatgaaaactttttttttcaaattcaagttcatggacctgctaaattcaatccttggccctttgggggtctgaggattccagttaaaaaaatcctgacctataataagaccaaagtactcacatcgagagagtgaaagataaaataataatagaagtcaacttaacattaataatattaataagaggaattgtttaatatggtctgtgtatttgcaggtttctactgctagagacatacaaaattcagtatggagtaaaagctatgtcttgaaaaggaccaagatataaaatgacactaaattaaggtgtaaatattttctcaaaaaagtttaagacttggccaggtgcggtggctcacgcctctaatcccagcactttgggaggccaaggcgggcggatcacgaggtcaggagatcgagaccatcctggctaacatggtgaaacccggcctttactaaaaatacaaaaaatgagccaggcgtggtggcgggcgcctgtagtcccagctactcgggaggctgaggcaggagaatggcgtgaacctgggaggcggagcttgcagtgagcggagatcccgccactgcactccagcctgggcgacagagcgagactccgtctcaaaaaaaaaaaaaaaaa

SEQ ID NO: 144367 - DNA, 5279 bp, Homo sapiens
  Payload ID: 8523
  Gene Symbol: IQSEC1
  Gene Name: IQ motif and Sec7 domain 1
  Uniprot ID: Q6DN90
  ENST ID: ENST00000273221
  CDS Start-End: 218-3109
gcgggcttggctggcctggggctcggacttggggccggagccgcgggagccggcggacgctggaccaggagccccgacgtgatcgcgtggcgggtggtcgggtctccgggtggccgggtgtcggccccgggatccggcggctcgctggcgggagtcggcggcctctgctgggcctgggtcccggctcccggcccggcccgctcccactgcggccgccatgtggtgcctgcactgcaactcggagaggacccagtcccttctggagctagagcttgacagcggcgtcgagggcgaggcccccagcagtgagactggcacatccctggacagcccctcagcctacccccagggccccttggtgcccggttccagcctgagcccggatcactacgagcacacgtcagtgggagcctatgggctgtactcggggccgccggggcaacagcagcgcacgcggaggcccaagctgcagcactcgacctccatcctgcgcaagcaggctgaggaggaggccatcaagcgctcacgctcactctccgagagctatgagctctcctcggacctgcaggacaagcaggtggagatgctagaacgaaagtatggggggcgcctggtaacccgccatgcggcccgcaccatccagacggcgtttcgccagtaccagatgaacaagaacttcgagcgcttgcgcagctccatgtcagagaaccgcatgtcacgccggattgtgctgtccaacatgaggatgcagttctcctttgaggggcctgagaaagtgcacagctcctacttcgaggggaagcaggtctcagtgactaacgacggctcccagctgggagccctggtgtcccctgagtgtggtgacctcagcgagcccaccaccctcaagtctccggccccctccagtgactttgcggacgccatcaccgagctggaggacgccttctctaggcaagtgaaatcactggccgagtccatcgacgatgccctcaactgccgcagcctgcacactgaggaggcaccggccctggatgcggcgcgggcccgggacaccgaaccccagacagccctgcacggcatggaccaccgcaaactggacgagatgacggcctcgtacagtgatgtcaccctgtacatcgatgaggaggagctgtcgccccctctgcccctctcgcaggcaggggaccggccgtccagcaccgagtcggacctgcggctacgggctgggggcgcagccccagactactgggccctggcccacaaagaggacaaggctgacacggacacgagctgccggagcacgccgtcgctggagcggcaggagcagcggctgcgggtggagcatctgccgctgctcaccatcgagccacccagcgacagctctgtggaccttagtgaccgctcggagcgggggtcactcaagaggcagagtgcttacgagcgcagccttggcgggcagcagggcagtcccaagcatggtccccacagcggcgcccccaagagcctcccccgggaggagcctgagttgcggccccggccccccaggcccctggacagccacttggccatcaatggctcagccaaccggcagagcaagtctgagtcggactactcagacggtgacaatgacagcatcaacagcacgtccaactccaacgataccatcaactgcagctccgagtcatcgtcccgtgacagcctgcgggagcagacgctcagcaagcagacctaccacaaggaggcccgcaacagctgggactcgcctgcctttagcaacgatgtcatccgcaagaggcactaccgcatcggcctgaacctcttcaacaagaagcctgagaagggagtccagtacctcatcgagcgtggctttgtgcccgacacgcccgtcggggtggcccacttcctgctgcagcgcaagggcctcagccggcagatgatcggcgagttcctgggcaaccggcagaagcagttcaaccgtgacgtgctcgactgcgtcgtggacgagatggacttctctaccatggagctggatgaggccctcaggaaattccaggcgcacatccgtgtccaaggggaggctcagaaagtggagcggctcatagaggcgttcagccagcgctactgcatctgcaaccctggggtggtgcggcaattccggaacccagacaccattttcatcctggccttcgccatcatcctgctgaacaccgacatgtacagccccaatgtcaagcccgagcggaaaatgaagctagaggacttcatcaagaacctccgaggtgtggacgatggtgaggacattccccgtgagatgctgatggggatctatgaacggatccgtaagcgagagctaaagaccaatgaggaccatgtgtcccaggtgcagaaggtggagaagctcattgtggggaaaaagccgatcggatccctgcatcccgggctcggctgtgtgctctctctgccccaccgtcggttggtctgctactgccggctctttgaggttccagacccaaacaagccccagaaactcggactacaccagcgagaaatcttcctgttcaacgacctcctggtggtcaccaagatcttccagaagaagaagaactcggtgacgtacagcttccgacagtccttctccttgtacggcatgcaggtcctgctcttcgagaaccagtactaccccaatggcatccggctcacctcgtctgtccccggagcagatatcaaagtgttaataaacttcaacgcccccaaccctcaagaccggaagaaattcaccgatgacctgcgggagtccattgcggaagtccaagagatggagaagcacaggatagagtcggagctcgagaagcagaaaggcgtcgtgcggcccagcatgtcccagtgctctagcctcaaaaaggagtcgggcaacggaacactgagccgggcctgcctggacgacagctatgccagcggtgagggcctcaagcgcagcgccctcagcagctccctgcgggacctctcggaagccgggaagcgagggcgtcgcagcagtgcgggatcgctagagagcaatgtggaatttcagcctttcgagccactgcagccgtcagtgctgtgctcctaagccatgggacccgaggactgccccccggcgcctgcccaggcggaggccctttcagaaagggcgaagctcacgcctgactctgcgggccgcggggccgcgttcccagtggacagcgtggtgagccgtggccggacggcaggaggagaggggagccccctctggctgtgtgtcaccttggctggctggctggccagggttttgccgatttccctcctcacatccctcccaccctcggtcatatcattgagatcaccgtaccagcaaatctgcaaaccaagcactttgttaatctccagagagagcaaatacagcaatctagagtttagcctttttaaaaatgtgactttaacccgcccacctgtgtcctcccattggcgtggcatttctttggtgtctgctcagaaagaaacagcatgggaccgtgtgattgggtccaggctgggctgtcagggaagcgccctggtgtctccgactcatcaattctcgggtcttttttaaaagccaggctccccaaagcactctgtctcgcaattttgaggaggctgttccgacctggaagcgttaaactgctgcatgtcatctggcgtcagctgtgaggctgcgctctgcgtgttgtgcgtttgcaaaatgtattggcgtgactgtaaacacatcgttgaagtaaagcgattacatattgagtatgtcagcttttctcaccctcttctgtgctgggaggagagtctaactgtaacctttaggttgttccagaaaagattcaggccgtttggcacagaattgctctttctgaagggtagcagtaatgaataggaacagacagaaaaccccaggaggggctttcaggaaactctccctctccatcgccatcctgcaagctccacagcctcgggctgccagcctgtggcactgtcctcggtgtgtcctggagctgtgctgggcagcagggcctcgcgtaaggaactgctggaacccactgagcccttcccggggtttcccgccgcactcagtgtgttccttcaggctagtgaggtttcattctgttttatttgcaagcttatcaaaagtttgtggaagatacattgttgggttccagaggctggagtcatgctgcccacatcttgtttgggaaagcaaaagctcccagtgagctggtgtccccgtgtgtctttcatgggactgtcccctttagagatcccacctgtcagagccacagcttcggggtcctgtcatcacatcccctgggaggggaggcaggaggaggccgagggccccaggatgtctgcctggtcccttctcactgtgaggacgcccttggcacacctttctcaagtcacacaaattactgcagttacatacagaattgctgacaggagcaggagacgctgagggaaacagctggcaatgtgacaaaagtcttttctgggacaacaatcaaatcatgtatttgtatttttttaagtttaccaatgaattgtacaacaatgtaaaaataaagttcatcctaatatgctgtgcacatcttgcttaaaaatgtcttcagcacccagtgcagtgatctttccctcacacactgcatgcagcaggagcctcttgtttttcttaatgagctgaaaagacagcagatgttcacagctgatgctgggtgttgactcagcgccacgggaagctctgtgcccgcaggtaagcacgcacagtcttacagttctccttgtaaaatatcatcacccttcctgcctgagaaacgagtacatttgtattttatgtaacaacaatagtcaaggcagcattgcaacactgagcagggtgaggtgggggtgctgagcacaggacaagagggaggaggcctgccctccattcagatgcatctgcatcgcccttctgtgtgcagtcacatcgagactgcacacagcatgcatctcctcttggaaaatatcttttgcctccgagttgttttaagcaattagaatcaggtcctgaatccccagactgttcagagacttcaagggacacctccctcacaagaagcctggcacccccactgtgtacctttgagaggaaaggagtgcgtttgttttcatctgcattctgtttgtcagtggcaacagactctatcaatgtaaaaccatggttgtgatcatgtggggaaatcaaataaatcctttgaaactct

SEQ ID NO: 144368 - DNA, 3744 bp, Homo sapiens
  Payload ID: 8523
  Gene Symbol: IQSEC1
  Gene Name: IQ motif and Sec7 domain 1
  ENST ID: ENST00000618604
  CDS Start-End: 368-2812
cctgagaagccagccaggctgcggctgtttgtggcaggaggcccccacccacagcactggaccaagcgtcgagggcgaggcccccagcagtgagactggcacatccctggacagcccctcagcctacccccagggccccttggtgcccggttccagcctgagcccggatcactacgagcacacgtcagtgggagcctatgggctgtactcggggccgccggggcaacagcagcgcacgcggaggcccaagctgcagcactcgacctccatcctgcgcaagcaggctgaggaggaggccatcaagcgctcacgctcactctccgagagctatgagctctcctcggacctgcaggacaagcaggtggagatgctagaacgaaagtatggggggcgcctggtaacccgccatgcggcccgcaccatccagacggcgtttcgccagtaccagatgaacaagaacttcgagcgcttgcgcagctccatgtcagagaaccgcatgtcacgccggattgtgctgtccaacatgaggatgcagttctcctttgaggggcctgagaaagtgcacagctcctacttcgaggggaagcaggtctcagtgactaacgacggctcccagctgggagccctggtgtcccctgagtgtggtgacctcagcgagcccaccaccctcaagtctccggccccctccagtgactttgcggacgccatcaccgagctggaggacgccttctctaggcaagtgaaatcactggccgagtccatcgacgatgccctcaactgccgcagcctgcacactgaggaggcaccggccctggatgcggcgcgggcccgggacaccgaaccccagacagccctgcacggcatggaccaccgcaaactggacgagatgacggcctcgtacagtgatgtcaccctgtacatcgatgaggaggagctgtcgccccctctgcccctctcgcaggcaggggaccggccgtccagcaccgagtcggacctgcggctacgggctgggggcgcagccccagactactgggccctggcccacaaagaggacaaggctgacacggacacgagctgccggagcacgccgtcgctggagcggcaggagcagcggctgcgggtggagcatctgccgctgctcaccatcgagccacccagcgacagctctgtggaccttagtgaccgctcggagcgggggtcactcaagaggcagagtgcttacgagcgcagccttggcgggcagcagggcagtcccaagcatggtccccacagcggcgcccccaagagcctcccccgggaggagcctgagttgcggccccggccccccaggcccctggacagccacttggccatcaatggctcagccaaccggcagagcaagtctgagtcggactactcagacggtgacaatgacagcatcaacagcacgtccaactccaacgataccatcaactgcagctccgagtcatcgtcccgtgacagcctgcgggagcagacgctcagcaagcagacctaccacaaggaggcccgcaacagctgggactcgcctgcctttagcaacgatgtcatccgcaagaggcactaccgcatcggcctgaacctcttcaacaagaagcctgagaagggagtccagtacctcatcgagcgtggctttgtgcccgacacgcccgtcggggtggcccacttcctgctgcagcgcaagggcctcagccggcagatgatcggcgagttcctgggcaaccggcagaagcagttcaaccgtgacgtgctcgactgcgtcgtggacgagatggacttctctaccatggagctggatgaggccctcaggaaattccaggcgcacatccgtgtccaaggggaggctcagaaagtggagcggctcatagaggcgttcagccagcgctactgcatctgcaaccctggggtggtgcggcaattccggaacccagacaccattttcatcctggccttcgccatcatcctgctgaacaccgacatgtacagccccaatgtcaagcccgagcggaaaatgaagctagaggacttcatcaagaacctccgaggtgtggacgatggtgaggacattccccgtgagatgctgatggggatctatgaacggatccgtaagcgagagctaaagaccaatgaggaccatgtgtcccaggtgcagaaggtggagaagctcattgtggggaaaaagccgatcggatccctgcatcccgggctcggctgtgtgctctctctgccccaccgtcggttggtctgctactgccggctctttgaggttccagacccaaacaagccccagaaactcggactacaccagcgagaaatcttcctgttcaacgacctcctggtggtcaccaagatcttccagaagaagaagaactcggtgacgtacagcttccgacagtccttctccttgtacggcatgcaggtcctgctcttcgagaaccagtactaccccaatggcatccggctcacctcgtctgtccccggagcagatatcaaagtgttaataaacttcaacgcccccaaccctcaagaccggaagaaattcaccgatgacctgcgggagtccattgcggaagtccaagagatggagaagcacaggatagagtcggagctcgagaagcagaaaggcgtcgtgcggcccagcatgtcccagtgctctagcctcaaaaaggagtcgggcaacggaacactgagccgggcctgcctggacgacagctatgccagcggtgagggcctcaagcgcagcgccctcagcagctccctgcgggacctctcggaagccggggtccatcattagcagtcctcacatgcgccggagagctacatcaacacgagagtgtccatctcgcccacaccagactatgcccaactcatcttccctcctgggctccttattcgggagcaagagagggaagccccctccccaggcccacctgccctcagccccagccctgccacccccccacccaccggtggtcctgcctcacttgcagcactctgtggctggccaccacctggggcccccagaggggctgccgcaggccgccatgcacgggcatcacacccagtactgccacatgcagaaccctcccccgtaccaccatcaccaccaccaccacccaccccagcacatccagcacgcacaccagtaccaccacggcccccatgggggccacccagcctacggggcccatgcccacggccacccgccgctgccctcggcccacgtggggcacacagtgcaccaccatgggcagccccctgccccgccgccccccaccagcagcaaggccaaacccagcggcatcagcacaattgtgtagacagcctgggtaggggtcccaggctccctgaaacacctgcacaccacacagggcacgcccgggggtcgccagccgcacaccaaacccggggcacttctgttgccatctctcccctctgcccctcacggcccaaccggagccccaggagcccacagggctggtgttgtgtggaacaaaggcccagatttcatttcttgttggcaccctgggctctgctcacctcagtctgagggatgggtgggcctcagacaccatcagccttgaaacggtgagccagccaagtagtgttgaactgcctcccccactccagctctcagctccctgtgccctaatgtacatgcatatgaaaacccaacctagaaaacgaagaaatgagatacaaaaacagacaaaacaaaccccaaaa

SEQ ID NO: 144369 - DNA, 3582 bp, Homo sapiens
  Payload ID: 8523
  Gene Symbol: IQSEC1
  Gene Name: IQ motif and Sec7 domain 1
  ENST ID: ENST00000613206
  CDS Start-End: 104-3448
attcccctccacttcttgcctgagccgcctgctcctcttggaaacacgttgagcctccccgctggagagggagccagaacagggaagaacggattcacacaggatggcttgcagaagacgctatttcgtcgagggcgaggcccccagcagtgagactggcacatccctggacagcccctcagcctacccccagggccccttggtgcccggttccagcctgagcccggatcactacgagcacacgtcagtgggagcctatgggctgtactcggggccgccggggcaacagcagcgcacgcggaggcccaagctgcagcactcgacctccatcctgcgcaagcaggctgaggaggaggccatcaagcgctcacgctcactctccgagagctatgagctctcctcggacctgcaggacaagcaggtggagatgctagaacgaaagtatggggggcgcctggtaacccgccatgcggcccgcaccatccagacggcgtttcgccagtaccagatgaacaagaacttcgagcgcttgcgcagctccatgtcagagaaccgcatgtcacgccggattgtgctgtccaacatgaggatgcagttctcctttgaggggcctgagaaagtgcacagctcctacttcgaggggaagcaggtctcagtgactaacgacggctcccagctgggagccctggtgtcccctgagtgtggtgacctcagcgagcccaccaccctcaagtctccggccccctccagtgactttgcggacgccatcaccgagctggaggacgccttctctaggcaagtgaaatcactggccgagtccatcgacgatgccctcaactgccgcagcctgcacactgaggaggcaccggccctggatgcggcgcgggcccgggacaccgaaccccagacagccctgcacggcatggaccaccgcaaactggacgagatgacggcctcgtacagtgatgtcaccctgtacatcgatgaggaggagctgtcgccccctctgcccctctcgcaggcaggggaccggccgtccagcaccgagtcggacctgcggctacgggctgggggcgcagccccagactactgggccctggcccacaaagaggacaaggctgacacggacacgagctgccggagcacgccgtcgctggagcggcaggagcagcggctgcgggtggagcatctgccgctgctcaccatcgagccacccagcgacagctctgtggaccttagtgaccgctcggagcgggggtcactcaagaggcagagtgcttacgagcgcagccttggcgggcagcagggcagtcccaagcatggtccccacagcggcgcccccaagagcctcccccgggaggagcctgagttgcggccccggccccccaggcccctggacagccacttggccatcaatggctcagccaaccggcagagcaagtctgagtcggactactcagacggtgacaatgacagcatcaacagcacgtccaactccaacgataccatcaactgcagctccgagtcatcgtcccgtgacagcctgcgggagcagacgctcagcaagcagacctaccacaaggaggcccgcaacagctgggactcgcctgcctttagcaacgatgtcatccgcaagaggcactaccgcatcggcctgaacctcttcaacaagaagcctgagaagggagtccagtacctcatcgagcgtggctttgtgcccgacacgcccgtcggggtggcccacttcctgctgcagcgcaagggcctcagccggcagatgatcggcgagttcctgggcaaccggcagaagcagttcaaccgtgacgtgctcgactgcgtcgtggacgagatggacttctctaccatggagctggatgaggccctcaggaaattccaggcgcacatccgtgtccaaggggaggctcagaaagtggagcggctcatagaggcgttcagccagcgctactgcatctgcaaccctggggtggtgcggcaattccggaacccagacaccattttcatcctggccttcgccatcatcctgctgaacaccgacatgtacagccccaatgtcaagcccgagcggaaaatgaagctagaggacttcatcaagaacctccgaggtgtggacgatggtgaggacattccccgtgagatgctgatggggatctatgaacggatccgtaagcgagagctaaagaccaatgaggaccatgtgtcccaggtgcagaaggtggagaagctcattgtggggaaaaagccgatcggatccctgcatcccgggctcggctgtgtgctctctctgccccaccgtcggttggtctgctactgccggctctttgaggttccagacccaaacaagccccagaaactcggactacaccagcgagaaatcttcctgttcaacgacctcctggtggtcaccaagatcttccagaagaagaagaactcggtgacgtacagcttccgacagtccttctccttgtacggcatgcaggtcctgctcttcgagaaccagtactaccccaatggcatccggctcacctcgtctgtccccggagcagatatcaaagtgttaataaacttcaacgcccccaaccctcaagaccggaagaaattcaccgatgacctgcgggagtccattgcggaagtccaagagatggagaagcacaggatagagtcggagctcgagaagcagaaaggcgtcgtgcggcccagcatgtcccagtgctctagcctcaaaaaggagtcgggcaacggaacactgagccgggcctgcctggacgacagctatgccagcggtgagggcctcaagcgcagcgccctcagcagctccctgcgggacctctcggaagccgggaagcgagggcgtcgcagcagtgcgggatcgctagagagcaatgtggaagggtccatcattagcagtcctcacatgcgccggagagctacatcaacacgagagtgtccatctcgcccacaccagactatgcccaactcatcttccctcctgggctccttattcgggagcaagagagggaagccccctccccaggcccacctgccctcagccccagccctgccacccccccacccaccggtggtcctgcctcacttgcagcactctgtggctggccaccacctggggcccccagaggggctgccgcaggccgccatgcacgggcatcacacccagtactgccacatgcagaaccctcccccgtaccaccatcaccaccaccaccacccaccccagcacatccagcacgcacaccagtaccaccacggcccccatgggggccacccagcctacggggcccatgcccacggccacccgccgctgccctcggcccacgtggggcacacagtgcaccaccatgggcagccccctgccccgccgccccccaccagcagcaaggccaaacccagcggcatcagcacaattgtgtagacagcctgggtaggggtcccaggctccctgaaacacctgcacaccacacagggcacgcccgggggtcgccagccgcacaccaaacccggggcacttctgttgccatctctcccctctgcccctcacggcccaac

SEQ ID NO: 144370 - DNA, 4004 bp, Homo sapiens
  Payload ID: 8524
  Gene Symbol: IQSEC2
  Gene Name: IQ motif and Sec7 domain 2
  Uniprot ID: Q5JU85
  ENST ID: ENST00000375365
  CDS Start-End: 94-2943
tccttctagggaagggctggggaggagggggtggtgacacggtggagacaccggctaggccagggggcctgcccttgggacaggtccagacccatggagccccccgggaggagcagcaggtccacagcgtctcatactctacaccagtattgctgtcctactcaggtccttgactccatgaagcttaccccctcaggcaggctggcagagagcagtgtggagggtgatgccccaggcagtgacctgagcacagcggttgatagtcctgggagccaacccccctaccggctgagccagctgcccccctccagcagccacatggggggcccccctgctggagtgggccttccctgggctcagcgggcacgcctccagccagccagtgtcgccctgaggaagcaggaggaggaggagataaagcgctccaaggccctatcggacagctatgaactctccacagacctgcaggacaagaaggtggaaatgctggagaggaagtatgggggctccttcctgagccgcagggctgccaggaccatccagacagccttccgccagtaccgcatgaacaagaactttgagcggctacgcagctcagcctcagagagccgcatgtcccgccgcatcatcctttccaacatgcggatgcagttctcctttgaggagtatgagaaggcacagaaccccgcgtacttcgagggcaagcctgcctcgctggacgagggtgccatggctggtgcccggagccaccggcttgaacgggggctcccatatggaggctcctgtggtgggggcatcgatggtggtggaagctccgtcaccacatctggagagttttctaatgacatcacagaacttgaggactccttctccaaacaggtaaagtctctggctgaatccatcgacgaagccctgaactgccacccgtcagggcccatgtctgaggagccagggtcagcccagctggagaagcgggagtcaaaggaacagcaagaggacagctcagccacatccttcagtgatcttcccctctacctggatgacacagttccccaacaatcccctgagcgactgcccagcacagaacccccaccccagggccggcccgagttctgggcgccagcccctctcccgccagttcctccaccagtgccatcaggaacccgggaagacggtagccgtgaggaaggcactcgcaggggtcccgggtgcttggagtgccgggatttccggctgcgggctgcccaccttcccctgcttaccattgagcctcctagtgacagctccgtggacctgagtgaccgctcagatcgcggctctgtccaccgccagctggtgtatgaggctgatggctgcagcccccatgggaccctgaagcacaaggggccaccaggcagggccccgatcccacaccgccactacccagcccctgaaggcccagccccagccccaccagggcccctgccaccagcccccaacagtggcactgggcccagtggtgtggctgggggtcggaggttggggaagtgcgaggcagcaggcgagaactctgatggtggagataacgagagccttgagagctccagcaattccaatgagaccatcaactgcagctccggctcctcttctcgggacagtctaagggagcctccggctaccggcctgtgcaagcagacttaccagcgggagacaaggcatagctgggactcgccagctttcaacaatgatgtggtccagaggcggcactaccgaatcggcctcaacctcttcaacaagaagccagagaagggtatccagtatctgatcgagcggggcttcctgtcagacacaccggtgggagtggctcacttcatcctggagcggaaaggcctcagccggcagatgataggggaattcctagggaaccggcagaagcagttcaacagagacgtgttggactgtgtggtggatgagatggacttctcctccatggatctggatgatgcgctccggaagttccagtcccatatccgggttcagggtgaggcccagaaagtggagcgactcatcgaagccttcagccagcggtactgtgtctgtaacccagccctcgtgcgccagttccggaacccagacaccatcttcatccttgcttttgccatcatcctcctcaataccgacatgtacagtcccagcgtcaaagctgaacgaaagatgaaactagatgacttcatcaagaacctgagaggggttgacaatggtgaagacatcccccgagacctcctggtgggcatctaccagcgcatccaggggcgtgaactgcggaccaacgatgaccatgtgtcccaggtgcaggctgtggagcgcatgattgttggaaagaaaccagtcctgtctctccctcaccgtcgactggtttgctgctgccagctctacgaggtgccagatccaaaccgcccccagaggctagggttgcatcagcgggaggtcttcctcttcaatgatctccttgtggtcaccaaaattttccagaagaagaagatcttggtgacgtacagtttccgtcagtctttccccctcgtggaaatgcacatgcagctcttccagaattcatattaccagtttgggatcaagttgctgtctgcagtacctggtggggagcgaaaagtcctcatcatcttcaatgcccccagcctccaggaccggctgcgctttacatccgacctgcgcgagtccattgcggaggtgcaggagatggagaaataccgtgtggagtcggagctggagaagcagaaaggtatgatgcggcctaacgcctcacagcctggaggggccaaggactcagtgaatgggacgatggcccgcagtagcctggaggacacttacggggcaggcgatgggctcaaacggggcgcactcagcagttccctgcgagacctctctgatgcaggggtctgttattagcagtccacgccctcaccagaggatgccacctccgcccccacccccgccgccagaggagtacaagagccagaggcccgtctccaactcctcatccttcctgggctccctatttggaagcaagcggggcaaggggcccttccagatgccaccaccgccaacaggccaggcctctgcctcctcttcatctgcttcttccacgcaccaccaccaccaccaccaccatcatggccatagccacggtggcctgggggtgctgcctgatgggcagtccaagctccaggccctgcatgcccagtattgccaaggaccgggccctgccccgccaccctacctcccaccccagcagccctctcttcccccacctccccagcagcccccacccttgccccagctgggctccattccaccgcctcccgcctcagccccacctgtggggccacatcgccacttccacgcccatggcccagtcccagggccccaacactataccttgggccggccaggcagggcacccagacggggggctggaggacaccctcagtttgctccacatggccgccaccccctgcaccagcccacatccccactgcccctgtacagtcctgccccccagcaccctccagcccacaaacagggccctaagcacttcatcttcagccaccacccacagatgatgccagcagcaggcgcggctgggggccctggatcccggccaccagggggctcctactcccacccccaccacccccagtcaccattgtcaccacactcacccatcccaccccacccctcctatccacccctccccccaccctcccctcacaccccgcactcaccccttccacccacctccccccatggcccgctgcacgcctctgggccccctggcacagccaacccccccagtgcaaaccccaaggccaagccaagccggatcagcaccgtggtctgatgaatggagagagtgagctggggaacaggaaagtctggggagccacaggagagggaccttgcaccctctttgcttcctcggttttttcaaaaatatatatacacatagc

SEQ ID NO: 144371 - DNA, 6011 bp, Homo sapiens
  Payload ID: 8524
  Gene Symbol: IQSEC2
  Gene Name: IQ motif and Sec7 domain 2
  Uniprot ID: Q5JU85
  ENST ID: ENST00000396435
  CDS Start-End: 202-4668
cggcagcctcagctcctgctccccgtgccgccggccccagcgctgtctcccgggccccctagggcccccgggccctcaagcccggtgcgcgccctcgcgtcccgccggccccctcccccggctgggcccgggggagggtggcgccgtgagagagcggggacagggctctcctgcccgttcccctgcccctgggccgccaggatggaggcggggtcggggcccccgggcggcccgggatccgagagcccaaatcgggccgtggagtacctgctggagctgaacaacatcatcgagagccagcagcagctgctggaaacccagcggcggcgcatcgaggagctggagggccagctggaccagctcacccaggagaaccgcgacctgcgagaggagagccagctgcaccgcggggagctgcaccgggacccccacggcgcgcgggatagcccgggccgcgagagccagtaccagaacctgcgcgagacccagttccaccaccgcgagctgcgggagagccagttccaccaggcggcccgggacgtgggctacccgaaccgggaaggcgcctaccagaatcgggaggctgtgtatcgggacaaggagcgggacgcctcctacccgctccaggacactaccggttacacagcccgcgagcgtgacgtggcccagtgccacctgcaccacgagaacccagccctgggtcgcgagcgtggcgggcgggaggccgggccggcgcacccgggccgcgagaaggaagcgggctattcggcggcggtgggcgtggggccgcggccaccgcgggagcggggccagctgagccgtggcgcatccaggagctccagtcccggcgccggcggaggccacagcaccagtaccagcaccagcccggccacgaccctccagagaaaatctgatggtgagaattccagaacagtcagtgtggagggtgatgccccaggcagtgacctgagcacagcggttgatagtcctgggagccaacccccctaccggctgagccagctgcccccctccagcagccacatggggggcccccctgctggagtgggccttccctgggctcagcgggcacgcctccagccagccagtgtcgccctgaggaagcaggaggaggaggagataaagcgctccaaggccctatcggacagctatgaactctccacagacctgcaggacaagaaggtggaaatgctggagaggaagtatgggggctccttcctgagccgcagggctgccaggaccatccagacagccttccgccagtaccgcatgaacaagaactttgagcggctacgcagctcagcctcagagagccgcatgtcccgccgcatcatcctttccaacatgcggatgcagttctcctttgaggagtatgagaaggcacagaaccccgcgtacttcgagggcaagcctgcctcgctggacgagggtgccatggctggtgcccggagccaccggcttgaacgggggctcccatatggaggctcctgtggtgggggcatcgatggtggtggaagctccgtcaccacatctggagagttttctaatgacatcacagaacttgaggactccttctccaaacaggtaaagtctctggctgaatccatcgacgaagccctgaactgccacccgtcagggcccatgtctgaggagccagggtcagcccagctggagaagcgggagtcaaaggaacagcaagaggacagctcagccacatccttcagtgatcttcccctctacctggatgacacagttccccaacaatcccctgagcgactgcccagcacagaacccccaccccagggccggcccgagttctgggcgccagcccctctcccgccagttcctccaccagtgccatcaggaacccgggaagacggtagccgtgaggaaggcactcgcaggggtcccgggtgcttggagtgccgggatttccggctgcgggctgcccaccttcccctgcttaccattgagcctcctagtgacagctccgtggacctgagtgaccgctcagatcgcggctctgtccaccgccagctggtgtatgaggctgatggctgcagcccccatgggaccctgaagcacaaggggccaccaggcagggccccgatcccacaccgccactacccagcccctgaaggcccagccccagccccaccagggcccctgccaccagcccccaacagtggcactgggcccagtggtgtggctgggggtcggaggttggggaagtgcgaggcagcaggcgagaactctgatggtggagataacgagagccttgagagctccagcaattccaatgagaccatcaactgcagctccggctcctcttctcgggacagtctaagggagcctccggctaccggcctgtgcaagcagacttaccagcgggagacaaggcatagctgggactcgccagctttcaacaatgatgtggtccagaggcggcactaccgaatcggcctcaacctcttcaacaagaagccagagaagggtatccagtatctgatcgagcggggcttcctgtcagacacaccggtgggagtggctcacttcatcctggagcggaaaggcctcagccggcagatgataggggaattcctagggaaccggcagaagcagttcaacagagacgtgttggactgtgtggtggatgagatggacttctcctccatggatctggatgatgcgctccggaagttccagtcccatatccgggttcagggtgaggcccagaaagtggagcgactcatcgaagccttcagccagcggtactgtgtctgtaacccagccctcgtgcgccagttccggaacccagacaccatcttcatccttgcttttgccatcatcctcctcaataccgacatgtacagtcccagcgtcaaagctgaacgaaagatgaaactagatgacttcatcaagaacctgagaggggttgacaatggtgaagacatcccccgagacctcctggtgggcatctaccagcgcatccaggggcgtgaactgcggaccaacgatgaccatgtgtcccaggtgcaggctgtggagcgcatgattgttggaaagaaaccagtcctgtctctccctcaccgtcgactggtttgctgctgccagctctacgaggtgccagatccaaaccgcccccagaggctagggttgcatcagcgggaggtcttcctcttcaatgatctccttgtggtcaccaaaattttccagaagaagaagatcttggtgacgtacagtttccgtcagtctttccccctcgtggaaatgcacatgcagctcttccagaattcatattaccagtttgggatcaagttgctgtctgcagtacctggtggggagcgaaaagtcctcatcatcttcaatgcccccagcctccaggaccggctgcgctttacatccgacctgcgcgagtccattgcggaggtgcaggagatggagaaataccgtgtggagtcggagctggagaagcagaaaggtatgatgcggcctaacgcctcacagcctggaggggccaaggactcagtgaatgggacgatggcccgcagtagcctggaggacacttacggggcaggcgatgggctcaaacggggcgcactcagcagttccctgcgagacctctctgatgcagggaagcgggggcggcgtaacagcgtgggatcgctggacagcaccatcgaagggtctgttattagcagtccacgccctcaccagaggatgccacctccgcccccacccccgccgccagaggagtacaagagccagaggcccgtctccaactcctcatccttcctgggctccctatttggaagcaagcggggcaaggggcccttccagatgccaccaccgccaacaggccaggcctctgcctcctcttcatctgcttcttccacgcaccaccaccaccaccaccaccatcatggccatagccacggtggcctgggggtgctgcctgatgggcagtccaagctccaggccctgcatgcccagtattgccaaggaccgggccctgccccgccaccctacctcccaccccagcagccctctcttcccccacctccccagcagcccccacccttgccccagctgggctccattccaccgcctcccgcctcagccccacctgtggggccacatcgccacttccacgcccatggcccagtcccagggccccaacactataccttgggccggccaggcagggcacccagacggggggctggaggacaccctcagtttgctccacatggccgccaccccctgcaccagcccacatccccactgcccctgtacagtcctgccccccagcaccctccagcccacaaacagggccctaagcacttcatcttcagccaccacccacagatgatgccagcagcaggcgcggctgggggccctggatcccggccaccagggggctcctactcccacccccaccacccccagtcaccattgtcaccacactcacccatcccaccccacccctcctatccacccctccccccaccctcccctcacaccccgcactcaccccttccacccacctccccccatggcccgctgcacgcctctgggccccctggcacagccaacccccccagtgcaaaccccaaggccaagccaagccggatcagcaccgtggtctgatgaatggagagagtgagctggggaacaggaaagtctggggagccacaggagagggaccttgcaccctctttgcttcctcggttttttcaaaaatatatatacacatagcaatgtcctcctccccatgtcctccctgccttgggacccgtcctctcacccccagcagttgccatggggtttccttccagattcgaggatccttgccacttgaagcctggactcagggtgctccagcgctggggagtggtgagggccttccagagatcctcgtactctttctcccgtcttcttcttccccacttttccctggaggtctagctctgtggcctcagacctctgggcctgtgtgagctctctgtgagctctggctggcggagaagggcaggtgtccggagctgtcggggtgaaggcttccctggggctcctctggccgtgtggggctaggagagcgctctgtagagttgtggccaaacttcagctggcttggccctctctctgacctcagggcctggccacacacttccatgtgtctttttgcctgctggaggacacggaccattgatgcacttggtgggtgggaccctgcttgtgttggccccacgtggggcagtgcttcctctctcgagccagtctatgccctttctccagtaggccccagcccagacctcttcggcttcaggaacttgcctcgccctgcaacgttcttatcctgatcaaagtccagacaggttttggggggggctcaggtctgggatgagaagggcactgccctccctcacccatattgcatgcccccccgccattcccttacacctaccccacctacaactgaagacaatgcactttacagatatcacccacacacacctcgctggggcaggggcacccagcatcagccctggggagagaggctcccaaagggccaccatgagcccaagatatccttcctgaggcagagattgaagccatcagagctggggttgggagccagaatgcctgagtccttctgtccgtcagaatctccgctgcctctccagcccttttgcagccctgtttatttattataaatatattttttacaagccccagctcctcttcttgccccgcatatccagctcctcactcagctcctgcctccctctcccctctccaccatgggctgcagtatagacagacagatggaccctggctgtacgaagggccagggccactggggcttgggggcgggggagggtggcagtgggaggggctgtatggagaggagctggggttcaggcattgtcttttttcctccttgtatataagaatgtatatttgatgcctcataaaagaccttgtgctca

SEQ ID NO: 144372 - DNA, 2701 bp, Homo sapiens
  Payload ID: 8525
  Gene Symbol: IQSEC3
  Gene Name: IQ motif and Sec7 domain 3
  Uniprot ID: Q9UPP2
  ENST ID: ENST00000382841
  CDS Start-End: 413-2692
aagcccctccccttctctgggccttgatttcccctcctgctcagtggggacgttcttggtcctccttcttgcccactctacccagtcgccgagtctggcgaagcagagctgtctgggggtcaccgcagcaggagggaccgagcttagatacgaaaaaagacttctacacggcaagagccacagaaaggacgctccagctggctcagcagaggggcatctctccctttcaagaacaaaaggtggcaggtacccgggggccctggggcagaacgaggtaaattctgcacggacttccacatctaagaccccagaaatctccagccggctccctccgaccgaatgagaccgtgctgcaccagttctgctgcccagccgccgacgcctgctccgacctggcctcccaaagattgaaatgctagaacataagtacggcggtcacctggtgtcccggcgcgccgcttgcaccatccaaaccgccttccgccaataccagctcagcaagaacttcgagaaaatccgcaactcgcttctggagagccgcctgccacggcggatctccctgcgcaaggtgcggtcacccacggccgagagcctggcggccgagaaagcgctcatggagggctacggcctcgtggggctgccgctggtgcgctcgccctccctgccgcccaccttcgcaggcaccctcaccgagctggaggactccttcaccgagcaggtgcaatccctggccaagtccatcgacgacgcgctcagcacgtggagcctcaagaccatgtgctccctgcgggagagtggcgcttaccagctccaccaggccctgcaggcggccgcggggcccccaggcctggaggccgaggggcgggcgccggagagcgcgggccccgggcccggggatgacgccgcggagacccccggcctgcccccggcccacagcgggaccctcatgatggctttccgggacgtcacggtgcagatcgccaaccagaacatatccgtctcctcctccacggctctgtcggtggccaactgcctgggcgctcagacggtccaggcccccgcagagcccgcggcgggcaaggccgagcagggcgagacctctgggcgggaggccccggaagcccccgccgtgggccgggaggacgcgtcagccgaggactcatgcgcagaggctgcggctagtggggcggcggatggggccacagcccccaaaacagaggaggaagaggaggaggaggagacggcggaggtggggagaggggccgaggccgaggcaggcgacttggagcagctgagcagcagcagcacgtccaccaagtccgccaagtcaggctcggaggcgtcggcctccgcctccaaggacgccctgcaggccatgatcctgagcctgccgcgctaccactgcgagaacccagccagctgcaagtcgcccacgctctccaccgacaccctgcgcaagcggctctaccgcatcggcctcaacctcttcaacataaaccccgacaagggcatccagttcctgatctcacgcggcttcatcccggacacccccatcggtgtggcccatttcctcctccagcgaaagggcctcagccgccagatgattggagagttcctgggcaacagcaagaagcagttcaaccgcgacgtgctggactgcgtggtggacgagatggacttctccagcatggagctggacgaggccctgcgcaagttccaggcacacatccgtgtgcagggggaggctcagaaggtggagcggctcattgaggccttcagccagcgctactgcatgtgcaaccccgaagtggttcagcagttccacaaccccgacaccatcttcatcctcgccttcgccatcatcctcctcaacaccgacatgtacagccccaacatcaagcctgaccggaagatgatgctggaggacttcatccgaaaccttcgaggtgtggacgatggcgctgacatccccagggagctggtggtaggcatctatgagaggatacagcagaaggagctcaagtccaatgaggaccacgtcacgtacgtcaccaaggtggagaagtccattgtgggcatgaagacagtgctgtccgtgccccaccgccgcctggtgtgctgcagccggctcttcgaggtgacggatgtgaacaagctgcagaagcaggcagcgcatcagagggaggtgttcctcttcaatgacctgctggtgattctcaaactttgcccgaagaagaagagctcctccacgtacaccttttgcaagtcagttggcctgctgggcatgcagttccagctctttgagaacgagtattactctcatggcatcacactggtgaccccgctctcgggctccgagaagaagcaggtgctgcatttctgtgccctgggctcggacgagatgcagaagttcgtggaggacctgaaggagtccattgctgaggtgacggagctggagcagatccgaatagagtgggagctggagaagcagcagggaacaaagacactctccttcaagccctgcggagcccagggggacccacagtcaaagcaaggatcgccgacagccaaaagggaagccgcgctcagggagaggccggcggagagcacggtggaggtattaatcaatgcctccccagcccgactcaccattttaccaatttcaagagatacaattaaaagttactgctagcatgggtaa

SEQ ID NO: 144373 - DNA, 7094 bp, Homo sapiens
  Payload ID: 8525
  Gene Symbol: IQSEC3
  Gene Name: IQ motif and Sec7 domain 3
  Uniprot ID: Q9UPP2
  ENST ID: ENST00000538872
  CDS Start-End: 119-3667
ggaggctgggccggtgggagagggaggcgagccgaccgctgggctgctgggctcccgcgccctcgcgctccccgccgccagcccaggcgcaggcagggcgcaggcggcggcgggcggcatggagagcctgctggagaatccggtgcgcgccgtgctctacctcaaggagctcacggccatcgtgcagaaccagcagagcctcatccacacccagcgagagcgtatcgacgagctggagcggcggctggacgagctgagcgctgagaaccgcagcctgtgggagcaccagcagctgctgcaagcccagcctccgcccgggctcgtccccccgtcatcggccccgctgccggccgctccggccaccgctcctgccgccgccgccagggcccaggaacctctccaggaccagggacagcgctcagcagccgcgccgcatcccgcgcccgatcggccgccgcgtcagcaccacggacagctcctggagcagccccagcggggccctggcagcagggctcacacaccccagtcgccccacaagcatctggggacacaaggggccgtgactgacaaggagaaggagcgtcccccgagttgctgcgctgctgccggagccctccttcagcacaaatccccctccgccctcggcaagggcgtcctgagcaggagacctgagaatgagaccgtgctgcaccagttctgctgcccagccgccgacgcctgctccgacctggcctcccaaagtgatggctcctgcacccaggccggtgggggcatggaggactccgtggtggcagcggcggcggtggcagccggcagacccagtgcccatgccccgaaggctcaagcccaggagctgcaggaggaggaggagcggccgggggcaggggctgcctccccaagggctggcccccagcacaaggcctcccccggccggcagcagcctgccctggcgacggcgctgtgcccccacgcccctgccgcctccgattacgaactctcccttgacctaaagaataaacagattgaaatgctagaacataagtacggcggtcacctggtgtcccggcgcgccgcttgcaccatccaaaccgccttccgccaataccagctcagcaagaacttcgagaaaatccgcaactcgcttctggagagccgcctgccacggcggatctccctgcgcaaggtgcggtcacccacggccgagagcctggcggccgagaaagcgctcatggagggctacggcctcgtggggctgccgctggtgcgctcgccctccctgccgcccaccttcgcaggcaccctcaccgagctggaggactccttcaccgagcaggtgcaatccctggccaagtccatcgacgacgcgctcagcacgtggagcctcaagaccatgtgctccctgcgggagagtggcgcttaccagctccaccaggccctgcaggcggccgcggggcccccaggcctggaggccgaggggcgggcgccggagagcgcgggccccgggcccggggatgacgccgcggagacccccggcctgcccccggcccacagcgggaccctcatgatggctttccgggacgtcacggtgcagatcgccaaccagaacatatccgtctcctcctccacggctctgtcggtggccaactgcctgggcgctcagacggtccaggcccccgcagagcccgcggcgggcaaggccgagcagggcgagacctctgggcgggaggccccggaagcccccgccgtgggccgggaggacgcgtcagccgaggactcatgcgcagaggctgcggctagtggggcggcggatggggccacagcccccaaaacagaggaggaagaggaggaggaggagacggcggaggtggggagaggggccgaggccgaggcaggcgacttggagcagctgagcagcagcagcacgtccaccaagtccgccaagtcaggctcggaggcgtcggcctccgcctccaaggacgccctgcaggccatgatcctgagcctgccgcgctaccactgcgagaacccagccagctgcaagtcgcccacgctctccaccgacaccctgcgcaagcggctctaccgcatcggcctcaacctcttcaacataaaccccgacaagggcatccagttcctgatctcacgcggcttcatcccggacacccccatcggtgtggcccatttcctcctccagcgaaagggcctcagccgccagatgattggagagttcctgggcaacagcaagaagcagttcaaccgcgacgtgctggactgcgtggtggacgagatggacttctccagcatggagctggacgaggccctgcgcaagttccaggcacacatccgtgtgcagggggaggctcagaaggtggagcggctcattgaggccttcagccagcgctactgcatgtgcaaccccgaagtggttcagcagttccacaaccccgacaccatcttcatcctcgccttcgccatcatcctcctcaacaccgacatgtacagccccaacatcaagcctgaccggaagatgatgctggaggacttcatccgaaaccttcgaggtgtggacgatggcgctgacatccccagggagctggtggtaggcatctatgagaggatacagcagaaggagctcaagtccaatgaggaccacgtcacgtacgtcaccaaggtggagaagtccattgtgggcatgaagacagtgctgtccgtgccccaccgccgcctggtgtgctgcagccggctcttcgaggtgacggatgtgaacaagctgcagaagcaggcagcgcatcagagggaggtgttcctcttcaatgacctgctggtgattctcaaactttgcccgaagaagaagagctcctccacgtacaccttttgcaagtcagttggcctgctgggcatgcagttccagctctttgagaacgagtattactctcatggcatcacactggtgaccccgctctcgggctccgagaagaagcaggtgctgcatttctgtgccctgggctcggacgagatgcagaagttcgtggaggacctgaaggagtccattgctgaggtgacggagctggagcagatccgaatagagtgggagctggagaagcagcagggaacaaagacactctccttcaagccctgcggagcccagggggacccacagtcaaagcaaggatcgccgacagccaaaagggaagccgcgctcagggagaggccggcggagagcacggtggaggtgtcaattcacaacaggcttcaaacgtcccagcacaactccgggctgggggccgagaggggagcgccggtgccgccgccagacctgcagcctagccccccgagacagcagaccccaccactgccgccgccgccacccacgcccccgggcaccctggtgcagtgccagcaaattgtcaaggtcattgtcctggacaagccctgcctggcccgcatggagcccctgctgagccaggctctctcctgctacacctcgtcgtcctctgactcctgcggctccacacccctgggcggtcccggctctccggtcaaggtcacccaccagcctccgctgcccccgcccccacccccctacaaccaccctcaccagttctgtcccccaggctccctgctgcacgggcaccgctactccagtggctcaaggagcctggtgtagactctgccccaccaccctgctgtcctgggagggctggccactggggggcctgggctgcccctccactgctccccataccctggcacgatgcgttcctggtcactgatcaccatcattttgggaagagaatcccaatccctggcacctgggtttgcctcatccaaccatccttccctttctcagctgcaccccctctgcagatctgaagacacacctcactctcccagggccctacacagccagacccggcgaggcctcctcttcccctggccaccactttcccccattggaccatggactgaagaaaacgagctgagggtctaacgagcttgcaggctttgagtctgttagtgcccggggcctcgggccttgggcagcagcatgaggctgggccggccggcagtggagcactagacagagtggctggctcgcagcccagaactagtgcctctgtagctgcactgaggggaggagggttggtcccacccctggagggacaggtgggaggagtgaggagggggctttttctgccacccccgcccccaagcctgaaactctcaggagtctacttcttggtccccagggacattggctgtcctgaccatgtccttccccctcctcccagggcctctgcttcctcaggagctgcccagactccagaaaagcctggaaaaagggaggcgggaaggggagcactttcggctttctataggtcagtccagcagggccacgggatcgcgaggtcatgtatctgcaaaatgcacctttttaaagagtgtcttagttccccagccccagctaatacccggccaatgccgtgtacgcaccggcatgtgcacgcaaacacgcatgagaaccaggccattccttccgctgtggaagcagaactggagacggggcaggaatgtgcccagcagagatggggctcagcccgaggcagggctccctcctgcatgaggctcggcccgaggcagggctccctcctgcatgagtctgtggcctccaggagggacttgggtgcagatgtaagcaagaaaaaccggggctccagaggcatgtgcatttcccctgcgcccctcagcctttaaatattccctcctcctagaaggttctagaccccccccttccagcaggggtgcccaagagtccctggaccctcaaaattgcaaaggagacccaagcggggctcgctgacctcccagggcccagcaagatgggatagccagccttaggtggccccacgagcccaagcctggggaagggcccctccccagccagacgagaggcagccaccccagagaccacaggagccgtaccatggcctgcgcagtcaggccctatcaggatgtgtctgtcccaagcctggccaggctccagtcctgtgccagtagctcactgctgtcctatgtgcaggtcccccaacacttggagcctgtggttaaggcctcctgggagaggcagtgagcatgagtcaaaggtgacatggacttgaatctccccaccccgccccgcctgcagtagccgggccaggtaggaggcaaggatcattccctgctcccagaggttccagatgacctagtttcgttttgtgtgtgtgtgtgtgtggtcacccagacgtcactgtgatatcacctagtgaatctatttctggccctgtcttcgtcggcccagtttctgtaacttgcagccaatttgccctctcccctgtggctgccagcccatctgcccctctgtgtccttgctgccctggccctcctctgttttctgtaacagatgctccagtcattgcctttcagagtggagcagatgacagatggggtgcacgcattcagacacctctgatgcccttagccagggcagggatcgtccttaaagtgaaggcctggacaggaggagtcagggacttgggaggaggtggagctgtggggatgggagtggaggaatcaaaatgagggaagctgaaaatagaatgaaaacgatgactaagaggcagggagtgcgaggtatgggggaataggaactatgagctaaatatacttatggggtgggggccgtgggggccagggacactctcccagacagccctgacccgccaggcaggaccccgtcccctgctcacacagctcttcaaacttaccaaggacaggcaggaccccgtcccctgctcacacagctcttcaagcttaccaaggacaggcagaaccccgtcccctgctcacacagctcttcaagcttaccaaggacaggcaggaccccgtcccctgctcacacagctcttcaaacttaccaagtgccctctcccctgttgagggcacagcaaccccaggccctccctcccacctcagctgaagccccaatcttccaaatcggaaccagcaagtcttagggctggcacgcatctgggcctctagctgagaacccggactctcaggcacctcagtgcccctgccccagggcagaggcccaccccgtgggttggtgcagtggctgccctgggctccacgggcagcacagggagtctgtccaggaagcagcccagccggggtcagtattccgtggagccagtcctgagctgggaggggcatttaacacccctgagggcctggggcaggacacagctggccctcctcattgtcaggggaagcaagtgcccaacatctgtaacctcccttccctgctcagtccccaggccaaggttgggacccctctccatccctgtccccagagcctagacctcagggacctaggaaaagcctcctgctccctccccacggcagcagacagggcagggcctccagcccccagagggccggtggggggtgctctcgggccttcctgctctcctaaggttgcggggacagtagagtgctgagccccagacccagtcaccccaagatggccccactctatccactctctagacctttgggaaatctgggtccctctcctgatttgatccattcggccccaactccagagtcgggaatgggagatgaaactagttttccacccacttttggacaagtcccacccctagatctgaagcaagctctaccagcagcgtgtcctggaagcctgcctgcctgcctgcccgtctgcacaggtgtcttgatccagccctgcgtcttcgagcccctgtgccaccggtccccacggcccgccaggagtctctttgtacccactaggcttccctgatgaccatctgtctgtccgtccctgtttttgctgtacataactcctgctgcaccctctccccgcacacccgtcacccatgagagagagaaacctctctagggaaaggcagggtggctgcacccagcaactaatccaaatggcaaatattttgtaacaaaatagcccagaggtattttatctgttcaattcatagagttttagagattatattgaaagatgtcacttgagcaaa

SEQ ID NO: 144374 - DNA, 2701 bp, Homo sapiens; identical to SEQ ID NO: 144372
  Payload ID: 8525
  Gene Symbol: IQSEC3
  Gene Name: IQ motif and Sec7 domain 3
  Uniprot ID: Q9UPP2
  ENST ID: ENST00000571363
  CDS Start-End: 413-2692

SEQ ID NO: 144375 - DNA, 3232 bp, Homo sapiens
  Payload ID: 8525
  Gene Symbol: IQSEC3
  Gene Name: IQ motif and Sec7 domain 3
  ENST ID: ENST00000575724
  CDS Start-End: 119-3232
ggaggctgggccggtgggagagggaggcgagccgaccgctgggctgctgggctcccgcgccctcgcgctccccgccgccagcccaggcgcaggcagggcgcaggcggcggcgggcggcatggagagcctgctggagaatccggtgcgcgccgtgctctacctcaaggagctcacggccatcgtgcagaaccagcagagcctcatccacacccagcgagagcgtatcgacgagctggagcggcggctggacgagctgagcgctgagaaccgcagcctgtgggagcaccagcagctgctgcaagcccagcctccgcccgggctcgtccccccgtcatcggccccgctgccggccgctccggccaccgctcctgccgccgccgccagggcccaggaacctctccaggaccagggacagcgctcagcagccgcgccgcatcccgcgcccgatcggccgccgcgtcagcaccacggacagctcctggagcagccccagcggggccctggcagcagggctcacacaccccagtcgccccacaagcatctggggacacaaggggccgtgactgacaaggagaaggagcgtcccccgagttgctgcgctgctgccggagccctccttcagcacaaatccccctccgccctcggcaagggcgtcctgagcaggagacctgagaatgagaccgtgctgcaccagttctgctgcccagccgccgacgcctgctccgacctggcctcccaaagtgatggctcctgcacccaggccggtgggggcatggaggactccgtggtggcagcggcggcggtggcagccggcagacccagtgcccatgccccgaaggctcaagcccaggagctgcaggaggaggaggagcggccgggggcaggggctgcctccccaagggctggcccccagcacaaggcctcccccggccggcagcagcctgccctggcgacggcgctgtgcccccacgcccctgccgcctccgattacgaactctcccttgacctaaagaataaacagattgaaatgctagaacataagtacggcggtcacctggtgtcccggcgcgccgcttgcaccatccaaaccgccttccgccaataccagctcagcaagaacttcgagaaaatccgcaactcgcttctggagagccgcctgccacggcggatctccctgcgcaaggtgcggtcacccacggccgagagcctggcggccgagaaagcgctcatggagggctacggcctcgtggggctgccgctggtgcgctcgccctccctgccgcccaccttcgcaggcaccctcaccgagctggaggactccttcaccgagcaggtgcaatccctggccaagtccatcgacgacgcgctcagcacgtggagcctcaagaccatgtgctccctgcgggagagtggcgcttaccagctccaccaggccctgcaggcggccgcggggcccccaggcctggaggccgaggggcgggcgccggagagcgcgggccccgggcccggggatgacgccgcggagacccccggcctgcccccggcccacagcgggaccctcatgatggctttccgggacgtcacggtgcagatcgccaaccagaacatatccgtctcctcctccacggctctgtcggtggccaactgcctgggcgctcagacggtccaggcccccgcagagcccgcggcgggcaaggccgagcagggcgagacctctgggcgggaggccccggaagcccccgccgtgggccgggaggacgcgtcagccgaggactcatgcgcagaggctgcggctagtggggcggcggatggggccacagcccccaaaacagaggaggaagaggaggaggaggagacggcggaggtggggagaggggccgaggccgaggcaggcgacttggagcagctgagcagcagcagcacgtccaccaagtccgccaagtcaggctcggaggcgtcggcctccgcctccaaggacgccctgcaggccatgatcctgagcctgccgcgctaccactgcgagaacccagccagctgcaagtcgcccacgctctccaccgacaccctgcgcaagcggctctaccgcatcggcctcaacctcttcaacataaaccccgacaagggcatccagttcctgatctcacgcggcttcatcccggacacccccatcggtgtggcccatttcctcctccagcgaaagggcctcagccgccagatgattggagagttcctgggcaacagcaagaagcagttcaaccgcgacgtgctggactgcgtggtggacgagatggacttctccagcatggagctggacgaggccctgcgcaagttccaggcacacatccgtgtgcagggggaggctcagaaggtggagcggctcattgaggccttcagccagcgctactgcatgtgcaaccccgaagtggttcagcagttccacaaccccgacaccatcttcatcctcgccttcgccatcatcctcctcaacaccgacatgtacagccccaacatcaagcctgaccggaagatgatgctggaggacttcatccgaaaccttcgaggtgtggacgatggcgctgacatccccagggagctggtggtaggcatctatgagaggatacagcagaaggagctcaagtccaatgaggaccacgtcacgtacgtcaccaaggtggagaagtccattgtgggcatgaagacagtgctgtccgtgccccaccgccgcctggtgtgctgcagccggctcttcgaggtgacggatgtgaacaagctgcagaagcaggcagcgcatcagagggaggtgttcctcttcaatgacctgctggtgattctcaaactttgcccgaagaagaagagctcctccacgtacaccttttgcaagtcagttggcctgctgggcatgcagttccagctctttgagaacgagtattactctcatggcatcacactggtgaccccgctctcgggctccgagaagaagcaggtgctgcatttctgtgccctgggctcggacgagatgcagaagttcgtggaggacctgaaggagtccattgctgaggtgacggagctggagcagatccgaatagagtgggagctggagaagcagcagggaacaaagacactctccttcaagccctgcggagcccagggggacccacagtcaaagcaaggatcgccgacagccaaaagggaagccgcgctcagggagaggccggcggagagcacggtggag

SEQ ID NO: 144376 - DNA, 2891 bp, Homo sapiens
  Payload ID: 8526
  Gene Symbol: IQUB
  Gene Name: IQ motif and ubiquitin domain containing
  Uniprot ID: Q8NA54
  ENST ID: ENST00000324698
  CDS Start-End: 178-2553
ccacccgcctctggctcctctccttcccacccctgccgtgctccggcaggaagaggtggtgccagggccgttgctaggatacgaccaacagctgagaacgcggcgagtatggaagctgcgtcttaggagcctgggaaagcacttcgacgagaatagtttggtttcgtacacaggaaaatgtctaatcaacaggagaagtatgaagctcagaatatagtcaattcaacagaagagagtgatgatgcttttgatactgtcactattccagttccctcagaagagcctcaagagtcagatcaaactgaagagcatgaatctggaatagaacaattcagtgagagccatgcaatacatgttgaggagcagagtgaccaaagcttttcaagcctggaaccagacaatgaacaactcatggaagaggttatatcaccaagacaagtttcatatactccgcaacatcatgaaaagcaatatgcaatgcagaggccaaatgatgatagtttggcatttctggataaaataaagtctgtaaaggaatctttgcaagaatcagtggaagattctctagcaacagtaaaagttgtacttattccagtgggccaggaaattgtaataccttttaaggttgataccattcttaaatatcttaaggaccatttttcacacttattaggtatcccacattctgtactgcagataagatactcaggaaaaattcttaaaaataatgagactctagtacaacatggagttaagccacaggaaattgtacaagtggaaatcttttctacaaatccagatctgtatccagtcagaagaatagatggattaactgatgtctctcaaatcataactgtcactgtccaaactggacttgatcaataccagcaggtacctgttgagattgtcaaatctgactttcacaaaccatttcttggtggattcagacataaagtaacaggagtagagtatcacaatgctggaacacaaactgtacctaaaaggattcccgaaagactcagtatattttgtagggatacgcagacagtttttcagaaaaaaaatctccaacaaactacaaatacaacatccacacagatgactaacattggtgtatatgtatcaaatatgactgataaactggtaacaccaggaaagtatttttcagcagcagaataccatgctcaaagactaaaggcggtgatagtgatacagacttactacaggcaatggcatgctaaaatcttcgtagagaatttaagaagacagaaaagcttaagactggaatgggaaacacagcaagaactaaggaagataagagaaaaagaagaatggataaaattggactatcaccggaggcataatcctaaaacaaatgaagattttgaatttctttataatgcattagaattctggcggcaagaagaacttacacgtattaaccaatcttttactggagctgaaaggaaagctgctctgtgtgaacttctggaaaaagagactcagataattgcttccattgggagacatagatacattgcttatatggcaaatcaggaagcagcaatacaagcttttttggataagtgttcagctccaaaaatatggagaacccctaatggcaaaacaattgagatggatacgcagttcaccatcagagccagagagctgcaaaatatctataagtgcattatgctgaaaaatatctcccaagatgagaggctggatgtgctgttaactcttaaacacactgtaaaggaacatgaatgtaaactaactcaggaaattctagaattgattgacagagaggttgaccttatgatgagaggagtcaaacatcataaccttgaaggactcagaaaaagaattgcgacactcttttttcattatatcaaaacacctctgtttaatcctgaagttgcaaaataccttaaggtccctcaagacccattgaaattttataagaagatttacttttgccacagttgccagctttatttgccttctacagaattttctgtatcatccacctcacgccgcatataccggtgtcgtaactgcattaaccttcagaatgaggctcaaaaacgagaatcatttttgaagtacaaatgtttacttcaacagctctactatacagaagctgattatgaagatgattctaaaattgctttcttgatgcagctacaagacattcagtacctgacagagaacatctgggcgtcccagtcagtcctcagtgcttgcgacaatctcagtgatctggtcatggtcagatggaataaatccctggagtggtccccctggaactgcattcttcttaccaaagatgaagcagctgctcatctcaagctaacaagtattgaagagggatatgaacgctcatttattcacaagatcaaacacaaacatatcctggctaagaactatttttctcaggttccagtgctggcttcatttatacttgatgatggtgaaattgatgagatcagatggaagtatcactcagacacaacacctaagattatagaatcccagaggcctcctcattaggtgatccaggagtatttgtttgatgatcggcattttgttcactgctaatagggtaatacagaggtcacagagtatggaaatggaatttaatctgtttattgattttgttttttgtttttcatagtattttgagttatataaagagaaaacatttctatataagtaagtattctttgttaggaagttggtgctaaattgaaatgcaattttgttactgaaattaatattttggggtaaagaaaacattttaaaatgtgttttcacattaaattttttaaattttttcaagtatattagagttaaaatctaacaaacagccaaataaaaactagacaact

SEQ ID NO: 144377 - DNA, 3024 bp, Homo sapiens
  Payload ID: 8526
  Gene Symbol: IQUB
  Gene Name: IQ motif and ubiquitin domain containing
  Uniprot ID: Q8NA54
  ENST ID: ENST00000484508
  CDS Start-End: 165-1955
gagcaactgccggcctccgcccccagccgcagccggtcactggcggcgccttccgcgccaagcttgggggccttttcggggtcctacatggcacggcttccgacccccggcccgggacggggctcgcaggccccagaggggcaggctggagaaggaggaggaaaatgtctaatcaacaggagaagtatgaagctcagaatatagtcaattcaacagaagagagtgatgatgcttttgatactgtcactattccagttccctcagaagagcctcaagagtcagatcaaactgaagagcatgaatctggaatagaacaattcagtgagagccatgcaatacatgttgaggagcagagtgaccaaagcttttcaagcctggaaccagacaatgaacaactcatggaagaggttatatcaccaagacaagtttcatatactccgcaacatcatgaaaagcaatatgcaatgcagaggccaaatgatgatagtttggcatttctggataaaataaagtctgtaaaggaatctttgcaagaatcagtggaagattctctagcaacagtaaaagttgtacttattccagtgggccaggaaattgtaataccttttaaggttgataccattcttaaatatcttaaggaccatttttcacacttattaggtatcccacattctgtactgcagataagatactcaggaaaaattcttaaaaataatgagactctagtacaacatggagttaagccacaggaaattgtacaagtggaaatcttttctacaaatccagatctgtatccagtcagaagaatagatggattaactgatgtctctcaaatcataactgtcactgtccaaactggacttgatcaataccagcaggtacctgttgagattgtcaaatctgactttcacaaaccatttcttggtggattcagacataaagtaacaggagtagagtatcacaatgctggaacacaaactgtacctaaaaggattcccgaaagactcagtatattttgtagggatacgcagacagtttttcagaaaaaaaatctccaacaaactacaaatacaacatccacacagatgactaacattggtgtatatgtatcaaatatgactgataaactggtaacaccaggaaagtatttttcagcagcagaataccatgctcaaagactaaaggcggtgatagtgatacagacttactacaggcaatggcatgctaaaatcttcgtagagaatttaagaagacagaaaagcttaagactggaatgggaaacacagcaagaactaaggaagataagagaaaaagaagaatggataaaattggactatcaccggaggcataatcctaaaacaaatgaagattttgaatttctttataatgcattagaattctggcggcaagaagaacttacacgtattaaccaatcttttactggagctgaaaggaaagctgctctgtgtgaacttctggaaaaagagactcagataattgcttccattgggagacatagatacattgcttatatggcaaatcaggaagcagcaatacaagcttttttggataagtgttcagctccaaaaatatggagaacccctaatggcaaaacaattgagatggatacgcagttcaccatcagagccagagagctgcaaaatatctataagtgcattatgctgaaaaatatctcccaagatgagaggctggatgtgctgttaactcttaaacacactgtaaaggaacatgaatgtaaactaactcaggaaattctagaattgattgacagagaggttgaccttatgatgagaggagtcaaacatcataaccttgaaggactcagaaaaagaattgcgacactcttttttcattatatcaaaacacctctgtttaatcctgaagttgcaaaataccttaagatgggtggagaatatctttccatggcattatagtaaatgctccatctataatggagacgtgtgctaacgtgttttcatgaggttgactgatatatttgctaatttaatgcctaggaggcatgaagataaaataatcattcaagataaacaaaatgtgtaaatctcagaataagaaaaggaaccagtatttatttaggtccctcaagacccattgaaattttataagaagatttacttttgccacagttgccagctttatttgccttctacagaattttctgtatcatccacctcacgccgcatataccggtgtcgtaactgcattaaccttcagaatgaggctcaaaaacgagaatcatttttgaagtacaaatgtttacttcaacagctctactatacagaagctgattatgaagatgattctaaaattgctttcttgatgcagctacaagacattcagtacctgacagagaacatctgggcgtcccagtcagtcctcagtgcttgcgacaatctcagtgatctggtcatggtcagatggaataaatccctggagtggtccccctggaactgcattcttcttaccaaagatgaagcagctgctcatctcaagctaacaagtattgaagagggatatgaacgctcatttattcacaagatcaaacacaaacatatcctggctaagaactatttttctcaggttccagtgctggcttcatttatacttgatgatggtgaaattgatgagatcagatggaagtatcactcagacacaacacctaagattatagaatcccagaggcctcctcattaggtgatccaggagtatttgtttgatgatcggcattttgttcactgctaatagggtaatacagaggtcacagagtatggaaatggaatttaatctgtttattgattttgttttttgtttttcatagtattttgagttatataaagagaaaacatttctatataagtaagtattctttgttaggaagttggtgctaaattgaaatgcaattttgttactgaaattaatattttggggtaaagaaaacattttaaaatgtgttttcacattaaattttttaaattttttcaa

SEQ ID NO: 144378 - DNA, 2321 bp, Homo sapiens
  Payload ID: 8526
  Gene Symbol: IQUB
  Gene Name: IQ motif and ubiquitin domain containing
  ENST ID: ENST00000469057
  CDS Start-End: 77-1342
ggcgagtatggaagctgcgtcttaggagcctgggaaagcacttcgacgagaatagtttggtttcgtacacaggaaaatgtctaatcaacaggagaagtatgaagctcagaatatagtcaattcaacagaagagagtgatgatgcttttgatactgtcactattccagttccctcagaagagcctcaagagtcagatcaaactgaagagcatgaatctggaatagaacaattcagtgagagccatgcaatacatgttgaggagcagagtgaccaaagcttttcaagcctggaaccagacaatgaacaactcatggaagaggttatatcaccaagacaagtttcatatactccgcaacatcatgaaaagcaatatgcaatgcagaggccaaatgatgatagtttggcatttctggataaaataaagtctgtaaaggaatctttgcaagaatcagtggaagattctctagcaacagtaaaagttgtacttattccagtgggccaggaaattgtaataccttttaaggttgataccattcttaaatatcttaaggaccatttttcacacttattaggtatcccacattctgtactgcagataagatactcaggaaaaattcttaaaaataatgagactctagtacaacatggagttaagccacaggaaattgtacaagtggaaatcttttctacaaatccagatctgtatccagtcagaagaatagatggattaactgatgtctctcaaatcataactgtcactgtccaaactggacttgatcaataccagcaggtacctgttgagattgtcaaatctgactttcacaaaccatttcttggtggattcagacataaagtaacaggagtagagtatcacaatgctggaacacaaactgtacctaaaaggattcccgaaagactcagtatattttgtagggatacgcagacagtttttcagaaaaaaaatctccaacaaactacaaatacaacatccacacagatgactaacattggtgtatatgtatcaaatatgactgataaactggtaacaccaggaaagtatttttcagcagcagaataccatgctcaaagactaaaggcggtgatagtgatacagacttactacaggcaatggcatgctaaaatcttcgtagagaatttaagaagacagaaaagcttaagactggaatgggaaacacagcaagaactaaggaagataagagaaaaagaagaatggataaaattggactatcaccggaggcataatcctaaaacaaatgaagattttgaatttctttataatgcattagaattgttcagctccaaaaatatggagaacccctaatggcaaaacaattgagatggatacgcagttcaccatcagagccagagagctgcaaaatatctataagtgcattatgctgaaaaatatctcccaagatgagaggctggatgtgctgttaactcttaaacacactgtaaaggaacatgaatgtaaactaactcaggaaattctagaattgattgacagagaggttgaccttatgatgagaggagtcaaacatcataaccttgaaggactcagaaaaagaattgcgacactcttttttcattatatcaaaacacctctgtttaatcctgaagttgcaaaataccttaaggtccctcaagacccattgaaattttataagaagatttacttttgccacagttgccagctttatttgccttctacagaattttctgtatcatccacctcacgccgcatataccggtgtcgtaactgcattaaccttcagaatgaggctcaaaaacgagaatcatttttgaagtacaaatgtttacttcaacagctctactatacagaagctgattatgaagatgattctaaaattgctttcttgatgcagctacaagacattcagtacctgacagagaacatctgggcgtcccagtcagtcctcagtgcttgcgacaatctcagtgatctggtcatggtcagatggaataaatccctggagtggtccccctggaactgcattcttcttaccaaagatgaagcagctgctcatctcaagctaacaagtattgaagagggatatgaacgctcatttattcacaagatcaaacacaaacatatcctggctaagaactatttttctcaggttccagtgctggcttcatttatacttgatgatggtgaaattgatgagatcagatggaagtatcactcagacacaacacctaagattatagaatcccagaggcctcctcattaggtgatccaggagtatttgtttgatgatcggcattttgttcactgc

SEQ ID NO: 144379 - DNA, 3296 bp, Homo sapiens
  Payload ID: 8526
  Gene Symbol: IQUB
  Gene Name: IQ motif and ubiquitin domain containing
  Uniprot ID: Q8NA54
  ENST ID: ENST00000466202
  CDS Start-End: 578-2953
gagcaactgccggcctccgcccccagccgcagccggtcactggcggcgccttccgcgccaagcttgggggccttttcggggtcctacatggcacggcttccgacccccggcccgggacggggctcgcaggccccagaggggcaggctggagaaggaggaggttaggtgtcttcaggagggttgctgagcccaaggacgcgccatcgccgcggagaaggagccggaccccttgggcggagcgcccaatgtgtggtccctcacgccgtcccgcaccttgctttttagggttctttttccgctttctgagcccttttataccttacgtttagaaggggaaaatcatcctcccacaccttctccccgactttttgccttttttgtcttgaagttacccaaaggtctgtgtattgttctcagtggtcccaagaattactcgaatatagttgtttttctgagggaggatggatggagataactatcctgatcccagtgtcactttttaaggcattcgcttcaagagacaagcagtttagaatcaggcagaactggattgcaaaatttatgggcagaccggaaaatgtctaatcaacaggagaagtatgaagctcagaatatagtcaattcaacagaagagagtgatgatgcttttgatactgtcactattccagttccctcagaagagcctcaagagtcagatcaaactgaagagcatgaatctggaatagaacaattcagtgagagccatgcaatacatgttgaggagcagagtgaccaaagcttttcaagcctggaaccagacaatgaacaactcatggaagaggttatatcaccaagacaagtttcatatactccgcaacatcatgaaaagcaatatgcaatgcagaggccaaatgatgatagtttggcatttctggataaaataaagtctgtaaaggaatctttgcaagaatcagtggaagattctctagcaacagtaaaagttgtacttattccagtgggccaggaaattgtaataccttttaaggttgataccattcttaaatatcttaaggaccatttttcacacttattaggtatcccacattctgtactgcagataagatactcaggaaaaattcttaaaaataatgagactctagtacaacatggagttaagccacaggaaattgtacaagtggaaatcttttctacaaatccagatctgtatccagtcagaagaatagatggattaactgatgtctctcaaatcataactgtcactgtccaaactggacttgatcaataccagcaggtacctgttgagattgtcaaatctgactttcacaaaccatttcttggtggattcagacataaagtaacaggagtagagtatcacaatgctggaacacaaactgtacctaaaaggattcccgaaagactcagtatattttgtagggatacgcagacagtttttcagaaaaaaaatctccaacaaactacaaatacaacatccacacagatgactaacattggtgtatatgtatcaaatatgactgataaactggtaacaccaggaaagtatttttcagcagcagaataccatgctcaaagactaaaggcggtgatagtgatacagacttactacaggcaatggcatgctaaaatcttcgtagagaatttaagaagacagaaaagcttaagactggaatgggaaacacagcaagaactaaggaagataagagaaaaagaagaatggataaaattggactatcaccggaggcataatcctaaaacaaatgaagattttgaatttctttataatgcattagaattctggcggcaagaagaacttacacgtattaaccaatcttttactggagctgaaaggaaagctgctctgtgtgaacttctggaaaaagagactcagataattgcttccattgggagacatagatacattgcttatatggcaaatcaggaagcagcaatacaagcttttttggataagtgttcagctccaaaaatatggagaacccctaatggcaaaacaattgagatggatacgcagttcaccatcagagccagagagctgcaaaatatctataagtgcattatgctgaaaaatatctcccaagatgagaggctggatgtgctgttaactcttaaacacactgtaaaggaacatgaatgtaaactaactcaggaaattctagaattgattgacagagaggttgaccttatgatgagaggagtcaaacatcataaccttgaaggactcagaaaaagaattgcgacactcttttttcattatatcaaaacacctctgtttaatcctgaagttgcaaaataccttaaggtccctcaagacccattgaaattttataagaagatttacttttgccacagttgccagctttatttgccttctacagaattttctgtatcatccacctcacgccgcatataccggtgtcgtaactgcattaaccttcagaatgaggctcaaaaacgagaatcatttttgaagtacaaatgtttacttcaacagctctactatacagaagctgattatgaagatgattctaaaattgctttcttgatgcagctacaagacattcagtacctgacagagaacatctgggcgtcccagtcagtcctcagtgcttgcgacaatctcagtgatctggtcatggtcagatggaataaatccctggagtggtccccctggaactgcattcttcttaccaaagatgaagcagctgctcatctcaagctaacaagtattgaagagggatatgaacgctcatttattcacaagatcaaacacaaacatatcctggctaagaactatttttctcaggttccagtgctggcttcatttatacttgatgatggtgaaattgatgagatcagatggaagtatcactcagacacaacacctaagattatagaatcccagaggcctcctcattaggtgatccaggagtatttgtttgatgatcggcattttgttcactgctaatagggtaatacagaggtcacagagtatggaaatggaatttaatctgtttattgattttgttttttgtttttcatagtattttgagttatataaagagaaaacatttctatataagtaagtattctttgttaggaagttggtgctaaattgaaatgcaattttgttactgaaattaatattttggggtaaagaaaacattttaaaatgtgttttcacattaaattttttaaattttttcaagtatattagagttaaaatctaacaaacagccaaataaaaactagacaactttcaa

SEQ ID NO: 144380 - DNA, 2594 bp, Homo sapiens
  Payload ID: 8527
  Gene Symbol: IQCB1
  Gene Name: IQ motif containing B1
  Uniprot ID: Q15051
  ENST ID: ENST00000310864
  CDS Start-End: 216-2012
cgcctccaggccccttcccgcgtcgcgacgcacgctgccccggaaggccgcggcgctgtagtgcggcgtgggagccccaggttctttagtggaagaacgcgaagcgaggatgagtgatccgtggaggcagtaacaggcgcggcgagggagaagtgattcccgaagaatcaaggctgggccggacccggtggcctggcaacagggtaataagagaaatgaagccaacaggtacagacccaaggatcttatctatagctgctgaagttgcaaaaagccctgagcagaatgtccctgttatactgttgaagttaaaagaaataataaacatcacacctttaggaagctcagagttgaagaaaatcaaacaagatatatattgttatgatctcattcaatattgcctcttggtcctcagtcaagattattctcgaatccagggtggttggactacaatttcccagcttacacagatattaagccattgctgtgtgggcttggagccaggagaagatgcagaggaattttacaatgaattacttccatcagctgcagaaaattttctagttttggggagacaattacaaacatgttttatcaatgcagctaaggctgaagaaaaagatgaattactacactttttccaaattgtgactgattctctcttctggcttttgggaggccatgttgaacttattcagaatgtactacaaagtgatcatttcttacatttactgcaagctgacaatgtccaaataggatctgcagtcatgatgatgctacagaatatactacagatcaacagtggtgatttactcagaataggaagaaaagccctgtattcaattttagatgaagttattttcaagcttttttcaactcctagtccagttataagaagtactgctacaaaactcctactgttgatggctgaatcccatcaggaaattttgattttactgagacaaagtacctgctacaaaggactcagacgtctactaagtaaacaggaaactgggactgaattcagtcaagaacttagacagcttgttggccttttaagcccaatggtctatcaggaagtagaagagcagaaactacatcaagcagcatgcttgattcaagcctattggaagggttttcagacaagaaagagattaaagaagcttccatctgctgtgattgctttgcagaggagtttcagatccaaacgatcaaagatgttgctggagataaataggcagaaggaagaagaggacctcaaattacaattgcaacttcaaagacagagagccatgagactttcccgagaattgcagctgagtatgctcgaaatagttcatccaggtcaggtggagaaacactatcgggaaatggaagagaaatcagcactgattatccagaaacattggagagggtacagggaaaggaaaaattttcaccaacagaggcagtctctcatagagtataaagcagctgtcacacttcaaagagcagcgcttaaattcctagcgaagtgccgtaagaaaaagaaactatttgctccttggcgaggactccaagaactcactgatgcacgccgagttgaactgaagaaacgagtggatgactatgtcagaagacatttgggctctccaatgtcagatgtggtcagtagggagctccatgcccaagctcaagaacgactgcaacactactttatgggcagggccctagaagagcgagcccagcagcacagagaagctctgatagcacagatcagcaccaacgttgaacagctaatgaaggcaccaagtctgaaggaggcagaagggaaagaacctgagctcttcctaagtagatccaggcctgtggcagccaaggccaagcaggcccatctcacaaccctgaagcacatacaagcaccctggtggaagaagcttggagaagaatctggagatgagattgatgttccaaaggatgagcttagtatagaattagaaaatttattcattggtggaaccaaaccaccttagtgagtaaccctaagaattgacacaaatctcatattttaggagattatattggttctgcctctggcatgctggtagactagggccatcctaacttattattttccagaggttctcctccagacaagacctgcagtaagcaaagagttatattctacctctctctcaattttctttttcttttctctgtatcctcatcgttagccacacacagatttgtgtggcttttattgtagaactaaacttagcatagtgttctgttgtttacatgaagtgtgtttttctttggtttcttctgttttccaactaaatatttttttctaaataaatattttcaacaattgatttgaaaaatttgtcaggattatttcaacttttcacatttgttatctgaaattcctatttcctgttaacataggaggtgtgtgcagactttattaatgtgaggaaaagaaatgctcaattgaaggacatttccctgttttctataaagcaatggttgaactcattttctattttgttatttctaaaaggaactgcataccaaaaaaatgcattctttctattaaactgtgagaactacat

SEQ ID NO: 144381 - DNA, 1919 bp, Homo sapiens
  Payload ID: 8527
  Gene Symbol: IQCB1
  Gene Name: IQ motif containing B1
  Uniprot ID: Q15051
  ENST ID: ENST00000349820
  CDS Start-End: 171-1568
ggccgcggcgctgtagtgcggcgtgggagccccaggttctttagtggaagaacgcgaagcgaggatgagtgatccgtggaggcagtaacaggcgcggcgagggagaagtgattcccgaagaatcaaggctgggccggacccggtggcctggcaacagggtaataagagaaatgaagccaacaggtacagacccaaggatcttatctatagctgctgaagttgcaaaaagccctgagcagaatgtccctgttatactgttgaagttaaaagaaataataaacatcacacctttaggaagctcagagttgaagaaaatcaaacaagatatatattgttatgatctcattcaatattgcctcttggtcctcagtcaagattattctcgaatccagggtggttggactacaatttcccagcttacacagatattaagccattgctgtgtgggcttggagccaggagaagatgcagaggaattttacaatgaattacttccatcagctgcagaaaattttctagttttggggagacaattacaaacatgttttatcaatgcagctaaggctgaagaaaaagatgaattactacactttttccaaattgtgactgattctctcttctggcttttgggaggccatgttgaacttattcagaatgtactacaaagtgatcatttcttacatttactgcaagctgacaatgtccaaataggatctgcagtcatgatgatgctacagaatatactacagatcaacagatccaaacgatcaaagatgttgctggagataaataggcagaaggaagaagaggacctcaaattacaattgcaacttcaaagacagagagccatgagactttcccgagaattgcagctgagtatgctcgaaatagttcatccaggtcaggtggagaaacactatcgggaaatggaagagaaatcagcactgattatccagaaacattggagagggtacagggaaaggaaaaattttcaccaacagaggcagtctctcatagagtataaagcagctgtcacacttcaaagagcagcgcttaaattcctagcgaagtgccgtaagaaaaagaaactatttgctccttggcgaggactccaagaactcactgatgcacgccgagttgaactgaagaaacgagtggatgactatgtcagaagacatttgggctctccaatgtcagatgtggtcagtagggagctccatgcccaagctcaagaacgactgcaacactactttatgggcagggccctagaagagcgagcccagcagcacagagaagctctgatagcacagatcagcaccaacgttgaacagctaatgaaggcaccaagtctgaaggaggcagaagggaaagaacctgagctcttcctaagtagatccaggcctgtggcagccaaggccaagcaggcccatctcacaaccctgaagcacatacaagcaccctggtggaagaagcttggagaagaatctggagatgagattgatgttccaaaggatgagcttagtatagaattagaaaatttattcattggtggaaccaaaccaccttagtgagtaaccctaagaattgacacaaatctcatattttaggagattatattggttctgcctctggcatgctggtagactagggccatcctaacttattattttccagaggttctcctccagacaagacctgcagtaagcaaagagttatattctacctctctctcaattttctttttcttttctctgtatcctcatcgttagccacacacagatttgtgtggcttttattgtagaactaaacttagcatagtgttctgttgtttacatgaagtgtgtttttctttggtttcttctgttttccaactaaatatttttttctaaataaatattttcaacaattgatttgaaaaa

SEQ ID NO: 144382 - DNA, 2253 bp, Homo sapiens
  Payload ID: 8527
  Gene Symbol: IQCB1
  Gene Name: IQ motif containing B1
  Uniprot ID: Q15051
  ENST ID: ENST00000393650
  CDS Start-End: 216-1127
cgcctccaggccccttcccgcgtcgcgacgcacgctgccccggaaggccgcggcgctgtagtgcggcgtgggagccccaggttctttagtggaagaacgcgaagcgaggatgagtgatccgtggaggcagtaacaggcgcggcgagggagaagtgattcccgaagaatcaaggctgggccggacccggtggcctggcaacagggtaataagagaaatgaagccaacaggtacagacccaaggatcttatctatagctgctgaagttgcaaaaagccctgagcagaatgtccctgttatactgttgaagttaaaagaaataataaacatcacacctttaggaagctcagagttgaagaaaatcaaacaagatatatattgttatgatctcattcaatattgcctcttggtcctcagtcaagattattctcgaatccagggtggttggactacaatttcccagcttacacagatattaagccattgctgtgtgggcttggagccaggagaagatgcagaggaattttacaatgaattacttccatcagctgcagaaaattttctagttttggggagacaattacaaacatgttttatcaatgcagctaaggctgaagaaaaagatgaattactacactttttccaaattgtgactgattctctcttctggcttttgggaggccatgttgaacttattcagaatgtactacaaagtgatcatttcttacatttactgcaagctgacaatgtccaaataggatctgcagtcatgatgatgctacagaatatactacagatcaacagtggtgatttactcagaataggaagaaaagccctgtattcaattttagatgaagttattttcaagcttttttcaactcctagtccagttataagaagtactgctacaaaactcctactgttgatggctgaatcccatcaggaaattttgattttactgagacaaagtacctgctacaaaggactcagacgtctactaagtaaacaggaaactgggactgaattcagtcaagaacttagacagcttgttggccttttaagcccaatggtctatcaggaagtagaagagcagatccaaacgatcaaagatgttgctggagataaataggcagaaggaagaagaggacctcaaattacaattgcaacttcaaagacagagagccatgagactttcccgagaattgcagctgagtatgctcgaaatagttcatccaggtcaggtggagaaacactatcgggaaatggaagagaaatcagcactgattatccagaaacattggagagggtacagggaaaggaaaaattttcaccaacagaggcagtctctcatagagtataaagcagctgtcacacttcaaagagcagcgcttaaattcctagcgaagtgccgtaagaaaaagaaactatttgctccttggcgaggactccaagaactcactgatgcacgccgagttgaactgaagaaacgagtggatgactatgtcagaagacatttgggctctccaatgtcagatgtggtcagtagggagctccatgcccaagctcaagaacgactgcaacactactttatgggcagggccctagaagagcgagcccagcagcacagagaagctctgatagcacagatcagcaccaacgttgaacagctaatgaaggcaccaagtctgaaggaggcagaagggaaagaacctgagctcttcctaagtagatccaggcctgtggcagccaaggccaagcaggcccatctcacaaccctgaagcacatacaagcaccctggtggaagaagcttggagaagaatctggagatgagattgatgttccaaaggatgagcttagtatagaattagaaaatttattcattggtggaaccaaaccaccttagtgagtaaccctaagaattgacacaaatctcatattttaggagattatattggttctgcctctggcatgctggtagactagggccatcctaacttattattttccagaggttctcctccagacaagacctgcagtaagcaaagagttatattctacctctctctcaattttctttttcttttctctgtatcctcatcgttagccacacacagatttgtgtggcttttattgtagaactaaacttagcatagtgttctgttgtttacatgaagtgtgtttttctttggtttcttctgttttccaactaaatatttttttctaaataaatattttcaacaattgatttgaaaaa

SEQ ID NO: 144383 - DNA, 701 bp, Homo sapiens
  Payload ID: 8527
  Gene Symbol: IQCB1
  Gene Name: IQ motif containing B1
  ENST ID: ENST00000498104
  CDS Start-End: 448-701
cggcgtgggagccccaggttctttagtggaagaacgcgaagcgaggatgagtgatccgtggaggcagtaacaggcgcggcgagggagaagtgattcccgaagaatcaaggctgggccggacccggtggcctggcaacagggtaataagagaaatgaagccaacaggtacagacccaaggatcttatctatagctgctgaagttgcaaaaagccctgagcagaatgtccctgttatactgttgaagttaaaagccattgctgtgtgggcttggagccaggagaagatgcagaggaattttacaatgaattacttccatcagctgcagaaaattttctagttttggggagacaattacaaacatgttttatcaatgcagctaagtactacaaagtgatcatttcttacatttactgcaagctgacaatgtccaaataggatctgcagtcatgatgatgctacagaatatactacagatcaacagtggtgatttactcagaataggaagaaaagccctgtattcaattttagatgaagttattttcaagcttttttcaactcctagtccagttataagaagtactgctacaaaactcctactgttgatggctgaatcccatcaggaaattttgattttactgagacaaagtacctgctacaaaggactcagacgtctactaagtaaacaggaaactgggactga

SEQ ID NO: 144384 - DNA, 988 bp, Homo sapiens
  Payload ID: 8527
  Gene Symbol: IQCB1
  Gene Name: IQ motif containing B1
  ENST ID: ENST00000460108
  CDS Start-End: 559-988
gccgcggcgctgtagtgcggcgtgggagccccaggttctttagtggaagaacgcgaagcgaggatgagtgatccgtggaggcagtaacaggcgcggcgagggagaagtgattcccgaagaatcaaggctgggccggacccggtggcctggcaacagggtaataagagaaatgaagccaacaggtacagacccaaggatcttatctatagctgctgaagttgcaaaaagccctgagcagaatgtccctgttatactgttgaagttaaaagccattgctgtgtgggcttggagccaggagaagatgcagaggaattttacaatgaattacttccatcagctgcagaaaattttctagttttggggagacaattacaaacatgttttatcaatgcagctaaggctgaagaaaaagatgaattactacactttttccaaattgtgactgattctctcttctggcttttgggaggccatgttgaacttattcagaatgtactacaaagtgatcatttcttacatttactgcaagctgacaatgtccaaataggatctgcagtcatgatgatgctacagaatatactacagatcaacagtggtgatttactcagaataggaagaaaagccctgtattcaattttagatgaagttattttcaagcttttttcaactcctagtccagttataagaagtactgctacaaaactcctactgttgatggctgaatcccatcaggaaattttgattttactgagacaaagtacctgctacaaaggactcagacgtctactaagtaaacaggaaactgggactgaattcagtcaagaacttagacagcttgttggccttttaagcccaatggtctatcaggaagtagaagagcagaaactacatcaagcagcatgcttgattcaagcctattggaagggttttcagacaagaaagagattaaagaagcttccatctgctgtgattgctttgcagaggagtt

SEQ ID NO: 144385 - DNA, 602 bp, Homo sapiens
  Payload ID: 8527
  Gene Symbol: IQCB1
  Gene Name: IQ motif containing B1
  ENST ID: ENST00000462442
  CDS Start-End: 340-602
cgcgtcgcgacgcacgctgccccggaaggccgcggcgctgtagtgcggcgtgggagccccaggttctttagtggaagaacgcgaagcgaggatgagtgatccgtggaggcagtaacaggcgcggcgagggagaagtgattcccgaagaatcaaggctgggccggacccggtggcctggcaacagggtagtagccttaaaatagataaataattgtctttttgtgtcaaatttcatgaatttaatgtaaagatgggagaagtgttgaattataggagaaacactcgagaaagtttacagatggtttccataacaggtggtttttcagggtaataagagaaatgaagccaacaggtacagacccaaggatcttatctatagctgctgaagttgcaaaaagccctgagcagaatgtccctgttatactgttgaagttaaaagaaataataaacatcacacctttaggaagctcagagttgaagaaaatcaaacaagatatatattgttatgatctcattcaatattgcctcttggtcctcagtcaagattattctcgaatccagggtggttggactacaatttcccagcttacacagatattaag

SEQ ID NO: 144386 - DNA, 2027 bp, Homo sapiens
  Payload ID: 8528
  Gene Symbol: IQCC
  Gene Name: IQ motif containing C
  Uniprot ID: Q4KMZ1
  ENST ID: ENST00000291358
  CDS Start-End: 22-1422
cgggcctggcagttggcgcccatggagccagagctgctggttcggaaggtgtctgcattgcaggcctgcgtccggggcttcttggtccgacgccagttccagagcctgcgagctgagtatgaggcgattgtacgagaggtcgagggcgacctgggcacgcttcagtggaccgagggccgcattcccaggccgcgattcctcccagagaaggcaaaatcccatcagacctggaaagcaggagacagggtagcaaatccagagcaggggctgtggaaccacttcccatgtgaagagtctgagggagaggccacctgggaggagatggtgctgaagaagtcaggagagagctcagcaaatcaaggaagcctctgcagagatcacagctcctggcttcagatgaagcagaacaggaaacccagccaagagaagaccagagacacgacaaggatggagaatccagaagccacagatcaaagactgccccacagccaacctcagcttcaagagcttcagtaccaccgcagccacttggccatggaattgctgtggctgcaacaggccatcaatagccgtaaggagtacctacttcttaaacaaacactgagatccccagaggcgggcccgatcagagaggaaccccgcgtgttcctagaacatggggaacaggcctgtgagagggaccagtcacaaccaagcgcaccactggaggaccagtcctacagagacaggaccactggagagctagaacaggaggatgactcctgtcacagggtcaaatcaccccacagatccccaggaagtttggccactacacaaaaaaacattgctggggctaagtgcagagaaccatgctacagcaagtctggaccaccgtcgtctataccatcaaacagccaggccttgggggacaggctcaccaaagggccagacgatggaagacagacctttggagggacctgcctgctgcagatgaaaatcctggaggaccagacccccagaggtttaaaacctaggaaccattgtcccaggaagtccaggacacagctgtctgcactctatgaggactcaaatattaaggagatgtctcccagaaaactagaccacaaagagcctgactgccgaacagtcaggacacaagagttgggcctctcagaggaccacatcatctgggatggtaccttgggggggccagagcatagtgtcctcgatctctggaggactaaaccacccaaaggccaggcccccactgatagaagctccagagatggaacctccaatgagcctagtcatgaaggacagaaaaagcagaggactataccatggagatcaaagtcacctgagattctgtcttctacaaaggcaggctgtacaggagaggaacagtggaggggcaggccatggaaaacagaaccacctggctagaccctaggaagccaggagaggatcaggttccaaaggggaatgctatgaaagggcagtgagacaagacctcatcctacctccctgaccagctctggcttctgctcctgcccctggccattggtgactagtggggccaagagaagctggagcagagagctggcatgagtatagggaaggaggaaggacacattttcaatcctctgcctgtagctcaatccaaatttgtggataaggggccgggtgcagtggctcacacctgtaatcccagcactttgggaggccaaggtgagtggatcacctgaggtcagaagtttgagaccagcctgaccaacatggtgaaatgaaaccccatctcaactaaaaatataaaaattagccaggcgtggtggtgcatgcctgtagtcccagttactcgggaggctgagacaggagaatcgcttgaacccaggagatggagattgcagtaggccaagatgatgccactgcactccagcctgggctacagagcgagacacggtctcaaaaaacaaatgtgtggctaaggagttacctgggggaagtagaatgagaggtctgttgggaataaaggtttttcttagattctg

SEQ ID NO: 144387 - DNA, 2252 bp, Homo sapiens
  Payload ID: 8528
  Gene Symbol: IQCC
  Gene Name: IQ motif containing C
  Uniprot ID: Q4KMZ1
  ENST ID: ENST00000537469
  CDS Start-End: 12-1652
agttggcgcccatggagccagagctgctggttcggaaggtgtctgcattgcaggtgcgggggcgggcgcggggttcacaggatttttcctttagggaaatcatggggtctcgtacctggacctcccagcgagatgctaccacgttcagtcccctaactgcgcgccaacctctggagataccggctgtccccaaccgcgctgaggaaagctgggacccacggactccctgccctgcgcgtccccactcccaccacacgctcgcgccggatcagggaaacgggaagagccttaaggcctgcgtccggggcttcttggtccgacgccagttccagagcctgcgagctgagtatgaggcgattgtacgagaggtcgagggcgacctgggcacgcttcagtggaccgagggccgcattcccaggccgcgattcctcccagagaaggcaaaatcccatcagacctggaaagcaggagacagggtagcaaatccagagcaggggctgtggaaccacttcccatgtgaagagtctgagggagaggccacctgggaggagatggtgctgaagaagtcaggagagagctcagcaaatcaaggaagcctctgcagagatcacagctcctggcttcagatgaagcagaacaggaaacccagccaagagaagaccagagacacgacaaggatggagaatccagaagccacagatcaaagactgccccacagccaacctcagcttcaagagcttcagtaccaccgcagccacttggccatggaattgctgtggctgcaacaggccatcaatagccgtaaggagtacctacttcttaaacaaacactgagatccccagaggcgggcccgatcagagaggaaccccgcgtgttcctagaacatggggaacaggcctgtgagagggaccagtcacaaccaagcgcaccactggaggaccagtcctacagagacaggaccactggagagctagaacaggaggatgactcctgtcacagggtcaaatcaccccacagatccccaggaagtttggccactacacaaaaaaacattgctggggctaagtgcagagaaccatgctacagcaagtctggaccaccgtcgtctataccatcaaacagccaggccttgggggacaggctcaccaaagggccagacgatggaagacagacctttggagggacctgcctgctgcagatgaaaatcctggaggaccagacccccagaggtttaaaacctaggaaccattgtcccaggaagtccaggacacagctgtctgcactctatgaggactcaaatattaaggagatgtctcccagaaaactagaccacaaagagcctgactgccgaacagtcaggacacaagagttgggcctctcagaggaccacatcatctgggatggtaccttgggggggccagagcatagtgtcctcgatctctggaggactaaaccacccaaaggccaggcccccactgatagaagctccagagatggaacctccaatgagcctagtcatgaaggacagaaaaagcagaggactataccatggagatcaaagtcacctgagattctgtcttctacaaaggcaggctgtacaggagaggaacagtggaggggcaggccatggaaaacagaaccacctggctagaccctaggaagccaggagaggatcaggttccaaaggggaatgctatgaaagggcagtgagacaagacctcatcctacctccctgaccagctctggcttctgctcctgcccctggccattggtgactagtggggccaagagaagctggagcagagagctggcatgagtatagggaaggaggaaggacacattttcaatcctctgcctgtagctcaatccaaatttgtggataaggggccgggtgcagtggctcacacctgtaatcccagcactttgggaggccaaggtgagtggatcacctgaggtcagaagtttgagaccagcctgaccaacatggtgaaatgaaaccccatctcaactaaaaatataaaaattagccaggcgtggtggtgcatgcctgtagtcccagttactcgggaggctgagacaggagaatcgcttgaacccaggagatggagattgcagtaggccaagatgatgccactgcactccagcctgggctacagagcgagacacggtctcaaaaaacaaatgtgtggctaaggagttacctgggggaagtagaatgagaggtctgttgggaataaaggtttttcttaga

SEQ ID NO: 144388 - DNA, 1369 bp, Homo sapiens
  Payload ID: 8529
  Gene Symbol: IQCD
  Gene Name: IQ motif containing D
  Uniprot ID: Q96DY2
  ENST ID: ENST00000299732
  CDS Start-End: 192-1235
agacaccgagtctcgccttctgagattggcgggtaacctagcaacgcagggaccgcggcggtaactgtggctagggaaacctggagcggtcagagcaggatggccagagacaataaaagcacgagacccaagtagtctaccgaagtctccatctctgtggacctacagaggcacagagggctgctcacaagatggctttagacattctcgccatggcccctttgtatcaggcccctgccatcaacagaatagggccaaagacagacccatctaaaaggccagctgatccactaaaacccttggttctctctaggaccaaactcaccaccattgaggccaaaaggatcatgtccatcctggatgaggcgatctacaaggtggagctggtgaccttgctgtcgtatgtggcatccaacagagaggatatggaggggatgctgggggaggacgtcatgagggcagtgagagagcatgaggatctctgccaggtcctccttgaaaacgtcaggtgcctgaaagagaaagaaaggcaattgcaggagcagaaagaggctgaggaggaagggtggctcagagaccgcctcctttccatagagctgcagaaatccagcctctcaccacttatgcagcagatcaaagactccaccaagaacgtccttagactcttgctcagcaacccccaggctgctaggctcctgcagatgcagacacagggtagaagtgcagaagcccagaattttattgacagcctgatagagctccgtggtttcctgtttgaaaaactactcactagtcccatggaagcgagggataaggcccagttcttacaggatatcagtagacagaatagtaataaccaacaaatcattgatactcttgaaaaggaattggcggagagaatgaagaacaggaatgcagaggaggagttggaggatctggacgctgttcacagggaggagaagatctcgctggaggagctcaggcggaggcacaaagtgctggtgggagagtttgcgcagatccgggaagagcgggagatcaactccaagaaaaggatggaggcagagcaggagatggtgcgcatggtacgggcggccacgctcatccaggccctatggaagggctatctggtgcgctccctgctcagatccaagaagaagcggggcaagggcaaagcaaaggacaaggagaagggcaagcagaaaggcaaggagaagggcaagggcaagaaatgagctctccacccagcccgctcctgacccttatcttcccagagaccaggccaggaaggcccgagatggagagcactaaattcacggctttcatgtttttatttaataaattaaaaagtatttgaagccacattgaa

SEQ ID NO: 144389 - DNA, 1673 bp, Homo sapiens
  Payload ID: 8529
  Gene Symbol: IQCD
  Gene Name: IQ motif containing D
  Uniprot ID: Q96DY2
  ENST ID: ENST00000416617
  CDS Start-End: 192-1541
agacaccgagtctcgccttctgagattggcgggtaacctagcaacgcagggaccgcggcggtaactgtggctagggaaacctggagcggtcagagcaggatggccagagacaataaaagcacgagacccaagtagtctaccgaagtctccatctctgtggacctacagaggcacagagggctgctcacaagatggctttagacattctcgccatggcccctttgtatcaggcccctgccatcaacagaatagggccaaagacagacccatctaaaaggccagctgatccactaaaacccttggttctctctaggaccaaactcaccaccattgaggccaaaaggatcatgtccatcctggatgaggcgatctacaaggtggagctggtgaccttgctgtcgtatgtggcatccaacagagaggatatggaggggatgctgggggaggacgtcatgagggcagtgagagagcatgaggatctctgccaggtcctccttgaaaacgtcaggtgcctgaaagagaaagaaaggcaattgcaggagcagaaagaggctgaggaggaagggtggctcagagaccgcctcctttccatagagctgcagaaatccagcctctcaccacttatgcagcagatcaaagactccaccaagaacgtccttagactcttgctcagcaacccccaggctgctaggctcctgcagatgcagacacagggtagaagtgcagaagcccagaattttattgacagcctgatagagctccgtggtttcctgtttgaaaaactactcactagtcccatggaagcgagggataaggcccagttcttacaggatatcagtagacagaatagtaataaccaacaaatcattgatactcttgaaaaggaattggcggagagaatgaagaacaggaatgcagaggtggaaaaggagaactttgtgatccaagaactgaaaaaccacctgcaccaggtgctcaagttctcagagaacagcctcgttcgcactaagcaggaggctgagaagcagcagaaggccgatttccgggcatcacaggccagggtggccaagatccagcaggagatcctgcagctgcagtcacagttttacaacctggtcatggagaaccgggaggcagagcaggcgctgaggaagaagaaatataaagtggaaacggaaatcgagaactggatccagaaatatgatacagagatgggtgagaagcaggaggagttggaggatctggacgctgttcacagggaggagaagatctcgctggaggagctcaggcggaggcacaaagtgctggtgggagagtttgcgcagatccgggaagagcgggagatcaactccaagaaaaggatggaggcagagcaggagatggtgcgcatggtacgggcggccacgctcatccaggccctatggaagggctatctggtgcgctccctgctcagatccaagaagaagcggggcaagggcaaagcaaaggacaaggagaagggcaagcagaaaggcaaggagaagggcaagggcaagaaatgagctctccacccagcccgctcctgacccttatcttcccagagaccaggccaggaaggcccgagatggagagcactaaattcacggctttcatgtttttatttaataaattaaaaagtatttgaagccacattg

SEQ ID NO: 144390 - DNA, 1872 bp, Homo sapiens
  Payload ID: 8529
  Gene Symbol: IQCD
  Gene Name: IQ motif containing D
  ENST ID: ENST00000546692
  CDS Start-End: 375-1613
tggctagggaaacctggagcggtcagagcagaatgctgtctgtatgcctggctggtccccgcctgacacatgtgcctgagatgcctccacacttggtcttcctgcccttgtggccctaacaccctcacaaagctgaaaactgcttccagtgaaaggttctgtgtaaaagcgacagaggacctaagatgaactcttgatgtcaacagttgtggtttctgcagccacactaaccacacagatgtcagcacagctgcactcacacctacttcttcattttgcaggatggccagagacaataaaagcacgagacccaagtagtctaccgaagtctccatctctgtggacctacagaggcacagagggctgctcacaagatggctttagacattctcgccatggcccctttgtatcaggcccctgccatcaacagaatagggccaaagacagacccatctaaaaggccagctgatccactaaaacccttggttctctctaggaccaaactcaccaccattgaggccaaaaggatcatgtccatcctggatgaggcgatctacaaggtggagctggtgaccttgctgtcgtatgtggcatccaacagagaggatatggaggggatgctgggggaggacgtcatgagggcagtgagagagcatgaggatctctgccaggtcctccttgaaaacgtcaggtgcctgaaagagaaagaaaggcaattgcaggagcagaaagaggctgaggaggaagggtggctcagagaccgcctcctttccatagagctgcagaaatccagcctctcaccacttatgcagcagatcaaagactccaccaagaacgtccttagactcttgctcagcaacccccaggctgctaggctcctgcagatgcagacacagggtagaagtgcagaagcccagaattttattgacagcctgatagagctccgtggtttcctgtttgaaaaactactcactagtcccatggaagcgagggataaggcccagttcttacaggatatcagtagacagaatagtaataaccaacaaatcattgatactcttgaaaaggaattggcggagagaatgaagaacaggaatgcagaggtggaaaaggagaactttgtgatccaagaactgaaaaaccacctgcaccaggtgctcaagttctcagagaacagcctcgttcgcactaagcaggaggctgagaagcagcagaaggccgatttccgggcatcacaggccagggtggccaagatccagcaggagatcctgcagctgcagtcacagttttacaacctggtcatggagaaccgggaggcagagcaggcgctgaggaaggtgccccgggaagcagcgaggatgggccgagggggcccctggtgggggggatgggtgggactgttccatcactcctggaggtccagcagtgttgggcagggcaggactgcaccagctactcaggaagtggcttggtggaggggaagggcacaggagcagggaaggcccaaatccaagccagtgtctcctgggaggcaggaaggggcagcacacaggcctggggacaggggacaaactgggatcctgtcccagcattgctgcatgccagctttgtgaccttgggcaagttcctcaactcctgagaccccacagggataatacccacatcgtcagaggctgggtgccctgcaaaggaatgaagaagtagcatgtaaagctcaggctaattactcaactcctgcccagctgccgatttcacacctcagaaatgaaaatgctaacattggtcttaatggttgttacatgagaattacatgagatggtagtgagagagctggtgcatagtaagtgttcaataaatatcatttctgaccgg

SEQ ID NO: 144391 - DNA, 2179 bp, Homo sapiens
  Payload ID: 8530
  Gene Symbol: IQCE
  Gene Name: IQ motif containing E
  Uniprot ID: Q6IPM2
  ENST ID: ENST00000325979
  CDS Start-End: 287-2179
cgcagaggccgccgcttccaggaagctctccgggacgccgcgccctcgcctctgggcgcctgcgagtctgcggcccgcaggtgacggagctcacggtaatgtttgactagagtcaccacgctcgtggattttgttttcctatttctgtctttctgaagttcatgtgttgagctcacatgttgctgtccggcacctctgaatccacgtgttggcttttccagagtcaccttatctctctaagccgagaaaagtggcctcctggaggtccctcaggacggcagggagcatgcctctgggcggccgagcgtccctgaccccgcagaagctgtggctgggaaccgcaaagccaggaagtctgacccaggccctgaactcacccctcacctgggagcatgcgtggactggcgtccccggcggcactcctgactgtctgacagacaccttcagagtgaagaggccacatctcaggcgctctgccagcaacggtcatgtccctgggactcctgtctacagagaaaaagaagatatgtatgacgagattattgagttaaagaagtcattgcacgtgcagaagagcgacgtggacctgatgagaacgaagctccggcgcctggaggaggaaaacagcaggaaggaccggcagatagagcagctcctggatcccagccgcggcacggattttgttcggactctggcagagaaaaggcccgatgccagttgggtcattaacgggctgaagcagaggatcctgaagctggaacagcagtgcaaggagaaggacggcaccatcagcaaactccagaccgatatgaagactaccaacctggaagagatgcggatcgccatggagacatactacgaggaggtgcatcgtctccagaccctcttggcaagttctgaaaccaccggaaagaagcccctgggggagaagaagacgggcgccaaaaggcagaagaagatgggcagtgccctcctgagcttgtcccggagtgtccaggagctcacggaagagaaccagagcctgaaggaggacctggaccgcgtgctgagcacctccccaaccatctccaagacacagggttatgtggagtggagcaagccccggctgctgaggcgcattgtggagctggagaagaaactaagtgtgatggagagctcaaaatcacacgccgcagagccagtcagatcacacccgccagcctgccttgcatccagctctgcgctgcacagacagccacgaggggaccgcaacaaggaccacgagcgtctccgaggggctgtgagagacctgaaggaagagcggaccgcgctgcaggagcagctgctgcagagagatttggaggtgaagcagctcctgcaggcgaaggccgacctggagaaggagctggagtgcgcgagggagggcgaggaggagaggagagagcgagaggaggttttgagagaggagattcagacacttaccagcaagctccaagaattgcaagaaatgaagaaagaagagaaagaggattgcccggaagttcctcataaggcccaagagctcccagctcccactcccagcagcaggcactgcgagcaagactggccgccggattccagcgaggaggggctcccgcggccccgctccccctgctctgatgggagaagagacgccgcggccagagtcctgcaggcccagtggaaggtgtacaagcacaagaaaaaaaaggctgttctggatgaggcggctgtggtgcttcaggcagctttcaggggacatctcacgcggacaaagctcttagcaagcaaagcacatggctcagagccacccagcgtgccaggcctcccagaccagagctctcctgtgccccgcgttccgagccccatcgcccaggccacgggcagccctgtgcaggaggaggccatcgtcatcatccagtccgctctgcgggcacacctggcccgggccaggcacagtgctaccggtaaaagaaccaccaccgcagcttctaccaggaggagatcggcttcagccacacacggggacgcctcctccccacccttcctcgcagctcttcctgacccctctccctcagggccacaggccttggcacctctacctggggatgacgtcaactccgatgattccgacgatattgtcattgcaccgtctctgcccacgaagaactttccagtttag

SEQ ID NO: 144392 - DNA, 2235 bp, Homo sapiens
  Payload ID: 8530
  Gene Symbol: IQCE
  Gene Name: IQ motif containing E
  ENST ID: ENST00000325997
  CDS Start-End: 126-254
agcggggtcgcgggccggcgccagggaaggccccgaggctgcgggcggccagggctgcccgcggattcccagacccggacgcccgagccagcaaccctgaggggcggccgggcagcgccgccaccatgttcctgggcaccggggagccggccttggacacgagtcaccttatctctctaagccgagaaaagtggcctcctggaggtccctcaggacggcagggagcatgcctctgggcggccgagcgtccctgaccccgcagaagctgtggctgggaaccgcaaagccaggaagtctgacccaggccctgaactcacccctcacctgggagcatgcgtggactggcgtccccggcggcactcctgactgtctgacagacaccttcagagtgaagaggccacatctcaggcgctctgccagcaacggtcatgtccctgggactcctgtctacagagaaaaagaagatatgtatgacgagattattgagttaaagaagtcattgcacgtgcagaagagcgacgtggacctgatgagaacgaagctccggcgcctggaggaggaaaacagcaggaaggaccggcagatagagcagctcctggatcccagccgcggcacggattttgttcggactctggcagagaaaaggcccgatgccagttgggtcattaacgggctgaagcagaggatcctgaagctggaacagcagtgcaaggagaaggacggcaccatcagcaaactccagaccgatatgaagactaccaacctggaagagatgcggatcgccatggagacatactacgaggaggtgcatcgtctccagaccctcttggcaagttctgaaaccaccggaaagaagcccctgggggagaagaagacgggcgccaaaaggcagaagaagatgggcagtgccctcctgagcttgtcccggagtgtccaggagctcacggaagagaaccagagcctgaaggaggacctggaccgcgtgctgagcacctccccaaccatctccaagacacagggttatgtggagtggagcaagccccggctgctgaggcgcattgtggagctggagaagaaactaagtgtgatggagagctcaaaatcacacgccgcagagccagtcagatcacacccgccagcctgccttgcatccagctctgcgctgcacagacagccacgaggggaccgcaacaaggaccacgagcgtctccgaggggctgtgagagacctgaaggaagagcggaccgcgctgcaggagcagctgctgcagagagatttggaggtgaagcagctcctgcaggcgaaggccgacctggagaaggagctggagtgcgcgagggagggcgaggaggagaggagagagcgagaggaggttttgagagaggagattcagacacttaccagcaagctccaagaattgcaagaaatgaagaaagaagagaaagaggattgcccggaagttcctcataaggcccaagagctcccagctcccactcccagcagcaggcactgcgagcaagactggccgccggattccagcgaggaggggctcccgcggccccgctccccctgctctgatgggagaagagacgccgcggccagagtcctgcaggcccagtggaaggtgtacaagcacaagaaaaaaaaggctgttctggatgaggcggctgtggtgcttcaggcagctttcaggggacatctcacgcggacaaagctcttagcaagcaaagcacatggctcagagccacccagcgtgccaggcctcccagaccagagctctcctgtgccccgcgttccgagccccatcgcccaggccacgggcagccctgtgcaggaggaggccatcgtcatcatccagtccgctctgcgggcacacctggcccgggccaggcacagtgctaccggtaaaagaaccaccaccgcagcttctaccaggaggagatcggcttcagccacacacggggacgcctcctccccacccttcctcgcagctcttcctgacccctctccctcagggccacaggccttggcacctctacctggggatgacgtcaactccgatgattccgacgatattgtcattgcaccgtctctgcccacgaagaactttccagtttaggtccccgtcactgtctccacgccgtgatggcagcgctgccgaggacataggaaccacgactggaaagataatttatcgtgttaggagaagaacgatgatacctacttaacacctca

SEQ ID NO: 144393 - DNA, 6844 bp, Homo sapiens
  Payload ID: 8530
  Gene Symbol: IQCE
  Gene Name: IQ motif containing E
  Uniprot ID: Q6IPM2
  ENST ID: ENST00000402050
  CDS Start-End: 185-2272
ccagggggaacgcaggtcgcttacccggctgggtaggtcggcggcctggttgccatggcagcggggtcgcgggccggcgccagggaaggccccgaggctgcgggcggccagggctgcccgcggattcccagacccggacgcccgagccagcaaccctgaggggcggccgggcagcgccgccaccatgttcctgggcaccggggagccggccttggacacgggagatgacagtctgtctgcagtcacctttgactctgatgtggagacgaaagcaaaaaggaaagctttccacaaacctccacccacatcgccaaagtcaccttatctctctaagccgagaaaagtggcctcctggaggtccctcaggacggcagggagcatgcctctgggcggccgagcgtccctgaccccgcagaagctgtggctgggaaccgcaaagccaggaagtctgacccaggccctgaactcacccctcacctgggagcatgcgtggactggcgtccccggcggcactcctgactgtctgacagacaccttcagagtgaagaggccacatctcaggcgctctgccagcaacggtcatgtccctgggactcctgtctacagagaaaaagaagatatgtatgacgagattattgagttaaagaagtcattgcacgtgcagaagagcgacgtggacctgatgagaacgaagctccggcgcctggaggaggaaaacagcaggaaggaccggcagatagagcagctcctggatcccagccgcggcacggattttgttcggactctggcagagaaaaggcccgatgccagttgggtcattaacgggctgaagcagaggatcctgaagctggaacagcagtgcaaggagaaggacggcaccatcagcaaactccagaccgatatgaagactaccaacctggaagagatgcggatcgccatggagacatactacgaggaggtgcatcgtctccagaccctcttggcaagttctgaaaccaccggaaagaagcccctgggggagaagaagacgggcgccaaaaggcagaagaagatgggcagtgccctcctgagcttgtcccggagtgtccaggagctcacggaagagaaccagagcctgaaggaggacctggaccgcgtgctgagcacctccccaaccatctccaagacacagggttatgtggagtggagcaagccccggctgctgaggcgcattgtggagctggagaagaaactaagtgtgatggagagctcaaaatcacacgccgcagagccagtcagatcacacccgccagcctgccttgcatccagctctgcgctgcacagacagccacgaggggaccgcaacaaggaccacgagcgtctccgaggggctgtgagagacctgaaggaagagcggaccgcgctgcaggagcagctgctgcagagagatttggaggtgaagcagctcctgcaggcgaaggccgacctggagaaggagctggagtgcgcgagggagggcgaggaggagaggagagagcgagaggaggttttgagagaggagattcagacacttaccagcaagctccaagaattgcaagaaatgaagaaagaagagaaagaggattgcccggaagttcctcataaggcccaagagctcccagctcccactcccagcagcaggcactgcgagcaagactggccgccggattccagcgaggaggggctcccgcggccccgctccccctgctctgatgggagaagagacgccgcggccagagtcctgcaggcccagtggaaggtgtacaagcacaagaaaaaaaaggctgttctggatgaggcggctgtggtgcttcaggcagctttcaggggacatctcacgcggacaaagctcttagcaagcaaagcacatggctcagagccacccagcgtgccaggcctcccagaccagagctctcctgtgccccgcgttccgagccccatcgcccaggccacgggcagccctgtgcaggaggaggccatcgtcatcatccagtccgctctgcgggcacacctggcccgggccaggcacagtgctaccggtaaaagaaccaccaccgcagcttctaccaggaggagatcggcttcagccacacacggggacgcctcctccccacccttcctcgcagctcttcctgacccctctccctcagggccacaggccttggcacctctacctggggatgacgtcaactccgatgattccgacgatattgtcattgcaccgtctctgcccacgaagaactttccagtttaggtccccgtcactgtctccacgccgtgatggcagcgctgccgaggacataggaaccacgactggaaagataatttatcgtgttaggagaagaacgatgatacctacttaacacctcagcatctgcgtcgtgtctctttgtgcttttgtttgtggaaggagacccaaatgcctttactttattctctggggagggccagcggctcgcatccccctcatctccagctgcagctcggatggtggattttcagtgccaacagacacatctgccgtgaactcgcagatgccagggagccctgtagtgacacgttctctgacagcaccttgccgcctgcccacgaccttgaccgtgaggagctgctatccgcaaccagcgccgacaccatgccccctcttcctggtgacaccctcaacaaccaggatttgctcgatctcagcccagcaggccaggcagacacaccccgctgtgccttaggaaggtgtgagaccggcttcccccatccccacagcaaaacacggcctgtcccaagccagtgaggagctaaagacacccaggtccccaaatgatcttactccatgccccacccgctcacaccgtcctttcccgtcacccttgctatcccctggagcactgccctccagagctgcccttcccaggaaggaatttggttggattctgtcactgtggagaccaagattttttaaaattcccaattacaaaagcagcatcacacttgcttctgagaacagcagggtgatgtctgttcccaagctggtggcgggagccttagcctgtgtggggccacccggggaagaggaggagaggagggtgaggaggcaggctcgccgttccaagggacagcataggctcgtggtggggcgtgttgcatctggtgtctgggacagtccccgtcaccccatgtgtgcggcctctgcactcccaagctccatggctgggctgggctgggctgggctgggctgggccgggcgtgcggagcctgtggagccagcagctgcagaggcctaggagggagttcctgggggaagcgcacagtgtccagtgcccatctcttgcttgtgtgtgagattagcccttgctggggcgtcaagaggaagagccttagacctgggcgggccttcaggggcatctagacccctgcacagcccaggcctggtgtctgcatttccacagcacccctgtggggactcctgccggggctggccgctgtctcaggagagacccaatggttagaaagcccctttttacacagctgacagcttctcccaaggcttccgtccacggggacaggcttaacccctgggcgccttttctgcagcatggcggccttctgagtcacctaagctgagcctgggtcattctctgtggcggtcagaaggccgatggccccaacacagtggcttgtgaaagggagagaggaggctctgcatgtccacctgctctatgggaggaggacacaggtgtccccagcccagcctgttctctcccagtcactcagggatggggccacccaaagtgcaggacccgccccaccctgcggttcgaagcctggcccctgtctccacttagcttctgtttctgcagtgggtggaagcgagtcagcggggggcctggcttgtgtacgtgttttccttatttggtctgtgggttgccaagtccatttttttttccactgaactggctggtaacttgatggactgtgtaactgacacaggccctctttagacccctgccttcaccccacccgcccgggtccactccctggggcgctgtcccaagccatccctgcttgccagctcaaagcttcaggtcctaggagccagtccacctcgaaagccctgagaaagtgagacacctgcacattcgctgggggagaccctccgttctcttgtggcagctgctcccacttgttaaaccaagctgtttctgcgggacgtgctcactcttgggaaccagtggcctagagctttgggttacaggcatggagagggctttcctgcctcaggcttggaggccaatgttccatacataaaccgccatgtcctctggtgcagctgggctgctcttttaaaagccagcatccatcttgaagctcgctgggtaaatggcaatgcattctcaagccagtgtcttcagctgatgcccagtgtccagtgctggtcaccagtcccctttgctgggtacagcctgcctggctgttctgtggtcctggaacgctgcagtgtggttttgttccatggagacagtaccaagcggagaggcctccttgcccacggccccagggcctgggggccaggggttctggccctgcggggacttaggcaggaggggaagagaagcccatggagccatgggaggggtgagctgtgggcggggcctagtcatgggaggggtgagctgtgggcggggcgagctgtgggtggggcctagccatgggagaggtgagctgtgaatggggctagctatgggtggggtgagctgtggacagggcctagccatgggaaaggtgagctgtgggcggggcctagtcacgggagaggtgagctgtgggcggggcctagtcatgggaggggtgagctgtggatggggcctagccatgggaggggtgagctgtgagtggggctgagccatgggagcagcaagctggtggagtgggctgggcggagctgtgggggctgctggcagggcctaggaaagtagacaactcccgggggagacgaagtagagagtgagtccccaagaaagggactcctgccccagcgtcaagtgccaaagcaggccccatctaccacttcagggtcgacgttggtggcaggtgttgttcacggtgtactgattgtcactgcaacacctccacatcaccttgaacttcaagaacagcagcaaagctgtatctgctatcagaggctgttaggtagtccagctttaaaataacacactctttctctatcccatgccctttaaacaagcagccacaggagatgtcagtctccagggcctggccccactgtgttgacagcagtcacgtctgttgagctgacactgctgaggctgaagctggccccgtgcaggtggctggtgagccacaggtgcagtacccggaggtgtgctctcccctagaggcctgtccccaactcctcccctagaggcctattcccgctgctcacagacctcagcagaggcaccagctggagggctccagggacatccttggagatacaggaggctttcctggcacagggcacagctcttaggaggcctttgtaggacgctgtctccccagcgtgtcctgctcatccaggatggggagaaagaggaggaggccccaggctcagaagccagggacagactgccgacgattaccaaactgaatccaggcagtgccatgaccctgggtgtcccttggttcacatcacccaccagacagctgcggagagagtgcagggaggggctgggaccaaacaggccagaaaccagcagaaaagaggcagaagtgaggtgggtgtgcctggggcacgaagccagcgccggggggatttcagtggagccttacagccaggctccgtgcggactgtgatgccagagaggcgtgcagcctctgggcaagtcgggagagggcttgggtggtccccacaaggcagaagaggtggaagggccagagaagaccaccaagaccaccgttcccgcaggcctggggtgagtgacctgactgagactagcgggcagagccaagcagggctaaactccaacccagggcccggtgttggacaaagtagctttttctttgctcgtttgtctgtgtattaagaagagactaaaatagccaaacgacgctggtcgcatgcgctggctgtggtctgtctgctgaatgtctatttttgtctcctgacgagacgtgaggaccatgcccttgatccctccgatggaccagaaacccccttccttgcaaaaaaaaggcaattgaattaggaaaagatagcccaacctagctcagatccaccaagataagcacagcaaagcttggctgcatttttgaggaataaaaacctgcagaaagcaccgataaccttcaagatctgaatgagattctattataacccgtctaaacgattgcaaaattcctcctttggttttggaagcagcgtttgctctcccgtggctcggattctctgaggaccagggagttgacacacaaaccccgccatgggtccgagccagctatttctcaaggctcccacctcgccaagctcccaagggcctgctggcagtgcctacgctgtgccaactaccctgtctggtacagaccacggctgggtaagcacccttaaaagcaacagaaatgacgtctggaagctgaaatgtgaaactgtcaagatggcttaggagaggaaggagtggacccgctggtctttggcattttgtatttagaattattctaactttatacataatgtataggccgatcttttggaagggataaggttttcattcttgtgcaactcattattctcattattggccttttaaataaaaagttgttttgcagtgtgccttga

SEQ ID NO: 144394 - DNA, 2086 bp, Homo sapiens
  Payload ID: 8530
  Gene Symbol: IQCE
  Gene Name: IQ motif containing E
  Uniprot ID: Q6IPM2
  ENST ID: ENST00000404984
  CDS Start-End: 45-1979
cccgagccagcaaccctgaggggcggccgggcagcgccgccaccatgttcctgggcaccggggagccggccttggacacgagtcaccttatctctctaagccgagcgtccctgaccccgcagaagctgtggctgggaaccgcaaagccaggaagtctgacccaggccctgaactcacccctcacctgggagcatgcgtggactggcgtccccggcggcactcctgactgtctgacagacaccttcagagtgaagaggccacatctcaggcgctctgccagcaacggtcatgtccctgggactcctgtctacagagaaaaagaagatatgtatgacgagattattgagttaaagaagtcattgcacgtgcagaagagcgacgtggacctgatgagaacgaagctccggcgcctggaggaggaaaacagcaggaaggaccggcagatagagcagctcctggatcccagccgcggcacggattttgttcggactctggcagagaaaaggcccgatgccagttgggtcattaacgggctgaagcagaggatcctgaagctggaacagcagtgcaaggagaaggacggcaccatcagcaaactccagaccgatatgaagactaccaacctggaagagatgcggatcgccatggagacatactacgaggaggtgcatcgtctccagaccctcttggcaagttctgaaaccaccggaaagaagcccctgggggagaagaagacgggcgccaaaaggcagaagaagatgggcagtgccctcctgagcttgtcccggagtgtccaggagctcacggaagagaaccagagcctgaaggaggacctggaccgcgtgctgagcacctccccaaccatctccaagacacagggttatgtggagtggagcaagccccggctgctgaggcgcattgtggagctggagaagaaactaagtgtgatggagagctcaaaatcacacgccgcagagccagtcagatcacacccgccagcctgccttgcatccagctctgcgctgcacagacagccacgaggggaccgcaacaaggaccacgagcgtctccgaggggctgtgagagacctgaaggaagagcggaccgcgctgcaggagcagctgctgcagagagatttggaggtgaagcagctcctgcaggcgaaggccgacctggagaaggagctggagtgcgcgagggagggcgaggaggagaggagagagcgagaggaggttttgagagaggagattcagacacttaccagcaagctccaagaattgcaagaaatgaagaaagaagagaaagaggattgcccggaagttcctcataaggcccaagagctcccagctcccactcccagcagcaggcactgcgagcaagactggccgccggattccagcgaggaggggctcccgcggccccgctccccctgctctgatgggagaagagacgccgcggccagagtcctgcaggcccagtggaaggtgtacaagcacaagaaaaaaaaggctgttctggatgaggcggctgtggtgcttcaggcagctttcaggggacatctcacgcggacaaagctcttagcaagcaaagcacatggctcagagccacccagcgtgccaggcctcccagaccagagctctcctgtgccccgcgttccgagccccatcgcccaggccacgggcagccctgtgcaggaggaggccatcgtcatcatccagtccgctctgcgggcacacctggcccgggccaggcacagtgctaccggtaaaagaaccaccaccgcagcttctaccaggaggagatcggcttcagccacacacggggacgcctcctccccacccttcctcgcagctcttcctgacccctctccctcagggccacaggccttggcacctctacctggggatgacgtcaactccgatgattccgacgatattgtcattgcaccgtctctgcccacgaagaactttccagtttaggtccccgtcactgtctccacgccgtgatggcagcgctgccgaggacataggaaccacgactggaaagataatttatcgtgttaggagaagaacgatgatacctactt

SEQ ID NO: 144395 - DNA, 2170 bp, Homo sapiens
  Payload ID: 8530
  Gene Symbol: IQCE
  Gene Name: IQ motif containing E
  Uniprot ID: Q6IPM2
  ENST ID: ENST00000438376
  CDS Start-End: 131-2170
atggcagcggggtcgcgggccggcgccagggaaggccccgaggctgcgggcggccagggctgcccgcggattcccagacccggacgcccgagccagcaaccctgaggggcggccgggcagcgccgccaccatgttcctgggcaccggggagccggccttggacacgaaagcaaaaaggaaagctttccacaaacctccacccacatcgccaaagtcaccttatctctctaagccgagaaaagtggcctcctggaggtccctcaggacggcagggagcatgcctctgggcggccgagcgtccctgaccccgcagaagctgtggctgggaaccgcaaagccaggaagtctgacccaggccctgaactcacccctcacctgggagcatgcgtggactggcgtccccggcggcactcctgactgtctgacagacaccttcagagtgaagaggccacatctcaggcgctctgccagcaacggtcatgtccctgggactcctgtctacagagaaaaagaagatatgtatgacgagattattgagttaaagaagtcattgcacgtgcagaagagcgacgtggacctgatgagaacgaagctccggcgcctggaggaggaaaacagcaggaaggaccggcagatagagcagctcctggatcccagccgcggcacggattttgttcggactctggcagagaaaaggcccgatgccagttgggtcattaacgggctgaagcagaggatcctgaagctggaacagcagtgcaaggagaaggacggcaccatcagcaaactccagaccgatatgaagactaccaacctggaagagatgcggatcgccatggagacatactacgaggaggtgcatcgtctccagaccctcttggcaagttctgaaaccaccggaaagaagcccctgggggagaagaagacgggcgccaaaaggcagaagaagatgggcagtgccctcctgagcttgtcccggagtgtccaggagctcacggaagagaaccagagcctgaaggaggacctggaccgcgtgctgagcacctccccaaccatctccaagacacagggttatgtggagtggagcaagccccggctgctgaggcgcattgtggagctggagaagaaactaagtgtgatggagagctcaaaatcacacgccgcagagccagtcagatcacacccgccagcctgccttgcatccagctctgcgctgcacagacagccacgaggggaccgcaacaaggaccacgagcgtctccgaggggctgtgagagacctgaaggaagagcggaccgcgctgcaggagcagctgctgcagagagatttggaggtgaagcagctcctgcaggcgaaggccgacctggagaaggagctggagtgcgcgagggagggcgaggaggagaggagagagcgagaggaggttttgagagaggagattcagacacttaccagcaagctccaagaattgcaagaaatgaagaaagaagagaaagaggattgcccggaagttcctcataaggcccaagagctcccagctcccactcccagcagcaggcactgcgagcaagactggccgccggattccagcgaggaggggctcccgcggccccgctccccctgctctgatgggagaagagacgccgcggccagagtcctgcaggcccagtggaaggtgtacaagcacaagaaaaaaaaggctgttctggatgaggcggctgtggtgcttcaggcagctttcaggggacatctcacgcggacaaagctcttagcaagcaaagcacatggctcagagccacccagcgtgccaggcctcccagaccagagctctcctgtgccccgcgttccgagccccatcgcccaggccacgggcagccctgtgcaggaggaggccatcgtcatcatccagtccgctctgcgggcacacctggcccgggccaggcacagtgctaccggtaaaagaaccaccaccgcagcttctaccaggaggagatcggcttcagccacacacggggacgcctcctccccacccttcctcgcagctcttcctgacccctctccctcagggccacaggccttggcacctctacctggggatgacgtcaactccgatgattccgacgatattgtcattgcaccgtctctgcccacgaagaactttccagtttag

SEQ ID NO: 144396 - DNA, 541 bp, Homo sapiens
  Payload ID: 8530
  Gene Symbol: IQCE
  Gene Name: IQ motif containing E
  ENST ID: ENST00000422276
  CDS Start-End: 158-541
aagcgatcctcccaccttagcctcccgagtagctgggactacagggagatgacagtctgtctgcagtcacctttgactctgatgtggagacgagtcaccttatctctctaagccgagaaaagtggcctcctggaggtccctcaggacggcagggagcatgcctctgggcggccgagcgtccctgaccccgcagaagctgtggctgggaaccgcaaagccaggaagtctgacccaggccctgaactcacccctcacctgggagcatgcgtggactggcgtccccggcggcactcctgactgtctgacagacaccttcagagtgaagaggccacatctcaggcgctctgccagcaacggtcatgtccctgggactcctgtctacagagaaaaagaagatatgtatgacgagattattgagttaaagaagtcattgcacgtgcagaagagcgacgtggacctgatgagaacgaagctccggcgcctggaggaggaaaacagcaggaaggaccggcagatagagcagctcctggatcccagccgc

SEQ ID NO: 144397 - DNA, 899 bp, Homo sapiens
  Payload ID: 8530
  Gene Symbol: IQCE
  Gene Name: IQ motif containing E
  ENST ID: ENST00000415271
  CDS Start-End: 162-899
cccggctgggtaggtcggcggcctggttgccatggcagcggggtcgcgggccggcgccagggaaggccccgaggctgcgggcggccagggctgcccgcggattcccagacccggacgcccgagccagcaaccctgaggggcggccgggcagcgccgccaccatgttcctgggcaccggggagccggccttggacacgggagatgacagtctgtctgcagtcacctttgactctgatgtggagacgaaagcaaaaaggaaagctttccacaaacctccacccacatcgccaaagtcaccttatctctctaagccgagaaaagtggcctcctggaggtccctcaggacggcagggagcatgcctctgggcggccgagcgtccctgaccccgcagaagctgtggctgggaaccgcaaagccaggaagtctgacccaggccctgaactcacccctcacctgggagcatgcgtggactggcgtccccggcggcactcctgactgtctgacagacaccttcagagtgaagaggccacatctcaggcgctctgccagcaacgtctctttttttttagagacggaatctcgctgtgttgcccaggctggtctcaaattcctggactcaagtgatcctctcaccttggcctcccagaatcctgggattacaggtcatgtccctgggactcctgtctacagagaaaaagaagatatgtatgacgagattattgagttaaagaagtcattgcacgtgcagaagagcgacgtggacctgatgagaacgaagctccggcgcctggaggaggaaaacagcaggaaggaccggcagatagagcagctcctggatcccagccgcggcacggattttgttcggactctggcagagaaaaggcccgatgccagttgg

SEQ ID NO: 144398 - DNA, 866 bp, Homo sapiens
  Payload ID: 8530
  Gene Symbol: IQCE
  Gene Name: IQ motif containing E
  ENST ID: ENST00000423196
  CDS Start-End: 60-866
gctaaagagatctggaaacagctggctgtgtggatgtacccagggcatcttcgtcagggatgttaagatgtgcagacacccaagtgaccatcctaggaagattacactcccaggtccctagaaacaggaggcagggcacgcaaggccacgcaggagcggcgcgtcggccaggaggcggcagggtcgtgcggaagacctgggccagggcctttatcatgagaaggagagggcgaggtgaggcccaagagctcccagctcccactcccagcagcaggcactgcgagcaagactggccgccggattccagcgaggaggggctcccgcggccccgctccccctgctctgatgggagaagagacgccgcggccagagtcctgcaggcccagtggaaggtgtacaagcacaagaaaaaaaaggctgttctggatgaggcggctgtggtgcttcaggcagctttcaggggacatctcacgcggacaaagctcttagcaagcaaagcacatggctcagagccacccagcgtgccaggcctcccagaccagagctctcctgtgccccgcgttccgagccccatcgcccaggccacgggcagccctgtgcaggaggaggccatcgtcatcatccagtccgctctgcgggcacacctggcccgggccaggcacagtgctaccggtaaaagaaccaccaccgcagcttctaccaggaggagatcggcttcagccacacacggggacgcctcctccccacccttcctcgcagctcttcctggtaatttcattcatttggattctggcaccagggcagctggtctgctgaggtctcagccaaagagtggccacctccaggaagcccgggctgtgtcggga

SEQ ID NO: 144399 - DNA, 543 bp, Homo sapiens
  Payload ID: 8530
  Gene Symbol: IQCE
  Gene Name: IQ motif containing E
  ENST ID: ENST00000423395
  CDS Start-End: 160-543
agaggccgccgcttccaggaagctctccgggacgccgcgccctcgcctctgggcgcctgcgagtctgcggcccgcaggtgacggagctcacggtagtcaccttatctctctaagccgagaaaagtggcctcctggaggtccctcaggacggcagggagcatgcctctgggcggccgagcgtccctgaccccgcagaagctgtggctgggaaccgcaaagccaggaagtctgacccaggccctgaactcacccctcacctgggagcatgcgtggactggcgtccccggcggcactcctgactgtctgacagacaccttcagagtgaagaggccacatctcaggcgctctgccagcaacggtcatgtccctgggactcctgtctacagagaaaaagaagatatgtatgacgagattattgagttaaagaagtcattgcacgtgcagaagagcgacgtggacctgatgagaacgaagctccggcgcctggaggaggaaaacagcaggaaggaccggcagatagagcagctcctggatcccagccgc

SEQ ID NO: 144400 - DNA, 580 bp, Homo sapiens
  Payload ID: 8530
  Gene Symbol: IQCE
  Gene Name: IQ motif containing E
  ENST ID: ENST00000427817
  CDS Start-End: 1-580
aagaatataagaatattgtctcctctaagcaagacattcacagaaaaggaggtcattaacgggctgaagcagaggatcctgaagctggaacagcagtgcaaggagaaggacggcaccatcagcaaactccagaccgatatgaagactaccaacctggaagagatgcggatcgccatggagacatactacgaggaggtgcatcgtctccagaccctcttggcaagttctgaaaccaccggaaagaagcccctgggggagaagaagacgggcgccaaaaggcagaagaagatgggcagtgccctcctgagcttgtcccggagtgtccaggagctcacggaagagaaccagagcctgaaggaggacctggaccgcgtgctgagcacctccccaaccatctccaagacacagggttatgtggagtggagcaagccccggctgctgaggcgcattgtggagctggagaagaaactaagtgtgatggagagctcaaaatcacacgccgcagagccagtcagatcacacccgccagcctgccttgcatccagctctgcgctgcacagacagccacgaggggaccgca

SEQ ID NO: 144401 - DNA, 2289 bp, Homo sapiens
  Payload ID: 8530
  Gene Symbol: IQCE
  Gene Name: IQ motif containing E
  ENST ID: ENST00000611775
  CDS Start-End: 34-2094
aaccctgaggggcggccgggcagcgccgccaccatgttcctgggcaccggggagccggccttggacacgaaagcaaaaaggaaagctttccacaaacctccacccacatcgccaaagtcaccttatctctctaagccgagaaaagtggcctcctggaggtccctcaggacggcagggagcatgcctctgggcggccgagcgtccctgaccccgcagaagctgtggctgggaaccgcaaagccaggaagtctgacccaggccctgaactcacccctcacctgggagcatgcgtggactggcgtccccggcggcactcctgactgtctgacagacaccttcagagtgaagaggccacatctcaggcgctctgccagcaacggtcatgtccctgggactcctgtctacagagaaaaagaagatatgtatgacgagattattgagttaaagaagtcattgcacgtgcagaagagcgacgtggacctgatgagaacgaagctccggcgcctggaggaggaaaacagcaggaaggaccggcagatagagcagctcctggatcccagccgcggcacggattttgttcggactctggcagagaaaaggcccgatgccagttgggtcattaacgggctgaagcagaggatcctgaagctggaacagcagtgcaaggagaaggacggcaccatcagcaaactccagaccgatatgaagactaccaacctggaagagatgcggatcgccatggagacatactacgaggaggtgcatcgtctccagaccctcttggcaagttctgaaaccaccggaaagaagcccctgggggagaagaagacgggcgccaaaaggcagaagaagatgggcagtgccctcctgagcttgtcccggagtgtccaggagctcacggaagagaaccagagcctgaaggaggacctggaccgcgtgctgagcacctccccaaccatctccaagacacagggttatgtggagtggagcaagccccggctgctgaggcgcattgtggagctggagaagaaactaagtgtgatggagagctcaaaatcacacgccgcagagccagtcagatcacacccgccagcctgccttgcatccagctctgcgctgcacagacagccacgaggggaccgcaacaaggaccacgagcgtctccgaggggctgtgagagacctgaaggaagagcggaccgcgctgcaggagcagctgctgcagagagatttggaggtgaagcagctcctgcaggcgaaggccgacctggagaaggagctggagtgcgcgagggagggcgaggaggagaggagagagcgagaggaggttttgagagaggagattcagacacttaccagcaagctccaagaattgcaagaaatgaagaaagaagagaaagaggattgcccggaagttcctcataaggcccaagagctcccagctcccactcccagcagcaggcactgcgagcaagactggccgccggattccagcgaggaggggctcccgcggccccgctccccctgctctgatgggagaagagacgccgcggccagagtcctgcaggcccagtggaaggtgtacaagcacaagaaaaaaaaggctgttctggatgaggcggctgtggtgcttcaggcagctttcaggggacatctcacgcggacaaagctcttagcaagcaaagcacatggctcagagccacccagcgtgccaggcctcccagaccagagctctcctgtgccccgcgttccgagccccatcgcccaggccacgggcagccctgtgcaggaggaggccatcgtcatcatccagtccgctctgcgggcacacctggcccgggccaggcacagtgctaccggtaaaagaaccaccaccgcagcttctaccaggaggagatcggcttcagccacacacggggacgcctcctccccacccttcctcgcagctcttcctggtaatttcattcatttggattctggcaccagggcagctggtctgctgaggtctcagccaaagagtggccacctccaggaagcccgggctgtgtcgggacggaagggaggagtgtcccatctggagctgcctctgaactaagcgtcgccttatgccaggaaggcccacaacagggccccgccttggcccagcttgtcctttgtgcctggaattgccgaggtccttgctgtctttattttttgctctcagctccaacaggaccgaggtggcttcctccttcaggccagcatttctcctgtttgtttgttgagtaaaaccgtgttattgtttcctttt

SEQ ID NO: 144402 - DNA, 2400 bp, Homo sapiens
  Payload ID: 8530
  Gene Symbol: IQCE
  Gene Name: IQ motif containing E
  ENST ID: ENST00000476665
  CDS Start-End: 104-2212
agggaaggccccgaggctgcgggcggccagggctgcccgcggattcccagacccggacgcccgagccagcaaccctgaggggcggccgggcagcgccgccaccatgttcctgggcaccggggagccggccttggacacgggagatgacagtctgtctgcagtcacctttgactctgatgtggagacgaaagcaaaaaggaaagctttccacaaacctccacccacatcgccaaagtcaccttatctctctaagccgagaaaagtggcctcctggaggtccctcaggacggcagggagcatgcctctgggcggccgagcgtccctgaccccgcagaagctgtggctgggaaccgcaaagccaggaagtctgacccaggccctgaactcacccctcacctgggagcatgcgtggactggcgtccccggcggcactcctgactgtctgacagacaccttcagagtgaagaggccacatctcaggcgctctgccagcaacggtcatgtccctgggactcctgtctacagagaaaaagaagatatgtatgacgagattattgagttaaagaagtcattgcacgtgcagaagagcgacgtggacctgatgagaacgaagctccggcgcctggaggaggaaaacagcaggaaggaccggcagatagagcagctcctggatcccagccgcggcacggattttgttcggactctggcagagaaaaggcccgatgccagttgggtcattaacgggctgaagcagaggatcctgaagctggaacagcagtgcaaggagaaggacggcaccatcagcaaactccagaccgatatgaagactaccaacctggaagagatgcggatcgccatggagacatactacgaggaggtgcatcgtctccagaccctcttggcaagttctgaaaccaccggaaagaagcccctgggggagaagaagacgggcgccaaaaggcagaagaagatgggcagtgccctcctgagcttgtcccggagtgtccaggagctcacggaagagaaccagagcctgaaggaggacctggaccgcgtgctgagcacctccccaaccatctccaagacacagggttatgtggagtggagcaagccccggctgctgaggcgcattgtggagctggagaagaaactaagtgtgatggagagctcaaaatcacacgccgcagagccagtcagatcacacccgccagcctgccttgcatccagctctgcgctgcacagacagccacgaggggaccgcaacaaggaccacgagcgtctccgaggggctgtgagagacctgaaggaagagcggaccgcgctgcaggagcagctgctgcagagagatttggaggtgaagcagctcctgcaggcgaaggccgacctggagaaggagctggagtgcgcgagggagggcgaggaggagaggagagagcgagaggaggttttgagagaggagattcagacacttaccagcaagctccaagaattgcaagaaatgaagaaagaagagaaagaggattgcccggaagttcctcataaggcccaagagctcccagctcccactcccagcagcaggcactgcgagcaagactggccgccggattccagcgaggaggggctcccgcggccccgctccccctgctctgatgggagaagagacgccgcggccagagtcctgcaggcccagtggaaggtgtacaagcacaagaaaaaaaaggctgttctggatgaggcggctgtggtgcttcaggcagctttcaggggacatctcacgcggacaaagctcttagcaagcaaagcacatggctcagagccacccagcgtgccaggcctcccagaccagagctctcctgtgccccgcgttccgagccccatcgcccaggccacgggcagccctgtgcaggaggaggccatcgtcatcatccagtccgctctgcgggcacacctggcccgggccaggcacagtgctaccggtaaaagaaccaccaccgcagcttctaccaggaggagatcggcttcagccacacacggggacgcctcctccccacccttcctcgcagctcttcctggtaatttcattcatttggattctggcaccagggcagctggtctgctgaggtctcagccaaagagtggccacctccaggaagcccgggctgtgtcgggacggaagggaggagtgtcccatctggagctgcctctgaactaagcgtcgccttatgccaggaaggcccacaacagggccccgccttggcccagcttgtcctttgtgcctggaattgccgaggtccttgctgtctttattttttgctctcagctccaacaggaccgaggtggcttcctccttcaggccagcatttctcctgtttgtttgttgagtaaaaccgtgttattgtt

SEQ ID NO: 144403 - DNA, 6775 bp, Homo sapiens
  Payload ID: 8530
  Gene Symbol: IQCE
  Gene Name: IQ motif containing E
  Uniprot ID: Q6IPM2
  ENST ID: ENST00000623361
  CDS Start-End: 312-2204
ggactctgcgcacgcgcatggtcgccccagggggaacgcaggtcgcttacccggctgggtaggtcggcggcctggttgccatggcagcggggtcgcgggccggcgccagggaaggccccgaggctgcgggcggccagggctgcccgcggattcccagacccggacgcccgagccagcaaccctgaggggcggccgggcagcgccgccaccatgttcctgggcaccggggagccggccttggacacgagtcaccttatctctctaagccgagaaaagtggcctcctggaggtccctcaggacggcagggagcatgcctctgggcggccgagcgtccctgaccccgcagaagctgtggctgggaaccgcaaagccaggaagtctgacccaggccctgaactcacccctcacctgggagcatgcgtggactggcgtccccggcggcactcctgactgtctgacagacaccttcagagtgaagaggccacatctcaggcgctctgccagcaacggtcatgtccctgggactcctgtctacagagaaaaagaagatatgtatgacgagattattgagttaaagaagtcattgcacgtgcagaagagcgacgtggacctgatgagaacgaagctccggcgcctggaggaggaaaacagcaggaaggaccggcagatagagcagctcctggatcccagccgcggcacggattttgttcggactctggcagagaaaaggcccgatgccagttgggtcattaacgggctgaagcagaggatcctgaagctggaacagcagtgcaaggagaaggacggcaccatcagcaaactccagaccgatatgaagactaccaacctggaagagatgcggatcgccatggagacatactacgaggaggtgcatcgtctccagaccctcttggcaagttctgaaaccaccggaaagaagcccctgggggagaagaagacgggcgccaaaaggcagaagaagatgggcagtgccctcctgagcttgtcccggagtgtccaggagctcacggaagagaaccagagcctgaaggaggacctggaccgcgtgctgagcacctccccaaccatctccaagacacagggttatgtggagtggagcaagccccggctgctgaggcgcattgtggagctggagaagaaactaagtgtgatggagagctcaaaatcacacgccgcagagccagtcagatcacacccgccagcctgccttgcatccagctctgcgctgcacagacagccacgaggggaccgcaacaaggaccacgagcgtctccgaggggctgtgagagacctgaaggaagagcggaccgcgctgcaggagcagctgctgcagagagatttggaggtgaagcagctcctgcaggcgaaggccgacctggagaaggagctggagtgcgcgagggagggcgaggaggagaggagagagcgagaggaggttttgagagaggagattcagacacttaccagcaagctccaagaattgcaagaaatgaagaaagaagagaaagaggattgcccggaagttcctcataaggcccaagagctcccagctcccactcccagcagcaggcactgcgagcaagactggccgccggattccagcgaggaggggctcccgcggccccgctccccctgctctgatgggagaagagacgccgcggccagagtcctgcaggcccagtggaaggtgtacaagcacaagaaaaaaaaggctgttctggatgaggcggctgtggtgcttcaggcagctttcaggggacatctcacgcggacaaagctcttagcaagcaaagcacatggctcagagccacccagcgtgccaggcctcccagaccagagctctcctgtgccccgcgttccgagccccatcgcccaggccacgggcagccctgtgcaggaggaggccatcgtcatcatccagtccgctctgcgggcacacctggcccgggccaggcacagtgctaccggtaaaagaaccaccaccgcagcttctaccaggaggagatcggcttcagccacacacggggacgcctcctccccacccttcctcgcagctcttcctgacccctctccctcagggccacaggccttggcacctctacctggggatgacgtcaactccgatgattccgacgatattgtcattgcaccgtctctgcccacgaagaactttccagtttaggtccccgtcactgtctccacgccgtgatggcagcgctgccgaggacataggaaccacgactggaaagataatttatcgtgttaggagaagaacgatgatacctacttaacacctcagcatctgcgtcgtgtctctttgtgcttttgtttgtggaaggagacccaaatgcctttactttattctctggggagggccagcggctcgcatccccctcatctccagctgcagctcggatggtggattttcagtgccaacagacacatctgccgtgaactcgcagatgccagggagccctgtagtgacacgttctctgacagcaccttgccgcctgcccacgaccttgaccgtgaggagctgctatccgcaaccagcgccgacaccatgccccctcttcctggtgacaccctcaacaaccaggatttgctcgatctcagcccagcaggccaggcagacacaccccgctgtgccttaggaaggtgtgagaccggcttcccccatccccacagcaaaacacggcctgtcccaagccagtgaggagctaaagacacccaggtccccaaatgatcttactccatgccccacccgctcacaccgtcctttcccgtcacccttgctatcccctggagcactgccctccagagctgcccttcccaggaaggaatttggttggattctgtcactgtggagaccaagattttttaaaattcccaattacaaaagcagcatcacacttgcttctgagaacagcagggtgatgtctgttcccaagctggtggcgggagccttagcctgtgtggggccacccggggaagaggaggagaggagggtgaggaggcaggctcgccgttccaagggacagcataggctcgtggtggggcgtgttgcatctggtgtctgggacagtccccgtcaccccatgtgtgcggcctctgcactcccaagctccatggctgggctgggctgggctgggctgggctgggccgggcgtgcggagcctgtggagccagcagctgcagaggcctaggagggagttcctgggggaagcgcacagtgtccagtgcccatctcttgcttgtgtgtgagattagcccttgctggggcgtcaagaggaagagccttagacctgggcgggccttcaggggcatctagacccctgcacagcccaggcctggtgtctgcatttccacagcacccctgtggggactcctgccggggctggccgctgtctcaggagagacccaatggttagaaagcccctttttacacagctgacagcttctcccaaggcttccgtccacggggacaggcttaacccctgggcgccttttctgcagcatggcggccttctgagtcacctaagctgagcctgggtcattctctgtggcggtcagaaggccgatggccccaacacagtggcttgtgaaagggagagaggaggctctgcatgtccacctgctctatgggaggaggacacaggtgtccccagcccagcctgttctctcccagtcactcagggatggggccacccaaagtgcaggacccgccccaccctgcggttcgaagcctggcccctgtctccacttagcttctgtttctgcagtgggtggaagcgagtcagcggggggcctggcttgtgtacgtgttttccttatttggtctgtgggttgccaagtccatttttttttccactgaactggctggtaacttgatggactgtgtaactgacacaggccctctttagacccctgccttcaccccacccgcccgggtccactccctggggcgctgtcccaagccatccctgcttgccagctcaaagcttcaggtcctaggagccagtccacctcgaaagccctgagaaagtgagacacctgcacattcgctgggggagaccctccgttctcttgtggcagctgctcccacttgttaaaccaagctgtttctgcgggacgtgctcactcttgggaaccagtggcctagagctttgggttacaggcatggagagggctttcctgcctcaggcttggaggccaatgttccatacataaaccgccatgtcctctggtgcagctgggctgctcttttaaaagccagcatccatcttgaagctcgctgggtaaatggcaatgcattctcaagccagtgtcttcagctgatgcccagtgtccagtgctggtcaccagtcccctttgctgggtacagcctgcctggctgttctgtggtcctggaacgctgcagtgtggttttgttccatggagacagtaccaagcggagaggcctccttgcccacggccccagggcctgggggccaggggttctggccctgcggggacttaggcaggaggggaagagaagcccatggagccatgggaggggtgagctgtgggcggggcctagtcatgggaggggtgagctgtgggcggggcgagctgtgggtggggcctagccatgggagaggtgagctgtgaatggggctagctatgggtggggtgagctgtggacagggcctagccatgggaaaggtgagctgtgggcggggcctagtcacgggagaggtgagctgtgggcggggcctagtcatgggaggggtgagctgtggatggggcctagccatgggaggggtgagctgtgagtggggctgagccatgggagcagcaagctggtggagtgggctgggcggagctgtgggggctgctggcagggcctaggaaagtagacaactcccgggggagacgaagtagagagtgagtccccaagaaagggactcctgccccagcgtcaagtgccaaagcaggccccatctaccacttcagggtcgacgttggtggcaggtgttgttcacggtgtactgattgtcactgcaacacctccacatcaccttgaacttcaagaacagcagcaaagctgtatctgctatcagaggctgttaggtagtccagctttaaaataacacactctttctctatcccatgccctttaaacaagcagccacaggagatgtcagtctccagggcctggccccactgtgttgacagcagtcacgtctgttgagctgacactgctgaggctgaagctggccccgtgcaggtggctggtgagccacaggtgcagtacccggaggtgtgctctcccctagaggcctgtccccaactcctcccctagaggcctattcccgctgctcacagacctcagcagaggcaccagctggagggctccagggacatccttggagatacaggaggctttcctggcacagggcacagctcttaggaggcctttgtaggacgctgtctccccagcgtgtcctgctcatccaggatggggagaaagaggaggaggccccaggctcagaagccagggacagactgccgacgattaccaaactgaatccaggcagtgccatgaccctgggtgtcccttggttcacatcacccaccagacagctgcggagagagtgcagggaggggctgggaccaaacaggccagaaaccagcagaaaagaggcagaagtgaggtgggtgtgcctggggcacgaagccagcgccggggggatttcagtggagccttacagccaggctccgtgcggactgtgatgccagagaggcgtgcagcctctgggcaagtcgggagagggcttgggtggtccccacaaggcagaagaggtggaagggccagagaagaccaccaagaccaccgttcccgcaggcctggggtgagtgacctgactgagactagcgggcagagccaagcagggctaaactccaacccagggcccggtgttggacaaagtagctttttctttgctcgtttgtctgtgtattaagaagagactaaaatagccaaacgacgctggtcgcatgcgctggctgtggtctgtctgctgaatgtctatttttgtctcctgacgagacgtgaggaccatgcccttgatccctccgatggaccagaaacccccttccttgcaaaaaaaaggcaattgaattaggaaaagatagcccaacctagctcagatccaccaagataagcacagcaaagcttggctgcatttttgaggaataaaaacctgcagaaagcaccgataaccttcaagatctgaatgagattctattataacccgtctaaacgattgcaaaattcctcctttggttttggaagcagcgtttgctctcccgtggctcggattctctgaggaccagggagttgacacacaaaccccgccatgggtccgagccagctatttctcaaggctcccacctcgccaagctcccaagggcctgctggcagtgcctacgctgtgccaactaccctgtctggtacagaccacggctgggtaagcacccttaaaagcaacagaaatgacgtctggaagctgaaatgtgaaactgtcaagatggcttaggagaggaaggagtggacccgctggtctttggcattttgtatttagaattattctaactttatacataatgtataggccgatcttttggaagggataaggttttcattcttgtgcaactcattattctcattattggccttttaaataaaaagttgttttgcagtgtgccttg

SEQ ID NO: 144404 - DNA, 695 bp, Homo sapiens
  Payload ID: 8531
  Gene Symbol: IQCF1
  Gene Name: IQ motif containing F1
  Uniprot ID: Q8N6M8
  ENST ID: ENST00000310914
  CDS Start-End: 64-681
atggctggatgaacacagatgtgaggggatttgaaccatctacaatcaatccatatgtgaccaatggaggagaagcagccccaaaagacgaaggaaccctcaaaagaagatgagcctcagcagaaggagatgccaacccatttgtccttaggagcagagtcaaaggcagaggctaaaactccagttctggttgagacacagacagtggacaatgccaatgagaaatcagaaaaacccccagaaaaccaaaagaagctctctgacaaagatacggtagccaccaagatccaggcctggtggcggggcaccctggtgcgtcgggcactgttgcacgcagccctcagtgcctgcatcattcagtgctggtggcggctgatactgtccaagattctgaagaagaggcggcaggcagcgctagaggccttctcccggaaggagtgggcagcagtcacactgcagtcccaggcccgcatgtggcgcatccgcagacgctattgccaggtgctcaatgctgttcgcatcatccaggcttactggaggtgccgctcctgtgcttcccgggggttcatcaagggccagtacagagtcacagccaaccagctgcatctccagctggagatcttgctggactcagggccttgcattgtgacagagtgtattcccttctcaataaaggaatgaagtggtcttttcca

SEQ ID NO: 144405 - DNA, 745 bp, Homo sapiens
  Payload ID: 8531
  Gene Symbol: IQCF1
  Gene Name: IQ motif containing F1
  ENST ID: ENST00000314534
  CDS Start-End: 64-192
atggctggatgaacacagatgtgaggggatttgaaccatctacaatcaatccatatgtgaccaatggaggagaagcagccccaaaagacgaaggaaccctcaaaagaagatgagcctcagcagaaggagatgccaacccatttgtccttaggagcagagtcaaaggcagagcaaggcaaggtacttctatagaagggtgcgcccttacagatggagcaatggctaaaactccagttctggttgagacacagacagtggacaatgccaatgagaaatcagaaaaacccccagaaaaccaaaagaagctctctgacaaagatacggtagccaccaagatccaggcctggtggcggggcaccctggtgcgtcgggcactgttgcacgcagccctcagtgcctgcatcattcagtgctggtggcggctgatactgtccaagattctgaagaagaggcggcaggcagcgctagaggccttctcccggaaggagtgggcagcagtcacactgcagtcccaggcccgcatgtggcgcatccgcagacgctattgccaggtgctcaatgctgttcgcatcatccaggcttactggaggtgccgctcctgtgcttcccgggggttcatcaagggccagtacagagtcacagccaaccagctgcatctccagctggagatcttgctggactcagggccttgcattgtgacagagtgtattcccttctcaataaaggaatgaagtggtcttttcca

SEQ ID NO: 144406 - DNA, 578 bp, Homo sapiens
  Payload ID: 8532
  Gene Symbol: IQCF2
  Gene Name: IQ motif containing F2
  Uniprot ID: Q8IXL9
  ENST ID: ENST00000333127
  CDS Start-End: 30-524
agggctaatgaaccatctaaggacaggccatgagggttcgattttgtaccaaaggcaatttaattttggttataattgaggatgttgaagaaagcattgaatggaagacattgcagaagaagaaacagcagaaaatcaaggaaaaacttagaataagaacaaaagcagctgtaaagatccaggcctggtggcggggcaccctggtgcgcaggacactgctgcatgcagccctcagggcctggataattcagtgctggtggcggatgacgctgtcgagggtgctggagaagaaacggcaggcagctctgatcgcctacgcaaccagagagagggcagtgatcaagctccagtctttggtccgtatgtggcgtgtccgctggcgatactgccaggtgctcaatgccatctacatcatccagggccactggcaatgccacaactgccagacctgcgctctcctccagggccactgtgtggtcacagccactcacctgcagttccacattgagatcatcaactcctaagggctggcaagaagggcactgtgtctactgtccctattaaaggtctaacctggt

SEQ ID NO: 144407 - DNA, 1241 bp, Homo sapiens
  Payload ID: 8533
  Gene Symbol: IQCF3
  Gene Name: IQ motif containing F3
  Uniprot ID: P0C7M6
  ENST ID: ENST00000446775
  CDS Start-End: 747-1211
tggctctgcatccccagtaaaactgtgcctgcaacacgtgggatccagtaagtaggagagtcctcacagggaagaagggaaagaaattcctaggatgctggggtgagggtaccccagaagaatgaccaggcagcaggcttgaagagcagctacccagattacacagtggtgcagcggtccatgaaaaaagcagagttgacggattatccaagttttggtggaaagtttgggataaattagtacaaaccatggcaatcaagagctccaggaaaaacagacaggaaatgcatgaaaggctatgtcacagcaatatgccatgttgctaagccatggacaggatataatcacaatgatggaagccctgaatgcttattgaaccaaaaactgtgatgctataatcatatagagaggagagcagaaggatgggaacaggatcttctttttccttgatgttctgaagctacaagatgacttccaataccatgttgaataggagtggttttggtatcaggatgatgctggcctcatagaatgagctggggaggggcctttcctcctcaattttttggaatagtttcagtaggaatgggaccagctcttctttgttcatctgatagaattcagctgtggatccttcttgtcctgcgctttattttgttgagagttgcccaaggaagtcaacaggagagccagatcaggaaacagcaaccagagggagatgatcacctgaaccactgctccaaaccatgggcagtaaatgctgtaaaggtggtccagatgaagatgcagtagaaagacagaggcggcagaagttgcttcttgcacaactgcatcacagaaaaagggtgaaggcagctgggcagatccaggcctggtggcgtggggtcctggtgcgcaggaccctgctggttgctgccctcagggcctggatgattcagtgctggtggaggacgttggtgcagagacggatccgtcagcggcggcaggccctgttgagggtctacgtcatccaggagcaggcgacggtcaagctccagtcctgcatccgcatgtggcagtgccggcaatgttaccgccaaatgtgcaatgctctctgcttgttccaggtcccagagagcagccttgccttccagactgatggctttttacaggtccaatatgcaatcccttcaaagcagccagagttccacattgaaatcctatcaatctgaaaggcctggggcatggagaacaggctgcac

SEQ ID NO: 144408 - DNA, 505 bp, Homo sapiens
  Payload ID: 8533
  Gene Symbol: IQCF3
  Gene Name: IQ motif containing F3
  Uniprot ID: P0C7M6
  ENST ID: ENST00000440739
  CDS Start-End: 41-505
aaccagagggagatgatcacctgaaccactgctccaaaccatgggcagtaaatgctgtaaaggtggtccagatgaagatgcagtagaaagacagaggcggcagaagttgcttcttgcacaactgcatcacagaaaaagggtgaaggcagctgggcagatccaggcctggtggcgtggggtcctggtgcgcaggaccctgctggttgctgccctcagggcctggatgattcagtgctggtggaggacgttggtgcagagacggatccgtcagcggcggcaggccctgttgagggtctacgtcatccaggagcaggcgacggtcaagctccagtcctgcatccgcatgtggcagtgccggcaatgttaccgccaaatgtgcaatgctctctgcttgttccaggtcccagagagcagccttgccttccagactgatggctttttacaggtccaatatgcaatcccttcaaagcagccagagttccacattgaaatcctatcaatctga

SEQ ID NO: 144409 - DNA, 450 bp, Homo sapiens
  Payload ID: 8533
  Gene Symbol: IQCF3
  Gene Name: IQ motif containing F3
  ENST ID: ENST00000444293
  CDS Start-End: 41-322
aaccagagggagatgatcacctgaaccactgctccaaaccatgggcagtaaatgctgtaaaggtggtccagatgaagatgcagtagaaagacagaggcggcagaagggcctggatgattcagtgctggtggaggacgttggtgcagagacggatccgtcagcggcggcaggccctgttgagggtctacgtcatccaggagcaggcgacggtcaagctccagtcctgcatccgcatgtggcagtgccggcaatgttaccgccaaatgtgcaatgctctctgcttgttccaggtcccagagagcagccttgccttccagactgatggctttttacaggtccaatatgcaatcccttcaaagcagccagagttccacattgaaatcctatcaatctgaaaggcctggggcatggagaacaggctgcactaccctaataaatgtctgaccaggt

SEQ ID NO: 144410 - DNA, 1270 bp, Homo sapiens
  Payload ID: 8533
  Gene Symbol: IQCF3
  Gene Name: IQ motif containing F3
  Uniprot ID: P0C7M6
  ENST ID: ENST00000437810
  CDS Start-End: 780-1244
tggctctgcatccccagtaaaactgtgcctgcaacacgtgggatccagtaagtaggagagtcctcacagggaagaagggaaagaaattcctaggatgctggggtgagggtaccccagaagaatgaccaggcagcaggcttgaagagcagctacccagattacacagtggtgcagcggtccatgaaaaaagcagagttgacggattatccaagttttggtggaaagtttgggataaattagtacaaaccatggcaatcaagagctccaggaaaaacagacaggaaatgcatgaaaggctatgtcacagcaatatgccatgttgctaagccatggacaggatataatcacaatgatggaagccctgaatgcttattgaaccaaaaactgtgatgctataatcatatagagaggagagcagaaggatgggaacaggtaaatcttcacttcatgaaaagaagtcaagaggatcttctttttccttgatgttctgaagctacaagatgacttccaataccatgttgaataggagtggttttggtatcaggatgatgctggcctcatagaatgagctggggaggggcctttcctcctcaattttttggaatagtttcagtaggaatgggaccagctcttctttgttcatctgatagaattcagctgtggatccttcttgtcctgcgctttattttgttgagagttgcccaaggaagtcaacaggagagccagatcaggaaacagcaaccagagggagatgatcacctgaaccactgctccaaaccatgggcagtaaatgctgtaaaggtggtccagatgaagatgcagtagaaagacagaggcggcagaagttgcttcttgcacaactgcatcacagaaaaagggtgaaggcagctgggcagatccaggcctggtggcgtggggtcctggtgcgcaggaccctgctggttgctgccctcagggcctggatgattcagtgctggtggaggacgttggtgcagagacggatccgtcagcggcggcaggccctgttgagggtctacgtcatccaggagcaggcgacggtcaagctccagtcctgcatccgcatgtggcagtgccggcaatgttaccgccaaatgtgcaatgctctctgcttgttccaggtcccagagagcagccttgccttccagactgatggctttttacaggtccaatatgcaatcccttcaaagcagccagagttccacattgaaatcctatcaatctgaaaggcctggggcatggagaacaggct

SEQ ID NO: 144411 - DNA, 1685 bp, Homo sapiens
  Payload ID: 8533
  Gene Symbol: IQCF3
  Gene Name: IQ motif containing F3
  Uniprot ID: P0C7M6
  ENST ID: ENST00000456080
  CDS Start-End: 1166-1630
agaagtacagacctgagtataatggagacctctagcctctaatcatgggcactaaaggggattgcagacttgaagggattgaaccaactactgcaagtcatgggcattcaatgttttgtaagagacaaccagtcaattcaaagatgcaggcaggcggagaaggatggccatgttcgccaaagcataatggaagatgttgatgaaaccgcactgttgaaacaaatggagcgggagaaaatgcctcctcctccaaagccaaagcatccagagtggctctgcatccccagtaaaactgtgcctgcaacacgtgggatccagtaagtaggagagtcctcacagggaagaagggaaagaaattcctaggatgctggggtgagggtaccccagaagaatgaccaggcagcaggcttgaagagcagctacccagattacacagtggtgcagcggtccatgaaaaaagcagagttgacggattatccaagttttggtggaaagtttgggataaattagtacaaaccatggcaatcaagagctccaggaaaaacagacaggaaatgcatgaaaggctatgtcacagcaatatgccatgttgctaagccatggacaggatataatcacaatgatggaagccctgaatgcttattgaaccaaaaactgtgatgctataatcatatagagaggagagcagaaggatgggaacaggtaaatcttcacttcatgaaaagaagtcaagaggatcttctttttccttgatgttctgaagctacaagatgacttccaataccatgttgaataggagtggttttggtatcaggatgatgctggcctcatagaatgagctggggaggggcctttcctcctcaattttttggaatagtttcagtaggaatgggaccagctcttctttgttcatctgatagaattcagctgtggatccttcttgtcctgcgctttattttgttgagagttgcccaaggaagtcaacaggagagccaggtattttctctttatccatcaactttgagcctggaaaaggcactgtggcccctggtcatagttgcctttgtgacatcacggccatctctttctccacctttcctgcccctgccaagatcaggaaacagcaaccagagggagatgatcacctgaaccactgctccaaaccatgggcagtaaatgctgtaaaggtggtccagatgaagatgcagtagaaagacagaggcggcagaagttgcttcttgcacaactgcatcacagaaaaagggtgaaggcagctgggcagatccaggcctggtggcgtggggtcctggtgcgcaggaccctgctggttgctgccctcagggcctggatgattcagtgctggtggaggacgttggtgcagagacggatccgtcagcggcggcaggccctgttgagggtctacgtcatccaggagcaggcgacggtcaagctccagtcctgcatccgcatgtggcagtgccggcaatgttaccgccaaatgtgcaatgctctctgcttgttccaggtcccagagagcagccttgccttccagactgatggctttttacaggtccaatatgcaatcccttcaaagcagccagagttccacattgaaatcctatcaatctgaaaggcctggggcatggagaacaggctgcactaccctaataaatgtctgaccaggt

SEQ ID NO: 144412 - DNA, 512 bp, Homo sapiens
  Payload ID: 8534
  Gene Symbol: IQCF5
  Gene Name: IQ motif containing F5
  Uniprot ID: A8MTL0
  ENST ID: ENST00000446461
  CDS Start-End: 54-500
cctgatcggaggagtgcgggccggagggtgatgggaccatctagcccctaaccatgggcccagaagagaagaccatcatgacagaaaggtctgcagctgttttcatccaggcctggtggcggggcatgctggtgcgacgcacactgctgcatgcagccctcagggcttggatcattcagtgctggtggaggcaggtgctggagaagctgctggcaaagaggcggaggatggtgttggagttctatgtgcagcaggaatgggcagcagtcaggctgcagtcctgggtccgcatgtggtgtgtccgccagcgttactgtcgtttgctcaacgctgtccgcatcatccaggtctattggcgctggcacagctgccattcccgtgtctttattgagggccactatgaactcaaagaaaaccaacttaatattcaacttgaaatctctttgggcttacaggcttgtaaggtgcaacaatgcataccccttccattaaaagaatgaccaggtctgcta

SEQ ID NO: 144413 - DNA, 446 bp, Homo sapiens
  Payload ID: 8535
  Gene Symbol: IQCF6
  Gene Name: IQ motif containing F6
  Uniprot ID: A8MYZ5
  ENST ID: ENST00000398780
  CDS Start-End: 61-384
ggacttacctgacagttagagaagacagccataaagattcagtcatggtggcgtggaaacatggtgcgccggacgttactgcaggcagcactcagagcctgggtcatccagtgctggtggaggtcaatgcaggccaagatgttggagcaaagacggcgcctggcactaagactctatacctgccaggagtgggcggtggtgaaggtgcaggcacaggttcgaatgtggcaggcccgcaggcggttcctccaggcacgccaagcggcctgcatcatccagtctcactggcgctggcatgccagccaaacccgaggcctgatccggggccactatgaggtcagagccagccggctggagcttgacatcgaaatcctcatgacctagggcgctgacagagccaaggaggctggatctctcttccaataaagacccttactgaccataca

SEQ ID NO: 144414 - DNA, 2262 bp, Homo sapiens
  Payload ID: 8536
  Gene Symbol: IQCG
  Gene Name: IQ motif containing G
  Uniprot ID: Q9H095
  ENST ID: ENST00000265239
  CDS Start-End: 426-1757
gagtggggctgtgggaggaagaaaggctagcgggcgttggccgtatgtgggtgtcttgaggcagtttttcagttctttcatttaccaaagtgacatgcacctactaggtgccaggtgtttagacgtacatacaaccctctgcaaaatctttcagtgtagtcctctgtatgaaaagtttccagccaagaattgccactgcacctgagataagggggatcctggccattaaggaaaccttgccttcgaaactgagccgtgaggaactatacaaaatgggaaattgggacaaatcccagtggctcatgacactaagaagtaaaattacgaactcactgagctggaagtcattcaacgggaattgaataggtaactgcacttttgtgagattataaatataccacggagggtaacgaagctacagaagaatggaagaagacagcctggaagactcaaaccttcctccaaaagtttggcattctgagatgacggtgtcagtgacaggcgaaccacctagtaccgtagaagaagaaggaatacctaaagaaacagacatagaaatcatcccagaaatcccggaaactctagagccactgtcccttccagatgtgctgaggatctcggcagttctggaggacaccacagaccagctctctattctgaactacatcatgcccgttcagtacgaagggagacagagcatctgcgtgaaaagcagagaaatgaatctagaaggaacgaatctagacaaacttccaatggcctcaacaatcacaaaaatacccagtccgttaataactgaggaaggacccaacttgccagaaatcagacacagaggccggttcgctgtggagtttaacaaaatgcaggatcttgtcttcaaaaaacctacaaggcagaccatcatgactacggagacactgaagaaaattcagattgataggcagtttttcagcgatgtgattgcagataccattaaggagttgcaagattcggccacttacaacagtctcctgcaagctttgagcaaagagagggaaaacaaaatgcatttctatgacatcattgccagggaggaaaaaggaagaaaacagataatatcacttcaaaaacagctaattaatgtcaaaaaggaatggcaatttgaagtccagagtcagaatgagtatattgctaacctcaaggaccaactgcaagagatgaaggcaaaatccaacttggagaatcgctacatgaaaaccaataccgagctgcagattgcccagacccagaaaaagtgtaacagaacagaggaactcttggtggaagagattgagaaactcaggatgaaaaccgaagaagaggcccggactcatacagagattgaaatgttccttagaaaggagcagcagaaacttgaggagaggctggagttctggatggagaaatacgataaggacacagaaatgaaacagaatgaactaaatgctctcaaagccacaaaggccagtgacttagcacaccttcaagacctggcaaagatgataagagagtatgaacaggtcatcattgaagatcgtatagaaaaggagaggagcaagaagaaggtaaaacaggatctcttggaattaaagagcgttataaagctccaggcctggtggcgaggcactatgatacggagagaaattggtggtttcaagatgcctaaagacaaagttgatagcaaggattcaaaaggcaaaggtaaaggcaaggataagaggagaggcaagaagaagtgaccaagttctcttttgtgttttctgctggtattctggaggtgggaaggacttggagagagttaagaaacacctggtacctcaaagatgactcatctacaggttgtttcctattgagactttcccagggaagcctgatttcactttgcctgttaatttcactctgcctgttaggtgggttttcaaaccctgatttaggattacaccattgacttagggcttcctcataccttgctgggaagaagtttctagtagtcctgtgaagattcattcttcttgctctttctcagcagaacaaaggagttcactggcttagctacagtgacgcattgaaacttgagtaattcctgtaatgtcagattttgattttacccaatttgtctgtagtgaaaaaactcttatgagcaaaagtattcagtaggaattacaatatgatgttattagctgtccagcataatatatacacagcaaagttttaataaatgttggttcctgcctgccttttaga

SEQ ID NO: 144415 - DNA, 1230 bp, Homo sapiens
  Payload ID: 8536
  Gene Symbol: IQCG
  Gene Name: IQ motif containing G
  ENST ID: ENST00000453254
  CDS Start-End: 184-1116
cgaaccctgagtggaggatgttcccgctgcctaaagaatgattgactgtatgaggaggactgcctgcaggaggctttatcgcccttttaggagaactcgtttagctgcctcgtgtccgcacctagtaactgcacttttgtgagattataaatataccacggagggtaacgaagctacagaagaatggaagaagacagcctggaagactcaaaccttcctccaaaagtttggcattctgagatgacggtgtcagtgacaggcgaaccacctagtaccgtagaagaagaaggaatacctaaagaaacagacatagaaatcatcccagaaatcccggaaactctagagccactgtcccttccagatgtgctgaggatctcggcagttctggaggacaccacagaccagctctctattctgaactacatcatgcccgttcagtacgaagggagacagagcatctgcgtgaaaagcagagaaatgaatctagaaggaacgaatctagacaaacttccaatggcctcaacaatcacaaaaatacccagtccgttaataactgaggaaggacccaacttgccagaaatcagacacagaggccggttcgctgtggagtttaacaaaatgcaggatcttgtcttcaaaaaacctacaaggcagaccatcatgactacggagacactgaagaaaattcagattgataggcagtttttcagcgatgtgattgcagataccattaaggagttgcaagattcggccacttacaacagtctcctgcaagctttgagcaaagagagggaaaacaaaatgcatttctatgacatcattgccagggaggaaaaaggaagaaaacagataatatcacttcaaaaacagctaattaatgtcaaaaaggaatggcaatttgaagtccagagtcagaatgagtatattgctaacctcaaggaccaactgcaagagatgaaggcaaaatccaacttggagaatcgctacatgaaaaccaataccgagctgcagattgcccagacccagaaaaagtgtaacagaacagaggaactcttggtggaagagattgaggtaatccctgggacattagccaagaacccaggagatggcaattgagctgtcactcctgatcccctctcagctaacaaaggagggagacaaagatttccctccatctctatcggcaacagcccctccacttgaggttgaaaataaaagcctaaatgagga

SEQ ID NO: 144416 - DNA, 550 bp, Homo sapiens
  Payload ID: 8536
  Gene Symbol: IQCG
  Gene Name: IQ motif containing G
  ENST ID: ENST00000452735
  CDS Start-End: 389-550
gatgttcccgctgcctaaagaatgattgactgtaagattgatttgccaacagtggggtgcttttctctcgatacacacagcaatagacagaacggaaattctgggatcctaatctagcatggaagagaaaggccgggagcacgaaggcagcaggacctcttccttctcttttttctttttctatacttcttttctcccctctacttatttatctctttcaagaaatgagactgggcacagtggctcacgcctgtaaacccagctctttgggaagccgaggcgggaggatcgcttgaggccaggagttcgagaccagcctgggcaacatagtaactgcacttttgtgagattataaatataccacggagggtaacgaagctacagaagaatggaagaagacagcctggaagactcaaaccttcctccaaaagtttggcattctgagatgacggtgtcagtgacaggcgaaccacctagtaccgtagaagaagaaggaatacctaaagaaacagacatagaaatcatcccagaaatcccggaaactctagag

SEQ ID NO: 144417 - DNA, 712 bp, Homo sapiens
  Payload ID: 8536
  Gene Symbol: IQCG
  Gene Name: IQ motif containing G
  ENST ID: ENST00000416896
  CDS Start-End: 117-712
ctcatgacactaagaagtaaaattacgaactcactgagctggaagtcattcaacgggaattgaatagagacagcctggaagactcaaaccttcctccaaaagtttggcattctgagatgacggtgtcagtgacaggcgaaccacctagtaccgtagaagaagaaggaatacctaaagaaacagacatagaaatcatcccagaaatcccggaaactctagagccactgtcccttccagatgtgctgaggatctcggcagttctggaggacaccacagaccagctctctattctgaactacatcatgcccgttcagtacgaagggagacagagcatctgcgtgaaaagcagagaaatgaatctagaaggaacgaatctagacaaacttccaatggcctcaacaatcacaaaaatacccagtccgttaataactgaggaaggacccaacttgccagaaatcagacacagaggccggttcgctgtggagtttaacaaaatgcaggatcttgtcttcaaaaaacctacaaggcagaccatcatgactacggagacactgaagaaaattcagattgataggcagtttttcagcgatgtgattgcagataccattaaggagttgcaagattcggccacttacaacagtctcctgcaagctttgagcaaagagagggaaaacaaaatgcatttctatgacatcattgccagggaggaaaa

SEQ ID NO: 144418 - DNA, 1981 bp, Homo sapiens
  Payload ID: 8536
  Gene Symbol: IQCG
  Gene Name: IQ motif containing G
  Uniprot ID: Q9H095
  ENST ID: ENST00000455191
  CDS Start-End: 147-1478
agtttacttcctgcgtccccggacgccgtaggtggaaaggcgaaccctgagtggaggatgttcccgctgcctaaagaatgattgactgtaactgcacttttgtgagattataaatataccacggagggtaacgaagctacagaagaatggaagaagacagcctggaagactcaaaccttcctccaaaagtttggcattctgagatgacggtgtcagtgacaggcgaaccacctagtaccgtagaagaagaaggaatacctaaagaaacagacatagaaatcatcccagaaatcccggaaactctagagccactgtcccttccagatgtgctgaggatctcggcagttctggaggacaccacagaccagctctctattctgaactacatcatgcccgttcagtacgaagggagacagagcatctgcgtgaaaagcagagaaatgaatctagaaggaacgaatctagacaaacttccaatggcctcaacaatcacaaaaatacccagtccgttaataactgaggaaggacccaacttgccagaaatcagacacagaggccggttcgctgtggagtttaacaaaatgcaggatcttgtcttcaaaaaacctacaaggcagaccatcatgactacggagacactgaagaaaattcagattgataggcagtttttcagcgatgtgattgcagataccattaaggagttgcaagattcggccacttacaacagtctcctgcaagctttgagcaaagagagggaaaacaaaatgcatttctatgacatcattgccagggaggaaaaaggaagaaaacagataatatcacttcaaaaacagctaattaatgtcaaaaaggaatggcaatttgaagtccagagtcagaatgagtatattgctaacctcaaggaccaactgcaagagatgaaggcaaaatccaacttggagaatcgctacatgaaaaccaataccgagctgcagattgcccagacccagaaaaagtgtaacagaacagaggaactcttggtggaagagattgagaaactcaggatgaaaaccgaagaagaggcccggactcatacagagattgaaatgttccttagaaaggagcagcagaaacttgaggagaggctggagttctggatggagaaatacgataaggacacagaaatgaaacagaatgaactaaatgctctcaaagccacaaaggccagtgacttagcacaccttcaagacctggcaaagatgataagagagtatgaacaggtcatcattgaagatcgtatagaaaaggagaggagcaagaagaaggtaaaacaggatctcttggaattaaagagcgttataaagctccaggcctggtggcgaggcactatgatacggagagaaattggtggtttcaagatgcctaaagacaaagttgatagcaaggattcaaaaggcaaaggtaaaggcaaggataagaggagaggcaagaagaagtgaccaagttctcttttgtgttttctgctggtattctggaggtgggaaggacttggagagagttaagaaacacctggtacctcaaagatgactcatctacaggttgtttcctattgagactttcccagggaagcctgatttcactttgcctgttaatttcactctgcctgttaggtgggttttcaaaccctgatttaggattacaccattgacttagggcttcctcataccttgctgggaagaagtttctagtagtcctgtgaagattcattcttcttgctctttctcagcagaacaaaggagttcactggcttagctacagtgacgcattgaaacttgagtaattcctgtaatgtcagattttgattttacccaatttgtctgtagtgaaaaaactcttatgagcaaaagtattcagtaggaattacaatatgatgttattagctgtccagcataatatatacacagcaaagttttaataaatgttggttcctgcctgcctttta

SEQ ID NO: 144419 - DNA, 7233 bp, Homo sapiens
  Payload ID: 8537
  Gene Symbol: IQGAP1
  Gene Name: IQ motif containing GTPase activating protein 1
  Uniprot ID: P46940
  ENST ID: ENST00000268182
  CDS Start-End: 125-5098
gacggcacggggcggggcctcggggaccccggcaagcccgcgcacttggcaggagctgtagctaccgccgtccgcgcctccaaggtttcacggcttcctcagcagagactcgggctcgtccgccatgtccgccgcagacgaggttgacgggctgggcgtggcccggccgcactatggctctgtcctggataatgaaagacttactgcagaggagatggatgaaaggagacgtcagaacgtggcttatgagtacctttgtcatttggaagaagcgaagaggtggatggaagcatgcctaggggaagatctgcctcccaccacagaactggaggaggggcttaggaatggggtctaccttgccaaactggggaacttcttctctcccaaagtagtgtccctgaaaaaaatctatgatcgagaacagaccagatacaaggcgactggcctccactttagacacactgataatgtgattcagtggttgaatgccatggatgagattggattgcctaagattttttacccagaaactacagatatctatgatcgaaagaacatgccaagatgtatctactgtatccatgcactcagtttgtacctgttcaagctaggcctggcccctcagattcaagacctatatggaaaggttgacttcacagaagaagaaatcaacaacatgaagactgagttggagaagtatggcatccagatgcctgcctttagcaagattgggggcatcttggctaatgaactgtcagtggatgaagccgcattacatgctgctgttattgctattaatgaagctattgaccgtagaattccagccgacacatttgcagctttgaaaaatccgaatgccatgcttgtaaatcttgaagagcccttggcatccacttaccaggatatactttaccaggctaagcaggacaaaatgacaaatgctaaaaacaggacagaaaactcagagagagaaagagatgtttatgaggagctgctcacgcaagctgaaattcaaggcaatataaacaaagtcaatacattttctgcattagcaaatatcgacctggctttagaacaaggagatgcactggccttgttcagggctctgcagtcaccagccctggggcttcgaggactgcagcaacagaatagcgactggtacttgaagcagctcctgagtgataaacagcagaagagacagagtggtcagactgaccccctgcagaaggaggagctgcagtctggagtggatgctgcaaacagtgctgcccagcaatatcagagaagattggcagcagtagcactgattaatgctgcaatccagaagggtgttgctgagaagactgttttggaactgatgaatcccgaagcccagctgccccaggtgtatccatttgccgccgatctctatcagaaggagctggctaccctgcagcgacaaagtcctgaacataatctcacccacccagagctctctgtcgcagtggagatgttgtcatcggtggccctgatcaacagggcattggaatcaggagatgtgaatacagtgtggaagcaattgagcagttcagttactggtcttaccaatattgaggaagaaaactgtcagaggtatctcgatgagttgatgaaactgaaggctcaggcacatgcagagaataatgaattcattacatggaatgatatccaagcttgcgtggaccatgtgaacctggtggtgcaagaggaacatgagaggattttagccattggtttaattaatgaagccctggatgaaggtgatgcccaaaagactctgcaggccctacagattcctgcagctaaacttgagggagtccttgcagaagtggcccagcattaccaagacacgctgattagagcgaagagagagaaagcccaggaaatccaggatgagtcagctgtgttatggttggatgaaattcaaggtggaatctggcagtccaacaaagacacccaagaagcacagaagtttgccttaggaatctttgccattaatgaggcagtagaaagtggtgatgttggcaaaacactgagtgcccttcgctcccctgatgttggcttgtatggagtcatccctgagtgtggtgaaacttaccacagtgatcttgctgaagccaagaagaaaaaactggcagtaggagataataacagcaagtgggtgaagcactgggtaaaaggtggatattattattaccacaatctggagacccaggaaggaggatgggatgaacctccaaattttgtgcaaaattctatgcagctttctcgggaggagatccagagttctatctctggggtgactgccgcatataaccgagaacagctgtggctggccaatgaaggcctgatcaccaggctgcaggctcgctgccgtggatacttagttcgacaggaattccgatccaggatgaatttcctgaagaaacaaatccctgccatcacctgcattcagtcacagtggagaggatacaagcagaagaaggcatatcaagatcggttagcttacctgcgctcccacaaagatgaagttgtaaagattcagtccctggcaaggatgcaccaagctcgaaagcgctatcgagatcgcctgcagtacttccgggaccatataaatgacattatcaaaatccaggcttttattcgggcaaacaaagctcgggatgactacaagactctcatcaatgctgaggatcctcctatggttgtggtccgaaaatttgtccacctgctggaccaaagtgaccaggattttcaggaggagcttgaccttatgaagatgcgggaagaggttatcaccctcattcgttctaaccagcagctggagaatgacctcaatctcatggatatcaaaattggactgctagtgaaaaataagattacgttgcaggatgtggtttcccacagtaaaaaacttaccaaaaaaaataaggaacagttgtctgatatgatgatgataaataaacagaagggaggtctcaaggctttgagcaaggagaagagagagaagttggaagcttaccagcacctgttttatttattgcaaaccaatcccacctatctggccaagctcatttttcagatgccccagaacaagtccaccaagttcatggactctgtaatcttcacactctacaactacgcgtccaaccagcgagaggagtacctgctcctgcggctctttaagacagcactccaagaggaaatcaagtcgaaggtagatcagattcaagagattgtgacaggaaatcctacggttattaaaatggttgtaagtttcaaccgtggtgcccgtggccagaatgccctgagacagatcttggccccagtcgtgaaggaaattatggatgacaaatctctcaacatcaaaactgaccctgtggatatttacaaatcttgggttaatcagatggagtctcagacaggagaggcaagcaaactgccctatgatgtgacccctgagcaggcgctagctcatgaagaagtgaagacacggctagacagctccatcaggaacatgcgggctgtgacagacaagtttctctcagccattgtcagctctgtggacaaaatcccttatgggatgcgcttcattgccaaagtgctgaaggactcgttgcatgagaagttccctgatgctggtgaggatgagctgctgaagattattggtaacttgctttattatcgatacatgaatccagccattgttgctcctgatgcctttgacatcattgacctgtcagcaggaggccagcttaccacagaccaacgccgaaatctgggctccattgcaaaaatgcttcagcatgctgcttccaataagatgtttctgggagataatgcccacttaagcatcattaatgaatatctttcccagtcctaccagaaattcagacggtttttccaaactgcttgtgatgtcccagagcttcaggataaatttaatgtggatgagtactctgatttagtaaccctcaccaaaccagtaatctacatttccattggtgaaatcatcaacacccacactctcctgttggatcaccaggatgccattgctccggagcacaatgatccaatccacgaactgctggacgacctcggcgaggtgcccaccatcgagtccctgataggggaaagctctggcaatttaaatgacccaaataaggaggcactggctaagacggaagtgtctctcaccctgaccaacaagttcgacgtgcctggagatgagaatgcagaaatggatgctcgaaccatcttactgaatacaaaacgtttaattgtggatgtcatccggttccagccaggagagaccttgactgaaatcctagaaacaccagccaccagtgaacaggaagcagaacatcagagagccatgcagagacgtgctatccgtgatgccaaaacacctgacaagatgaaaaagtcaaaatctgtaaaggaagacagcaacctcactcttcaagagaagaaagagaagatccagacaggtttaaagaagctaacagagcttggaaccgtggacccaaagaacaaataccaggaactgatcaacgacattgccagggatattcggaatcagcggaggtaccgacagaggagaaaggccgaactagtgaaactgcaacagacatacgctgctctgaactctaaggccaccttttatggggagcaggtggattactataaaagctatatcaaaacctgcttggataacttagccagcaagggcaaagtctccaaaaagcctagggaaatgaaaggaaagaaaagcaaaaagatttctctgaaatatacagcagcaagactacatgaaaaaggagttcttctggaaattgaggacctgcaagtgaatcagtttaaaaatgttatatttgaaatcagtccaacagaagaagttggagacttcgaagtgaaagccaaattcatgggagttcaaatggagacttttatgttacattatcaggacctgctgcagctacagtatgaaggagttgcagtcatgaaattatttgatagagctaaagtaaatgtcaacctcctgatcttccttctcaacaaaaagttctacgggaagtaattgatcgtttgctgccagcccagaaggatgaaggaaagaagcacctcacagctcctttctaggtccttctttcctcattggaagcaaagacctagccaacaacagcacctcaatctgatacactcccgatgccacatttttaactcctctcgctctgatgggacatttgttacccttttttcatagtgaaattgtgtttcaggcttagtctgacctttctggtttcttcattttcttccattacttaggaaagagtggaaactccactaaaatttctctgtgttgttacagtcttagaggttgcagtactatattgtaagctttggtgtttgtttaattagcaatagggatggtaggattcaaatgtgtgtcatttagaagtggaagctattagcaccaatgacataaatacatacaagacacacaactaaaatgtcatgttattaacagttattaggttgtcatttaaaaataaagttcctttatatttctgtcccatcaggaaaactgaaggatatggggaatcattggttatcttccattgtgtttttctttatggacaggagctaatggaagtgacagtcatgttcaaaggaagcatttctagaaaaaaggagataatgtttttaaatttcattatcaaacttgggcaattctgtttgtgtaactccccgactagtggatgggagagtcccattgctaaaattcagctactcagataaattcagaatgggtcaaggcacctgcctgtttttgttggtgcacagagattgacttgattcagagagacaattcactccatccctatggcagaggaatgggttagccctaatgtagaatgtcattgtttttaaaactgttttatatcttaagagtgccttattaaagtatagatgtatgtcttaaaatgtgggtgataggaattttaaagatttatataatgcatcaaaagccttagaataagaaaagctttttttaaattgctttatctgtatatctgaactcttgaaacttatagctaaaacactaggatttatctgcagtgttcagggagataattctgcctttaattgtctaaaacaaaaacaaaaccagccaacctatgttacacgtgagattaaaaccaattttttccccattttttctccttttttctcttgctgcccacattgtgcctttattttatgagccccagttttctgggcttagtttaaaaaaaaaatcaagtctaaacattgcatttagaaagcttttgttcttggataaaaagtcatacactttaaaaaaaaaaaaaactttttccaggaaaatatattgaaatcatgctgctgagcctctattttctttctttgatgttttgattcagtattcttttatcataaatttttagcatttaaaaattcactgatgtacattaagccaataaactgctttaatgaataacaaactatgtagtgtgtccctattataaatgcattggagaagtatttttatgagactctttactcaggtgcatggttacagcccacagggaggcatggagtgccatggaaggattcgccactacccagaccttgttttttgttgtattttggaagacaggttttttaaagaaacattttcctcagattaaaagatgatgctattacaactagcattgcctcaaaaactgggaccaaccaaagtgtgtcaaccctgtttccttaaaagaggctatgaatcccaaaggccacatccaagacaggcaataatgagcagagtttacagctcctttaataaaatgtgtcagtaattttaaggtttatagttccctcaacacaattgctaatgcagaatagtgtaaaatgcgcttcaagaatgttgatgatgatgatatagaattgtggctttagtagcacagaggatgccccaacaaactcatggcgttgaaaccacacagttctcattactgttatttattagctgtagcattctctgtctcctctctctcctcctttgaccttctcctcgaccagccatcatgacatttaccatgaatttacttcctcccaagagtttggactgcccgtcagattgttgctgcacatagttgcctttgtatctctgtatgaaataaaaggtcatttgttcatgtt

SEQ ID NO: 144420 - DNA, 559 bp, Homo sapiens
  Payload ID: 8537
  Gene Symbol: IQGAP1
  Gene Name: IQ motif containing GTPase activating protein 1
  ENST ID: ENST00000560418
  CDS Start-End: 430-559
agctaccgccgtccgcgcctccaaggtttcacggcttcctcagcagagactcgggctcgtccgccatgtccgccgcagacgaggttgacgggctgggcgtggcccggccgcactatggctgtggatggaagcatgcctaggggaagatctgcctcccaccacagaactggaggaggggcttaggaatggggtctaccttgccaaactggggaacttcttctctcccaaagtagtgtccctgaaaaaaatctatgatcgagaacagaccagatacaaggcgactggcctccactttagacacactgataatgtgattcagtggttgaatgccatggatgagattggattgcctaagagaaagttctgaagttctcttccttgccactgattttttacccagaaactacagatatctatgatcgaaagaacatgccaagatgtatctactgtatccatgcactcagtttgtacctgttcaagctaggcctggcccctcagattcaagacctatatggaaaggttgacttcacagaagaagaaatcaacaacatgaagactg

SEQ ID NO: 144421 - DNA, 3602 bp, Homo sapiens
  Payload ID: 8537
  Gene Symbol: IQGAP1
  Gene Name: IQ motif containing GTPase activating protein 1
  ENST ID: ENST00000560738
  CDS Start-End: 82-3339
acttggcaggagctgtagctaccgccgtccgcgcctccaaggtttcacggcttcctcagcagagactcgggctcgtccgccatgtccgccgcagacgaggttgacgggctgggcgtggcccggccgcactatggctctgtcctggataatgaaagacttactgcagaggagatggatgaaaggagacgtggaatctggcagtccaacaaagacacccaagaagcacagaagtttgccttaggaatctttgccattaatgaggcagtagaaagtggtgatgttggcaaaacactgagtgcccttcgctcccctgatgttggcttgtatggagtcatccctgagtgtggtgaaacttaccacagtgatcttgctgaagccaagaagaaaaaactggcagtaggagataataacagcaagtgggtgaagcactgggtaaaaggtggatattattattaccacaatctggagacccaggaaggaggatgggatgaacctccaaattttgtgcaaaattctatgcagctttctcgggaggagatccagagttctatctctggggtgactgccgcatataaccgagaacagctgtggctggccaatgaaggcctgatcaccaggctgcaggctcgctgccgtggatacttagttcgacaggaattccgatccaggatgaatttcctgaagaaacaaatccctgccatcacctgcattcagtcacagtggagaggatacaagcagaagaaggcatatcaagatcggttagcttacctgcgctcccacaaagatgaagttgtaaagattcagtccctggcaaggatgcaccaagctcgaaagcgctatcgagatcgcctgcagtacttccgggaccatataaatgacattatcaaaatccaggcttttattcgggcaaacaaagctcgggatgactacaagactctcatcaatgctgaggatcctcctatggttgtggtccgaaaatttgtccacctgctggaccaaagtgaccaggattttcaggaggagcttgaccttatgaagatgcgggaagaggttatcaccctcattcgttctaaccagcagctggagaatgacctcaatctcatggatatcaaaattggactgctagtgaaaaataagattacgttgcaggatgtggtttcccacagtaaaaaacttaccaaaaaaaataaggaacagttgtctgatatgatgatgataaataaacagaagggaggtctcaaggctttgagcaaggagaagagagagaagttggaagcttaccagcacctgttttatttattgcaaaccaatcccacctatctggccaagctcatttttcagatgccccagaacaagtccaccaagttcatggactctgtaatcttcacactctacaactacgcgtccaaccagcgagaggagtacctgctcctgcggctctttaagacagcactccaagaggaaatcaagtcgaaggtagatcagattcaagagattgtgacaggaaatcctacggttattaaaatggttgtaagtttcaaccgtggtgcccgtggccagaatgccctgagacagatcttggccccagtcgtgaaggaaattatggatgacaaatctctcaacatcaaaactgaccctgtggatatttacaaatcttgggttaatcagatggagtctcagacaggagaggcaagcaaactgccctatgatgtgacccctgagcaggcgctagctcatgaagaagtgaagacacggctagacagctccatcaggaacatgcgggctgtgacagacaagtttctctcagccattgtcagctctgtggacaaaatcccttatgggatgcgcttcattgccaaagtgctgaaggactcgttgcatgagaagttccctgatgctggtgaggatgagctgctgaagattattggtaacttgctttattatcgatacatgaatccagccattgttgctcctgatgcctttgacatcattgacctgtcagcaggaggccagcttaccacagaccaacgccgaaatctgggctccattgcaaaaatgcttcagcatgctgcttccaataagatgtttctgggagataatgcccacttaagcatcattaatgaatatctttcccagtcctaccagaaattcagacggtttttccaaactgcttgtgatgtcccagagcttcaggataaatttaatgtggatgagtactctgatttagtaaccctcaccaaaccagtaatctacatttccattggtgaaatcatcaacacccacactctcctgttggatcaccaggatgccattgctccggagcacaatgatccaatccacgaactgctggacgacctcggcgaggtgcccaccatcgagtccctgataggggaaagctctggcaatttaaatgacccaaataaggaggcactggctaagacggaagtgtctctcaccctgaccaacaagttcgacgtgcctggagatgagaatgcagaaatggatgctcgaaccatcttactgaatacaaaacgtttaattgtggatgtcatccggttccagccaggagagaccttgactgaaatcctagaaacaccagccaccagtgaacaggaagcagaacatcagagagccatgcagagacgtgctatccgtgatgccaaaacacctgacaagatgaaaaagtcaaaatctgtaaaggaagacagcaacctcactcttcaagagaagaaagagaagatccagacaggtttaaagaagctaacagagcttggaaccgtggacccaaagaacaaataccaggaactgatcaacgacattgccagggatattcggaatcagcggaggtaccgacagaggagaaaggccgaactagtgaaactgcaacagacatacgctgctctgaactctaaggccaccttttatggggagcaggtggattactataaaagctatatcaaaacctgcttggataacttagccagcaagggcaaagtctccaaaaagcctagggaaatgaaaggaaagaaaagcaaaaagatttctctgaaatatacagcagcaagactacatgaaaaaggagttcttctggaaattgaggacctgcaagtgaatcagtttaaaaatgttatatttgaaatcagtccaacagaagaagttggagacttcgaagtgaaagccaaattcatgggagttcaaatggagacttttatgttacattatcaggacctgctgcagctacagtatgaaggagttgcagtcatgaaattatttgatagagctaaagtaaatgtcaacctcctgatcttccttctcaacaaaaagttctacgggaagtaattgatcgtttgctgccagcccagaaggatgaaggaaagaagcacctcacagctcctttctaggtccttctttcctcattggaagcaaagacctagccaacaacagcacctcaatctgatacactcccgatgccacatttttaactcctctcgctctgatgggacatttgttacccttttttcatagtgaaattgtgtttcaggcttagtctgacctttctggtttcttcattttcttccattacttaggaaagagtggaaact

SEQ ID NO: 144422 - DNA, 350 bp, Homo sapiens
  Payload ID: 8537
  Gene Symbol: IQGAP1
  Gene Name: IQ motif containing GTPase activating protein 1
  ENST ID: ENST00000560373
  CDS Start-End: 1-324
gtaaaaggtggatattattattaccacaatctggagacccaggaaggaggatgggatgaacctccaaattttgtgcaaaattctatgcagctttctcgggaggagatccagagttctatctctggggtgactgccgcatataaccgagaacagctgtggctggccaatgaaggcctgatcaccaggctgcaggctcgctgccgtggatacttagttcgacaggaattccgatccaggatgaatttcctgaagaaacaaatccctgccatcacctgcattcaggtatttcagaacctatcacacagacagcaagcgggcatctagagcaggggtaataaacggtcagctgt

SEQ ID NO: 144423 - DNA, 1201 bp, Homo sapiens
  Payload ID: 8537
  Gene Symbol: IQGAP1
  Gene Name: IQ motif containing GTPase activating protein 1
  ENST ID: ENST00000559809
  CDS Start-End: 1-146
acgaggttgacgggctgggcgtggcccggccgcactatggctctgtcctggataatgaaagacttactgcagaggagatggatgaaaggagacgtcagaacgtggcttatgagtacctttgtcatttggaagaagcgaagaggtaaagattggctggctggagagaagattaagagaagggaactgataatagtgtgaatacaaataaagattgctttgaggctgaacacagtggtccatgcctgtaatcccaacacgttgggaggccgaggtgggggggaatcacttgaacccagctgtttgagaccagattgggcaacatagtgacaccccatctctacaaaaaaattttaaaaattagccaggcatggtggtgcatgccagtagtcctagctactcgggagcctgaggagggaggatcacttgagtccgggaggtcgaggcagcagtgagccgtgctctcaccactgtgctctagcctgggtgacaaaactcctgtttttggtggggggaaaaaaaagaaaagatttatttgagtatgttatagatgtaactgggaagctggtggttgagggaataagtataggtagggtatttatttatggcaataagtagccttgatgagagtttatcatgaatcactgtgatgggcatttaagtgtactgaacggttttccaggtttctattgttcagtcttatgcttattgtgcatgttttgggcgttaccaactgtggggtggaaatagcatttttaggatttgaagttattggctttaatgtttcacttatgcttcatgaattttgatttatatatgaattgagtctcctcctcctatgacctgcggagtggctgcttggtttgggaggcttagaagcgtggtgctgttggtgtaggtccatctgtttggcaatattcagagtcagcatcctctgcattctttgtgaagtgaatgtaaagctgctcttttcctttttcagatgccccacaaccttgtggtcttaattttagagtgtcattttgttatcagtgattcatttcttttgttctggtgcttgtgttcttttgcagagtcccagggtagatgtaattatagatcatgtattctataagtgagctttggtggaaaagtcaagtgagggataatgaaatatttgtaattaacgtttaataaaaagggtgtttgaagtggtgctaataaa

SEQ ID NO: 144424 - DNA, 5863 bp, Homo sapiens
  Payload ID: 8537
  Gene Symbol: IQGAP1
  Gene Name: IQ motif containing GTPase activating protein 1
  ENST ID: ENST00000633485
  CDS Start-End: 96-3671
cggcaagcccgcgcacttggcaggagctgtagctaccgccgtccgcgcctccaaggtttcacggcttcctcagcagagactcgggctcgtccgccatgtccgccgcagacgaggttgacgggctgggcgtggcccggccgcactatggctctgtcctggataatgaaagacttactgcagaggagatggatgaaaggagacgtcagaacgtggcttatgagtacctttgtcatttggaagaagcgaagaggtggatggaagcatgcctaggggaagatctgcctcccaccacagaactggaggaggggcttaggaatggggtctaccttgccaaactggggaacttcttctctcccaaagtagtgtccctgaaaaaaatctatgatcgagaacagaccagatacaaggcgactggcctccactttagacacactgataatgtgattcagtggttgaatgccatggatgagattggattgcctaagattttttacccagaaactacagatatctatgatcgaaagaacatgccaagatgtatctactgtatccatgcactcagtttgtacctgttcaagctaggcctggcccctcagattcaagacctatatggaaaggttgacttcacagaagaagaaatcaacaacatgaagactgagttggagaagtatggcatccagatgcctgcctttagcaagattgggggcatcttggctaatgaactgtcagtggatgaagccgcattacatgctgctgttattgctattaatgaagctattgaccgtagaattccagccgacacatttgcagctttgaaaaatccgaatgccatgcttgtaaatcttgaagagcccttggcatccacttaccaggatatactttaccaggctaagcaggacaaaatgacaaatgctaaaaacaggacagaaaactcagagagagaaagagatgtttatgaggagctgctcacgcaagctgaaattcaaggcaatataaacaaagtcaatacattttctgcattagcaaatatcgacctggctttagaacaaggagatgcactggccttgttcagggctctgcagtcaccagccctggggcttcgaggactgcagcaacagaatagcgactggtacttgaagcagctcctgagtgataaacagcagaagagacagagtggtcagactgaccccctgcagaaggaggagctgcagtctggagtggatgctgcaaacagtgctgcccagcaatatcagagaagattggcagcagtagcactgattaatgctgcaatccagaagggtgttgctgagaagactgttttggaactgatgaatcccgaagcccagctgccccaggtgtatccatttgccgccgatctctatcagaaggagctggctaccctgcagcgacaaagtcctgaacataatctcacccacccagagctctctgtcgcagtggagatgttgtcatcggtggccctgatcaacagggcattggaatcaggagatgtgaatacagtgtggaagcaattgagcagttcagttactggtcttaccaatattgaggaagaaaactgtcagaggtatctcgatgagttgatgaaactgaaggctcaggcacatgcagagaataatgaattcattacatggaatgatatccaagcttgcgtggaccatgtgaacctggtggtgcaagaggaacatgagaggattttagccattggtttaattaatgaagccctggatgaaggtgatgcccaaaagactctgcaggccctacagattcctgcagctaaacttgagggagtccttgcagaagtggcccagcattaccaagacacgctgattagagcgaagagagagaaagcccaggaaatccaggatgagtcagctgtgttatggttggatgaaattcaaggtggaatctggcagtccaacaaagacacccaagaagcacagaagtttgccttaggaatctttgccattaatgaggcagtagaaagtggtgatgttggcaaaacactgagtgcccttcgctcccctgatgttggcttgtatggagtcatccctgagtgtggtgaaacttaccacagtgatcttgctgaagccaagaagaaaaaactggcagtaggagataataacagcaagtgggtgaagcactgggtaaaaggtggatattattattaccacaatctggagacccaggaaggaggatgggatgaacctccaaattttgtgcaaaattctatgcagctttctcgggaggagatccagagttctatctctggggtgactgccgcatataaccgagaacagctgtggctggccaatgaaggcctgatcaccaggctgcaggctcgctgccgtggatacttagttcgacaggaattccgatccaggatgaatttcctgaagaaacaaatccctgccatcacctgcattcagtcacagtggagaggatacaagcagaagaaggcatatcaagatcggttagcttacctgcgctcccacaaagatgaagttgtaaagattcagtccctggcaaggatgcaccaagctcgaaagcgctatcgagatcgcctgcagtacttccgggaccatataaatgacattatcaaaatccaggcttttattcgggcaaacaaagctcgggatgactacaagactctcatcaatgctgaggatcctcctatggttgtggtccgaaaatttgtccacctgctggaccaaagtgaccaggattttcaggaggagcttgaccttatgaagatgcgggaagaggttatcaccctcattcgttctaaccagcagctggagaatgacctcaatctcatggatatcaaaattggactgctagtgaaaaataagattacgttgcaggatgtggtttcccacagtaaaaaacttaccaaaaaaaataaggaacagttgtctgatatgatgatgataaataaacagaagggaggtctcaaggctttgagcaaggagaagagagagaagttggaagcttaccagcacctgttttatttattgcaaaccaatcccacctatctggccaagctcatttttcagatgccccagaacaagtccaccaagttcatggactctgtaatcttcacactctacaactacgcgtccaaccagcgagaggagtacctgctcctgcggctctttaagacagcactccaagaggaaatcaagtcgaaggtagatcagattcaagagattgtgacaggaaatcctacggttattaaaatggttgtaagtttcaaccgtggtgcccgtggccagaatgccctgagacagatcttggccccagtcgtgaaggaaattatggatgacaaatctctcaacatcaaaactgaccctgtggatatttacaaatcttgggttaatcagatggagtctcagacaggagaggcaagcaaactgccctatgatgtgacccctgagcaggcgctagctcatgaagaagtgaagacacggctagacagctccatcaggaacatgcgggctgtgacagacaagtttctctcagccattgtcagctctgtggacaaaatcccttatgggatgcgcttcattgccaaagtgctgaaggactcgttgcatgagaagttccctgatgctggtgaggatgagctgctgaagttctgtgctttcctacagtgaggcctcgattctagactttctgttcagattattggtaacttgctttattatcgatacatgaatccagccattgttgctcctgatgcctttgacatcattgacctgtcagcaggaggccagcttaccacagaccaacgccgaaatctgggctccattgcaaaaatgcttcagcatgctgcttccaataagatgtttctgggagataatgcccacttaagcatcattaatgaatatctttcccagtcctaccagaaattcagacggtttttccaaactgcttgtgatgtcccagagcttcaggataaatttaatgtggatgagtactctgatttagtaaccctcaccaaaccagtaatctacatttccattggtgaaatcatcaacacccacactctcctgttggatcaccaggatgccattgctccggagcacaatgatccaatccacgaactgctggacgacctcggcgaggtgcccaccatcgagtccctgataggggaaagctctggcaatttaaatgacccaaataaggaggcactggctaagacggaagtgtctctcaccctgaccaacaagttcgacgtgcctggagatgagaatgcagaaatggatgctcgaaccatcttactgaatacaaaacgtttaattgtggatgtcatccggttccagccaggagagaccttgactgaaatcctagaaacaccagccaccagtgaacaggaagcagaacatcagagagccatgcagagacgtgctatccgtgatgccaaaacacctgacaagatgaaaaagtcaaaatctgtaaaggaagacagcaacctcactcttcaagagaagaaagagaagatccagacaggtttaaagaagctaacagagcttggaaccgtggacccaaagaacaaataccaggaactgatcaacgacattgccagggatattcggaatcagcggaggtaccgacagaggagaaaggccgaactagtgaaactgcaacagacatacgctgctctgaactctaaggccaccttttatggggagcaggtggattactataaaagctatatcaaaacctgcttggataacttagccagcaagggcaaagtctccaaaaagcctagggaaatgaaaggaaagaaaagcaaaaagatttctctgaaatatacagcagcaagactacatgaaaaaggagttcttctggaaattgaggacctgcaagtgaatcagtttaaaaatgttatatttgaaatcagtccaacagaagaagttggagacttcgaagtgaaagccaaattcatgggagttcaaatggagacttttatgttacattatcaggacctgctgcagctacagtatgaaggagttgcagtcatgaaattatttgatagagctaaagtaaatgtcaacctcctgatcttccttctcaacaaaaagttctacgggaagtaattgatcgtttgctgccagcccagaaggatgaaggaaagaagcacctcacagctcctttctaggtccttctttcctcattggaagcaaagacctagccaacaacagcacctcaatctgatacactcccgatgccacatttttaactcctctcgctctgatgggacatttgttacccttttttcatagtgaaattgtgtttcaggcttagtctgacctttctggtttcttcattttcttccattacttaggaaagagtggaaactccactaaaatttctctgtgttgttacagtcttagaggttgcagtactatattgtaagctttggtgtttgtttaattagcaatagggatggtaggattcaaatgtgtgtcatttagaagtggaagctattagcaccaatgacataaatacatacaagacacacaactaaaatgtcatgttattaacagttattaggttgtcatttaaaaataaagttcctttatatttctgtcccatcaggaaaactgaaggatatggggaatcattggttatcttccattgtgtttttctttatggacaggagctaatggaagtgacagtcatgttcaaaggaagcatttctagaaaaaaggagataatgtttttaaatttcattatcaaacttgggcaattctgtttgtgtaactccccgactagtggatgggagagtcccattgctaaaattcagctactcagataaattcagaatgggtcaaggcacctg

SEQ ID NO: 144425 - DNA, 5844 bp, Homo sapiens
  Payload ID: 8538
  Gene Symbol: IQGAP2
  Gene Name: IQ motif containing GTPase activating protein 2
  Uniprot ID: Q13576
  ENST ID: ENST00000274364
  CDS Start-End: 298-5025
cgcggtgaataacggggcctggctggaggagaaaggaaacctgctgcgggaggcggcggcgaccggccagggagcgagggaggagagttcacttttacttcagtgtcagcgcgcggcggccgtggctggctctggcgagagagcaccgagggagtgggtcgcagatcttcgggcggctaggggaaatcggcgagaggcgggatccgagcgcgccggcggggcgcagagcccgcgagcctggccagcgagggtagccgcggggggcgcgccccgggcgggcccccggagacgcgcaggatgccacacgaagagctgccgtcgctgcagagaccccgctatggctctattgtggacgatgaaaggctctctgcagaggagatggatgagaggaggcggcagaacattgcttatgaatatctgtgccacttagaggaagccaaaaggtggatggaagtttgcttagttgaagaattgccaccaaccactgaattggaagaagggctccggaatggagtttaccttgcaaagttagccaagttctttgccccgaaaatggtatcagagaaaaagatctatgatgtggaacaaacacgttataagaagtctggccttcattttcgacacacagataataccgtccagtggttaagagcgatggagtctattggtctacccaagatattttatccagaaacaacagatgtctatgatcggaaaaacataccaagaatgatatattgcattcacgcactgagtttgtatctgttcaaactaggaatagcaccccagatccaggatttgttgggcaaagtagacttcacagaggaggaaatcagtaatatgagaaaagaacttgagaaatatggaatacagatgccatctttcagcaaaataggtggtattctggccaatgaactgtccgtggatgaagctgcattacatgctgcagttatagccattaatgaagcagttgaaaaaggaatagcagagcaaaccgttgtaacactaagaaacccaaatgcggttttaactttagtggatgacaaccttgcaccagaatatcagaaagaactctgggatgccaaaaagaaaaaagaggaaaatgcaagactgaagaatagctgtatttcagaagaagaaagagatgcttatgaagaactgctgacacaagcagaaatccaaggcaatattaataaagtcaacaggcaggctgcagtggaccatatcaatgctgtcattccggaaggtgaccccgagaatacgctgcttgcactgaagaaaccagaggcccagctgcctgctgtttatccctttgctgctgccatgtatcagaacgaacttttcaacctccagaaacagaacaccatgaactacttggcccacgaggagcttttgattgctgtggaaatgttgtctgctgttgctttactaaaccaggccttggaaagcaacgatcttgtgtctgtgcagaatcaactcagaagccccgcaataggcttaaacaatctggacaaggcatatgtggaacgttatgcaaacacactactctctgttaaactagaagttttatcccaagggcaagataacttaagctggaatgaaattcagaattgtattgatatggttaatgctcaaattcaagaagaaaatgaccgagttgtagctgtagggtacatcaatgaagctattgatgaagggaatcctttgaggactttagaaactttgctcctacctactgcgaatattagtgatgtggacccagcccatgcccagcactaccaggatgttttataccatgctaaatcacagaaactcggagactctgagagtgtttccaaagtgctttggctggatgagatacagcaagccgtcgatgatgccaacgtggacaaggacagagcaaaacaatgggttactctggtggttgatgttaatcagtgtttggaaggaaaaaaatcaagtgatattttgtctgtattgaagtcttccacttctaatgcaaatgacataatcccggagtgtgctgacaaatactatgatgcccttgtgaaggcaaaagagctcaaatctgaaagagtgtctagtgacggttcatggctcaaactcaacctgcacaaaaaatatgactactattacaacactgattcaaaagagagttcctgggtcacacctgaatcatgcttgtataaagaatcatggctcacaggaaaagaaatcgaggacattattgaggaagtcacagtaggttacattcgtgagaatatatggtctgcttcagaagagttgcttcttcgctttcaagccacaagctcaggacccatccttagggaagagtttgaagctagaaaatcatttttgcatgaacaagaagagaatgtggtcaaaatacaggctttttggaaaggatataaacaacggaaggagtatatgcacaggcggcaaacgttcattgataatactgattctattgtgaagattcagtcctggttccgaatggcaactgcaagaaagagctatctttcaagactacagtatttcagagatcataataatgaaattgtgaaaatacagtcactgttgagagcgaacaaagctagagatgactacaaaacattggttggctctgaaaacccaccattaacagtaattcgcaaatttgtatacctgctggaccaaagtgatttggatttccaggaggaactagaggttgcacgattaagggaagaagtagtgaccaagatcagggccaatcaacagctggaaaaagacctgaacctgatggacatcaagattggactgctggtgaagaacaggatcacactagaggatgtaatttcacatagtaaaaagctgaacaagaaaaaaggaggagaaatggaaatactgaataacaccgacaaccaaggaataaaaagtttgagtaaggagaggagaaaaacactagaaacatatcagcagctgttttaccttttacagaccaaccctttatacttggctaagctgattttccagatgccacagaacaagtccactaaatttatggatactgttattttcacactatataattatgcctctaatcagcgagaagaatatctacttctcaagctttttaaaactgctctggaggaagaaataaaatcaaaagtggaccaggtacaggacatagttactggtaaccctacagtcatcaagatggtcgtcagcttcaatagaggtgcccggggacagaacaccctgcgccaactcctggctccagtggtaaaagagatcatcgacgacaagtcgctgattatcaacacaaaccctgtagaggtgtacaaggcttgggtgaaccaactagaaacacagactggagaggccagcaagttgccttatgatgtgaccacagaacaagctctaacatacccagaagtgaaaaataaactggaggcttccattgagaacctgagaagggtcaccgacaaagtcctgaattctatcatttcttcccttgatctactgccttatggattgaggtatatagccaaagtactgaagaattcgatccatgagaaattccccgatgcaacagaagatgagctattaaagattgttggaaacctcctgtactatcggtacatgaatccagccattgtagctccagatggctttgatatcatcgacatgacagctggaggtcagataaattctgaccaaaggagaaacttaggatcagtggccaaggttcttcagcacgcagcctccaacaagctgtttgaaggagaaaatgagcatctctcatctatgaacaattatttatcagagacgtatcaggaattcaggaaatatttcaaagaagcatgtaatgtccctgagccagaagagaagtttaatatggacaaatacacagacctggtgacagtcagcaaaccagtcatttatatttcaattgaagaaatcatcagcacacactcactcctgttggaacaccaggatgcaattgcccctgagaaaaatgacttactgagtgaattgctggggtcgctgggagaggtgccaaccgtggaatcttttcttggggaaggagcagttgaccccaatgaccctaacaaggcaaatacactaagtcagctttcaaagaccgagatttctcttgtcttgacaagcaaatatgacatagaggacggtgaagctatagatagccgaagcctcatgataaagaccaagaagctgataattgatgtgatccggaaccagccagggaacacattgacagaaatcttagagacaccagcaactgcgcaacaggaggtagaccatgccacggacatggtgagccgtgcaatgatagattccaggactccagaagaaatgaagcatagccaatctatgattgaagatgcacagctgcctcttgagcagaagaagaggaaaatccagaggaatcttcggacgttggaacagactggacacgtgtcatccgaaaataaataccaagacattctcaatgagattgccaaggatattcgaaatcaaagaatctatcgtaagcttcgaaaagctgaattggcaaaacttcagcagaccctgaatgcacttaacaagaaggcagcattttatgaagagcaaatcaattattatgacacctacataaagacttgtttagacaacttaaaaagaaaaaatactcggagatcaattaaactagatggaaaaggagaacccaaaggggcgaagagagcgaagccagtgaagtacactgcagcaaagctgcatgagaaaggtgtcctgctagatatagatgatcttcaaacaaaccagtttaagaatgttacatttgatatcatagctactgaagatgtaggcattttcgatgtaagatcaaaattccttggtgttgagatggaaaaggtgcaactcaatattcaggatttacttcagatgcaatatgaaggagtagctgtaatgaaaatgtttgataaggttaaagtgaatgtaaaccttctcatatacctgctgaacaagaagttctatggaaagtgaagtgcctacagaaatttcttggattctgtatcatctggattaggaaatgaatttgtttaatatttttgtttttaaacatgattgaaatcactgcttataaatgtgtgatttttttaaaacgaccaaaactgttctgaagaatgtacccaggtgcctttttgctaatttgatactataatagaatgagacataaaatgaattaatggaaacatatccacactgtactgtgatataggtactctgatttaaaactttggacatcctgtgatctgttttaaagttggggggtgggaaatttagctgactagggacaaacatgtaaacctattttcctatgaaaaaaattttaaatgtcccacttgaataacgtaattcttcatagtttttttaatctatggataaatggaaacctaattatttgtaatgaattatttagacagttctaagccctgtcttctgggagttatcaattttaaagagaacttttgtgcaattcaaatgaagtttttataagtaattgaaaatgacaacacaataacactttctgtataaaagtatatattttatgtgatttattcctactaaatgaaagtgcactactgcctcatgtaaagactcttgcacgcagagcctttaagtgactaaggaacaacatagatagtgagcatagtccccacctccacccctcacaatttatttgaatacttcaattgtgcctctcaattttttgtaatgctaaaaaatcagtatctagatggtttttaaatgtattctctggaaattgttttatgtaaaataaatgttacttaattccattaa

SEQ ID NO: 144426 - DNA, 3376 bp, Homo sapiens
  Payload ID: 8538
  Gene Symbol: IQGAP2
  Gene Name: IQ motif containing GTPase activating protein 2
  Uniprot ID: Q13576
  ENST ID: ENST00000396234
  CDS Start-End: 70-3285
agcagcttgtattcttagaaacgcagcagacagcaactttagcaggtgatttcaatcaagtcagctgaaatgcactcacttccaggagttgtagctgtagggtacatcaatgaagctattgatgaagggaatcctttgaggactttagaaactttgctcctacctactgcgaatattagtgatgtggacccagcccatgcccagcactaccaggatgttttataccatgctaaatcacagaaactcggagactctgagagtgtttccaaagtgctttggctggatgagatacagcaagccgtcgatgatgccaacgtggacaaggacagagcaaaacaatgggttactctggtggttgatgttaatcagtgtttggaaggaaaaaaatcaagtgatattttgtctgtattgaagtcttccacttctaatgcaaatgacataatcccggagtgtgctgacaaatactatgatgcccttgtgaaggcaaaagagctcaaatctgaaagagtgtctagtgacggttcatggctcaaactcaacctgcacaaaaaatatgactactattacaacactgattcaaaagagagttcctgggtcacacctgaatcatgcttgtataaagaatcatggctcacaggaaaagaaatcgaggctttttggaaaggatataaacaacggaaggagtatatgcacaggcggcaaacgttcattgataatactgattctattgtgaagattcagtcctggttccgaatggcaactgcaagaaagagctatctttcaagactacagtatttcagagatcataataatgaaattgtgaaaatacagtcactgttgagagcgaacaaagctagagatgactacaaaacattggttggctctgaaaacccaccattaacagtaattcgcaaatttgtatacctgctggaccaaagtgatttggatttccaggaggaactagaggttgcacgattaagggaagaagtagtgaccaagatcagggccaatcaacagctggaaaaagacctgaacctgatggacatcaagattggactgctggtgaagaacaggatcacactagaggatgtaatttcacatagtaaaaagctgaacaagaaaaaaggaggagaaatggaaatactgaataacaccgacaaccaaggaataaaaagtttgagtaaggagaggagaaaaacactagaaacatatcagcagctgttttaccttttacagaccaaccctttatacttggctaagctgattttccagatgccacagaacaagtccactaaatttatggatactgttattttcacactatataattatgcctctaatcagcgagaagaatatctacttctcaagctttttaaaactgctctggaggaagaaataaaatcaaaagtggaccaggtacaggacatagttactggtaaccctacagtcatcaagatggtcgtcagcttcaatagaggtgcccggggacagaacaccctgcgccaactcctggctccagtggtaaaagagatcatcgacgacaagtcgctgattatcaacacaaaccctgtagaggtgtacaaggcttgggtgaaccaactagaaacacagactggagaggccagcaagttgccttatgatgtgaccacagaacaagctctaacatacccagaagtgaaaaataaactggaggcttccattgagaacctgagaagggtcaccgacaaagtcctgaattctatcatttcttcccttgatctactgccttatggattgaggtatatagccaaagtactgaagaattcgatccatgagaaattccccgatgcaacagaagatgagctattaaagattgttggaaacctcctgtactatcggtacatgaatccagccattgtagctccagatggctttgatatcatcgacatgacagctggaggtcagataaattctgaccaaaggagaaacttaggatcagtggccaaggttcttcagcacgcagcctccaacaagctgtttgaaggagaaaatgagcatctctcatctatgaacaattatttatcagagacgtatcaggaattcaggaaatatttcaaagaagcatgtaatgtccctgagccagaagagaagtttaatatggacaaatacacagacctggtgacagtcagcaaaccagtcatttatatttcaattgaagaaatcatcagcacacactcactcctgttggaacaccaggatgcaattgcccctgagaaaaatgacttactgagtgaattgctggggtcgctgggagaggtgccaaccgtggaatcttttcttggggaaggagcagttgaccccaatgaccctaacaaggcaaatacactaagtcagctttcaaagaccgagatttctcttgtcttgacaagcaaatatgacatagaggacggtgaagctatagatagccgaagcctcatgataaagaccaagaagctgataattgatgtgatccggaaccagccagggaacacattgacagaaatcttagagacaccagcaactgcgcaacaggaggtagaccatgccacggacatggtgagccgtgcaatgatagattccaggactccagaagaaatgaagcatagccaatctatgattgaagatgcacagctgcctcttgagcagaagaagaggaaaatccagaggaatcttcggacgttggaacagactggacacgtgtcatccgaaaataaataccaagacattctcaatgagattgccaaggatattcgaaatcaaagaatctatcgtaagcttcgaaaagctgaattggcaaaacttcagcagaccctgaatgcacttaacaagaaggcagcattttatgaagagcaaatcaattattatgacacctacataaagacttgtttagacaacttaaaaagaaaaaatactcggagatcaattaaactagatggaaaaggagaacccaaaggggcgaagagagcgaagccagtgaagtacactgcagcaaagctgcatgagaaaggtgtcctgctagatatagatgatcttcaaacaaaccagtttaagaatgttacatttgatatcatagctactgaagatgtaggcattttcgatgtaagatcaaaattccttggtgttgagatggaaaaggtgcaactcaatattcaggatttacttcagatgcaatatgaaggagtagctgtaatgaaaatgtttgataaggttaaagtgaatgtaaaccttctcatatacctgctgaacaagaagttctatggaaagtgaagtgcctacagaaatttcttggattctgtatcatctggattaggaaatgaatttgtttaatatttttgtttttaaacatgattgaaatcac

SEQ ID NO: 144427 - DNA, 4255 bp, Homo sapiens
  Payload ID: 8538
  Gene Symbol: IQGAP2
  Gene Name: IQ motif containing GTPase activating protein 2
  ENST ID: ENST00000505766
  CDS Start-End: 48-4255
agaagagggaagtcaagtgtaggaaggagttgtggcaatttaagtggatggaagtttgcttagttgaagaattgccaccaaccactgaattggaagaagggctccggaatggagtttaccttgcaaagttagccaagttctttgccccgaaaatggtatcagagaaaaagatctatgatgtggaacaaacacgttataagaagtctggccttcattttcgacacacagataataccgtccagtggttaagagcgatggagtctattggtctacccaagatattttatccagaaacaacagatgtctatgatcggaaaaacataccaagaatgatatattgcattcacgcactgagtttgtatctgttcaaactaggaatagcaccccagatccaggatttgttgggcaaagtagacttcacagaggaggaaatcagtaatatgagaaaagaacttgagaaatatggaatacagatgccatctttcagcaaaataggtggtattctggccaatgaactgtccgtggatgaagctgcattacatgctgcagttatagccattaatgaagcagttgaaaaaggaatagcagagcaaaccgttgtaacactaagaaacccaaatgcggttttaactttagtggatgacaaccttgcaccagaatatcagaaagaactctgggatgccaaaaagaaaaaagaggaaaatgcaagactgaagaatagctgtatttcagaagaagaaagagatgcttatgaagaactgctgacacaagcagaaatccaaggcaatattaataaagtcaacaggcaggctgcagtggaccatatcaatgctgtcattccggaaggtgaccccgagaatacgctgcttgcactgaagaaaccagaggcccagctgcctgctgtttatccctttgctgctgccatgtatcagaacgaacttttcaacctccagaaacagaacaccatgaactacttggcccacgaggagcttttgattgctgtggaaatgttgtctgctgttgctttactaaaccaggccttggaaagcaacgatcttgtgtctgtgcagaatcaactcagaagccccgcaataggcttaaacaatctggacaaggcatatgtggaacgttatgcaaacacactactctctgttaaactagaagttttatcccaagggcaagataacttaagctggaatgaaattcagaattgtattgatatggttaatgctcaaattcaagaagaaaatgaccgagttgtagctgtagggtacatcaatgaagctattgatgaagggaatcctttgaggactttagaaactttgctcctacctactgcgaatattagtgatgtggacccagcccatgcccagcactaccaggatgttttataccatgctaaatcacagaaactcggagactctgagagtgtttccaaagtgctttggctggatgagatacagcaagccgtcgatgatgccaacgtggacaaggacagagcaaaacaatgggttactctggtggttgatgttaatcagtgtttggaaggaaaaaaatcaagtgatattttgtctgtattgaagtcttccacttctaatgcaaatgacataatcccggagtgtgctgacaaatactatgatgcccttgtgaaggcaaaagagctcaaatctgaaagagtgtctagtgacggttcatggctcaaactcaacctgcacaaaaaatatgactactattacaacactgattcaaaagagagttcctgggtcacacctgaatcatgcttgtataaagaatcatggctcacaggaaaagaaatcgaggacattattgaggaagtcacagtaggttacattcgtgagaatatatggtctgcttcagaagagttgcttcttcgctttcaagccacaagctcaggacccatccttagggaagagtttgaagctagaaaatcatttttgcatgaacaagaagagaatgtggtcaaaatacaggctttttggaaaggatataaacaacggaaggagtatatgcacaggcggcaaacgttcattgataatactgattctattgtgaagattcagtcctggttccgaatggcaactgcaagaaagagctatctttcaagactacagtatttcagagatcataataatgaaattgtgaaaatacagtcactgttgagagcgaacaaagctagagatgactacaaaacattggttggctctgaaaacccaccattaacagtaattcgcaaatttgtatacctgctggaccaaagtgatttggatttccaggaggaactagaggttgcacgattaagggaagaagtagtgaccaagatcagggccaatcaacagctggaaaaagacctgaacctgatggacatcaagattggactgctggtgaagaacaggatcacactagaggatgtaatttcacatagtaaaaagctgaacaagaaaaaaggaggagaaatggaaatactgaataacaccgacaaccaaggaataaaaagtttgagtaaggagaggagaaaaacactagaaacatatcagcagctgttttaccttttacagaccaaccctttatacttggctaagctgattttccagatgccacagaacaagtccactaaatttatggatactgttattttcacactatataattatgcctctaatcagcgagaagaatatctacttctcaagctttttaaaactgctctggaggaagaaataaaatcaaaagtggaccaggtacaggacatagttactggtaaccctacagtcatcaagatggtcgtcagcttcaatagaggtgcccggggacagaacaccctgcgccaactcctggctccagtggtaaaagagatcatcgacgacaagtcgctgattatcaacacaaaccctgtagaggtgtacaaggcttgggtgaaccaactagaaacacagactggagaggccagcaagttgccttatgatgtgaccacagaacaagctctaacatacccagaagtgaaaaataaactggaggcttccattgagaacctgagaagggtcaccgacaaagtcctgaattctatcatttcttcccttgatctactgccttatggattgaggtatatagccaaagtactgaagaattcgatccatgagaaattccccgatgcaacagaagatgagctattaaagattgttggaaacctcctgtactatcggtacatgaatccagccattgtagctccagatggctttgatatcatcgacatgacagctggaggtcagataaattctgaccaaaggagaaacttaggatcagtggccaaggttcttcagcacgcagcctccaacaagctgtttgaaggagaaaatgagcatctctcatctatgaacaattatttatcagagacgtatcaggaattcaggaaatatttcaaagaagcatgtaatgtccctgagccagaagagaagtttaatatggacaaatacacagacctggtgacagtcagcaaaccagtcatttatatttcaattgaagaaatcatcagcacacactcactcctgttggaacaccaggatgcaattgcccctgagaaaaatgacttactgagtgaattgctggggtcgctgggagaggtgccaaccgtggaatcttttcttggggaaggagcagttgaccccaatgaccctaacaaggcaaatacactaagtcagctttcaaagaccgagatttctcttgtcttgacaagcaaatatgacatagaggacggtgaagctatagatagccgaagcctcatgataaagaccaagaagctgataattgatgtgatccggaaccagccagggaacacattgacagaaatcttagagacaccagcaactgcgcaacaggaggtagaccatgccacggacatggtgagccgtgcaatgatagattccaggactccagaagaaatgaagcatagccaatctatgattgaagatgcacagctgcctcttgagcagaagaagaggaaaatccagaggaatcttcggacgttggaacagactggacacgtgtcatccgaaaataaataccaagacattctcaatgagattgccaaggatattcgaaatcaaagaatctatcgtaagcttcgaaaagctgaattggcaaaacttcagcagaccctgaatgcacttaacaagaaggcagcattttatgaagagcaaatcaattattatgacacctacataaagacttgtttagacaactt

SEQ ID NO: 144428 - DNA, 559 bp, Homo sapiens
  Payload ID: 8538
  Gene Symbol: IQGAP2
  Gene Name: IQ motif containing GTPase activating protein 2
  ENST ID: ENST00000513534
  CDS Start-End: 78-410
aggtgatttcaatcaagtcagctgaaatgcactcacttccaggtgatcggccttggttctgttaagaccatttttggatggggtgttttaaaggagttgtagctgtagggtacatcaatgaagctattgatgaagggaatcctttgaggactttagaaactttgctcctacctactgcgaatattagtgatgtggacccagcccatgcccagcactaccaggatgttttataccatgctaaatcacagaaactcggagactctgagagtgtttccaaagtgctttggctggatgagatacagcaagccgtcgatgatgccaacgtggacaaggacagagcaaaacaatatgggcttttcaacctcggaagcatctgtgagaaacatctgggctttatctccttagcttagaaaaatgggttactctggtggttgatgttaatcagtgtttggaaggaaaaaaatcaagtgatattttgtctgtattgaagtcttccacttctaatgcaaatgacataatcccggagtgtgctgacaaatactatgatgcccttgtgaag

SEQ ID NO: 144429 - DNA, 1648 bp, Homo sapiens
  Payload ID: 8538
  Gene Symbol: IQGAP2
  Gene Name: IQ motif containing GTPase activating protein 2
  ENST ID: ENST00000514001
  CDS Start-End: 121-1648
agcagcttgtattcttagaaacgcagcagacagcaactttagcaggtgatttcaatcaagtcagctgaaatgcactcacttccaggtgatcggccttggttctgttaagaccatttttggatggggtgttttaaaggagttgtagctgtagggtacatcaatgaagctattgatgaagggaatcctttgaggactttagaaactttgctcctacctactgcgaatattagtgatgtggacccagcccatgcccagcactaccaggatgttttataccatgctaaatcacagaaactcggagactctgagagtgtttccaaagtgctttggctggatgagatacagcaagccgtcgatgatgccaacgtggacaaggacagagcaaaacaatgggttactctggtggttgatgttaatcagtgtttggaaggaaaaaaatcaagtgatattttgtctgtattgaagtcttccacttctaatgcaaatgacataatcccggagtgtgctgacaaatactatgatgcccttgtgaaggcaaaagagctcaaatctgaaagagtgtctagtgacggttcatggctcaaactcaacctgcacaaaaaatatgactactattacaacactgattcaaaagagagttcctgggtcacacctgaatcatgcttgtataaagaatcatggctcacaggaaaagaaatcgaggacattattgaggaagtcacagtaggttacattcgtgagaatatatggtctgcttcagaagagttgcttcttcgctttcaagccacaagctcaggacccatccttagggaagagtttgaagctagaaaatcatttttgcatgaacaagaagagaatgtggtcaaaatacaggctttttggaaaggatataaacaacggaaggagtatatgcacaggcggcaaacgttcattgataatactgattctattgtgaagattcagtcctggttccgaatggcaactgcaagaaagagctatctttcaagactacagtatttcagagatcataataatgaaattgtgaaaatacagtcactgttgagagcgaacaaagctagagatgactacaaaacattggttggctctgaaaacccaccattaacagtaattcgcaaatttgtatacctgctggaccaaagtgatttggatttccaggaggaactagaggttgcacgattaagggaagaagtagtgaccaagatcagggccaatcaacagctggaaaaagacctgaacctgatggacatcaagattggactgctggtgaagaacaggatcacactagaggatgtaatttcacatagtaaaaagctgaacaagaaaaaaggaggagaaatggaaatactgaataacaccgacaaccaaggaataaaaagtttgagtaaggagaggagaaaaacactagaaacatatcagcagctgttttaccttttacagaccaaccctttatacttggctaagctgattttccagatgccacagaacaagtccactaaatttatggatactgttattttcacactatataattatgcctctaatcagcgagaagaatatctacttctcaagctttttaaaactgctctggaggaagaaataaaatcaaaagtggaccaggtacaggaca

SEQ ID NO: 144430 - DNA, 562 bp, Homo sapiens
  Payload ID: 8538
  Gene Symbol: IQGAP2
  Gene Name: IQ motif containing GTPase activating protein 2
  ENST ID: ENST00000504254
  CDS Start-End: 27-209
aggtgatttcaatcaagtcagctgaaatgcactcacttccaggagttgtagctgtagggtacatcaatgaagctattgatgaagggaatcctttgaggactttagaaactttgctcctacctactgcgaatattagtgatgtggacccagcccatgcccagcactaccaggatgttttataccatgctaaatcacagaaactcggataatcgtggctcctgtccagccttccaaggcagaaaaggggaactcttcaaaagaatttgggggagctccacgaaaggtcttaatggttaataaaacttaaacttgaagcctgaccatcccacagcctgctctttacaaaatgcagcaagaatcagaaaatacaaatttcacatgagacttaaaggctagggatatgctaggaagaaattgatctgcggaaacctttcacatcttgattaaattacattagaccaagatttttacaaaggactctgagagtgtttccaaagtgctttggctggatgagatacagcaagccgtcgatgatgccaacgtggacaaggacagagcaaaa

SEQ ID NO: 144431 - DNA, 2617 bp, Homo sapiens
  Payload ID: 8538
  Gene Symbol: IQGAP2
  Gene Name: IQ motif containing GTPase activating protein 2
  ENST ID: ENST00000514350
  CDS Start-End: 144-2617
aaaacaaacagaaagttggcctgctgtctctccaaggtggccctgtcagtgaacccaaggccgaagaccacaggttaatctttgcccaggctggccttggtggcagagctattgtggacgatgaaaggctctctgcagaggagatggatgagaggaggcggcagaacattgcttatgaatatctgtgccacttagaggaagccaaaaggtggatggaagtttgcttagttgaagaattgccaccaaccactgaattggaagaagggctccggaatggagtttaccttgcaaagttagccaagttctttgccccgaaaatggtatcagagaaaaagatctatgatgtggaacaaacacgttataagaagtctggccttcattttcgacacacagataataccgtccagtggttaagagcgatggagtctattggtctacccaagatattttatccagaaacaacagatgtctatgatcggaaaaacataccaagaatgatatattgcattcacgcactgagtttgtatctgttcaaactaggaatagcaccccagatccaggatttgttgggcaaagtagacttcacagaggaggaaatcagtaatatgagaaaagaacttgagaaatatggaatacagatgccatctttcagcaaaataggtggtattctggccaatgaactgtccgtggatgaagctgcattacatgctgcagttatagccattaatgaagcagttgaaaaaggaatagcagagcaaaccgttgtaacactaagaaacccaaatgcggttttaactttagtggatgacaaccttgcaccagaatatcagaaagaactctgggatgccaaaaagaaaaaagaggaaaatgcaagactgaagaatagctgtatttcagaagaagaaagagatgcttatgaagaactgctgacacaagcagaaatccaaggcaatattaataaagtcaacaggcaggctgcagtggaccatatcaatgctgtcattccggaaggtgaccccgagaatacgctgcttgcactgaagaaaccagaggcccagctgcctgctgtttatccctttgctgctgccatgtatcagaacgaacttttcaacctccagaaacagaacaccatgaactacttggcccacgaggagcttttgattgctgtggaaatgttgtctgctgttgctttactaaaccaggccttggaaagcaacgatcttgtgtctgtgcagaatcaactcagaagccccgcaataggcttaaacaatctggacaaggcatatgtggaacgttatgcaaacacactactctctgttaaactagaagttttatcccaagggcaagataacttaagctggaatgaaattcagaattgtattgatatggttaatgctcaaattcaagaagaaaatgaccgagttgtagctgtagggtacatcaatgaagctattgatgaagggaatcctttgaggactttagaaactttgctcctacctactgcgaatattagtgatgtggacccagcccatgcccagcactaccaggatgttttataccatgctaaatcacagaaactcggagactctgagagtgtttccaaagtgctttggctggatgagatacagcaagccgtcgatgatgccaacgtggacaaggacagagcaaaacaatgggttactctggtggttgatgttaatcagtgtttggaaggaaaaaaatcaagtgatattttgtctgtattgaagtcttccacttctaatgcaaatgacataatcccggagtgtgctgacaaatactatgatgcccttgtgaaggcaaaagagctcaaatctgaaagagtgtctagtgacggttcatggctcaaactcaacctgcacaaaaaatatgactactattacaacactgattcaaaagagagttcctgggtcacacctgaatcatgcttgtataaagaatcatggctcacaggaaaagaaatcgaggacattattgaggaagtcacagtaggttacattcgtgagaatatatggtctgcttcagaagagttgcttcttcgctttcaagccacaagctcaggacccatccttagggaagagtttgaagctagaaaatcatttttgcatgaacaagaagagaatgtggtcaaaatacaggctttttggaaaggatataaacaacggaaggagtatatgcacaggcggcaaacgttcattgataatactgattctattgtgaagattcagtcctggttccgaatggcaactgcaagaaagagctatctttcaagactacagtatttcagagatcataataatgaaattgtgaaaatacagtcactgttgagagcgaacaaagctagagatgactacaaaacattggttggctctgaaaacccaccattaacagtaattcgcaaatttgtatacctgctggaccaaagtgatttggatttccaggaggaactagaggttgcacgattaagggaagaagtagtgaccaagatcagggccaatcaacagctggaaaaagacctgaacctgatggacatcaagattggactgctggtgaagaacaggatcacactagaggatgtaatttcacatagtaaaaagct

SEQ ID NO: 144432 - DNA, 599 bp, Homo sapiens
  Payload ID: 8538
  Gene Symbol: IQGAP2
  Gene Name: IQ motif containing GTPase activating protein 2
  ENST ID: ENST00000509074
  CDS Start-End: 97-599
agcagacagcaactttagcaggtgatttcaatcaagtcagctgaaatgcactcacttccaggtgatcggccttggttctgttaagaccatttttggatggggtgttttaaaggagttgtagctgtagggtacatcaatgaagctattgatgaagggaatcctttgaggactttagaaactttgctcctacctactgcgaatattagtgatgtggacccagcccatgcccagcactaccaggatgttttataccatgctaaatcacagaaactcggagactctgagagtgtttccaaagtgctttggctggatgagatacagcaagccgtcgatgatgccaacgtggacaaggacagagcaaaacaatgggttactctggtggttgatgttaatcagtgtttggaaggaaaaaaatcaagtgatattttgtctgtattgaagtcttccacttctaatgcaaatgacataatcccggagtgtgctgacaaatactatgatgcccttgtgaaggcaaaagagctcaaatctgaaagagtgacggttcatggctcaaactcaacctgcacaaaaaatatgactactattacaacactgattca

SEQ ID NO: 144433 - DNA, 2039 bp, Homo sapiens
  Payload ID: 8538
  Gene Symbol: IQGAP2
  Gene Name: IQ motif containing GTPase activating protein 2
  ENST ID: ENST00000504477
  CDS Start-End: 1-240
gtagctccagatggctttgatatcatcgacatgacagctggaggtcagataaattctgaccaaaggagaaacttaggatcagtggccaaggttcttcagcacgcagcctccaacaagctgtttgaaggagaaaatgagcatctctcatctatgaacaattatttatcagagacgtatcaggaattcagctcctgttggaacaccaggatgcaattgcccctgagaaaaatgacttactgagtgaattgctggggtcgctgggagaggtgccaaccgtggaatcttttcttggggaaggagcagttgaccccaatgaccctaacaaggcaaatacactaagtcagctttcaaagaccgagatttctcttgtcttgacaagcaaatatgacatagaggacggtgaagctatagatagccgaagcctcatgataaagaccaagaagctgataattgatgtgatccggaaccagccagggaacacattgacagaaatcttagagacaccagcaactgcgcaacaggaggtagaccatgccacggacatggtgagccgtgcaatgatagattccaggactccagaagaaatgaagcatagccaatctatgattgaagatgcacagctgcctcttgagcagaagaagaggaaaatccagaggaatcttcggacgttggaacagactggacacgtgtcatccgaaaataaataccaagacattctcaatgagattgccaaggatattcgaaatcaaagaatctatcgtaagcttcgaaaagctgaattggcaaaacttcagcagaccctgaatgcacttaacaagaaggcagcattttatgaagagcaaatcaattattatgacacctacataaagacttgtttagacaacttaaaaagaaaaaatactcggagatcaattaaactagatggaaaaggagaacccaaaggggcgaagagagcgaagccagtgaagtacactgcagcaaagctgcatgagaaaggtgtcctgctagatatagatgatcttcaaacaaaccagtttaagaatgttacatttgatatcatagctactgaagatgtaggcattttcgatgtaagatcaaaattccttggtgttgagatggaaaaggtgcaactcaatattcaggatttacttcagatgcaatatgaaggagtagctgtaatgaaaatgtttgataaggttaaagtgaatgtaaaccttctcatatacctgctgaacaagaagttctatggaaagtgaagtgcctacagaaatttcttggattctgtatcatctggattaggaaatgaatttgtttaatatttttgtttttaaacatgattgaaatcactgcttataaatgtgtgatttttttaaaacgaccaaaactgttctgaagaatgtacccaggtgcctttttgctaatttgatactataatagaatgagacataaaatgaattaatggaaacatatccacactgtactgtgatataggtactctgatttaaaactttggacatcctgtgatctgttttaaagttggggggtgggaaatttagctgactagggacaaacatgtaaacctattttcctatgaaaaaaattttaaatgtcccacttgaataacgtaattcttcatagtttttttaatctatggataaatggaaacctaattatttgtaatgaattatttagacagttctaagccctgtcttctgggagttatcaattttaaagagaacttttgtgcaattcaaatgaagtttttataagtaattgaaaatgacaacacaataacactttctgtataaaagtatatattttatgtgatttattcctactaaatgaaagtgcactactgcctcatgtaaagactcttgcacgcagagcctttaagtgactaaggaacaacatagatagtgagcatagtccccacctccacccctcacaatttatttgaatacttcaattgtgcctctcaattttttgtaatgctaaaaaatcagtatctagatggtttttaaatgtattctctggaaatt

SEQ ID NO: 144434 - DNA, 3404 bp, Homo sapiens
  Payload ID: 8538
  Gene Symbol: IQGAP2
  Gene Name: IQ motif containing GTPase activating protein 2
  Uniprot ID: Q13576
  ENST ID: ENST00000502745
  CDS Start-End: 91-3306
cagcaactttagcaggtgatttcaatcaagtcagctgaaatgcactcacttccaggtgatcggccttggttctgttaagaccatttttggatggggtgttttaaaggagttgtagctgtagggtacatcaatgaagctattgatgaagggaatcctttgaggactttagaaactttgctcctacctactgcgaatattagtgatgtggacccagcccatgcccagcactaccaggatgttttataccatgctaaatcacagaaactcggagactctgagagtgtttccaaagtgctttggctggatgagatacagcaagccgtcgatgatgccaacgtggacaaggacagagcaaaacaatgggttactctggtggttgatgttaatcagtgtttggaaggaaaaaaatcaagtgatattttgtctgtattgaagtcttccacttctaatgcaaatgacataatcccggagtgtgctgacaaatactatgatgcccttgtgaaggcaaaagagctcaaatctgaaagagtgtctagtgacggttcatggctcaaactcaacctgcacaaaaaatatgactactattacaacactgattcaaaagagagttcctgggtcacacctgaatcatgcttgtataaagaatcatggctcacaggaaaagaaatcgaggctttttggaaaggatataaacaacggaaggagtatatgcacaggcggcaaacgttcattgataatactgattctattgtgaagattcagtcctggttccgaatggcaactgcaagaaagagctatctttcaagactacagtatttcagagatcataataatgaaattgtgaaaatacagtcactgttgagagcgaacaaagctagagatgactacaaaacattggttggctctgaaaacccaccattaacagtaattcgcaaatttgtatacctgctggaccaaagtgatttggatttccaggaggaactagaggttgcacgattaagggaagaagtagtgaccaagatcagggccaatcaacagctggaaaaagacctgaacctgatggacatcaagattggactgctggtgaagaacaggatcacactagaggatgtaatttcacatagtaaaaagctgaacaagaaaaaaggaggagaaatggaaatactgaataacaccgacaaccaaggaataaaaagtttgagtaaggagaggagaaaaacactagaaacatatcagcagctgttttaccttttacagaccaaccctttatacttggctaagctgattttccagatgccacagaacaagtccactaaatttatggatactgttattttcacactatataattatgcctctaatcagcgagaagaatatctacttctcaagctttttaaaactgctctggaggaagaaataaaatcaaaagtggaccaggtacaggacatagttactggtaaccctacagtcatcaagatggtcgtcagcttcaatagaggtgcccggggacagaacaccctgcgccaactcctggctccagtggtaaaagagatcatcgacgacaagtcgctgattatcaacacaaaccctgtagaggtgtacaaggcttgggtgaaccaactagaaacacagactggagaggccagcaagttgccttatgatgtgaccacagaacaagctctaacatacccagaagtgaaaaataaactggaggcttccattgagaacctgagaagggtcaccgacaaagtcctgaattctatcatttcttcccttgatctactgccttatggattgaggtatatagccaaagtactgaagaattcgatccatgagaaattccccgatgcaacagaagatgagctattaaagattgttggaaacctcctgtactatcggtacatgaatccagccattgtagctccagatggctttgatatcatcgacatgacagctggaggtcagataaattctgaccaaaggagaaacttaggatcagtggccaaggttcttcagcacgcagcctccaacaagctgtttgaaggagaaaatgagcatctctcatctatgaacaattatttatcagagacgtatcaggaattcaggaaatatttcaaagaagcatgtaatgtccctgagccagaagagaagtttaatatggacaaatacacagacctggtgacagtcagcaaaccagtcatttatatttcaattgaagaaatcatcagcacacactcactcctgttggaacaccaggatgcaattgcccctgagaaaaatgacttactgagtgaattgctggggtcgctgggagaggtgccaaccgtggaatcttttcttggggaaggagcagttgaccccaatgaccctaacaaggcaaatacactaagtcagctttcaaagaccgagatttctcttgtcttgacaagcaaatatgacatagaggacggtgaagctatagatagccgaagcctcatgataaagaccaagaagctgataattgatgtgatccggaaccagccagggaacacattgacagaaatcttagagacaccagcaactgcgcaacaggaggtagaccatgccacggacatggtgagccgtgcaatgatagattccaggactccagaagaaatgaagcatagccaatctatgattgaagatgcacagctgcctcttgagcagaagaagaggaaaatccagaggaatcttcggacgttggaacagactggacacgtgtcatccgaaaataaataccaagacattctcaatgagattgccaaggatattcgaaatcaaagaatctatcgtaagcttcgaaaagctgaattggcaaaacttcagcagaccctgaatgcacttaacaagaaggcagcattttatgaagagcaaatcaattattatgacacctacataaagacttgtttagacaacttaaaaagaaaaaatactcggagatcaattaaactagatggaaaaggagaacccaaaggggcgaagagagcgaagccagtgaagtacactgcagcaaagctgcatgagaaaggtgtcctgctagatatagatgatcttcaaacaaaccagtttaagaatgttacatttgatatcatagctactgaagatgtaggcattttcgatgtaagatcaaaattccttggtgttgagatggaaaaggtgcaactcaatattcaggatttacttcagatgcaatatgaaggagtagctgtaatgaaaatgtttgataaggttaaagtgaatgtaaaccttctcatatacctgctgaacaagaagttctatggaaagtgaagtgcctacagaaatttcttggattctgtatcatctggattaggaaatgaatttgtttaatatttttgtttttaaacatgattgaaatcactgcttat

SEQ ID NO: 144435 - DNA, 5442 bp, Homo sapiens
  Payload ID: 8538
  Gene Symbol: IQGAP2
  Gene Name: IQ motif containing GTPase activating protein 2
  ENST ID: ENST00000379730
  CDS Start-End: 48-4625
agaagagggaagtcaagtgtaggaaggagttgtggcaatttaagtggatggaagtttgcttagttgaagaattgccaccaaccactgaattggaagaagggctccggaatggagtttaccttgcaaagttagccaagttctttgccccgaaaatggtatcagagaaaaagatctatgatgtggaacaaacacgttataagaagtctggccttcattttcgacacacagataataccgtccagtggttaagagcgatggagtctattggtctacccaagatattttatccagaaacaacagatgtctatgatcggaaaaacataccaagaatgatatattgcattcacgcactgagtttgtatctgttcaaactaggaatagcaccccagatccaggatttgttgggcaaagtagacttcacagaggaggaaatcagtaatatgagaaaagaacttgagaaatatggaatacagatgccatctttcagcaaaataggtggtattctggccaatgaactgtccgtggatgaagctgcattacatgctgcagttatagccattaatgaagcagttgaaaaaggaatagcagagcaaaccgttgtaacactaagaaacccaaatgcggttttaactttagtggatgacaaccttgcaccagaatatcagaaagaactctgggatgccaaaaagaaaaaagaggaaaatgcaagactgaagaatagctgtatttcagaagaagaaagagatgcttatgaagaactgctgacacaagcagaaatccaaggcaatattaataaagtcaacaggcaggctgcagtggaccatatcaatgctgtcattccggaaggtgaccccgagaatacgctgcttgcactgaagaaaccagaggcccagctgcctgctgtttatccctttgctgctgccatgtatcagaacgaacttttcaacctccagaaacagaacaccatgaactacttggcccacgaggagcttttgattgctgtggaaatgttgtctgctgttgctttactaaaccaggccttggaaagcaacgatcttgtgtctgtgcagaatcaactcagaagccccgcaataggcttaaacaatctggacaaggcatatgtggaacgttatgcaaacacactactctctgttaaactagaagttttatcccaagggcaagataacttaagctggaatgaaattcagaattgtattgatatggttaatgctcaaattcaagaagaaaatgaccgagttgtagctgtagggtacatcaatgaagctattgatgaagggaatcctttgaggactttagaaactttgctcctacctactgcgaatattagtgatgtggacccagcccatgcccagcactaccaggatgttttataccatgctaaatcacagaaactcggagactctgagagtgtttccaaagtgctttggctggatgagatacagcaagccgtcgatgatgccaacgtggacaaggacagagcaaaacaatgggttactctggtggttgatgttaatcagtgtttggaaggaaaaaaatcaagtgatattttgtctgtattgaagtcttccacttctaatgcaaatgacataatcccggagtgtgctgacaaatactatgatgcccttgtgaaggcaaaagagctcaaatctgaaagagtgtctagtgacggttcatggctcaaactcaacctgcacaaaaaatatgactactattacaacactgattcaaaagagagttcctgggtcacacctgaatcatgcttgtataaagaatcatggctcacaggaaaagaaatcgaggacattattgaggaagtcacagtaggttacattcgtgagaatatatggtctgcttcagaagagttgcttcttcgctttcaagccacaagctcaggacccatccttagggaagagtttgaagctagaaaatcatttttgcatgaacaagaagagaatgtggtcaaaatacaggctttttggaaaggatataaacaacggaaggagtatatgcacaggcggcaaacgttcattgataatactgattctattgtgaagattcagtcctggttccgaatggcaactgcaagaaagagctatctttcaagactacagtatttcagagatcataataatgaaattgtgaaaatacagtcactgttgagagcgaacaaagctagagatgactacaaaacattggttggctctgaaaacccaccattaacagtaattcgcaaatttgtatacctgctggaccaaagtgatttggatttccaggaggaactagaggttgcacgattaagggaagaagtagtgaccaagatcagggccaatcaacagctggaaaaagacctgaacctgatggacatcaagattggactgctggtgaagaacaggatcacactagaggatgtaatttcacatagtaaaaagctgaacaagaaaaaaggaggagaaatggaaatactgaataacaccgacaaccaaggaataaaaagtttgagtaaggagaggagaaaaacactagaaacatatcagcagctgttttaccttttacagaccaaccctttatacttggctaagctgattttccagatgccacagaacaagtccactaaatttatggatactgttattttcacactatataattatgcctctaatcagcgagaagaatatctacttctcaagctttttaaaactgctctggaggaagaaataaaatcaaaagtggaccaggtacaggacatagttactggtaaccctacagtcatcaagatggtcgtcagcttcaatagaggtgcccggggacagaacaccctgcgccaactcctggctccagtggtaaaagagatcatcgacgacaagtcgctgattatcaacacaaaccctgtagaggtgtacaaggcttgggtgaaccaactagaaacacagactggagaggccagcaagttgccttatgatgtgaccacagaacaagctctaacatacccagaagtgaaaaataaactggaggcttccattgagaacctgagaagggtcaccgacaaagtcctgaattctatcatttcttcccttgatctactgccttatggattgaggtatatagccaaagtactgaagaattcgatccatgagaaattccccgatgcaacagaagatgagctattaaagattgttggaaacctcctgtactatcggtacatgaatccagccattgtagctccagatggctttgatatcatcgacatgacagctggaggtcagataaattctgaccaaaggagaaacttaggatcagtggccaaggttcttcagcacgcagcctccaacaagctgtttgaaggagaaaatgagcatctctcatctatgaacaattatttatcagagacgtatcaggaattcaggaaatatttcaaagaagcatgtaatgtccctgagccagaagagaagtttaatatggacaaatacacagacctggtgacagtcagcaaaccagtcatttatatttcaattgaagaaatcatcagcacacactcactcctgttggaacaccaggatgcaattgcccctgagaaaaatgacttactgagtgaattgctggggtcgctgggagaggtgccaaccgtggaatcttttcttggggaaggagcagttgaccccaatgaccctaacaaggcaaatacactaagtcagctttcaaagaccgagatttctcttgtcttgacaagcaaatatgacatagaggacggtgaagctatagatagccgaagcctcatgataaagaccaagaagctgataattgatgtgatccggaaccagccagggaacacattgacagaaatcttagagacaccagcaactgcgcaacaggaggtagaccatgccacggacatggtgagccgtgcaatgatagattccaggactccagaagaaatgaagcatagccaatctatgattgaagatgcacagctgcctcttgagcagaagaagaggaaaatccagaggaatcttcggacgttggaacagactggacacgtgtcatccgaaaataaataccaagacattctcaatgagattgccaaggatattcgaaatcaaagaatctatcgtaagcttcgaaaagctgaattggcaaaacttcagcagaccctgaatgcacttaacaagaaggcagcattttatgaagagcaaatcaattattatgacacctacataaagacttgtttagacaacttaaaaagaaaaaatactcggagatcaattaaactagatggaaaaggagaacccaaaggggcgaagagagcgaagccagtgaagtacactgcagcaaagctgcatgagaaaggtgtcctgctagatatagatgatcttcaaacaaaccagtttaagaatgttacatttgatatcatagctactgaagatgtaggcattttcgatgtaagatcaaaattccttggtgttgagatggaaaaggtgcaactcaatattcaggatttacttcagatgcaatatgaaggagtagctgtaatgaaaatgtttgataaggttaaagtgaatgtaaaccttctcatatacctgctgaacaagaagttctatggaaagtgaagtgcctacagaaatttcttggattctgtatcatctggattaggaaatgaatttgtttaatatttttgtttttaaacatgattgaaatcactgcttataaatgtgtgatttttttaaaacgaccaaaactgttctgaagaatgtacccaggtgcctttttgctaatttgatactataatagaatgagacataaaatgaattaatggaaacatatccacactgtactgtgatataggtactctgatttaaaactttggacatcctgtgatctgttttaaagttggggggtgggaaatttagctgactagggacaaacatgtaaacctattttcctatgaaaaaaattttaaatgtcccacttgaataacgtaattcttcatagtttttttaatctatggataaatggaaacctaattatttgtaatgaattatttagacagttctaagccctgtcttctgggagttatcaattttaaagagaacttttgtgcaattcaaatgaagtttttataagtaattgaaaatgacaacacaataacactttctgtataaaagtatatattttatgtgatttattcctactaaatgaaagtgcactactgcctcatgtaaagactcttgcacgcagagcctttaagtgactaaggaacaacatagatagtgagcatagtccccacctccacccctcacaatttatttgaatacttcaattgtgcctctcaattttttgtaatgctaaaaaatcagtatctagatggtttttaaatgtattctctggaaattgttttatgtaaaataaatgttacttaattccatt

SEQ ID NO: 144436 - DNA, 5988 bp, Homo sapiens
  Payload ID: 8539
  Gene Symbol: IQGAP3
  Gene Name: IQ motif containing GTPase activating protein 3
  Uniprot ID: Q86VI3
  ENST ID: ENST00000361170
  CDS Start-End: 12-4907
gaaggaggaacatggagaggagagcagcgggcccaggctgggcagcctatgaacgcctcacagctgaggagatggatgagcagaggcggcagaatgttgcctatcagtacctgtgccggctggaggaggccaagcgctggatggaggcctgcctgaaggaggagcttccttccccggtggagctggaggagagccttcggaatggagtgctgctggccaagctaggccactgttttgcaccctccgtggttcccttgaagaagatctacgatgtggagcagctgcggtaccaggcaactggcttacatttccgtcacacagacaacatcaacttttggctatctgcaatagcccacatcggtctgccttcgaccttcttcccagagaccacggacatctatgacaaaaagaacatgccccgggtagtctactgcatccatgctctcagtctcttcctcttccggctgggattggcccctcagatacatgatctatacgggaaagtgaaattcacagctgaggaactcagcaacatggcgtccgaactggccaaatatggcctccagctgcctgccttcagcaagatcgggggcatcttggccaatgagctctcggtggatgaggctgcagtccatgcagctgttcttgccatcaatgaagcagtggagcgaggggtggtggaggacaccctggctgccttgcagaatcccagtgctcttctggagaatctccgagagcctctggcagccgtctaccaagagatgctggcccaggccaagatggagaaggcagccaatgccaggaaccatgatgacagagaaagccaggacatctatgaccactacctaactcaggctgaaatccagggcaatatcaaccatgtcaacgtccatggggctctagaagttgttgatgatgccctggaaagacagagccctgaagccttgctcaaggcccttcaagaccctgccctggccctgcgaggggtgaggagagactttgctgactggtacctggagcagctgaactcagacagagagcagaaggcacaggagctgggcctggtggagcttctggaaaaggaggaagtccaggctggtgtggctgcagccaacacaaagggtgatcaggaacaagccatgctccacgctgtgcagcggatcaacaaagccatccggaggagagtggcggctgacactgtgaaggagctgatgtgccctgaggcccagctgcctccagtgtaccctgttgcatcgtctatgtaccagctggagctggcagtgctccagcagcagcagggggagcttggccaggaggagctcttcgtggctgtggagatgctctcagctgtggtcctgattaaccgggccctggaggcccgggatgccagtggcttctggagcagcctggtgaaccctgccacaggcctggctgaggtggaaggagaaaatgcccagcgttacttcgatgccctgctgaaattgcgacaggagcgtgggatgggtgaggacttcctgagctggaatgacctgcaggccaccgtgagccaggtcaatgcacagacccaggaagagactgaccgggtccttgcagtcagcctcatcaatgaggctctggacaaaggcagccctgagaagactctgtctgccctactgcttcctgcagctggcctagatgatgtcagcctccctgtcgcccctcggtaccatctcctccttgtggcagccaaaaggcagaaggcccaggtgacaggggatcctggagctgtgctgtggcttgaggagatccgccagggagtggtcagagccaaccaggacactaatacagctcagagaatggctcttggtgtggctgccatcaatcaagccatcaaggagggcaaggcagcccagactgagcgggtgttgaggaaccccgcagtggcccttcgaggggtagttcccgactgtgccaacggctaccagcgagccctggaaagtgccatggcaaagaaacagcgtccagcagacacagctttctgggttcaacatgacatgaaggatggcactgcctactacttccatctgcagaccttccaggggatctgggagcaacctcctggctgccccctcaacacctctcacctgacccgggaggagatccagtcagctgtcaccaaggtcactgctgcctatgaccgccaacagctctggaaagccaacgtcggctttgttatccagctccaggcccgcctccgtggcttcctagttcggcagaagtttgctgagcattcccactttctgaggacctggctcccagcagtcatcaagatccaggctcattggcggggttataggcagcggaagatttacctggagtggttgcagtattttaaagcaaacctggatgccataatcaagatccaggcctgggcccggatgtgggcagctcggaggcaatacctgaggcgtctgcactacttccagaagaatgttaactccattgtgaagatccaggcatttttccgagccaggaaagcccaagatgactacaggatattagtgcatgcaccccaccctcctctcagtgtggtacgcagatttgcccatctcttgaatcaaagccagcaagacttcttggctgaggcagagctgctgaagctccaggaagaggtagttaggaagatccgatccaatcagcagctggagcaggacctcaacatcatggacatcaagattggcctgctggtgaagaaccggatcactctgcaggaagtggtctcccactgcaagaagctgaccaagaggaataaggaacagctgtcagatatgatggttctggacaagcagaagggtttaaagtcgctgagcaaagagaaacggcagaaactagaagcataccaacacctcttctacctgctccagactcagcccatctacctggccaagctgatctttcagatgccacagaacaaaaccaccaagttcatggaggcagtgattttcagcctgtacaactatgcctccagccgccgagaggcctatctcctgctccagctgttcaagacagcactccaggaggaaatcaagtcaaaggtggagcagccccaggacgtggtgacaggcaacccaacagtggtgaggctggtggtgagattctaccgtaatgggcggggacagagtgccctgcaggagattctgggcaaggttatccaggatgtgctagaagacaaagtgctcagcgtccacacagaccctgtccacctctataagaactggatcaaccagactgaggcccagacagggcagcgcagccatctcccatatgatgtcaccccggagcaggccttgagccaccccgaggtccagagacgactggacatcgccctacgcaacctcctcgccatgactgataagttccttttagccatcacctcatctgtggaccaaattccgtatgggatgcgatatgtggccaaagtcctgaaggcaactctggcagagaaattccctgacgccacagacagcgaggtctataaggtggtcgggaacctcctgtactaccgcttcctgaacccagctgtggtggctcctgacgccttcgacattgtggccatggcagctggtggagccctggctgccccccagcgccatgccctgggggctgtggctcagctcctacagcacgctgcggctggcaaggccttctctgggcagagccagcacctacgggtcctgaatgactatctggaggaaacacacctcaagttcaggaagttcatccatagagcctgccaggtgccagagccagaggagcgttttgcagtggacgagtactcagacatggtggctgtggccaaacccatggtgtacatcaccgtgggggagctggtcaacacgcacaggctgttgctggagcaccaggactgcattgcccctgatcaccaagaccccctgcatgagctcctggaggatcttggggagctgcccaccatccctgaccttattggtgagagcatcgctgcagatgggcacacggacctgagcaagctagaagtgtccctgacgctgaccaacaagtttgaaggactagaggcagatgctgatgactccaacacccgtagcctgcttctgagcaccaagcagctgttggccgatatcatacagttccatcctggggacaccctcaaggagatcctgtccctctcggcttccagagagcaagaagcagcccacaagcagctgatgagccgacgccaggcctgtacagcccagacaccggagccactgcgacgacaccgctcactgacagctcactccctcctgccactggcagagaagcagcggcgcgtcctgcggaacctacgccgacttgaagccctggggttggtcagcgccagaaatggctaccaggggctagtggacgagctggccaaggacatccgcaaccagcacagacacaggcacaggcggaaggcagagctggtgaagctgcaggccacattacagggcctgagcactaagaccaccttctatgaggagcagggtgactactacagccagtacatccgggcctgcctggaccacctggcccccgactccaagagttctgggaaggggaagaagcagccttctcttcattacactgctgctcagctcctggaaaagggtgtcttggtggaaattgaagatcttcccgcctctcacttcagaaacgtcatctttgacatcacgccgggagatgaggcaggaaagtttgaagtaaatgccaagttcctgggtgtggacatggagcgatttcagcttcactatcaggatctcctgcagctccagtatgagggtgtggctgtcatgaaactcttcaacaaggccaaagtcaatgtcaaccttctcatcttcctcctcaacaagaagtttttgcggaagtgacagaggcaaagggtgctacccaagcccctcttacctctctggatgctttctttaacactaactcaccactgtgcttccctgcagacacctagagctcaggactgggcaaggcccagggattctcaccccttccccagctgggaggagcttgcctgcctggccacagacagtgtatcttctaattggctaaagtgggccttgcccagagtccagctgtgtggcttttatcatgcatgacaaacccctggctttcctgccagatggtaggacatggaccttgacctgggaaagccattactcttgtgtctgctactgccctcccacagtcaccccaatattacaagcactgccccagcggcttgatttcccctctgccttccttctctctgcactcccacaaagccagggccaggctccccatccctacctcccactgcatcagcagtgggtgttcctgcccttcctgagtctaggcagctctgctgctgtgatctgcacaccctccaacctgggcagggactggggggatgcagtgtgtgttagtgcccatgtggcattgtggcactgttgccccccatggcggcatgggcaagatgaccttccattagcttcaagtcttgttctcttgtctgtggtctgtttaatatgtgggtcactagggtatttattctttctcccatccttacactctggatcattgtgcagacttaatcagggttttaacgctttcatttttttttttttttttttttttttgagctcaaagagagttctcattttccctattcaaactaatacccatgccgtgttttttaccttggatttaaagtcaccttaggttggggcaacagattctcactcatgtttaagatcttgttatttcagcttcataagatcaaagaggagtctttcccttttctcttttaccctcaggattctcatcccttacagctgactcttccaggcaatttccatagatctgcagtcctgcctctgccacagtctctctgttgtccccacatctacccaacttcctgtactgttgcccttctgatgttaataaaagcagctgttactccca

SEQ ID NO: 144437 - DNA, 5294 bp, Homo sapiens
  Payload ID: 8539
  Gene Symbol: IQGAP3
  Gene Name: IQ motif containing GTPase activating protein 3
  ENST ID: ENST00000491900
  CDS Start-End: 117-4883
gtcctgtctggcggtgccgacggtgaggggcggtggcccaacggcgggagattcaaacctggaagaaggaggaacatggagaggagagcagcgggcccaggctgggcagcctctggatggaggcctgcctgaaggaggagcttccttccccggtggagctggaggagagccttcggaatggagtgctgctggccaagctaggccactgttttgcaccctccgtggttcccttgaagaagatctacgatgtggagcagctgcggtaccaggcaactggcttacatttccgtcacacagacaacatcaacttttggctatctgcaatagcccacatcggtctgccttcgaccttcttcccagagaccacggacatctatgacaaaaagaacatgccccgggtagtctactgcatccatgctctcagtctcttcctcttccggctgggattggcccctcagatacatgatctatacgggaaagtgaaattcacagctgaggaactcagcaacatggcgtccgaactggccaaatatggcctccagctgcctgccttcagcaagatcgggggcatcttggccaatgagctctcggtggatgaggctgcagtccatgcagctgttcttgccatcaatgaagcagtggagcgaggggtggtggaggacaccctggctgccttgcagaatcccagtgctcttctggagaatctccgagagcctctggcagccgtctaccaagagatgctggcccaggccaagatggagaaggcagccaatgccaggaaccatgatgacagagaaagccaggacatctatgaccactacctaactcaggctgaaatccagggcaatatcaaccatgtcaacgtccatggggctctagaagttgttgatgatgccctggaaagacagagccctgaagccttgctcaaggcccttcaagaccctgccctggccctgcgaggggtgaggagagactttgctgactggtacctggagcagctgaactcagacagagagcagaaggcacaggagctgggcctggtggagcttctggaaaaggaggaagtccaggctggtgtggctgcagccaacacaaagggtgatcaggaacaagccatgctccacgctgtgcagcggatcaacaaagccatccggaggagagtggcggctgacactgtgaaggagctgatgtgccctgaggcccagctgcctccagtgtaccctgttgcatcgtctatgtaccagctggagctggcagtgctccagcagcagcagggggagcttggccaggaggagctcttcgtggctgtggagatgctctcagctgtggtcctgattaaccgggccctggaggcccgggatgccagtggcttctggagcagcctggtgaaccctgccacaggcctggctgaggtggaaggagaaaatgcccagcgttacttcgatgccctgctgaaattgcgacaggagcgtgggatgggtgaggacttcctgagctggaatgacctgcaggccaccgtgagccaggtcaatgcacagacccaggaagagactgaccgggtccttgcagtcagcctcatcaatgaggctctggacaaaggcagccctgagaagactctgtctgccctactgcttcctgcagctggcctagatgatgtcagcctccctgtcgcccctcggtaccatctcctccttgtggcagccaaaaggcagaaggcccaggtgacaggggatcctggagctgtgctgtggcttgaggagatccgccagggagtggtcagagccaaccaggacactaatacagctcagagaatggctcttggtgtggctgccatcaatcaagccatcaaggagggcaaggcagcccagactgagcgggtgttgaggaaccccgcagtggcccttcgaggggtagttcccgactgtgccaacggctaccagcgagccctggaaagtgccatggcaaagaaacagcgtccagcagacacagctttctgggttcaacatgacatgaaggatggcactgcctactacttccatctgcagaccttccaggggatctgggagcaacctcctggctgccccctcaacacctctcacctgacccgggaggagatccagtcagctgtcaccaaggtcactgctgcctatgaccgccaacagctctggaaagccaacgtcggctttgttatccagctccaggcccgcctccgtggcttcctagttcggcagaagtttgctgagcattcccactttctgaggacctggctcccagcagtcatcaagatccaggctcattggcggggttataggcagcggaagatttacctggagtggttgcagtattttaaagcaaacctggatgccataatcaagatccaggcctgggcccggatgtgggcagctcggaggcaatacctgaggcgtctgcactacttccagaagaatgttaactccattgtgaagatccaggcatttttccgagccaggaaagcccaagatgactacaggatattagtgcatgcaccccaccctcctctcagtgtggtacgcagatttgcccatctcttgaatcaaagccagcaagacttcttggctgaggcagagctgctgaagctccaggaagaggtagttaggaagatccgatccaatcagcagctggagcaggacctcaacatcatggacatcaagattggcctgctggtgaagaaccggatcactctgcaggaagtggtctcccactgcaagaagctgaccaagaggaataaggaacagctgtcagatatgatggttctggacaagcagaagggtttaaagtcgctgagcaaagagaaacggcagaaactagaagcataccaacacctcttctacctgctccagactcagcccatctacctggccaagctgatctttcagatgccacagaacaaaaccaccaagttcatggaggcagtgattttcagcctgtacaactatgcctccagccgccgagaggcctatctcctgctccagctgttcaagacagcactccaggaggaaatcaagtcaaaggtggagcagccccaggacgtggtgacaggcaacccaacagtggtgaggctggtggtgagattctaccgtaatgggcggggacagagtgccctgcaggagattctgggcaaggttatccaggatgtgctagaagacaaagtgctcagcgtccacacagaccctgtccacctctataagaactggatcaaccagactgaggcccagacagggcagcgcagccatctcccatatgatgtcaccccggagcaggccttgagccaccccgaggtccagagacgactggacatcgccctacgcaacctcctcgccatgactgataagttccttttagccatcacctcatctgtggaccaaattccgtatgggatgcgatatgtggccaaagtcctgaaggcaactctggcagagaaattccctgacgccacagacagcgaggtctataaggtggtcgggaacctcctgtactaccgcttcctgaacccagctgtggtggctcctgacgccttcgacattgtggccatggcagctggtggagccctggctgccccccagcgccatgccctgggggctgtggctcagctcctacagcacgctgcggctggcaaggccttctctgggcagagccagcacctacgggtcctgaatgactatctggaggaaacacacctcaagttcaggaagttcatccatagagcctgccaggtgccagagccagaggagcgttttgcagtggacgagtactcagacatggtggctgtggccaaacccatggtgtacatcaccgtgggggagctggtcaacacgcacaggctgttgctggagcaccaggactgcattgcccctgatcaccaagaccccctgcatgagctcctggaggatcttggggagctgcccaccatccctgaccttattggtgagagcatcgctgcagatgggcacacggacctgagcaagctagaagtgtccctgacgctgaccaacaagtttgaaggactagaggcagatgctgatgactccaacacccgtagcctgcttctgagcaccaagcagctgttggccgatatcatacagttccatcctggggacaccctcaaggagatcctgtccctctcggcttccagagagcaagaagcagcccacaagcagctgatgagccgacgccaggcctgtacagcccagacaccggagccactgcgacgacaccgctcactgacagctcactccctcctgccactggcagagaagcagcggcgcgtcctgcggaacctacgccgacttgaagccctggggttggtcagcgccagaaatggctaccaggggctagtggacgagctggccaaggacatccgcaaccagcacagacacaggcacaggcggaaggcagagctggtgaagctgcaggccacattacagggcctgagcactaagaccaccttctatgaggagcagggtgactactacagccagtacatccgggcctgcctggaccacctggcccccgactccaagagttctgggaaggggaagaagcagccttctcttcattacactgctgctcagctcctggaaaagggtgtcttggtggaaattgaagatcttcccgcctctcacttcagaaacgtcatctttgacatcacgccgggagatgaggcaggaaagtttgaagtaaatgccaagttcctgggtgtggacatggagcgatttcagcttcactatcaggatctcctgcagctccagtatgagggtgtggctgtcatgaaactcttcaacaaggccaaagtcaatgtcaaccttctcatcttcctcctcaacaagaagtttttgcggaagtgacagaggcaaagggtgctacccaagcccctcttacctctctggatgctttctttaacactaactcaccactgtgcttccctgcagacacctagagctcaggactgggcaaggcccagggattctcaccccttccccagctgggaggagcttgcctgcctggccacagacagtgtatcttctaattggctaaagtgggccttgcccagagtccagctgtgtggcttttatcatgcatgacaaacccctggctttcctgccagatggattctcatcccttacagctgactcttccaggcaatttccatagatctgcagtcctgcctctgccacagtctctctgttgtccccacatctacccaacttcctgtactgttgcccttctgatgttaataaaagcagctgttactccca

SEQ ID NO: 144438 - DNA, 4208 bp, Homo sapiens
  Payload ID: 8540
  Gene Symbol: IQCH
  Gene Name: IQ motif containing H
  Uniprot ID: Q86VS3
  ENST ID: ENST00000335894
  CDS Start-End: 67-3150
tccggctgaaggtttccgtgcttggaaaccgcgcctccgcggaggtagccgttccctgacctagccatggcacagaacactgaaaaccacgaccctgtcggatccatcttaatccagatccatgaagacctttatcagttaaaggagaaattaacaaaattctcacctgaggaaaaaggagagactctagacattcagagtcttgaaacagcaatcaaaaggactgaagtggggttaagaattcacattgagaagtatttaaatgttgtaaaccagaatgtattaacgacttctgttaatgatgagagcttatatactccccaggcttccaaatggttacttccaactgtaattgatcagaaatcatttattttccctcaggaatctgagggtacattttggcaaccccaaagacagcacagttcatctctgcctgtctttccaagagcaaagataaaggtttcgaagttaatcaaagggtctaacatatccagcctcacggttctgccatcttctcattgcacagatccctatttcactcctataccagtcttacaagcagatgcccacaaagggattttaagtatgatagaacgagggctgattccaccaacagcaaggattacctttcagaatccacccattacacccagagcagctcctctgcatagttttgatgaagcacgtaagattccaactgtagccactttcactatacctcgggaaccacctccatctccagcagaagtgaagttctttcccaagaaacaaagatcaaaggggaaaagcagaaggtcaagaggacatcatgataggaaggccatgaaagtcaaaacacctttgagagccctgaaatcactgtgggattatgactttttaatttatgatggtgtcatagacaatacagccccagacttcttagcattcaaggaacattttagcttagcttggggaggtattttttctctcttggaacacgtcgagaagtttctcaggaactatgctataccagaagtcaaaataaaagggaataatttggtggccctccttccagagtttgagctgacgaataaacttaccagatatgaccttctctcagtgttagaggacccagctcatgtccaaatgctgataaatcttccagggcaaaggtacaagggccaagatggaaattcggaggccgccatgaagatccaagccacatggaaatgctacaaagcaagaaaattcttcctcttttatcgccagcagaagtgggcatcaggtgtgattgccattgcttggctgttatattgccataagactcgactaaagaagatactaaaggaatcacgtcagagacacctggagaattttcgcattcgagccaagcatctggcagccaactggaatcgcatcaggacctccaggaggactattatccatatcccatcattagggtattcccagcctgtgagagaacatattgccgatttcaacacacagcagaacatgcagctggggaggctgtgtgacatcttagatgccaatgtgaatgtcatctacatctgctcccatcatatgaatgacgagttagtgctgtattacaaaaaaatcctaagtctacatgcagccgtcaaatctgggaaccttgaggacagaagtgacctgcaggacaggttcaaaattatcacacctgaagctgtaaacatcttccctaagcatcatatgtgcctggccactcacctgatgtacagtcccaaggcaatcaaaagaataaaaaatctcatccgaggaacagaggcctacatcgtcagcgggctcctccacagagatgatttagctgtggccgatatgttagacatacccatcctgggctctgagcctgaactagctcatctttatagtaccaaatctggaggcaaacgtgtctttgacagtgccaatgtggcagttcctcctggaatatatgatatttatagtcagcaacagatgatagagcagctgagtcagctgataactgatcacctgcaaatacagcgttggctctttaaaatggactctgagttccgaggaaatgggactgcattttgtgatattccttcctacctaaagtgctacaaatgggtgctaaaggagagtagcagatatggccttgaagactggagaaagaaatgggcacaagagccagctttggtgaagatctctgaggagctggcgggcattttagcacagcacgcacagccagtcaatgagaaacggttcccgacgtggaggaaattcctccaaacatttctcagtcaagggggtgtgatcgaagcattcccacctgcagacaatgtcaccaacctcacagtggacatgctgatagagcccaacgggaaaatcagcgtgctgtcgacaggggaccagcttcatgctgaaagccccttcatctcctctggtaccaccgtgcctcagacctcagtggatccccaagttctcacttatttgtgcctccaaattggaaaagcctgcagaatgagagatgtggttggttacttttcgatagatctggtgacttttatagatccaagcaccttggaacaacaggtgtgggcaaccggccttaacctcgcatatagtgaccagctggccctgactcaactcaccttatacctgacaaacggccatctggattgcagtttgagcaccctggaagtgccccgctttgttccaaaggaaaggaagaaaaccaaatgcatgagtgcgctgtcaatgccgatgctggcaaccagtcgctatgcagtgatgaccacccagctaagacacagcaatctctcactggttttccactatgtttttctccagatctgtagggcccatggcattggctatgatgttgaggaaaggcaaggaactgtttttatattatatgagcacctgaagagacacaagttgggaatgttaacaatcggcgaggatctccagggggtcctcatgacctttgctcgccatctcttcatcatccatcaagaaatatcagcacctaatatgcaaggcgagaccaattttaagaccaccattgctgatattgaaactattctaagagtaacaaaggaaaacaaaatgagatttgaagaggagcaacagtccaaagatgataaaaacctctctaaacccaagaaatgatcctggaatacagtacataacaatttggatcccagtctggaataaaaagggcaatttttttttctgttagaaataaaagccaggggaaattggtttgctttgtgtgctaggaggtgaatcagaacagattataatgaaatgctctttttaaaacattgtttattaagtgatcttattttatttattaaaccaaaacttatttgtgttttcatttgagagtgttgaacaatcccttcttcttctcaaactcagaaaaaagtaatctgataaaagaagaaagttaaaagtcttactgatatcacctccgcatttacttcctcataggcctcaggattatgtagcttttattttttatgttttataaagttttctcctatttctaatagtccatcgatcttctgcatttataggtttgaataaaggcttaagaattgctatttgtcaaaacacaaatgcctttttttcaaagcttcaaattatattgaaattatatttatatgaatttttaagtgactatcattcatcgtgtttttgttataccaagccactattgtctgctattgttgccatttttcaaaaagtaggataagccagcatctagttaaccaaagcatcagaatgtatctaggtggcagtatctgctcttagtttaagatggagtgtagctcgagctctgtagcttgaataaacatttgtattctctagttctccatttaatacagcagtaggattttttcaagtttagttcaacattatactacctttaaaaaggcagactgttaagattgtagtagtgctgactctaactttcagcattcacttcataattgtccaaaaatatttccacatcagtgagctttactgaagggtgaaataaaagcaaattacaacaccaaaaccattattgttttaaagaatgacctttatgtctataaaaatattttagtgtattggggaaaggaataggatttttacctgtggaatttcaataatttgttaactgtgattcagccacaggctaagagtttctgtaataaaattaacatttgtgtgtgtca

SEQ ID NO: 144439 - DNA, 3062 bp, Homo sapiens
  Payload ID: 8540
  Gene Symbol: IQCH
  Gene Name: IQ motif containing H
  Uniprot ID: Q86VS3
  ENST ID: ENST00000358767
  CDS Start-End: 1-1866
atgacaaaggccatgaaagtcaaaacacctttgagagccctgaaatcactgtgggattatgactttttaatttatgatggtgtcatagacaatacagccccagacttcttagcattcaaggaacattttagcttagcttggggaggtattttttctctcttggaacacgtcgagaagtttctcaggaactatgctataccagaagtcaaaataaaagggaataatttggtggccctccttccagagtttgagctgacgaataaacttaccagatatgaccttctctcagtgttagaggacccagctcatgtccaaatgctgataaatcttccagggcaaaggtacaagggccaagatggaaattcggaggccgccatgaagatccaagccacatggaaatgctacaaagcaagaaaattcttcctcttttatcgccagcagaagtgggcatcaggtgtgattgccattgcttggctgttatattgccataagactcgactaaagaagatactaaaggaatcacgtcagagacacctggagaattttcgcattcgagccaagcatctggcagccaactggaatcgcatcaggacctccaggaggactattatccatatcccatcattagggtattcccagcctgtgagagaacatattgccgatttcaacacacagcagaacatgcagctggggaggctgtgtgacatcttagatgccaatgtgaatgtcatctacatctgctcccatcatatgaatgacgagttagtgctgtattacaaaaaaatcctaagtctacatgcagccgtcaaatctgggaaccttgaggacagaagtgacctgcaggacaggttcaaaattatcacacctgaagctgtaaacatcttccctatgatagagcagctgagtcagctgataactgatcacctgcaaatacagcgttggctctttaaaatggactctgagttccgaggaaatgggactgcattttgtgatattccttcctacctaaagtgctacaaatgggtgctaaaggagagtagcagatatggccttgaagactggagaaagaaatgggcacaagagccagctttggtgaagatctctgaggagctggcgggcattttagcacagcacgcacagccagtcaatgagaaacggttcccgacgtggaggaaattcctccaaacatttctcagtcaagggggtgtgatcgaagcattcccacctgcagacaatgtcaccaacctcacagtggacatgctgatagagcccaacgggaaaatcagcgtgctgtcgacaggggaccagcttcatgctgaaagccccttcatctcctctggtaccaccgtgcctcagacctcagtggatccccaagttctcacttatttgtgcctccaaattggaaaagcctgcagaatgagagatgtggttggttacttttcgatagatctggtgacttttatagatccaagcaccttggaacaacaggtgtgggcaaccggccttaacctcgcatatagtgaccagctggccctgactcaactcaccttatacctgacaaacggccatctggattgcagtttgagcaccctggaagtgccccgctttgttccaaaggaaaggaagaaaaccaaatgcatgagtgcgctgtcaatgccgatgctggcaaccagtcgctatgcagtgatgaccacccagctaagacacagcaatctctcactggttttccactatgtttttctccagatctgtagggcccatggcattggctatgatgttgagaacaatcggcgaggatctccagggggtcctcatgacctttgctcgccatctcttcatcatccatcaagaaatatcagcacctaatatgcaaggcgagaccaattttaagaccaccattgctgatattgaaactattctaagagtaacaaaggaaaacaaaatgagatttgaagaggagcaacagtccaaagatgataaaaacctctctaaacccaagaaatgatcctggaatacagtacataacaatttggatcccagtctggaataaaaagggcaatttttttttctgttagaaataaaagccaggggaaattggtttgctttgtgtgctaggaggtgaatcagaacagattataatgaaatgctctttttaaaacattgtttattaagtgatcttattttatttattaaaccaaaacttatttgtgttttcatttgagagtgttgaacaatcccttcttcttctcaaactcagaaaaaagtaatctgataaaagaagaaagttaaaagtcttactgatatcacctccgcatttacttcctcataggcctcaggattatgtagcttttattttttatgttttataaagttttctcctatttctaatagtccatcgatcttctgcatttataggtttgaataaaggcttaagaattgctatttgtcaaaacacaaatgcctttttttcaaagcttcaaattatattgaaattatatttatatgaatttttaagtgactatcattcatcgtgtttttgttataccaagccactattgtctgctattgttgccatttttcaaaaagtaggataagccagcatctagttaaccaaagcatcagaatgtatctaggtggcagtatctgctcttagtttaagatggagtgtagctcgagctctgtagcttgaataaacatttgtattctctagttctccatttaatacagcagtaggattttttcaagtttagttcaacattatactacctttaaaaaggcagactgttaagattgtagtagtgctgactctaactttcagcattcacttcataattgtccaaaaatatttccacatcagtgagctttactgaagggtgaaataaaagcaaattacaacaccaaaaccattattgttttaaagaatgacctttatgtctataaaaatattttagtgtattggggaaaggaataggatttttacctgtggaatttcaataatttgttaactgtgattcagccacaggctaagagtttctgtaataaaattaacatttgtgtgtgtc

SEQ ID NO: 144440 - DNA, 3675 bp, Homo sapiens
  Payload ID: 8540
  Gene Symbol: IQCH
  Gene Name: IQ motif containing H
  ENST ID: ENST00000514049
  CDS Start-End: 97-279
gcgcgcggtgttgccatggggacgagcggctccggctgaaggtttccgtgcttggaaaccgcgcctccgcggaggtagccgttccctgacctagccatggcacagaacactgaaaaccacgaccctgtcggatccatcttaatccagatccatgaagacctttatcagttaaaggagaaattaacaaaattctcacctgaggaaaaaggagagactctagacattcagagtcttgaaacagcaatcaaaaggactgaagtggggttaagaggattttaagtatgatagaacgagggctgattccaccaacagcaaggattacctttcagaatccacccattacacccagagcagctcctctgcatagttttgatgaagcacgtaagattccaactgtagccactttcactatacctcgggaaccacctccatctccagcagaagtgaagttctttcccaagaaacaaagatcaaaggggaaaagcagaaggtcaagaggacatcatgataggaagatttgtgatcctaatccacctgggacagccccagatatgttcctaagaagaaaccagacttaagaataaaagaacacgtgtcaagagaaacctaagaatgacaaaggccatgaaagtcaaaacacctttgagagccctgaaatcactgtgggattatgactttttaatttatgatggtgtcatagacaatacagccccagacttcttagcattcaaggaacattttagcttagcttggggaggtattttttctctcttggaacacgtcgagaagtttctcaggaactatgctataccagaagtcaaaataaaagggaataatttggtggccctccttccagagtttgagctgacgaataaacttaccagatatgaccttctctcagtgttagaggacccagctcatgtccaaatgctgataaatcttccagggcaaaggtacaagggccaagatggaaattcggaggccgccatgaagatccaagccacatggaaatgctacaaagcaagaaaattcttcctcttttatcgccagcagaagtgggcatcaggtgtgattgccattgcttggctgttatattgccataagactcgactaaagaagatactaaaggaatcacgtcagagacacctggagaattttcgcattcgagccaagcatctggcagccaactggaatcgcatcaggacctccaggaggactattatccatatcccatcattagggtattcccagcctgtgagagaacatattgccgatttcaacacacagcagaacatgcagctggggaggctgtgtgacatcttagatgccaatgtgaatgtcatctacatctgctcccatcatatgaatgacgagttagtgctgtattacaaaaaaatcctaagtctacatgcagccgtcaaatctgggaaccttgaggacagaagtgacctgcaggacaggttcaaaattatcacacctgaagctgtaaacatcttccctatgatagagcagctgagtcagctgataactgatcacctgcaaatacagcgttggctctttaaaatggactctgagttccgaggaaatgggactgcattttgtgatattccttcctacctaaagtgctacaaatgggtgctaaaggagagtagcagatatggccttgaagactggagaaagaaatgggcacaagagccagctttggtgaagatctctgaggagctggcgggcattttagcacagcacgcacagccagtcaatgagaaacggttcccgacgtggaggaaattcctccaaacatttctcagtcaagggggtgtgatcgaagcattcccacctgcagacaatgtcaccaacctcacagtggacatgctgatagagcccaacgggaaaatcagcgtgctgtcgacaggggaccagcttcatgctgaaagccccttcatctcctctggtaccaccgtgcctcagacctcagtggatccccaagttctcacttatttgtgcctccaaattggaaaagcctgcagaatgagagatgtggttggttacttttcgatagatctggtgacttttatagatccaagcaccttggaacaacaggtgtgggcaaccggccttaacctcgcatatagtgaccagctggccctgactcaactcaccttatacctgacaaacggccatctggattgcagtttgagcaccctggaagtgccccgctttgttccaaaggaaaggaagaaaaccaaatgcatgagtgcgctgtcaatgccgatgctggcaaccagtcgctatgcagtgatgaccacccagctaagacacagcaatctctcactggttttccactatgtttttctccagatctgtagggcccatggcattggctatgatgttgagaacaatcggcgaggatctccagggggtcctcatgacctttgctcgccatctcttcatcatccatcaagaaatatcagcacctaatatgcaaggcgagaccaattttaagaccaccattgctgatattgaaactattctaagagtaacaaaggaaaacaaaatgagatttgaagaggagcaacagtccaaagatgataaaaacctctctaaacccaagaaatgatcctggaatacagtacataacaatttggatcccagtctggaataaaaagggcaatttttttttctgttagaaataaaagccaggggaaattggtttgctttgtgtgctaggaggtgaatcagaacagattataatgaaatgctctttttaaaacattgtttattaagtgatcttattttatttattaaaccaaaacttatttgtgttttcatttgagagtgttgaacaatcccttcttcttctcaaactcagaaaaaagtaatctgataaaagaagaaagttaaaagtcttactgatatcacctccgcatttacttcctcataggcctcaggattatgtagcttttattttttatgttttataaagttttctcctatttctaatagtccatcgatcttctgcatttataggtttgaataaaggcttaagaattgctatttgtcaaaacacaaatgcctttttttcaaagcttcaaattatattgaaattatatttatatgaatttttaagtgactatcattcatcgtgtttttgttataccaagccactattgtctgctattgttgccatttttcaaaaagtaggataagccagcatctagttaaccaaagcatcagaatgtatctaggtggcagtatctgctcttagtttaagatggagtgtagctcgagctctgtagcttgaataaacatttgtattctctagttctccatttaatacagcagtaggattttttcaagtttagttcaacattatactacctttaaaaaggcagactgttaagattgtagtagtgctgactctaactttcagcattcacttcataattgtccaaaaatatttccacatcagtgagctttactgaagggtgaaataaaagcaaattacaacaccaaaaccattattgttttaaagaatgacctttatgtctataaaaatattttagtgtattggggaaaggaataggatttttacctgtggaatttcaataatttgttaactgtgattcagccacaggctaagagtttctgtaataaaattaacatttgtgtgtgtca

SEQ ID NO: 144441 - DNA, 1000 bp, Homo sapiens
  Payload ID: 8540
  Gene Symbol: IQCH
  Gene Name: IQ motif containing H
  Uniprot ID: Q86VS3
  ENST ID: ENST00000512104
  CDS Start-End: 98-604
cgcgcgcggtgttgccatggggacgagcggctccggctgaaggtttccgtgcttggaaaccgcgcctccgcggaggtagccgttccctgacctagccatggcacagaacactgaaaaccacgaccctgtcggatccatcttaatccagatccatgaagacctttatcagttaaaggagaaattaacaaaattctcacctgaggaaaaaggagagactctagacattcagagtcttgaaacagcaatcaaaaggactgaagtggggttaagaattcacattgagaagtatttaaatgttgtaaaccagaatgtattaacgacttctgttaatgatgagagcttatatactccccaggcttccaaatggttacttccaactgtaattgatcagaaatcatttattttccctcaggaatctgagggtacattttggcaaccccaaagacagcacagttcatctctgcctgtctttccaagagcaaagcgaaagatagggttgaatgtaaaaatcttgcaggatcctgaaaacatccaccacagagctgctgtaaatgcgaactatggaatcagtttgccatatattaatcagagaaaagcatgttaggtcctcaaaggtatgtggaaacaagaagaaatccctggtactgttcatgttccctcactgacatccagttccagttagactttataatacaacacattaagaaatctacagaaaatttgactttgatttattccttttaaataaaaagtgtttcttaaaaggcttgaaacatgtatctgttaacatgaattttaaaagaacaattatgaatgcataacaaaatagccaaaccaaacattgctttgaattgctgcacaaataactgattataactgttatgacctagaaaaaaatcataaaaacatttttctttttggcaagatgtgagttgctgtagaattataccagttctttggttctactttccaaataaatatatatataatgcaatgtaaa

SEQ ID NO: 144442 - DNA, 819 bp, Homo sapiens
  Payload ID: 8540
  Gene Symbol: IQCH
  Gene Name: IQ motif containing H
  ENST ID: ENST00000535744
  CDS Start-End: 50-562
gtgcttggaaaccgcgcctccgcggaggtagccgttccctgacctagccatggcacagaacactgaaaaccacgaccctgtcggatccatcttaatccagatccatgaagacctttatcagttaaaggagaaattaacaaaattctcacctgaggaaaaaggagagactctagacattcagagtcttgaaacagcaatcaaaaggactgaagtggggttaagaattcacattgagaagtatttaaatgttgtaaaccagaatgtattaacgacttctgttaatgatgagagcttatatactccccaggcttccaaatggttacttccaactgtaattgatcagaaatcatttattttccctcaggaatctgagggtacattttggcaaccccaaagacagcacagttcatctctgcctgtctttccaagagcaaagcgaaagatagggttgaatgtaaaaatcttgcaggatcctgaaaacatccaccacagagctgctgtaaatgcgaactatggaatcagtttgccatatattaatcagagaaaagcatgtggattttaagtatgatagaacgagggctgattccaccaacagcaaggattacctttcagaatccacccattacacccagagcagctcctctgcatagttttgatgaagcacgtaagattccaactgtagccactttcactatacctcgggaaccacctccatctccagcagaagtgaagttctttcccaagaaacaaagatcaaaggccatgaaagtcaaaacacctttgagagccctgaaatcactgtgggattatgacttttta

SEQ ID NO: 144443 - DNA, 3112 bp, Homo sapiens
  Payload ID: 8540
  Gene Symbol: IQCH
  Gene Name: IQ motif containing H
  Uniprot ID: Q86VS3
  ENST ID: ENST00000546225
  CDS Start-End: 1-2055
atgaaagtcaaaacacctttgagagccctgaaatcactgtgggattatgactttttaatttatgatggtgtcatagacaatacagccccagacttcttagcattcaaggaacattttagcttagcttggggaggtattttttctctcttggaacacgtcgagaagtttctcaggaactatgctataccagaagtcaaaataaaagggaataatttggtggccctccttccagagtttgagctgacgaataaacttaccagatatgaccttctctcagtgttagaggacccagctcatgtccaaatgctgataaatcttccagggcaaaggtacaagggccaagatggaaattcggaggccgccatgaagatccaagccacatggaaatgctacaaagcaagaaaattcttcctcttttatcgccagcagaagtgggcatcaggtgtgattgccattgcttggctgttatattgccataagactcgactaaagaagatactaaaggaatcacgtcagagacacctggagaattttcgcattcgagccaagcatctggcagccaactggaatcgcatcaggacctccaggaggactattatccatatcccatcattagggtattcccagcctgtgagagaacatattgccgatttcaacacacagcagaacatgcagctggggaggctgtgtgacatcttagatgccaatgtgaatgtcatctacatctgctcccatcatatgaatgacgagttagtgctgtattacaaaaaaatcctaagtctacatgcagccgtcaaatctgggaaccttgaggacagaagtgacctgcaggacaggttcaaaattatcacacctgaagctgtaaacatcttccctatgatagagcagctgagtcagctgataactgatcacctgcaaatacagcgttggctctttaaaatggactctgagttccgaggaaatgggactgcattttgtgatattccttcctacctaaagtgctacaaatgggtgctaaaggagagtagcagatatggccttgaagactggagaaagaaatgggcacaagagccagctttggtgaagatctctgaggagctggcgggcattttagcacagcacgcacagccagtcaatgagaaacggttcccgacgtggaggaaattcctccaaacatttctcagtcaagggggtgtgatcgaagcattcccacctgcagacaatgtcaccaacctcacagtggacatgctgatagagcccaacgggaaaatcagcgtgctgtcgacaggggaccagcttcatgctgaaagccccttcatctcctctggtaccaccgtgcctcagacctcagtggatccccaagttctcacttatttgtgcctccaaattggaaaagcctgcagaatgagagatgtggttggttacttttcgatagatctggtgacttttatagatccaagcaccttggaacaacaggtgtgggcaaccggccttaacctcgcatatagtgaccagctggccctgactcaactcaccttatacctgacaaacggccatctggattgcagtttgagcaccctggaagtgccccgctttgttccaaaggaaaggaagaaaaccaaatgcatgagtgcgctgtcaatgccgatgctggcaaccagtcgctatgcagtgatgaccacccagctaagacacagcaatctctcactggttttccactatgtttttctccagatctgtagggcccatggcattggctatgatgttgaggaaaggcaaggaactgtttttatattatatgagcacctgaagagacacaagttgggaatgttaacaatcggcgaggatctccagggggtcctcatgacctttgctcgccatctcttcatcatccatcaagaaatatcagcacctaatatgcaaggcgagaccaattttaagaccaccattgctgatattgaaactattctaagagtaacaaaggaaaacaaaatgagatttgaagaggagcaacagtccaaagatgataaaaacctctctaaacccaagaaatgatcctggaatacagtacataacaatttggatcccagtctggaataaaaagggcaatttttttttctgttagaaataaaagccaggggaaattggtttgctttgtgtgctaggaggtgaatcagaacagattataatgaaatgctctttttaaaacattgtttattaagtgatcttattttatttattaaaccaaaacttatttgtgttttcatttgagagtgttgaacaatcccttcttcttctcaaactcagaaaaaagtaatctgataaaagaagaaagttaaaagtcttactgatatcacctccgcatttacttcctcataggcctcaggattatgtagcttttattttttatgttttataaagttttctcctatttctaatagtccatcgatcttctgcatttataggtttgaataaaggcttaagaattgctatttgtcaaaacacaaatgcctttttttcaaagcttcaaattatattgaaattatatttatatgaatttttaagtgactatcattcatcgtgtttttgttataccaagccactattgtctgctattgttgccatttttcaaaaagtaggataagccagcatctagttaaccaaagcatcagaatgtatctaggtggcagtatctgctcttagtttaagatggagtgtagctcgagctctgtagcttgaataaacatttgtattctctagttctccatttaatacagcagtaggattttttcaagtttagttcaacattatactacctttaaaaaggcagactgttaagattgtagtagtgctgactctaactttcagcattcacttcataattgtccaaaaatatttccacatcagtgagctttactgaagggtgaaataaaagcaaattacaacaccaaaaccattattgttttaaagaatgacctttatgtctataaaaatattttagtgtattggggaaaggaataggatttttacctgtggaatttcaataatttgttaactgtgattcagccacaggctaagagtttctgtaataaaattaacatttgtgtgtgtc

SEQ ID NO: 144444 - DNA, 1699 bp, Homo sapiens
  Payload ID: 8540
  Gene Symbol: IQCH
  Gene Name: IQ motif containing H
  ENST ID: ENST00000559568
  CDS Start-End: 50-109
gtgcttggaaaccgcgcctccgcggaggtagccgttccctgacctagccatggcacagaacactgaaaaccacgaccctgtcggatccatcttaatccagggattttaagtatgatagaacgagggctgattccaccaacagcaaggattacctttcagaatccacccattacacccagagcagctcctctgcatagttttgatgaagcacgtaagattccaactgtagccactttcactatacctcgggaaccacctccatctccagcagaagtgaagttctttcccaagaaacaaagatcaaaggggaaaagcagaaggtcaagaggacatcatgataggaaggccatgaaagtcaaaacacctttgagagccctgaaatcactgtgggattatgactttttaatttatgatggtgtcatagacaatacagccccagacttcttagcattcaaggaacattttagcttagcttggggaggtattttttctctcttggaacacgtcgagaagtttctcaggaactatgctataccagaagtcaaaataaaagggaataatttggtggccctccttccagagtttgagctgacgaataaacttaccagatatgaccttctctcagtgttagaggacccagctcatgtccaaatgctgataaatcttccagggcaaaggtacaagggccaagatggaaattcggaggccgccatgaagatccaagccacatggaaatgctacaaagcaagaaaattcttcctcttttatcgccagcagaagtgggcatcaggtgtgattgccattgcttggctgttatattgccataagactcgactaaagaagatactaaaggaatcacgtcagagacacctggagaattttcgcattcgagccaagcatctggcagccaactggaatcgcatcaggacctccaggaggactattatccatatcccatcattaggtataacacttttgcctgcaaatctatcagcaacctctattacccaccacattatggctccttgattgagttcaaggaaggccccttgttttattcaaattggtctcggcaggaaaatgttctcgacatgatgagagtaataacacaggaccctcgcttgaaacggcgtttaatttggggattaagcaaataaagtcattatgtgggggctgctattcagtggagaggtgatttgctgtaattcgctttcatctgtatgaaatgaactaaaaagttgtatttttccccgaaataacagataatgttttcgatcttctttaatgatagaagaacacaggcttgtatgtgttgttgctgttacgccaataagccaggatattgcttgtacactgtttttaatcaaatgtgcagtcaaaatgataagctacattctctgaaattatttagttctaattacgagcagatgggatgctttatttgcacctagggcgcctgagcaaaaggaaatgctgtgtgaacaagaataattaagaagttgaatagtgttttttgcacttaaataatctgcagtttcatgttaattagcactaatgtaattatttaattacatttatgaattggggaacttaaaagctgttgtctgaaacacactggtaaaaaaggtatgccaaaatgacattgggaatttcagaaatttgcattggagtttcttttaagacatgagctactgtcaac

SEQ ID NO: 144445 - DNA, 543 bp, Homo sapiens
  Payload ID: 8540
  Gene Symbol: IQCH
  Gene Name: IQ motif containing H
  ENST ID: ENST00000561339
  CDS Start-End: 1-141
aaattaacaaaattctcacctgaggaaaaaggagagactctagacattcagagtcttgaaacagcaatcaaaaggactgaagtggggttaagaccactttcactatacctcgggaaccacctccatctccagcagaagtgaagttctttcccaagaaacaaagatcaaaggggaaaagcagaaggtcaagaggacatcatgataggaaggccatgaaagtcaaaacacctttgagagccctgaaatcactgtgggattatgactttttaatttatgatggtgtcatagacaatacagccccagacttcttagcattcaaggaacattttagcttagcttggggaggtattttttctctcttggaacacgtcgagaagtttctcaggaactatgctataccagaagtcaaaataaaagggaataatttggtggccctccttccagagtttgagctgacgaataaacttaccagatatgaccttctctcagtgttagaggacccagctcatgtccaaatgctgataaatcttccagggcaaaggt

SEQ ID NO: 144446 - DNA, 653 bp, Homo sapiens
  Payload ID: 8540
  Gene Symbol: IQCH
  Gene Name: IQ motif containing H
  ENST ID: ENST00000558759
  CDS Start-End: 1-273
actgtttttatattatatgagcacctgaagagacacaagttgggaatgttaacaatcggcgaggatctccagggggtcctcatgacctttgctcgccatctcttcatcatccatcaagaaatatcagcacctaatatgcaaggcgagaccaattttaagaccaccattgctgatattgaaactattctaagagtaacaaaggaaaacaaaatgagatttgaagaggagcaacagtccaaagatgataaaaacctctctaaacccaagaaatgatcctggaatacaatctctctaatccattcgaggggcccattgttcagacacttgacagataggaagtcctacatgcccattagagccgcgcctcgactgaagccagagcaacataaggtccaagagactcattagttcactggcacaatcgtgtcctgagagtaaatgaaaccctctgtctccttatggctctcatctgctctggactttaaaagaaaactgtctccgttttgttcggcacagtagtggatcattcacatggtgagagcccctgcttaacagtacaaaactgttaaatctatcggaaagttttgcatgtgaattttgattagcactcccgaagctcaagctgctggcaatagcgaaacgatttcgccatc

SEQ ID NO: 144447 - DNA, 583 bp, Homo sapiens
  Payload ID: 8540
  Gene Symbol: IQCH
  Gene Name: IQ motif containing H
  ENST ID: ENST00000561357
  CDS Start-End: 1-583
tcttcctcttttatcgccagcagaagtgggcatcaggtgtgattgccattgcttggctgttatattgccataagactcgactaaagaagatactaaaggaatcacgtcagagacacctggagaattttcgcattcgagccaagcatctggcagccaactggaatcgcatcaggacctccaggaggactattatccatatcccatcattagggtattcccagcctgtgagagaacatattgccgatttcaacacacagcagaacatgcagctggggaggctgtgtgacatcttagatgccaatgtgaatgtcatctacatctgctcccatcatatgaatgacgagttagtgctgtattacaaaaaaatcctaagtctacatgcagccgtcaaatctgggaaccttgaggacagaagtgacctgcaggacaggttcaaaattatcacacctgaagctgtaaacatcttccctatgatagagcagctgagtcagctgataactgatcacctgcaaatacagcgttggctctttaaaatggactctgagttccgaggaaatgggactgcattttgtgatattccttc

SEQ ID NO: 144448 - DNA, 1822 bp, Homo sapiens
  Payload ID: 8540
  Gene Symbol: IQCH
  Gene Name: IQ motif containing H
  Uniprot ID: Q86VS3
  ENST ID: ENST00000629425
  CDS Start-End: 235-1152
gtgcttggaaaccgcgcctccgcggaggtagccgttccctgacctagccatggcacagaacactgaaaaccacgaccctgtcggatccatcttaatccagatccatgaagacctttatcagttaaaggagaaattaacaaaattctcacctgaggaaaaaggagagactctagacattcagagtcttgaaacagcaatcaaaaggactgaagtggggttaagaggattttaagtatgatagaacgagggctgattccaccaacagcaaggattacctttcagaatccacccattacacccagagcagctcctctgcatagttttgatgaagcacgtaagattccaactgtagccactttcactatacctcgggaaccacctccatctccagcagaagtgaagttctttcccaagaaacaaagatcaaaggggaaaagcagaaggtcaagaggacatcatgataggaaggccatgaaagtcaaaacacctttgagagccctgaaatcactgtgggattatgactttttaatttatgatggtgtcatagacaatacagccccagacttcttagcattcaaggaacattttagcttagcttggggaggtattttttctctcttggaacacgtcgagaagtttctcaggaactatgctataccagaagtcaaaataaaagggaataatttggtggccctccttccagagtttgagctgacgaataaacttaccagatatgaccttctctcagtgttagaggacccagctcatgtccaaatgctgataaatcttccagggcaaaggtacaagggccaagatggaaattcggaggccgccatgaagatccaagccacatggaaatgctacaaagcaagaaaattcttcctcttttatcgccagcagaagtgggcatcaggtgtgattgccattgcttggctgttatattgccataagactcgactaaagaagatactaaaggaatcacgtcagagacacctggagaattttcgcattcgagccaagcatctggcagccaactggaatcgcatcaggacctccaggaggactattatccatatcccatcattaggtataacacttttgcctgcaaatctatcagcaacctctattacccaccacattatggctccttgattgagttcaaggaaggccccttgttttattcaaattggtctcggcaggaaaatgttctcgacatgatgagagtaataacacaggaccctcgcttgaaacggcgtttaatttggggattaagcaaataaagtcattatgtgggggctgctattcagtggagaggtgatttgctgtaattcgctttcatctgtatgaaatgaactaaaaagttgtatttttccccgaaataacagataatgttttcgatcttctttaatgatagaagaacacaggcttgtatgtgttgttgctgttacgccaataagccaggatattgcttgtacactgtttttaatcaaatgtgcagtcaaaatgataagctacattctctgaaattatttagttctaattacgagcagatgggatgctttatttgcacctagggcgcctgagcaaaaggaaatgctgtgtgaacaagaataattaagaagttgaatagtgttttttgcacttaaataatctgcagtttcatgttaattagcactaatgtaattatttaattacatttatgaattggggaacttaaaagctgttgtctgaaacacactggtaaaaaaggtatgccaaaatgacattgggaatttcagaaatttgcattggagtttcttttaagacatgagctactgtcaac

SEQ ID NO: 144449 - DNA, 1460 bp, Homo sapiens
  Payload ID: 8541
  Gene Symbol: IQCJ
  Gene Name: IQ motif containing J
  Uniprot ID: Q1A5X6
  ENST ID: ENST00000397832
  CDS Start-End: 106-444
tcacattcccccacagtcacattgcgctctgtgattctgaggaatacagtgtgccagcatccgatccagtctcctttcacctgcaggtgttccagaaacttcaaaatgcgtctggaagaactgaaaagattgcagaatcctctagaacaagttaatgatggaaaatattcatttgaaaatcaccagctggccatggatgcagagaataatattgaaaagtatcccctcaatctacagcccttggaatcaaaggtgaaaatcattcagcgagcatggcgagagtacctgcagcggcaggagcccctggggaagaggagcccgtccccaccctctgtctcctcagagaagctgagcagctctgtcagcatgaacaccttctccgacagcagcacacccgtgagtgtcatgtttctttttctatgtcctgacttgacattcaactgaaagcctagactttggttctaagagagaaatcttgggatgtgagcaggtggtttgtgacagtgaagatctatgtagcttatttgctacccaggaacccatggtgagagttttgtcacctcaaaataaagacacaattcataagcacaaagtgaactttatcaagtctggagaaaatagattgcatttatgtgttctcatttctctattatggaggtatcttttttgcttttctttataatagcatatttcttttagtatgtgctgtgtgtttcttttattgtgtggtgctaatatgatagaagataagattggttataaggagtagaaagagaacttttaccagaagaattgaaagtggtcacacactcaggggttgcaacttaaatgtctccaggggccaggtaagtcaccctcatgactgaggtggctgagctgtgcccctggctacacggagaacatagacctcacctgaagggcagcgcacttggctcctgacaatgtgacaccatgtggcgatacaggcaggcatggccaaatgtgattttctttcttcaggacatgtcagaaatctgcatttttaagtgttagcagccagtaagaaaatttaaaaggtaaagtaagcatgcctacagaccacaattgacctacaggccaccagtttaagaaatctgagatagagagttaaggaataagggaatctgctggaagtctttatttttaaaaaacaccaaaagtgggaagaaatcagtgatgagggatttatgaaccaggattttgtggatttaagcattgtgataatttgtaaccagtcactgaaatgctgaaaagttagagaaatgaagtaattacacaagtatattacttccaaaaatttttcttttacttttggttatcatgtttattctgtggtaaaaaggtttcccaacactcaacgcaatgtattctttttgggatcaggtaaaagttactgtatttgaaatgttttcagatggttgcattgcatattcttcaataaa

SEQ ID NO: 144450 - DNA, 885 bp, Homo sapiens
  Payload ID: 8541
  Gene Symbol: IQCJ
  Gene Name: IQ motif containing J
  Uniprot ID: Q1A5X6
  ENST ID: ENST00000451172
  CDS Start-End: 106-585
tcacattcccccacagtcacattgcgctctgtgattctgaggaatacagtgtgccagcatccgatccagtctcctttcacctgcaggtgttccagaaacttcaaaatgcgtctggaagaactgaaaagattgcagaatcctctagaacaagttaatgatggaaaatattcatttgaaaatcaccagctggccatggatgcagagaataatattgaaaagtatcccctcaatctacagcccttggaatcaaaggtgaaaatcattcagcgagcatggcgagagtacctgcagcggcaggagcccctggggaagaggagcccgtccccaccctctgtctcctcagagaagctgagcagctctgtcagcatgaacaccttctccgacagcagcacaccctttgccagggcccctgttgggaagattcatccttacatctcttggaggttgcagtcacctggggacaagttgcctggtggaaggaaggtgattcttctctaccttgaccagcttgccagacccactgggttcatacatactctcaaggagccccagatagaaagacttggttttctcaccctccagtgaatggacctcaagtttatggagggaataggatgatccctggcctacactgactaagcctgtcatcaagaaatgagcttcctctaacaaccatgagtccatttggaacttctgtgttaaaagccttcagtccaagtcaaatgttgtcagtgagctgtgtccctggggagttctttatgccctgcctcttgcttgatcttttccaggttgttgaacctcagccctctttctctgggtttaatctattgctgttactgcctagacaattttctatcttctcatatctgatcaactgactgtctt

SEQ ID NO: 144451 - DNA, 1408 bp, Homo sapiens
  Payload ID: 8541
  Gene Symbol: IQCJ
  Gene Name: IQ motif containing J
  Uniprot ID: Q1A5X6
  ENST ID: ENST00000482126
  CDS Start-End: 106-504
tcacattcccccacagtcacattgcgctctgtgattctgaggaatacagtgtgccagcatccgatccagtctcctttcacctgcaggtgttccagaaacttcaaaatgcgtctggaagaactgaaaagattgcagaatcctctagaacaagttaatgatggaaaatattcatttgaaaacattcagcgagcatggcgagagtacctgcagcggcaggagcccctggggaagaggagcccgtccccaccctctgtctcctcagagaagctgagcagctctgtcagcatgaacaccttctccgacagcagcacaccctttgccagggcccctgttgggaagattcatccttacatctcttggaggttgcagtcacctggggacaagttgcctggtggaaggaaggtgattcttctctaccttgaccagcttgccagacccactgggttcatacatactctcaaggagccccagatagaaagacttggttttctcaccctccagtgaatggacctcaagtttatggagggaataggatgatccctggcctacactgactaagcctgtcatcaagaaatgagcttcctctaacaaccatgagtccatttggaacttctgtgttaaaagccttcagtccaagtcaaatgttgtcagtgagctgtgtccctggggagttctttatgccctgcctcttgcttgatcttttccaggttgttgaacctcagccctctttctctgggtttaatctattgctgttactgcctagacaattttctatcttctcatatctgatcaactgactgtcttgtcccaagtcccttccttccttctactaacctctaacacaaccttaatggaggccaacaagcccttacctaacttctggacattgccagctgctctgcagccccacgcccataactgcaattattgcctatctcaactatctaccccaggcatgcactacacaggaaatcagctcactaatctggttgagttcctgtgtggagctgataatgatgcttttgcatgcttctgctctgattgttttggctaggcctagtggttaatgtggttctttgaacatttctgccttaaaatatataacaaaagtaacgtttaagtatgagtgctcaaattcattatcttaataaaagctgagcacttgttatgtgccaggcactctgctattatcttgtttaatcctatcaatgatcatacaaagaaagacactattattatctccattttacaggtgatgaaaaagagacttaaagagataactaccttttcttgggccacccattgggttggagctccatattttattcttccactatattacttgaaaagaaggctgcatttagacacggtcaagcaatcagttcatgcatttctaagactgctttac

SEQ ID NO: 144452 - DNA, 2423 bp, Homo sapiens
  Payload ID: 8542
  Gene Symbol: IQCK
  Gene Name: IQ motif containing K
  Uniprot ID: Q8N0W5
  ENST ID: ENST00000308214
  CDS Start-End: 700-1269
attaatccctgagacaaaggtactgaaggcaagtggctgaagaacaggcttgattggacagatgacttggagatgttcactggacagggacagccttgtgaagatctttgtgaatacccgacctcgcaagctccagagactacaataattcacttgccctaggttccaaagccagcaagtggaaaacggagactggaattccgcccacaggactccaaagcctgtgcagcaacaccccactcccccggcaggatcaccagcaggacgcgcgggagccaggaagtaagatccgtacctccaaggctcccatgggcccaagcctccgcatcaacagactgggagggattacgtggggtcccagggccggctctgaggcgggaaaactttctggaggcggcggcctcaggccggagcgggcgcacaccgactggaggggtcggattcagggatgtgggtggaccgcatttccccatcttccccgccgcgcacttcctctggtgcaatctccacaccccgcgccggcccgcctgcaacgcgccctggcactcaccggtgggcgaaatttccccgcctccacgtgagagccagctccgccgtgacccggaagtccacttcgagtcgccggcccaccctctcgggttccggcttcttccgggtcgcggccttccggcgaacgcggttaccgtggaaaccgcggccatggcggcaccgcggcaaatccccagccacatagtgcgcctcaagcccagctgctctacagactcgtcgttcacccggacgccggtgcccaccgtgtctctcgcgtcccgcgagctgcctgtctcgtcgtggcaggtcaccgagccgtcaagcaagaatctgtgggagcagatctgcaaggagtatgaagctgagcagcctccctttccagaaggatataaagtcaaacaggagcctgtgattacggttgcgccagtagaggaaatgctttttcatggcttcagtgcagagcactattttccggtttcccatttcaccatgatctcacgtacaccctgtcctcaagataaatcggaaacaatcaacccaaaaacatgttctcccaaagaatatttggaaactttcatctttcctgttctgcttcccggaatggctagcctgcttcaccaagcgaagaaagaaaaatgttttgagcccacggccgccaatcccactctcgctcctgctgacagaagaggaagcagccctctacattcaatccttctggagagcctgtgtggttcgctgtgatcctgagattcaagaactgcgtcagtggcagaagaaacttcgcgaggccaagcacattcaccagcaagtcaaaattttctgggccaagcaagaacaaaaagtgaaatgcaaaatggaggacgatgcagtacctgcagccaagatgaaaattccatcatcttaaccatagctaagacgtatctttgcccattcgagcacaagttaccttgtgcaaggaaaatgtccaaatgatgctctctctcttgtgatttctttaacaagacttggaacatgtgcaaatggaatcttttctgtacaagataggattcattgcaaacaagctttaatgcaaatagtttagaaaagaaaggaccagtcttcactttctgcattatccccacattttattcattcatccagattacttcttcagtgcctcaggagtattcttctacaccagctgctgttaaaatgtacaatgaactctagtcccaaggaatacagaagtgctcttattaccagttttcccacttgtggccgcctttgcaaagatccatattctaatttaagtccccaacctctgaatttggttttaagtttacctagtgactgactactctctttataaaaaagaccttatacttaatgatcatttccaaaggagaccactccttaacttttactgcaaacccaacaagatgagacacttaaacccagacagatgtaacaaaggatttttgttgtctaagtcccaaagtattatatagaaagttcctgcttttatgggtaaacttattaccttaatatgttctgtggtttgctgttaaccaagattctcccatttaaaatgccacagaccgaccctcaaggcagatccgaaagcctagtagttagttgcactgggttgttttgacaagctaccacacgtcttaagtaaatagtaaagcctttatttttgtgttaagaacagcattttgaaaataaaacctatctgcccatggtttacagccttttaaatttgtaatatttatatagtcgtttatggtacatattgattgtcttgaaatttctttaacttcttttttataagtatgcaacagtcagccgggggaagataaaggtacattataaaacacacattaatgcatttaataaatatatattatctatcaaaa

SEQ ID NO: 144453 - DNA, 3482 bp, Homo sapiens
  Payload ID: 8542
  Gene Symbol: IQCK
  Gene Name: IQ motif containing K
  Uniprot ID: Q8N0W5
  ENST ID: ENST00000320394
  CDS Start-End: 700-1563
attaatccctgagacaaaggtactgaaggcaagtggctgaagaacaggcttgattggacagatgacttggagatgttcactggacagggacagccttgtgaagatctttgtgaatacccgacctcgcaagctccagagactacaataattcacttgccctaggttccaaagccagcaagtggaaaacggagactggaattccgcccacaggactccaaagcctgtgcagcaacaccccactcccccggcaggatcaccagcaggacgcgcgggagccaggaagtaagatccgtacctccaaggctcccatgggcccaagcctccgcatcaacagactgggagggattacgtggggtcccagggccggctctgaggcgggaaaactttctggaggcggcggcctcaggccggagcgggcgcacaccgactggaggggtcggattcagggatgtgggtggaccgcatttccccatcttccccgccgcgcacttcctctggtgcaatctccacaccccgcgccggcccgcctgcaacgcgccctggcactcaccggtgggcgaaatttccccgcctccacgtgagagccagctccgccgtgacccggaagtccacttcgagtcgccggcccaccctctcgggttccggcttcttccgggtcgcggccttccggcgaacgcggttaccgtggaaaccgcggccatggcggcaccgcggcaaatccccagccacatagtgcgcctcaagcccagctgctctacagactcgtcgttcacccggacgccggtgcccaccgtgtctctcgcgtcccgcgagctgcctgtctcgtcgtggcaggtcaccgagccgtcaagcaagaatctgtgggagcagatctgcaaggagtatgaagctgagcagcctccctttccagaaggatataaagtcaaacaggagcctgtgattacggttgcgccagtagaggaaatgctttttcatggcttcagtgcagagcactattttccggtttcccatttcaccatgatctcacgtacaccctgtcctcaagataaatcggaaacaatcaacccaaaaacatgttctcccaaagaatatttggaaactttcatctttcctgttctgcttcccggaatggctagcctgcttcaccaagcgaagaaagaaaaatgttttgagaggaaaagaaccaaattcattgcctgtgattttctgactgagtggttatacaaccaaaatccaaagagggcaggggagccattcacagaatttttctccattccatttgtggaggagcggctaaagcaacacccacggccgccaatcccactctcgctcctgctgacagaagaggaagcagccctctacattcaatccttctggagagcctgtgtggttcgctgtgatcctgagattcaagaactgcgtcagtggcagaagaaacttcgcgaggccaagcacattcaccagcaagtcaaaattttctgggccaagcaagaacaaaaagtgaaatgcaaaatggaggacgatgcagtacctgcagccaagatgaaaattccatcatcttaaccatagctaagacgtatctttgcccattcgagcacaagttaccttgtgcaaggaaaatgtccaaatgatgctctctctcttgtgatttctttaacaagacttggaacatgtgcaaatggaatcttttctgtacaagataggattcattgcaaacaagctttaatgcaaatagtttagaaaagaaaggaccagtcttcactttctgcattatccccacattttattcattcatccagattacttcttcagtgcctcaggagtattcttctacaccagctgctgttaaaatgtacaatgaactctagtcccaaggaatacagaagtgctcttattaccagttttcccacttgtggccgcctttgcaaagatccatattctaatttaagtccccaacctctgaatttggttttaagtttacctagtgactgactactctctttataaaaaagaccttatacttaatgatcatttccaaaggagaccactccttaacttttactgcaaacccaacaagatgagacacttaaacccagacagatgtaacaaaggatttttgttgtctaagtcccaaagtattatatagaaagttcctgcttttatgggtaaacttattaccttaatatgttctgtggtttgctgttaaccaagattctcccatttaaaatgccacagaccgaccctcaaggcagatccgaaagcctagtagttagttgcactgggttgttttgacaagctaccacacgtcttaagtaaatagtaaagcctttatttttgtgttaagaacagcattttgaaaataaaacctatctgcccatggtttacagccttttaaatttgtaatatttatatagtcgtttatggtacatattgattgtcttgaaatttctttaacttcttttttataagtatgcaacagtcagccgggggaagataaaggtacattataaaacacacattaatgcatttaataaatatatattatctatcaaaagtgagccttagctcttcatcagttaataaaaagcacctgctgagaactcctgtaagctggtatcatcattgcatcattggattataaaagccacaatgctccctttcaacttggggtttggcctgaggcgttcaactcagccttggccaaccgagaccaccacccgagttcacccttgttcagtgggtcctgacggcatctgggctaaaaaaaaaaaaaaaaaaaagcactgggcgcccagcttccaacaaccagatcttcaactctggaatccctggagatgcacagaacttcccagtttgtaagctgtcagagctgactcccttctcttcccaccctccacctccagtggggagaaatccaggctagaatgacaattttctattaaaaggggggacaagagtggctgttatagacccaaagcgattttaataaccagacacggaacaatttgtgcttacaatgagagattttgatcacagatgctctcctcccgggtcgttttccccaaacgagtcttgtttacacacgcagatcttaaacagaggtgccatttaattttgtctttaaaccttgctccacggggggcagctggctgctacagtctcttggcaaagatgtctcttgatacttttcaggtgtagtcattagaaaaagaacagctctctcccttctcctctcactcccgcctccgcccccattatgaaggcgttcagcccactctcaaccttaaaagccaaaataaaacaaaaccctaagtgcgataacatatcagatttaaaaggggggaaaaaggtctcattaaatgaggcttcccatggctcaaagatggctctgttcttatgctggggaagcacgactttccatggcagccatttgtgctgtgctcaccttatatgcttggacaataaagaacttagaaaacgaa

SEQ ID NO: 144454 - DNA, 280 bp, Homo sapiens
  Payload ID: 8542
  Gene Symbol: IQCK
  Gene Name: IQ motif containing K
  ENST ID: ENST00000568061
  CDS Start-End: 1-177
gcagaagaaacttcgcgaggccaagcacattcaccagcaagtcaaaattttctgggccaagcaagaacaaaaagtgaaatgcaaaatggaggacgatgcagtacctgcagccaagatgaaaattccatcatcttaaccatagctaagactatgcaacagtcagccgggggaagataaaggtacattataaaacacacattaatgcatttaataaatatatattatctatcaaaagtgagccttagctcttcatcagttaataaaaagcacctgctgagaa

SEQ ID NO: 144455 - DNA, 920 bp, Homo sapiens
  Payload ID: 8542
  Gene Symbol: IQCK
  Gene Name: IQ motif containing K
  ENST ID: ENST00000564955
  CDS Start-End: 29-313
gaacgcggttaccgtggaaaccgcggccatggcggcaccgcggcaaatccccagccacatagtgcgcctcaagcccagctgctctacagactcgtcgttcacccggacgccggtgcccaccgtgtctctcgcgtcccgcgagctgcctgtctcgtcgtggcaggtcaccgagccgtcaagcaagaatctgtgggagcagatctgcaagggttgcgccagtagaggaaatgctttttcatggcttcagtgcagagcactattttccggtttcccatttcaccatgatctcacgtacaccctgtcctcaagataaatcggaaacaatcaacccaaaaacatgttctcccaaagaatatttggaaactttcatctttcctgttctgcttcccggaatggctagcctgcttcaccaagcgaagaaagaaaaatgttttgagaggaaaagaaccaaattcattgcctgtgattttctgactgagtggttatacaaccaaaatccaaagagggcaggggagccattcacagaatttttctccattccatttgtggaggagcggctaaagcaacacccacggccgccaatcccactctcgctcctgctgacagaagaggaagcagccctctacattcaatccttctggagagcctgtgtggttcgctgtgatcctgagattcaagaactgcgtcagtggcagaagaaacttcgcgaggccaagcacattcaccagcaagtcaaaattttctgggccaagcaagaacaaaaagtgaaatgcaaaatggaggacgatgcagtacctgcagccaagatgaaaattccatcatcttaaccatagctaagacgtatctttgcccattcgagcacaagttaccttgtgcaaggaaaatgtccaaatgatgctctctctcttgtgatttcttta

SEQ ID NO: 144456 - DNA, 801 bp, Homo sapiens
  Payload ID: 8542
  Gene Symbol: IQCK
  Gene Name: IQ motif containing K
  ENST ID: ENST00000561935
  CDS Start-End: 1-502
ccccagccacatagtgcgcctcaagcccagctgctctacagactcgtcgttcacccggacgccggtgcccaccgtgtctctcgcgtcccgcgagctgcctgtctcgtcgtggcaggtcaccgagccgtcaagcaagaatctgtgggagcagatctgcaaggagtatgaagctgagcagcctccctttccagaaggatataaagtcaaacaggagcctgtgattacggttgcgccagtagaggaaatgctttttcatggcttcagtgcagagcactattttccggtttcccatttcaccatgatctcacgtacaccctgtcctcaagataaatcggaaacaatcaacccaaaaacatgttctcccaaagaatatttggaaactttcatctttcctgttctgcttcccggaatggctagcctgcttcaccaagcgaagaaagaaaaatgttttgagattgattgttccccctggcatctctctactccatgccaactgtcatgaatgtaaactgctcgcagagagtcttggaacacaaggaaaagaaccaaattcattgcctgtgattttctgactgagtggttatacaaccaaaatccaaagagggcaggggagccattcacagaatttttctccattccatttgtggaggagcggctaaagcaacacccacggccgccaatcccactctcgctcctgctgacagaagaggaagcagccctctacattcaatccttctggagagcctgtgtggttcgctgtgatcctgagattcaagaactgcgtcagtggcagaagaaact

SEQ ID NO: 144457 - DNA, 1774 bp, Homo sapiens
  Payload ID: 8542
  Gene Symbol: IQCK
  Gene Name: IQ motif containing K
  ENST ID: ENST00000568126
  CDS Start-End: 700-984
attaatccctgagacaaaggtactgaaggcaagtggctgaagaacaggcttgattggacagatgacttggagatgttcactggacagggacagccttgtgaagatctttgtgaatacccgacctcgcaagctccagagactacaataattcacttgccctaggttccaaagccagcaagtggaaaacggagactggaattccgcccacaggactccaaagcctgtgcagcaacaccccactcccccggcaggatcaccagcaggacgcgcgggagccaggaagtaagatccgtacctccaaggctcccatgggcccaagcctccgcatcaacagactgggagggattacgtggggtcccagggccggctctgaggcgggaaaactttctggaggcggcggcctcaggccggagcgggcgcacaccgactggaggggtcggattcagggatgtgggtggaccgcatttccccatcttccccgccgcgcacttcctctggtgcaatctccacaccccgcgccggcccgcctgcaacgcgccctggcactcaccggtgggcgaaatttccccgcctccacgtgagagccagctccgccgtgacccggaagtccacttcgagtcgccggcccaccctctcgggttccggcttcttccgggtcgcggccttccggcgaacgcggttaccgtggaaaccgcggccatggcggcaccgcggcaaatccccagccacatagtgcgcctcaagcccagctgctctacagactcgtcgttcacccggacgccggtgcccaccgtgtctctcgcgtcccgcgagctgcctgtctcgtcgtggcaggtcaccgagccgtcaagcaagaatctgtgggagcagatctgcaagggttgcgccagtagaggaaatgctttttcatggcttcagtgcagagcactattttccggtttcccatttcaccatgatctcacgtacaccctgtcctcaagataaatcggaaacaatcaacccaaaaacatgttctcccaaagaatatttggaaactttcatctttcctgttctgcttcccggaatggctagcctgcttcaccaagcgaagaaagaaaaatgttttgagaggaaaagaaccaaattcattgcctgtgattttctgactgagtggttatacaagtaagttgttcgtgtctgactattcagtgatcctaagaattcagtcgtgttaatttgcaagcagaatagcaacaactgacttgaattcttgcttattgttttcttgtcaatcaaacatatggcatcatgaccagccaaaatccaaagagggcaggggagccattcacagaatttttctccattccatttgtggaggagcggctaaagcaacacccacggccgccaatcccactctcgctcctgctgacagaagaggaagcagccctctacattcaatccttctggagagcctgtgtggtaagaatcatatgcgactgtggtatttgatttaatggggaacttttgtgaggtggagggtccagggtaaaccttagatgagttaggaacaggatattatagctaacatccagacctcagaaatacgattctctgtaaaatgggtcttaaaaagtgatttagaatttttactgaaactggctgggcatagtagctcatggctgtaatcccagaactttgcaggggccaaggtgggaggatcacttgagcccaggagttcaagaccagcctgggcaacatgacgaaacctcgtatctgccaaaaaaaaaaaagaaaa

SEQ ID NO: 144458 - DNA, 946 bp, Homo sapiens
  Payload ID: 8542
  Gene Symbol: IQCK
  Gene Name: IQ motif containing K
  ENST ID: ENST00000561839
  CDS Start-End: 1-370
accgcggcaaatccccagccacatagtgcgcctcaagcccagctgctctacagactcgtcgttcacccggacgccggtgcccaccgtgtctctcgcgtcccgcgagctgcctgtctcgtcgtggcaggtcaccgagccgtcaagcaagaatctgtgggagcagatctgcaaggagtatgaagctgagcagcctccctttccagaaggatataaagtcaaacaggagcctgtgattacggttgcgccagtagaggaaatgctttttcatggcttcagtgcagagcactattttccggtttcccatttcaccatgatctcacgtacaccctgtcctcaagataaatcggaaacaatcaacccaaaaacataggaaaagaaccaaattcattgcctgtgattttctgactgagtggttatacaaccaaaatccaaagagggcaggggagccattcacagaatttttctccattccatttgtggaggagcggctaaagcaacacccacggccgccaatcccactctcgctcctgctgacagaagaggaagcagccctctacattcaatccttctggagagcctgtgtggttcgctgtgatcctgagattcaagaactgcgtcagtggcagaagaaacttcgcgaggccaagcacattcaccagcaagtcaaaattttctgggccaagcaagaacaaaaagtgaaatgcaaaatggaggacgatgcagtacctgcagccaagatgaaaattccatcatcttaaccatagctaagacgtatctttgcccattcgagcacaagttaccttgtgcaaggaaaatgtccaaatgatgctctctctcttgtgatttctttaacaagacttggaacatgtgcaaatggaatcttttctgtacaagataggattcattgcaaacaagctttaatgcaaatagtttagaaaagaaagga

SEQ ID NO: 144459 - DNA, 882 bp, Homo sapiens
  Payload ID: 8542
  Gene Symbol: IQCK
  Gene Name: IQ motif containing K
  ENST ID: ENST00000564186
  CDS Start-End: 28-876
aacgcggttaccgtggaaaccgcggccatggcggcaccgcggcaaatccccagccacatagtgcgcctcaagcccagctgctctacagactcgtcgttcacccggacgccggtgcccaccgtgtctctcgcgtcccgcgagctgcctgtctcgtcgtggcaggtcaccgagccgtcaagcaagaatctgtgggagcagatctgcaaggagtatgaagctgagcagcctccctttccagaaggatataaagtcaaacaggagcctgtgattacggttgcgccagtagaggaaatgctttttcatggcttcagtgcagagcactattttccggtttcccatttcaccatgatctcacgtacaccctgtcctcaagataaatcggaaacaatcaacccaaaaacatgttctcccaaagaatatttggaaactttcatctttcctgttctgcttcccggaatggctagcctgcttcaccaagcgaagaaagaaaaatgttttgagaggaaaagaaccaaattcattgcctgtgattttctgactgagtggttatacaaccaaaatccaaagagggcaggggagccattcacagaatttttctccattccatttgtggaggagcggctaaagcaacacccacggccgccaatcccactctcgctcctgctgacagaagaggaagcagccctctacattcaatccttctggagagcctgtgtggttcgctgtgatcctgagattcaagaactgcgtcagtggcagaagaaacttcgcgaggccaagcacattcaccagcaagtcaaaattttctgggccaagcaagaacaaaaaggtaagttgctggattcactgtccttagttcattcaagaaaagcctgattctta

SEQ ID NO: 144460 - DNA, 3336 bp, Homo sapiens
  Payload ID: 8543
  Gene Symbol: IQCA1
  Gene Name: IQ motif containing with AAA domain 1
  Uniprot ID: Q86XH1
  ENST ID: ENST00000254653
  CDS Start-End: 266-2305
gaggttcgcgagtctctgggtcgcgacgggaaggagtgaaacacctctctgcgcctgcgcgctccgtgcctgcgaagcaaacccggcctcaccttttcctgcccgaagcagaagattctcgcagtcctggtttctccctccagaagaccccccacccaaatcctctgtagctcctggtagtgccctgacccctgctgccaccgtccttcagagagcaacggaagagcttcccggagggcgaggaaaagagggaaagtagccagcaatgtcgaacgcaatgtataataagatgtggcatcagacccaagaagccctcggtgctttactcgataaagagcctcagaagatgattgaaccacaaagaaatcaggttttcatctttcaaacattagccaccttctacgtaaagtatgtgcagatctttagaaacctagagaatgtctacgaccagttcgtccacccccagaaacgaatactgatcaggaaagtcctggacggggtgatgggccgcatcctggagctgaagaacgagatggtggagctggaactcacggagttccattatttcgatgatatcctgcaggatctcaagctggccccccaacaattagatattcccatacccaagtattttttgaaggagaagttggaagtaataaaaggaagagagaaaattcttgctcaaatattagcggacagcggaatagatacatctgacatgaaataccctgtaaagagtatccctttcgatgaggctgttaaattaatccagattgctgagagggcacggcaaggtcgcctaagggctttattcatgaagcaaatctatctgcaagaatatagagcaaagcaatccaagatgcttggcaagaaagtgacagatacctgggctgctgcactccgcattcagaaggtttggcgacgtttccatcaacgtaaggaaactgaaaaactgagagaagaggagatgatcttcctgggtatgaatccacctcctctctttaatgaagtcagtgctacagtaatccaggctgaaaaggtggaccgcctgcggaatgaggtgcagataaagcatgaagaggactacagggaagccctggttaccatcaagaatgacctaaagttgatagaaggcgtggatatcaaggagaaccttcaagaccagatccggcattggttcatcgaatgcagaaatttaaccgggacatttcctgactaccctgacgttgaagaaggagggtcagctattattttttctgacaagaccatacaacaggttattgaggatatcatagcaaaccaagaggaagaagaaaaaaacaaaaagaagaagaagaaaaaggaaaaacaacccaagaaagccaaaaaacaaaagaaaggaacaaaggagaaaaataaggaagaagacgaaaaatggaaaatgtcaccaagtctttttcttcctgcaatgaaggaaggatgtaacgcatacaaagaaatctggatgaaaaaagatgagtcttggaatttctctcaggactatgatccagaactgatcaaagaggagaaacgaaaagaattacagtcagagatcaggatacaggttgatgagttgatgagacaggaacttaaaaacttaaagctagctgtggacagagaaagggagcgcccagtgaaagcaggaaagaaaaaggacaagaagaaaggaaagaaaggcaaaaagaaagagaagaaggcaaagaaggataaagatctgacagctgacaggaccatcgagtctctgtataaggaactggtggaagaaggattactgatccaggctctgaaagtcaacctctctgattacattggtgagtacagctacctggggactactcttcgccaggtgtccatagaacccatgccctccctcctggatgtcagacagctcatcacattgtacggaatctggccattaggttctgcagcagtgcatgagaaagctcctttggtgaaatcgctactgttagccgggccgtctggggtagggaagaaaatgctggtccatgccatctgcaccgaaacgggagccaacctcttcaacttgtcctcctctaacattgctgggaaataccctggcaaaaatggcctccaaatgatgctgcatgcagtcttcaaggtggctcgacagctccagccctccgtggtgtggattgaagacacagaaaaaaccttctacaaaaaagttcccaacgcagaaaagatgttcactccctctgctggcgaagttgctgcattgcagaaaaacttgaaaaggtccacaagtagaatgaacctaaacgcctgaaaaaacaccttccccaaatcctgaaactcctgaaaccagatgaccggattctgattgtggggaccacacggcgtcccttcgatgctgaactccaatctttctgcaaagtttaccagaaaattattttggtgcccagaccagactatgcttccagatacgttctgtggaagcaaatcattgaacgcaatggaggagtcctcaccagtgccttgaatgtcagctgcctggcgaaggtcactgacggcttcacccaaggacatatagtcgaagtggttaaaggcgtgctcacagatcagagaatccggcggcaaattcataaacctctcactgcagttgagtttattacggcgataaccagcatgaatccagtgtacaaagaggaagaagagagctttaagaactggtatgccaaaactcctctgggtaaaaaacgtgccttggcgataacaggaggcagcacagaaaaggcaaaggacaaagggaaaaggaaataaaagaaagagaaaaaggcaaaaaagaaaaagtaatgcctttctgaagaaccatgcttgagtctctctgggatggagaggaccccaactcgccaaagaaaagattcaccattgcccgcctgaagaagccctcaggggaaggaacttagcagtgtgcaggtgagctgatgccgcaaacccgctaaccactgcatgtgctgttatgcctttcccaggctggacacctagctgggtgttcatcataactttccacagctttaatccacgccaagtttgtatataactgaaattcactcttgacaccctccacagtctttccaagttggactcttcctctcatcagtactagttgtcaaatttaaaatgtgacagttaaagaatattctagtttgacaattagtaagcaatgagtatatcatcagtacactagctttttattaatccatgtacactgtatagtatcttgcatctattttaataaattaattctttgctctagtaatagattttatataatgaaataaaggtgttgtccttgaa

SEQ ID NO: 144461 - DNA, 3155 bp, Homo sapiens
  Payload ID: 8543
  Gene Symbol: IQCA1
  Gene Name: IQ motif containing with AAA domain 1
  Uniprot ID: Q86XH1
  ENST ID: ENST00000309507
  CDS Start-End: 269-2614
agtgaggttcgcgagtctctgggtcgcgacgggaaggagtgaaacacctctctgcgcctgcgcgctccgtgcctgcgaagcaaacccggcctcaccttttcctgcccgaagcagaagattctcgcagtcctggtttctccctccagaagaccccccacccaaatcctctgtagctcctggtagtgccctgacccctgctgccaccgtccttcagagagcaacggaagagcttcccggagggcgaggaaaagagggaaagtagccagcaatgtcgaacgcaatgtataataagatgtggcatcagacccaagaagccctcggtgctttactcgataaagagcctcagaagatgattgaaccacaaagaaatcaggttttcatctttcaaacattagccaccttctacgtaaagtatgtgcagatctttagaaacctagagaatgtctacgaccagttcgtccacccccagaaacgaatactgatcaggaaagtcctggacggggtgatgggccgcatcctggagctgaagaacgagatggtggagctggaactcacggagttccattatttcgatgatatcctgcaggatctcaagctggccccccaacaattagatattcccatacccaagtattttttgaaggagaagttggaagtaataaaaggaagagagaaaattcttgctcaaatattagcggacagcggaatagatacatctgacatgaaataccctgtaaagagtatccctttcgatgaggctgttaaattaatccagattgctgagagggcacggcaaggtcgcctaagggctttattcatgaagcaaatctatctgcaagaatatagagcaaagcaatccaagatgcttggcaagaaagtgacagatacctgggctgctgcactccgcattcagaaggtttggcgacgtttccatcaacgtaaggaaactgaaaaactgagagaagaggagatgatcttcctgggtatgaatccacctcctctctttaatgaagtcagtgctacagtaatccaggctgaaaaggtggaccgcctgcggaatgaggtgcagataaagcatgaagaggactacagggaagccctggttaccatcaagaatgacctaaagttgatagaaggcgtggatatcaaggagaaccttcaagaccagatccggcattggttcatcgaatgcagaaatttaaccgggacatttcctgactaccctgacgttgaagaaggagggtcagctattattttttctgacaagaccatacaacaggaagaagacgaaaaatggaaaatgtcaccaagtctttttcttcctgcaatgaaggaaggatgtaacgcatacaaagaaatctggatgaaaaaagatgagtcttggaatttctctcaggactatgatccagaactgatcaaagaggagaaacgaaaagaattacagtcagagatcaggatacaggttgatgagttgatgagacaggaacttaaaaacttaaagctagctgtggacagagaaagggagcgcccagtgaaagcaggaaagaaaaaggacaagaaaggaaagaaaggcaaaaagaaagagaagaaggcaaagaaggataaagatctgacagctgacaggaccatcgagtctctgtataaggaactggtggaagaaggattactgatccaggctctgaaagtcaacctctctgattacattggtgagtacagctacctggggactactcttcgccaggtgtccatagaacccatgccctccctcctggatgtcagacagctcatcacattgtacggaatctggccattaggttctgcagcagtgcatgagaaagctcctttggtgaaatcgctactgttagccgggccgtctggggtagggaagaaaatgctggtccatgccatctgcaccgaaacgggagccaacctcttcaacttgtcctcctctaacattgctgggaaataccctggcaaaaatggcctccaaatgatgctgcatgcagtcttcaaggtggctcgacagctccagccctccgtggtgtggattgaagacacagaaaaaaccttctacaaaaaagttcccaacgcagaaaagatgaatgaacctaaacgcctgaaaaaacaccttccccaaatcctgaaactcctgaaaccagatgaccggattctgattgtggggaccacacggcgtcccttcgatgctgaactccaatctttctgcaaagtttaccagaaaattattttggtgcccagaccagactatgcttccagatacgttctgtggaagcaaatcattgaacgcaatggaggagtcctcaccagtgccttgaatgtcagctgcctggcgaaggtcactgacggcttcacccaaggacatatagtcgaagtggttaaaggcgtgctcacagatcagagaatccggcggcaaattcataaacctctcactgcagttgagtttattacggcgataaccagcatgaatccagtgtacaaagaggaagaagagagctttaagaactggtatgccaaaactcctctgggtaaaaaacgtgccttggcgataacaggaggcagcacagaaaaggcaaaggacaaagggaaaaggaaataaaagaaagagaaaaaggcaaaaaagaaaaagtaatgcctttctgaagaaccatgcttgagtctctctgggatggagaggaccccaactcgccaaagaaaagattcaccattgcccgcctgaagaagccctcaggggaaggaacttagcagtgtgcaggtgagctgatgccgcaaacccgctaaccactgcatgtgctgttatgcctttcccaggctggacacctagctgggtgttcatcataactttccacagctttaatccacgccaagtttgtatataactgaaattcactcttgacaccctccacagtctttccaagttggactcttcctctcatcagtactagttgtcaaatttaaaatgtgacagttaaagaatattctagtttgacaattagtaagcaatgagtatatcatcagtacactagctttttattaatccatgtacactgtatagtatcttgcatctattttaataaattaattctttgctctagtaatagattttatataatgaaataaaggtgttgtccttgaactga

SEQ ID NO: 144462 - DNA, 3281 bp, Homo sapiens
  Payload ID: 8543
  Gene Symbol: IQCA1
  Gene Name: IQ motif containing with AAA domain 1
  Uniprot ID: Q86XH1
  ENST ID: ENST00000409907
  CDS Start-End: 276-2744
tggccgaagtgaggttcgcgagtctctgggtcgcgacgggaaggagtgaaacacctctctgcgcctgcgcgctccgtgcctgcgaagcaaacccggcctcaccttttcctgcccgaagcagaagattctcgcagtcctggtttctccctccagaagaccccccacccaaatcctctgtagctcctggtagtgccctgacccctgctgccaccgtccttcagagagcaacggaagagcttcccggagggcgaggaaaagagggaaagtagccagcaatgtcgaacgcaatgtataataagatgtggcatcagacccaagaagccctcggtgctttactcgataaagagcctcagaagatgattgaaccacaaagaaatcaggttttcatctttcaaacattagccaccttctacgtaaagtatgtgcagatctttagaaacctagagaatgtctacgaccagttcgtccacccccagaaacgaatactgatcaggaaagtcctggacggggtgatgggccgcatcctggagctgaagaacgagatggtggagctggaactcacggagttccattatttcgatgatatcctgcaggatctcaagctggccccccaacaattagatattcccatacccaagtattttttgaaggagaagttggaagtaataaaaggaagagagaaaattcttgctcaaatattagcggacagcggaatagatacatctgacatgaaataccctgtaaagagtatccctttcgatgaggctgttaaattaatccagattgctgagagggcacggcaaggtcgcctaagggctttattcatgaagcaaatctatctgcaagaatatagagcaaagcaatccaagatgcttggcaagaaagtgacagatacctgggctgctgcactccgcattcagaaggtttggcgacgtttccatcaacgtaaggaaactgaaaaactgagagaagaggagatgatcttcctgggtatgaatccacctcctctctttaatgaagtcagtgctacagtaatccaggctgaaaaggtggaccgcctgcggaatgaggtgcagataaagcatgaagaggactacagggaagccctggttaccatcaagaatgacctaaagttgatagaaggcgtggatatcaaggagaaccttcaagaccagatccggcattggttcatcgaatgcagaaatttaaccgggacatttcctgactaccctgacgttgaagaaggagggtcagctattattttttctgacaagaccatacaacaggttattgaggatatcatagcaaaccaagaggaagaagaaaaaaacaaaaagaagaagaagaaaaaggaaaaacaacccaagaaagccaaaaaacaaaagaaaggaacaaaggagaaaaataaggaagaagacgaaaaatggaaaatgtcaccaagtctttttcttcctgcaatgaaggaaggatgtaacgcatacaaagaaatctggatgaaaaaagatgagtcttggaatttctctcaggactatgatccagaactgatcaaagaggagaaacgaaaagaattacagtcagagatcaggatacaggttgatgagttgatgagacaggaacttaaaaacttaaagctagctgtggacagagaaagggagcgcccagtgaaagcaggaaagaaaaaggacaagaaaggaaagaaaggcaaaaagaaagagaagaaggcaaagaaggataaagatctgacagctgacaggaccatcgagtctctgtataaggaactggtggaagaaggattactgatccaggctctgaaagtcaacctctctgattacattggtgagtacagctacctggggactactcttcgccaggtgtccatagaacccatgccctccctcctggatgtcagacagctcatcacattgtacggaatctggccattaggttctgcagcagtgcatgagaaagctcctttggtgaaatcgctactgttagccgggccgtctggggtagggaagaaaatgctggtccatgccatctgcaccgaaacgggagccaacctcttcaacttgtcctcctctaacattgctgggaaataccctggcaaaaatggcctccaaatgatgctgcatgcagtcttcaaggtggctcgacagctccagccctccgtggtgtggattgaagacacagaaaaaaccttctacaaaaaagttcccaacgcagaaaagatgaatgaacctaaacgcctgaaaaaacaccttccccaaatcctgaaactcctgaaaccagatgaccggattctgattgtggggaccacacggcgtcccttcgatgctgaactccaatctttctgcaaagtttaccagaaaattattttggtgcccagaccagactatgcttccagatacgttctgtggaagcaaatcattgaacgcaatggaggagtcctcaccagtgccttgaatgtcagctgcctggcgaaggtcactgacggcttcacccaaggacatatagtcgaagtggttaaaggcgtgctcacagatcagagaatccggcggcaaattcataaacctctcactgcagttgagtttattacggcgataaccagcatgaatccagtgtacaaagaggaagaagagagctttaagaactggtatgccaaaactcctctgggtaaaaaacgtgccttggcgataacaggaggcagcacagaaaaggcaaaggacaaagggaaaaggaaataaaagaaagagaaaaaggcaaaaaagaaaaagtaatgcctttctgaagaaccatgcttgagtctctctgggatggagaggaccccaactcgccaaagaaaagattcaccattgcccgcctgaagaagccctcaggggaaggaacttagcagtgtgcaggtgagctgatgccgcaaacccgctaaccactgcatgtgctgttatgcctttcccaggctggacacctagctgggtgttcatcataactttccacagctttaatccacgccaagtttgtatataactgaaattcactcttgacaccctccacagtctttccaagttggactcttcctctcatcagtactagttgtcaaatttaaaatgtgacagttaaagaatattctagtttgacaattagtaagcaatgagtatatcatcagtacactagctttttattaatccatgtacactgtatagtatcttgcatctattttaataaattaattctttgctctagtaatagattttatataatgaaataaaggtgttgtccttgaa

SEQ ID NO: 144463 - DNA, 1606 bp, Homo sapiens
  Payload ID: 8543
  Gene Symbol: IQCA1
  Gene Name: IQ motif containing with AAA domain 1
  ENST ID: ENST00000418802
  CDS Start-End: 1-1606
acagtctcgagggaagagggtctggtggaaggagatgacgccgtctctcagcgctgaggaaaacagaatgtataataagatgtggcatcagacccaagaagccctcggtgctttactcgataaagagcctcagaagatgattgaaccacaaagaaatcaggttttcatctttcaaacattagccaccttctacgtaaagtatgtgcagatctttagaaacctagagaatgtctacgaccagttcgtccacccccagaaacgaatactgatcaggaaagtcctggacggggtgatgggccgcatcctggagctgaagaacgagatggtggagctggaactcacggagttccattatttcgatgatatcctgcaggatctcaagctggccccccaacaattagatattcccatacccaagtattttttgaaggagaagttggaagtaataaaaggaagagagaaaattcttgctcaaatattagcggacagcggaatagatacatctgacatgaaataccctgtaaagagtatccctttcgatgaggctgttaaattaatccagattgctgagagggcacggcaaggtcgcctaagggctttattcatgaagcaaatctatctgcaagaatatagagcaaagcaatccaagatgcttggcaagaaagtgacagatacctgggctgctgcactccgcattcagaaggtttggcgacgtttccatcaacgtaaggaaactgaaaaactgagagaagaggagatgatcttcctgggtatgaatccacctcctctctttaatgaagtcagtgctacagtaatccaggctgaaaaggtggaccgcctgcggaatgaggtgcagataaagcatgaagaggactacagggaagccctggttaccatcaagaatgacctaaagttgatagaaggcgtggatatcaaggagaaccttcaagaccagatccggcattggttcatcgaatgcagaaatttaaccgggacatttcctgactaccctgacgttgaagaaggagggtcagctattattttttctgacaagaccatacaacaggttattgaggatatcatagcaaaccaagaggaagaagaaaaaaacaaaaagaagaagaagaaaaaggaaaaacaacccaagaaagccaaaaaacaaaagaaaggaacaaaggagaaaaataaggaagaagacgaaaaatggaaaatgtcaccaagtctttttcttcctgcaatgaaggaaggatgtaacgcatacaaagaaatctggatgaaaaaagatgagtcttggaatttctctcaggactatgatccagaactgatcaaagaggagaaacgaaaagaattacagtcagagatcaggatacaggttgatgagttgatgagacaggaacttaaaaacttaaagctagctgtggacagagaaagggagcgcccagtgaaagcaggaaagaaaaaggacaagaagaaaggaaagaaaggcaaaaagaaagagaagaaggcaaagaaggataaagatctgacagctgacaggaccatcgagtctctgtataaggaactggtggaagaaggattactgatccaggctctgaaagtcaacctc

SEQ ID NO: 144464 - DNA, 3069 bp, Homo sapiens
  Payload ID: 8543
  Gene Symbol: IQCA1
  Gene Name: IQ motif containing with AAA domain 1
  ENST ID: ENST00000431676
  CDS Start-End: 36-2528
gacagtctcgagggaagagggtctggtggaaggagatgacgccgtctctcagcgctgaggaaaacagaatgtataataagatgtggcatcagacccaagaagccctcggtgctttactcgataaagagcctcagaagatgattgaaccacaaagaaatcaggttttcatctttcaaacattagccaccttctacgtaaagtatgtgcagatctttagaaacctagagaatgtctacgaccagttcgtccacccccagaaacgaatactgatcaggaaagtcctggacggggtgatgggccgcatcctggagctgaagaacgagatggtggagctggaactcacggagttccattatttcgatgatatcctgcaggatctcaagctggccccccaacaattagatattcccatacccaagtattttttgaaggagaagttggaagtaataaaaggaagagagaaaattcttgctcaaatattagcggacagcggaatagatacatctgacatgaaataccctgtaaagagtatccctttcgatgaggctgttaaattaatccagattgctgagagggcacggcaaggtcgcctaagggctttattcatgaagcaaatctatctgcaagaatatagagcaaagcaatccaagatgcttggcaagaaagtgacagatacctgggctgctgcactccgcattcagaaggtttggcgacgtttccatcaacgtaaggaaactgaaaaactgagagaagaggagatgatcttcctgggtatgaatccacctcctctctttaatgaagtcagtgctacagtaatccaggctgaaaaggtggaccgcctgcggaatgaggtgcagataaagcatgaagaggactacagggaagccctggttaccatcaagaatgacctaaagttgatagaaggcgtggatatcaaggagaaccttcaagaccagatccggcattggttcatcgaatgcagaaatttaaccgggacatttcctgactaccctgacgttgaagaaggagggtcagctattattttttctgacaagaccatacaacaggttattgaggatatcatagcaaaccaagaggaagaagaaaaaaacaaaaagaagaagaagaaaaaggaaaaacaacccaagaaagccaaaaaacaaaagaaaggaacaaaggagaaaaataaggaagaagacgaaaaatggaaaatgtcaccaagtctttttcttcctgcaatgaaggaaggatgtaacgcatacaaagaaatctggatgaaaaaagatgagtcttggaatttctctcaggactatgatccagaactgatcaaagaggagaaacgaaaagaattacagtcagagatcaggatacaggttgatgagttgatgagacaggaacttaaaaacttaaagctagctgtggacagagaaagggagcgcccagtgaaagcaggaaagaaaaaggacaagaagaaaggaaagaaaggcaaaaagaaagagaagaaggcaaagaaggataaagatctgacagctgacaggaccatcgagtctctgtataaggaactggtggaagaaggattactgatccaggctctgaaagtcaacctctctgattacattggtgagtacagctacctggggactactcttcgccaggtgtccatagaacccatgccctccctcctggatgtcagacagctcatcacattgtacggaatctggccattaggttctgcagcagtgcatgagaaagctcctttggtgaaatcgctactgttagccgggccgtctggggtagggaagaaaatgctggtccatgccatctgcaccgaaacgggagccaacctcttcaacttgtcctcctctaacattgctgggaaataccctggcaaaaatggcctccaaatgatgctgcatgcagtcttcaaggtggctcgacagctccagccctccgtggtgtggattgaagacacagaaaaaaccttctacaaaaaagttcccaacgcagaaaagatgaatgaacctaaacgcctgaaaaaacaccttccccaaatcctgaaactcctgaaaccagatgaccggattctgattgtggggaccacacggcgtcccttcgatgctgaactccaatctttctgcaaagtttaccagaaaattattttggtgcccagaccagactatgcttccagatacgttctgtggaagcaaatcattgaacgcaatggaggagtcctcaccagtgccttgaatgtcagctgcctggcgaaggtcactgacggcttcacccaaggacatatagtcgaagtggttaaaggcgtgctcacagatcagagaatccggcggcaaattcataaacctctcactgcagttgagtttattacggcgataaccagcatgaatccagtgtacaaagaggaagaagagagctttaagaactggtatgccaaaactcctctgggtaaaaaacgtgccttggcgataacaggaggcagcacagaaaaggcaaaggacaaagggaaaaggaaataaaagaaagagaaaaaggcaaaaaagaaaaagtaatgcctttctgaagaaccatgcttgagtctctctgggatggagaggaccccaactcgccaaagaaaagattcaccattgcccgcctgaagaagccctcaggggaaggaacttagcagtgtgcaggtgagctgatgccgcaaacccgctaaccactgcatgtgctgttatgcctttcccaggctggacacctagctgggtgttcatcataactttccacagctttaatccacgccaagtttgtatataactgaaattcactcttgacaccctccacagtctttccaagttggactcttcctctcatcagtactagttgtcaaatttaaaatgtgacagttaaagaatattctagtttgacaattagtaagcaatgagtatatcatcagtacactagctttttattaatccatgtacactgtatagtatcttgcatctattttaataaattaattctttgctctagtaatagattttatataatgaaataaaggtgttgtccttgaactga

SEQ ID NO: 144465 - DNA, 633 bp, Homo sapiens
  Payload ID: 8544
  Gene Symbol: IQCA1L
  Gene Name: IQ motif containing with AAA domain 1 like
  ENST ID: ENST00000611102
  CDS Start-End: 1-365
ctttgtatgcggtccttcggcttggctccccggatatccacatcatggccccactcatccgctccatcctcctggtgggcccctctggcatggggaagaagatgctggtcaaggcagtgtgcacagaaactggcgccaacctgttcgacctgtcgccggaaaacctgctgggcaaatatcctggcaggaatggggcacagatgatggtgcatatagtctttaaggtccggagcccccagcttttggcatttgcggttctcagacctgtggcaacaaaggaggggggctttgaggtcacgtcacccatcagcctactgggtagcccgactcctacagccctctgtgatttggattggaaatgctgagaagaatttctataagaagacccccaaagaagacaaggagatggacccaaagcggataaagaaggacctcaccaaggccttgcggctgctgactcccggagaccgtgtgatgctgattgggacaacctcccggccacagctggccgagatgcggggtctgtgccgggtctacgagcggatcctcttcatgccccggcctgactacgcatcccgctatgtgctctggaagcgtatgatagaggcccggggcatccagccgacccagcac

SEQ ID NO: 144466 - DNA, 2606 bp, Homo sapiens
  Payload ID: 8544
  Gene Symbol: IQCA1L
  Gene Name: IQ motif containing with AAA domain 1 like
  ENST ID: ENST00000615129
  CDS Start-End: 43-2499
ccaccaccagcaaacaaggggcagcgtggaggagtggacacaatgtctgagggagcttaccagcgcctctgggagtcctcccacgcgaccctgcaggagctgctggaccaagagcagcttctgctcgaacctgcgcccgaccgggagcggcagtccttccagtacaggctcgcatcgctctacctgcactacctggggctgctgcgccgcttcgacaccgtctatgaccagatggtgcagccgcagaagcggcggctgctgcgacgcctgctggacggcgtggcgggccgcgtgctggagctcaaggacgagctggtgcgcgccgacctgtgtgagaaccactgcctggaccgcgtgctgcaggatttcaagctcaccccagctgacctggaggttccaatccccaaatacttcctgctggagcagtccaccactgtgcgggagcgagggctgatactggccgagatcctgtccagactggagccagtgtcctcccagaagagctttacaggaatgcaccggactgaggccataattctagtgcaaaaggcagagcgggcgaggcaaggccggcttcgagccaccttcatgcgagagattcgaagagatgaggagcaggatgggaggattcgggaggatggatggcacaagttcagtcagggccaagcagctgtcaccatacagaaggtgtggaaaggctatctgcagaggaaacgcactcagcaggaccggcgaatggagatggagttcattggcatgctcccctcacccaaccaggtagagcacctgagcatcatctcccagccatgcctcgtggaggatgtccagaggctccgccagatggagaaagaggaggagttccgggcagcaatggtgaaggcccatgattctctggtagagacagaggggcctgacatgaaggagaaaatgaaggagcaaatccgacagtggtttatcgagtgccatgaccttactggccggttccctgattatccagatgcgtcttcaggtggatcctactcaatctttgcagacaaaacgccagaacaggtgagaatggaactggaaatgcagatgcaagagaacagaaaaaaggaacaagagaagagcaaggaaaaaggaaaggatgaaaaagagaagaagaaaggaaaggaagaaaaggccaagaagggggaagtggatgcggtgttgcaagtgttgccatccaaatgtatccctatgatctgtgccgggcatgaagaatacttaaatacatggaagaaccggtgtgagagcatacaccccagtcagaattatgactccgagaccctccgggaggagaagaggaaagaggtggagctggagatccggatacaggtggatgagctgatgcgtcaggagctgaggaagctccgtctggctgtggacaaggaggaagaaagacccctgagggctccaaagaaaacacctgggaagaaaactgggaaaaagaaggaaaaagatctgacctcagacaggtctgtggagtctctgtacgaagagcttgttatttctggccttctaaggaagagtgagtcagtagcattgaaagactacataggtgacttcctgtatcttggatccactctgagtttggtgaagaagttgcccatgccatccctgtttgacatacgacagaatgtggctttgtatgcggtccttcggcttggctccccggatatccacatcatggccccactcatccgctccatcctcctggtgggcccctctggcatggggaagaagatgctggtcaaggcagtgtgcacagaaactggcgccaacctgttcgacctgtcgccggaaaacctgctgggcaaatatcctggcaggaatggggcacagatgatggtgcatatagtctttaaggtagcccgactcctacagccctctgtgatttggattggaaatgctgagaagaatttctataagaagacccccaaagaagacaaggagatggacccaaagcggataaagaaggacctcaccaaggccttgcggctgctgactcccggagaccgtgtgatgctgattgggacaacctcccggccacagctggccgagatgcggggtctgtgccgggtctacgagcggatcctcttcatgccccggcctgactacgcatcccgctatgtgctctggaagcgtatgatagaggcccggggcatccagccgacccagcacctggacatcagtgccctagccaaggtctccgatggctacacgccgggtcacattctccaagccatccaatcggtgctgagtgagcggcggttcctgcaactgtccaagcggcccctggtggcctctgagttcctgggacaactggtgaagctggatccagtgtacagggaggaggaggagtccctgaaggactggtacttcaagaccccactgggcaagaagagcatgaaacacaggatggaccagttggaggccgaggaggccaagctggacaaggagaagaagaaaaggaagtgatggctaaggcttgcgggcacctgagattagtggcgtgggacagggcagtggcccaagggtaaagggatggggcagaggcataaatgcccagatgacttgggaacaaa

SEQ ID NO: 144467 - DNA, 738 bp, Homo sapiens
  Payload ID: 8544
  Gene Symbol: IQCA1L
  Gene Name: IQ motif containing with AAA domain 1 like
  ENST ID: ENST00000613681
  CDS Start-End: 1-356
tgcaagagaacagaaaaaaggaacaagagaagagcaaggaaaaaggaaaggatgaaaaagagaagaagaaaggaaaggaagaaaaggccaagaagggggaagtggatgcggtgttgcaagtgttgccatccaaatgtatccctatgatctgtgccgggcatgaagaatacttaaatacatggaagaaccggtgtgagagcatacaccccagtcagaattatgactccgagaccctccgggaggagaagaggaaagaggtggagctggagatccggatacaggtcacaaagacctcagcgggggatcttcggtttgaattccatctgggggcttctccgcatgttgaaggctgttaagaacagggctcctgagagagcaggaagaggattaggcctgggtgtgaacaggtggatgagctgatgcgtcaggagctgaggaagctccgtctggctgtggacaaggaggaagaaagacccctgagggctccaaagaaaacacctgggaagaaaactgggaaaaagaaggaaaaagatctgacctcagacaggtctgtggagtctctgtacgaagagcttgttatttctggccttctaaggaagagtgagtcagtagcattgaaagactacataggtgacttcctgtatcttggatccactctgagtttggtgaagaagttgcccatgccatccctgtttgacatacgacagaatgtggctttgtatgcggtccttcggcttg

SEQ ID NO: 144468 - DNA, 2633 bp, Homo sapiens
  Payload ID: 8545
  Gene Symbol: IQCJ-SCHIP1
  Gene Name: IQCJ-SCHIP1 readthrough
  ENST ID: ENST00000337808
  CDS Start-End: 578-2041
agaaagagataatctgtgaaagccacagagcctgatttctgctgtgataatcttcagcagaccgaggctggggcgagaatgaggcagacctgtttacatggtgtgtgcagtgccttgtggaattcttaactctattttattgtattatttttaatcgaaaagtagatcagatgatagcatgaagtgaatcggctgctttggactaatgggatcttcttttctgcattaagatcaagaacttttctggaatcctctgttctccgagtagccttgtcttctctgtgtgttttatcaatttgaagaacactggcaaaaatcagcaaacttcatctcccaaaaagctctcgctcttttttgccaatacttgaagatttctgctccaaaatctactttgagctgcttgagcatggtggttgataaccgaagggcaaaagcatcacttatttagtgtgtgttatagaaattttttagacaaccttactagctaacccaggtgaccctttacggatttctttcaaagccaatttgaataaacaactcttccctctcaaatgggcaagagtaactcttcagcaccatggagaggtccgggcagcgtgttacaacgtgggactgtgaccagggcaagcactctgacagtgattaccgagaggatgggatggatctaggcagtgacgccggcagcagcagcagcagcagccgcgccagttcacagtccaactccaccaaagtgaccccttgctccgagtgcaaatcttcatcgtcgccggggggcagcctggacttggtgtctgccctggaggactatgaggagcccttcccggtctaccagaagaaggtgattgatgagtgggcgccggaggaggacggggaggaggaggaagaggaggacgagcgcgaccagcgagggtaccgggatgaccgctctccggcccgggaaccgggggacgtaagcgccaggacccgcagcggcggcggcgggggcaggagcgccaccaccgccatgccgcccccggtgcccaacggcaacctccaccagcacgacccccaggacctcaggcacaatggcaacgtggtggtggctggccggccgagctgttcccggggcccccgccgggcgatccaaaagccccagccggctgggggccggcgcagtggccgcggcccggcggctggggggctctgccttcagcccccagacggcgggacgtgcgtccccgaagagcccccggtgccacctatggattgggaggcgctggagaagcatctggccgggctgcagttccgggagcaggaggtacggaaccagggccaggcgaggaccaactccacctccgcacagaaaaatgagagagagtctatcagacagaagttggcacttggaagcttctttgatgatggcccaggaatttataccagctgtagcaaaagtgggaagccaagcctttcctcccgactgcagagtgggatgaacttgcagatatgctttgtcaacgacagtggcagtgataaggacagtgatgctgatgacagtaagactgaaaccagcttggacacccccttgtctcccatgagcaaacagagttcttcctattctgatagagacactactgaagaggagtctgaatccttggatgacatggacttccttacaaggcaaaagaaattgcaagctgaagccaaaatggcccttgccatggccaaaccaatggccaaaatgcaagtagaagtggagaaacagaacaggaaaaagtctcccgtcgctgatcttctgccacacatgcctcatataagtgaatgcttgatgaaaagaagtttaaaacccaccgacctgagagacatgactattgggcagctacaagtgatagtcaatgatctccattcccagatagaaagcttgaatgaagagttggtccagctgcttctcatccgagatgagctgcacacagagcaggatgccatgctggtggacattgaagacttgaccagacatgctgaaagtcagcagaagcacatggcagagaaaatgcctgcaaagtgaaaagaagccattcaaccagagaacaagctagaatttattttgcttctgtggttgtaaaaatgctgttgctaaaggtggcgcagaaacaaatatcagtgttagtcattgataatgtctgaagcttaatgtccagtgattggcctttgcttcttaatttattttaattttttacttgtgccacttaatatcaggcattttaataaaatattgttacaaaaaatgtacagtactgacaccaccacaaatcatggttaataaaagagagtagttttaactttatttttatttgtttagagattttaagttggaacagtattttcccattgactacttttcattcttcactgtagttttaaagaagaactgtaaatgacggtgctatacaagtcaaaaaatacatgcctgcctcgtagtgaagttgtagctctccgtaatatgtatattttactcagttttcaacattttgtgaatgttgactacctgaagttcctttttagatgtgctattaacattctgttggattcagagggttccttgaaagttttatgtataaatatgtaaaataaaaattaaaactttgtttcatatcata

SEQ ID NO: 144469 - DNA, 2067 bp, Homo sapiens
  Payload ID: 8545
  Gene Symbol: IQCJ-SCHIP1
  Gene Name: IQCJ-SCHIP1 readthrough
  ENST ID: ENST00000412423
  CDS Start-End: 67-1491
ctttcaaagccaatttgaataaacaactcttccctctcaaatgggcaagagtaactcttcagcaccatggagaggtccgggcagcgtgttacaacgtgggactgtgaccagggcaagcactctgacagtgattaccgagaggatgggatggatctaggcagtgacgccggcagcagcagcagcagcagccgcgccagttcacagtccaactccaccaaagtgaccccttgctccgagtgcaaatcttcatcgtcgccggggggcagcctggacttggtgtctgccctggaggactatgaggagcccttcccggtctaccagaagaaggtgattgatgagtgggcgccggaggaggacggggaggaggaggaagaggaggacgagcgcgaccagcgagggtaccgggatgaccgctctccggcccgggaaccgggggacgtaagcgccaggacccgcagcggcggcggcgggggcaggagcgccaccaccgccatgccgcccccggtgcccaacggcaacctccaccagcacgacccccaggacctcaggcacaatggcaacgtggtggtggctggccggccgagctgttcccggggcccccgccgggcgatccaaaagccccagccggctgggggccggcgcagtggccgcggcccggcggctggggggctctgccttcagcccccagacggcgggacgtgcgtccccgaagagcccccggtgccacctatggattgggaggcgctggagaagcatctggccgggctgcagttccgggagcaggaggcacagaaaaatgagagagagtctatcagacagaagttggcacttggaagcttctttgatgatggcccaggaatttataccagctgtagcaaaagtgggaagccaagcctttcctcccgactgcagagtgggatgaacttgcagatatgctttgtcaacgacagtggcagtgataaggacagtgatgctgatgacagtaagactgaaaccagcttggacacccccttgtctcccatgagcaaacagagttcttcctattctgatagagacactactgaagaggagtctgaatccttggatgacatggacttccttacaaggcaaaagaaattgcaagctgaagccaaaatggcccttgccatggccaaaccaatggccaaaatgcaagtagaagtggagaaacagaacaggaaaaagtctcccgtcgctgatcttctgccacacatgcctcatataagtgaatgcttgatgaaaagaagtttaaaacccaccgacctgagagacatgactattgggcagctacaagtgatagtcaatgatctccattcccagatagaaagcttgaatgaagagttggtccagctgcttctcatccgagatgagctgcacacagagcaggatgccatgctggtggacattgaagacttgaccagacatgctgaaagtcagcagaagcacatggcagagaaaatgcctgcaaagtgaaaagaagccattcaaccagagaacaagctagaatttattttgcttctgtggttgtaaaaatgctgttgctaaaggtggcgcagaaacaaatatcagtgttagtcattgataatgtctgaagcttaatgtccagtgattggcctttgcttcttaatttattttaattttttacttgtgccacttaatatcaggcattttaataaaatattgttacaaaaaatgtacagtactgacaccaccacaaatcatggttaataaaagagagtagttttaactttatttttatttgtttagagattttaagttggaacagtattttcccattgactacttttcattcttcactgtagttttaaagaagaactgtaaatgacggtgctatacaagtcaaaaaatacatgcctgcctcgtagtgaagttgtagctctccgtaatatgtatattttactcagttttcaacattttgtgaatgttgactacctgaagttcctttttagatgtgctattaacattctgttggattcagagggttccttgaaagttttatgtataaatatgtaaaataaaaattaaaac

SEQ ID NO: 144470 - DNA, 583 bp, Homo sapiens
  Payload ID: 8545
  Gene Symbol: IQCJ-SCHIP1
  Gene Name: IQCJ-SCHIP1 readthrough
  ENST ID: ENST00000472451
  CDS Start-End: 154-583
aatttgagggttagttaccggcaggaagtctggttgtgcgagaggaaaggcgggcaggagggaagcctcaggctggtgctggctcccgcccccaggcctccttgggggacgcacctctgacccagcgggcgcagggattaccgagaggatgggatggatctaggcagtgacgccggcagcagcagcagcagcagccgcgccagttcacagtccaactccaccaaagtgaccccttgctccgagtgcaaatcttcatcgtcgccggggggcagcctggacttggtgtctgccctggaggactatgaggagcccttcccggtctaccagaagaaggtgattgatgagtgggcgccggaggaggacggggaggaggaggaagaggaggacgagcgcgaccagcgagggtaccgggatgaccgctctccggcccgggaaccgggggacgtaagcgccaggacccgcagcggcggcggcgggggcaggagcgccaccaccgccatgccgcccccggtgcccaacggcaacctccaccagcacgacccccaggacctcaggcacaatggcaacgtggtggtggctggcc

SEQ ID NO: 144471 - DNA, 1884 bp, Homo sapiens
  Payload ID: 8545
  Gene Symbol: IQCJ-SCHIP1
  Gene Name: IQCJ-SCHIP1 readthrough
  ENST ID: ENST00000460298
  CDS Start-End: 242-1597
agagcgagatgcgaaattagtagccgcccacccccttctcagttcccgcccccagggaattataatttcctgggaaagtgtctggttctcggagaatccttggggcggggtaaaggggcgcgcctggcgcaaaatggttaatacaaagtctgcgcgcgccgcggggccccttgtatgaaaagtgtgcgcgctggtggctgggcacccctttgctaatttgagggattaccgagaggatgggatggatctaggcagtgacgccggcagcagcagcagcagcagccgcgccagttcacagtccaactccaccaaagtgaccccttgctccgagtgcaaatcttcatcgtcgccggggggcagcctggacttggtgtctgccctggaggactatgaggagcccttcccggtctaccagaagaaggtgattgatgagtgggcgccggaggaggacggggaggaggaggaagaggaggacgagcgcgaccagcgagggtaccgggatgaccgctctccggcccgggaaccgggggacgtaagcgccaggacccgcagcggcggcggcgggggcaggagcgccaccaccgccatgccgcccccggtgcccaacggcaacctccaccagcacgacccccaggacctcaggcacaatggcaacgtggtggtggctggccggccgagctgttcccggggcccccgccgggcgatccaaaagccccagccggctgggggccggcgcagtggccgcggcccggcggctggggggctctgccttcagcccccagacggcgggacgtgcgtccccgaagagcccccggtgccacctatggattgggaggcgctggagaagcatctggccgggctgcagttccgggagcaggaggcacagaaaaatgagagagagtctatcagacagaagttggcacttggaagcttctttgatgatggcccaggaatttataccagctgtagcaaaagtgggaagccaagcctttcctcccgactgcagagtgggatgaacttgcagatatgctttgtcaacgacagtggcagtgataaggacagtgatgctgatgacagtaagactgaaaccagcttggacacccccttgtctcccatgagcaaacagagttcttcctattctgatagagacactactgaagaggagtctgaatccttggatgacatggacttccttacaaggcaaaagaaattgcaagctgaagccaaaatggcccttgccatggccaaaccaatggccaaaatgcaagtagaagtggagaaacagaacaggaaaaagtctcccgtcgctgatcttctgccacacatgcctcatataagtgaatgcttgatgaaaagaagtttaaaacccaccgacctgagagacatgactattgggcagctacaagtgatagtcaatgatctccattcccagatagaaagcttgaatgaagagttggtccagctgcttctcatccgagatgagctgcacacagagcaggatgccatgctggtggacattgaagacttgaccaggtcagtgtggcttcactcttgccaaagaagaaaagcccagggtggtctgaaatctaagaattaggcaaaaactagctcaagagaacttcttcctctacttccataaataactcacctagccttttctggtgccagctgttcagatggaggggaagcagaattccattgtccttaccaaatgcatgctttttagcaaccatcccccccttgtgatgaattgtcagtgcattacttctcacatctccgcctaaatcaggtctagttctggttttggaggactttaccttgaaggactgtcccctgggaagctgggcataagccatgtcatgctggcatgtttccagcacaagc

SEQ ID NO: 144472 - DNA, 699 bp, Homo sapiens
  Payload ID: 8545
  Gene Symbol: IQCJ-SCHIP1
  Gene Name: IQCJ-SCHIP1 readthrough
  ENST ID: ENST00000467377
  CDS Start-End: 197-699
agcgacttgccgccgcgccccggccaggcacaccttttggggaggcgggggaccaccctgcccggcgtgggccgagagcgccccccaccccgagccttccggcgggtgggaggaggggccggccagggagacgcggaggcgggagtgagacctccgactgccagcggttccttacaaagattaccgagaggatgggatggatctaggcagtgacgccggcagcagcagcagcagcagccgcgccagttcacagtccaactccaccaaagtgaccccttgctccgagtgcaaatcttcatcgtcgccggggggcagcctggacttggtgtctgccctggaggactatgaggagcccttcccggtctaccagaagaaggtgattgatgagtgggcgccggaggaggacggggaggaggaggaagaggaggacgagcgcgaccagcgagggtaccgggatgaccgctctccggcccgggaaccgggggacgtaagcgccaggacccgcagcggcggcggcgggggcaggagcgccaccaccgccatgccgcccccggtgcccaacggcaacctccaccagcacgacccccaggacctcaggcacaatggcaacgtggtggtggctggccggccgagctgttcccggggcccccgccgggcgatccaaaagccccagccggctgggggccggcgcagtggccg

SEQ ID NO: 144473 - DNA, 600 bp, Homo sapiens
  Payload ID: 8545
  Gene Symbol: IQCJ-SCHIP1
  Gene Name: IQCJ-SCHIP1 readthrough
  ENST ID: ENST00000473061
  CDS Start-End: 1-301
cggaaccagggccaggcgaggaccaactccacctccgcacagaaaaatgagagagagtctatcagacagaagttggcacttggaagcttctttgatgatggcccaggaatttataccagctgtagcaaaagtgggaagccaagcctttcctcccggcttgaatgaagagttggtccagctgcttctcatccgagatgagctgcacacagagcaggatgccatgctggtggacattgaagacttgaccagacatgctgaaagtcagcagaagcacatggcagagaaaatgcctgcaaagtgaaaagaagccattcaaccagagaacaagctagaatttattttgcttctgtggttgtaaaaatgctgttgctaaaggtggcgcagaaacaaatatcagtgttagtcattgataatgtctgaagcttaatgtccagtgattggcctttgcttcttaatttattttaattttttacttgtgccacttaatatcaggcattttaataaaatattgttacaaaaaatgtacagtactgacaccaccacaaatcatggttaataaaagagagtagttttaactttatttttatttgtttagagatt

SEQ ID NO: 144474 - DNA, 1780 bp, Homo sapiens
  Payload ID: 8545
  Gene Symbol: IQCJ-SCHIP1
  Gene Name: IQCJ-SCHIP1 readthrough
  ENST ID: ENST00000476809
  CDS Start-End: 170-1780
ctctttgaggctttctgatgcctagagtgagctcaactcaaaggtttccagcctcacactcgcctcacattcccccacagtcacattgcgctctgtgattctgaggaatacagtgtgccagcatccgatccagtctcctttcacctgcaggtgttccagaaacttcaaaatgcgtctggaagaactgaaaagattgcagaatcctctagaacaagttaatgatggaaaatattcatttgaaaacattcagcgagcatggcgagagtacctgcagcggcaggagcccctggggaagaggagcccgtccccaccctctgtctcctcagagaagctgagcagctctgtcagcatgaacaccttctccgacagcagcacacccgattaccgagaggatgggatggatctaggcagtgacgccggcagcagcagcagcagcagccgcgccagttcacagtccaactccaccaaagtgaccccttgctccgagtgcaaatcttcatcgtcgccggggggcagcctggacttggtgtctgccctggaggactatgaggagcccttcccggtctaccagaagaaggtgattgatgagtgggcgccggaggaggacggggaggaggaggaagaggaggacgagcgcgaccagcgagggtaccgggatgaccgctctccggcccgggaaccgggggacgtaagcgccaggacccgcagcggcggcggcgggggcaggagcgccaccaccgccatgccgcccccggtgcccaacggcaacctccaccagcacgacccccaggacctcaggcacaatggcaacgtggtggtggctggccggccgagctgttcccggggcccccgccgggcgatccaaaagccccagccggctgggggccggcgcagtggccgcggcccggcggctggggggctctgccttcagcccccagacggcgggacgtgcgtccccgaagagcccccggtgccacctatggattgggaggcgctggagaagcatctggccgggctgcagttccgggagcaggaggtacggaaccagggccaggcgaggaccaactccacctccgcacagaaaaatgagagagagtctatcagacagaagttggcacttggaagcttctttgatgatggcccaggaatttataccagctgtagcaaaagtgggaagccaagcctttcctcccgactgcagagtgggatgaacttgcagatatgctttgtcaacgacagtggcagtgataaggacagtgatgctgatgacagtaagactgaaaccagcttggacacccccttgtctcccatgagcaaacagagttcttcctattctgatagagacactactgaagaggagtctgaatccttggatgacatggacttccttacaaggcaaaagaaattgcaagctgaagccaaaatggcccttgccatggccaaaccaatggccaaaatgcaagtagaagtggagaaacagaacaggaaaaagtctcccgtcgctgatcttctgccacacatgcctcatataagtgaatgcttgatgaaaagaagtttaaaacccaccgacctgagagacatgactattgggcagctacaagtgatagtcaatgatctccattcccagatagaaagcttgaatgaagagttggtccagctgcttctcatccgagatgagctgcacacagagcaggatgccatgctggtggacattgaagacttgaccagacatgctgaaagtcagcagaagcacatggcagagaaaatgcctgcaaagtga

SEQ ID NO: 144475 - DNA, 575 bp, Homo sapiens
  Payload ID: 8545
  Gene Symbol: IQCJ-SCHIP1
  Gene Name: IQCJ-SCHIP1 readthrough
  ENST ID: ENST00000481715
  CDS Start-End: 102-575
ttgaaagcaacacttcctatgaacatccagattttctagtcagatctgtaaatatcttacacaacaacagcaagtagaggaaaaatacatttttcacacccatgcaaatggaagaactgaaaagattgcagaatcctctagaacaagttaatgatggaaaatattcatttgaaaacattcagcgagcatggcgagagtacctgcagcggcaggagcccctggggaagaggagcccgtccccaccctctgtctcctcagagaagctgagcagctctgtcagcatgaacaccttctccgacagcagcacacccgattaccgagaggatgggatggatctaggcagtgacgccggcagcagcagcagcagcagccgcgccagttcacagtccaactccaccaaagtgaccccttgctccgagtgcaaatcttcatcgtcgccggggggcagcctggacttggtgtctgccctggaggactatgaggagcccttcccggtctaccagaagaaggtgattgatgagtgggcgccggaggaggacggggaggaggaggaagaggaggacgagcgcgaccag

SEQ ID NO: 144476 - DNA, 584 bp, Homo sapiens
  Payload ID: 8545
  Gene Symbol: IQCJ-SCHIP1
  Gene Name: IQCJ-SCHIP1 readthrough
  ENST ID: ENST00000483486
  CDS Start-End: 124-584
agatttcactaaaggaatctcattgaaagcaacacttcctatgaacatccagattttctagtcagatctgtaaatatcttacacaacaacagcaagtagaggaaaaatacatttttcacacccatgcaaatggaagaactgaaaagattgcagaatcctctagaacaagttaatgatggaaaatattcatttgaaaatcaccagctggccatggatgcagagaataatattgaaaagtatcccctcaatctacagcccttggaatcaaaggtgaaaatcattcagcgagcatggcgagagtacctgcagcggcaggagcccctggggaagaggagcccgtccccaccctctgtctcctcagagaagctgagcagctctgtcagcatgaacaccttctccgacagcagcacacccgattaccgagaggatgggatggatctaggcagtgacgccggcagcagcagcagcagcagccgcgccagttcacagtccaactccaccaaagtgaccccttgctccgagtgcaaatcttcatcgtcgccggggggcagcctggacttggtgtctgccctggaggactatga

SEQ ID NO: 144477 - DNA, 484 bp, Homo sapiens
  Payload ID: 8545
  Gene Symbol: IQCJ-SCHIP1
  Gene Name: IQCJ-SCHIP1 readthrough
  ENST ID: ENST00000471575
  CDS Start-End: 182-484
tttttctttcccctctttgaggctttctgatgcctagagtgagctcaactcaaaggtttccagcctcacactcgcctcacattcccccacagtcacattgcgctctgtgattctgaggaatacagtgtgccagcatccgatccagtctcctttcacctgcaggtgttccagaaacttcaaaatgcgtctggaagaactgaaaagattgcagaatcctctagaacaagttaatgatggaaaatattcatttgaaaatcaccagctggccatggatgcagagaataatattgaaaagtatcccctcaatctacagcccttggaatcaaagcattcagcgagcatggcgagagtacctgcagcggcaggagcccctggggaagaggagcccgtccccaccctctgtctcctcagagaagctgagcagctctgtcagcatgaacaccttctccgacagcagcacacccgattaccgagaggatgggat

SEQ ID NO: 144478 - DNA, 2445 bp, Homo sapiens
  Payload ID: 8545
  Gene Symbol: IQCJ-SCHIP1
  Gene Name: IQCJ-SCHIP1 readthrough
  ENST ID: ENST00000485419
  CDS Start-End: 170-1861
ctctttgaggctttctgatgcctagagtgagctcaactcaaaggtttccagcctcacactcgcctcacattcccccacagtcacattgcgctctgtgattctgaggaatacagtgtgccagcatccgatccagtctcctttcacctgcaggtgttccagaaacttcaaaatgcgtctggaagaactgaaaagattgcagaatcctctagaacaagttaatgatggaaaatattcatttgaaaatcaccagctggccatggatgcagagaataatattgaaaagtatcccctcaatctacagcccttggaatcaaaggtgaaaatcattcagcgagcatggcgagagtacctgcagcggcaggagcccctggggaagaggagcccgtccccaccctctgtctcctcagagaagctgagcagctctgtcagcatgaacaccttctccgacagcagcacacccgattaccgagaggatgggatggatctaggcagtgacgccggcagcagcagcagcagcagccgcgccagttcacagtccaactccaccaaagtgaccccttgctccgagtgcaaatcttcatcgtcgccggggggcagcctggacttggtgtctgccctggaggactatgaggagcccttcccggtctaccagaagaaggtgattgatgagtgggcgccggaggaggacggggaggaggaggaagaggaggacgagcgcgaccagcgagggtaccgggatgaccgctctccggcccgggaaccgggggacgtaagcgccaggacccgcagcggcggcggcgggggcaggagcgccaccaccgccatgccgcccccggtgcccaacggcaacctccaccagcacgacccccaggacctcaggcacaatggcaacgtggtggtggctggccggccgagctgttcccggggcccccgccgggcgatccaaaagccccagccggctgggggccggcgcagtggccgcggcccggcggctggggggctctgccttcagcccccagacggcgggacgtgcgtccccgaagagcccccggtgccacctatggattgggaggcgctggagaagcatctggccgggctgcagttccgggagcaggaggtacggaaccagggccaggcgaggaccaactccacctccgcacagaaaaatgagagagagtctatcagacagaagttggcacttggaagcttctttgatgatggcccaggaatttataccagctgtagcaaaagtgggaagccaagcctttcctcccgactgcagagtgggatgaacttgcagatatgctttgtcaacgacagtggcagtgataaggacagtgatgctgatgacagtaagactgaaaccagcttggacacccccttgtctcccatgagcaaacagagttcttcctattctgatagagacactactgaagaggagtctgaatccttggatgacatggacttccttacaaggcaaaagaaattgcaagctgaagccaaaatggcccttgccatggccaaaccaatggccaaaatgcaagtagaagtggagaaacagaacaggaaaaagtctcccgtcgctgatcttctgccacacatgcctcatataagtgaatgcttgatgaaaagaagtttaaaacccaccgacctgagagacatgactattgggcagctacaagtgatagtcaatgatctccattcccagatagaaagcttgaatgaagagttggtccagctgcttctcatccgagatgagctgcacacagagcaggatgccatgctggtggacattgaagacttgaccagacatgctgaaagtcagcagaagcacatggcagagaaaatgcctgcaaagtgaaaagaagccattcaaccagagaacaagctagaatttattttgcttctgtggttgtaaaaatgctgttgctaaaggtggcgcagaaacaaatatcagtgttagtcattgataatgtctgaagcttaatgtccagtgattggcctttgcttcttaatttattttaattttttacttgtgccacttaatatcaggcattttaataaaatattgttacaaaaaatgtacagtactgacaccaccacaaatcatggttaataaaagagagtagttttaactttatttttatttgtttagagattttaagttggaacagtattttcccattgactacttttcattcttcactgtagttttaaagaagaactgtaaatgacggtgctatacaagtcaaaaaatacatgcctgcctcgtagtgaagttgtagctctccgtaatatgtatattttactcagttttcaacattttgtgaatgttgactacctgaagttcctttttagatgtgctattaacattctgttggattcagagggttccttgaaagttttatgtataaatatgtaaaataaaaattaaaactttgtttc

SEQ ID NO: 144479 - DNA, 574 bp, Homo sapiens
  Payload ID: 8545
  Gene Symbol: IQCJ-SCHIP1
  Gene Name: IQCJ-SCHIP1 readthrough
  ENST ID: ENST00000488898
  CDS Start-End: 302-574
gtgtgtgtgtgtgtgtgtgtgtgtgtgtgtgtgcgtgtgtatggggaggaggtgttgatttttgaaaattgggagagaagagttatattgctgctgcacgagaatttctaccccatgttacctgccttcttaaaactcagtaagcactgaggggaagagatgtggttctgctttggagaacctcagggggacgttgatccgcagtgttcagcaggaattttaggaagaactgaaaagattgcagaatcctctagaacaagttaatgatggaaaatattcatttgaaaatcaccagctggccatggatgcagagaataatattgaaaagtatcccctcaatctacagcccttggaatcaaaggtgaaaatcattcagcgagcatggcgagagtacctgcagcggcaggagcccctggggaagaggagcccgtccccaccctctgtctcctcagagaagctgagcagctctgtcagcatgaacaccttctccgacagcagcacacccgattaccgagaggatgggatggatctaggcagtgacgccggcagcagcagcagcagcagccgcgccagt

SEQ ID NO: 144480 - DNA, 1410 bp, Homo sapiens
  Payload ID: 8545
  Gene Symbol: IQCJ-SCHIP1
  Gene Name: IQCJ-SCHIP1 readthrough
  ENST ID: ENST00000527095
  CDS Start-End: 67-834
ctttcaaagccaatttgaataaacaactcttccctctcaaatgggcaagagtaactcttcagcaccatggagaggtccgggcagcgtgttacaacgtgggactgtgaccagggcaagcactctgacagtgcacagaaaaatgagagagagtctatcagacagaagttggcacttggaagcttctttgatgatggcccaggaatttataccagctgtagcaaaagtgggaagccaagcctttcctcccgactgcagagtgggatgaacttgcagatatgctttgtcaacgacagtggcagtgataaggacagtgatgctgatgacagtaagactgaaaccagcttggacacccccttgtctcccatgagcaaacagagttcttcctattctgatagagacactactgaagaggagtctgaatccttggatgacatggacttccttacaaggcaaaagaaattgcaagctgaagccaaaatggcccttgccatggccaaaccaatggccaaaatgcaagtagaagtggagaaacagaacaggaaaaagtctcccgtcgctgatcttctgccacacatgcctcatataagtgaatgcttgatgaaaagaagtttaaaacccaccgacctgagagacatgactattgggcagctacaagtgatagtcaatgatctccattcccagatagaaagcttgaatgaagagttggtccagctgcttctcatccgagatgagctgcacacagagcaggatgccatgctggtggacattgaagacttgaccagacatgctgaaagtcagcagaagcacatggcagagaaaatgcctgcaaagtgaaaagaagccattcaaccagagaacaagctagaatttattttgcttctgtggttgtaaaaatgctgttgctaaaggtggcgcagaaacaaatatcagtgttagtcattgataatgtctgaagcttaatgtccagtgattggcctttgcttcttaatttattttaattttttacttgtgccacttaatatcaggcattttaataaaatattgttacaaaaaatgtacagtactgacaccaccacaaatcatggttaataaaagagagtagttttaactttatttttatttgtttagagattttaagttggaacagtattttcccattgactacttttcattcttcactgtagttttaaagaagaactgtaaatgacggtgctatacaagtcaaaaaatacatgcctgcctcgtagtgaagttgtagctctccgtaatatgtatattttactcagttttcaacattttgtgaatgttgactacctgaagttcctttttagatgtgctattaacattctgttggattcagagggttccttgaaagttttatgtataaatatgtaaaataaaaattaaaac

SEQ ID NO: 144481 - DNA, 2966 bp, Homo sapiens
  Payload ID: 8546
  Gene Symbol:
  Gene Name: Iron/zinc purple acid phosphatase-like protein [Source:UniProtKB/Swiss-Prot
  Acc:Q6ZNF0]
  Uniprot ID: Q6ZNF0
  ENST ID: ENST00000331256
  CDS Start-End: 275-1591
gtaggcggcaagaggcctcggcacccgcgaactcataaataccggggcggcgctggtggcgggagaggcgcgtgcgggcagccggcgcccccgaggcacctggataaccacccatcttgaaggagacctccctgccctgcctctgttgtcccccagagcactgcctgatcatcctctgttccccatcctcccagcccttcctgctgtacctgtggggagctgatctcctcagtccccctgcttttccccggtctgccatcaccaccccaccaccatgcacccccttcctggctactggtcctgttactgtctactcctgctattctccttgggagtccaggggtccctgggggctcccagcgctgccccagagcaagtccatctgtcttacccaggtgagccaggctccatgactgtaacttggaccacatgggtcccaacccgctctgaagtgcaattcgggttgcagccgtcggggcccctgcccctccgcgcccagggcaccttcgtcccctttgtggacgggggcattctccggcggaagctctacatacaccgagtcacgcttcgcaagctgctgccaggggttcagtatgtttatcgctgtggcagtgcgcagggctggagccgtcggttccgcttcagggccctcaagaatggggcccactggagtccccgtctggctgtgtttggagacctgggggctgacaacccgaaggccgtcccccggctgcgcagggacacccagcagggcatgtatgacgccgttctccatgtgggagactttgcctacaacctggatcaggacaacgcccgtgttggggataggttcatgcggctcattgaacccgtggctgccagcctgccgtacatgacatgccctgggaatcatgaagaacgctacaacttctctaactacaaggctcgcttcagcatgccgggggataatgagggcctgtggtacagctgggatctgggtcccgcccacatcatctccttctccaccgaggtctatttctttctccattatggccgccacttggtacagaggcagtttcgctggctggagagcgacctccagaaagccaataagaaccgggcagcccggccgtggatcatcactatggggcaccggcccatgtactgctccaacgcagatctggacgactgcacacgacatgaaagcaaggtccgcaaaggcctccaaggcaagctgtacgggttggaggatcttttctacaaatatggagtggatctgcagctgtgggctcatgagcactcgtatgaacgactgtggccaatttacaactaccaggtatttaacggcagccgagagatgccctacaccaacccgcgagggcctgtccacatcatcacaggatctgctggctgtgaggagcggctgacgccctttgctgtcttcccgaggccctggagtgccgtgcgtgtgaaggagtacgggtatacgcggctgcacatcctcaacgggacccacatccacatccagcaggtgtcggacgaccaggatgggaagatcgtagatgatgtctgggtggtgagacccctgtttggccggaggatgtacctctagggatggcggcagctctcctccagaagcctaggttttgccgccttggctgctgtgaccagaaactgcccaggcctgggtggggagttgggtgggccctgactcccctgccctccagaggccccatgtagggtacatgcagccctatggagctggggcagctgttccctcctggagaggtgggagtcctggctggctgtggagggagggcaggtgtgcgggcacagagtgacacacggcaggtttctgctggcagggccccaccctcctgcatagctctgatcgggcgaggtgcccacggggcttcaggaatgaagaggcttaagctctggctccatggattctgcacatctgcgggggatgccgctgggcttcctcctctcctgcccacctggcaagggcatcgccaggtgggcacaaccgtcatgacactactcaccagcaggtggcgtcaggggctttttcttctgagcccggcactgagagttggtctgaagcctggctccttcttcactgctccaggactgctatgaagagtcccttcatgcctcagtttcccagcctggcaccatcttattcgggaagaggagacgtgttaacactcttgcctcctagctaggacagatgacaaaccgcaagagccacagacttgccagttccttccctctttccttcctttctttcccttcttttatttattgaatcataatttattgagcatctaccatgtgccaggctctgttctcagtgctggagagacagctgtgaatgagacagagatctcggccctcacagagctgacatcctaaccagagagttggacaaaaatcacgataaatgagttggttaaatagcgatttgtgagtagaaaacgcagggacggtgagagagcagtttcaattttcagggggatctcactgagagggcaacatttgatctgaaggaggtggggaaggagccaagtgggcagacatctgggggaagagcattccaggcagaggaacagccagtgcaaaggccctgagacagaaatgtgcctggccggctgggtacagtaactcacatctgtagtcccagcactttgggaggccgaggcgggcagatcacttgagcccaggagtttgagaccagcctgggcaacacagcgaaaccctttctctaccaaaaatatgaaatttagctgggcatggtggtgtgtgcctgtagtcccagctgctcaggaggctgaggcgggaggatggcttgagcccaggaggttgaggctgcagtgagccatgattgcgccactgcaccccagcctgggcaacagagcaagaccctgtctcaaaaaatatatataaataaaaaagttttaaaaagagaaaaataaacaaagaaa

SEQ ID NO: 144482 - DNA, 2887 bp, Homo sapiens
  Payload ID: 8546
  Gene Symbol:
  Gene Name: Iron/zinc purple acid phosphatase-like protein [Source:UniProtKB/Swiss-Prot
  Acc:Q6ZNF0]
  ENST ID: ENST00000601575
  CDS Start-End: 224-1327
gaaggaagccggaaggctggaggaagatgcagcgaggctggaaagcacctggataaccacccatcttgaaggagacctccctgccctgcctctgttgtcccccagagcactgcctgatcatcctctgttccccatcctcccagcccttcctgctgtacctgtggggagctgatctcctcagtccccctgcttttccccggtctgccatcaccaccccaccaccatgcacccccttcctggctactggtcctgttactgtctactcctgctattctccttgggagtccaggggtccctgggggctcccagcgctgccccagagcaagtccatctgtcttacccaggtgagccaggctccatgactgtaacttggaccacatgggtcccaacccgctctgaagtgcaattcgggttgcagccgtcggggcccctgcccctccgcgcccagggcaccttcgtcccctttgtggacgggggcattctccggcggaagctctacatacaccgagtcacgcttcgcaagctgctgccaggggttcagtatgtttatcgctgtggcagtgcgcagggctggagccgtcggttccgcttcagggccctcaagaatggggcccactggagtccccgtctggctgtgtttggagacctgggggctgacaacccgaaggccgtcccccggctgcgcagggacacccagcagggcatgtatgacgccgttctccatgtggcaacttctctaactacaaggctcgcttcagcatgccgggggataatgagggcctgtggtacaggtaatgtgggggtgctgggggactggccctctcccctgaaggatgggagatgcaggggagccctggtccctgacccctgccctttgactcctccagctgggatctgggtcccgcccacatcatctccttctccaccgaggtctatttctttctccattatggccgccacttggtacagaggcagtttcgctggctggagagcgacctccagaaagccaataagaaccgggcagcccggccgtggatcatcactatggggcaccggcccatgtactgctccaacgcagatctggacgactgcacacgacatgaaagcaaggtccgcaaaggcctccaaggcaagctgtacgggttggaggatcttttctacaaatatggagtggatctgcagctgtgggctcatgagcactcgtatgaacgactgtggccaatttacaactaccaggtatttaacggcagccgagagatgccctacaccaacccgcgagggcctgtccacatcatcacaggatctgctggctgtgaggagcggctgacgccctttgctgtcttcccgaggccctggagtgccgtgcgtgtgaaggagtacgggtatacgcggctgcacatcctcaacgggacccacatccacatccagcaggtgtcggacgaccaggatgggaagatcgtagatgatgtctgggtggtgagacccctgtttggccggaggatgtacctctagggatggcggcagctctcctccagaagcctaggttttgccgccttggctgctgtgaccagaaactgcccaggcctgggtggggagttgggtgggccctgactcccctgccctccagaggccccatgtagggtacatgcagccctatggagctggggcagctgttccctcctggagaggtgggagtcctggctggctgtggagggagggcaggtgtgcgggcacagagtgacacacggcaggtttctgctggcagggccccaccctcctgcatagctctgatcgggcgaggtgcccacggggcttcaggaatgaagaggcttaagctctggctccatggattctgcacatctgcgggggatgccgctgggcttcctcctctcctgcccacctggcaagggcatcgccaggtgggcacaaccgtcatgacactactcaccagcaggtggcgtcaggggctttttcttctgagcccggcactgagagttggtctgaagcctggctccttcttcactgctccaggactgctatgaagagtcccttcatgcctcagtttcccagcctggcaccatcttattcgggaagaggagacgtgttaacactcttgcctcctagctaggacagatgacaaaccgcaagagccacagacttgccagttccttccctctttccttcctttctttcccttcttttatttattgaatcataatttattgagcatctaccatgtgccaggctctgttctcagtgctggagagacagctgtgaatgagacagagatctcggccctcacagagctgacatcctaaccagagagttggacaaaaatcacgataaatgagttggttaaatagcgatttgtgagtagaaaacgcagggacggtgagagagcagtttcaattttcagggggatctcactgagagggcaacatttgatctgaaggaggtggggaaggagccaagtgggcagacatctgggggaagagcattccaggcagaggaacagccagtgcaaaggccctgagacagaaatgtgcctggccggctgggtacagtaactcacatctgtagtcccagcactttgggaggccgaggcgggcagatcacttgagcccaggagtttgagaccagcctgggcaacacagcgaaaccctttctctaccaaaaatatgaaatttagctgggcatggtggtgtgtgcctgtagtcccagctgctcaggaggctgaggcgggaggatggcttgagcccaggaggttgaggctgcagtgagccatgattgcgccactgcaccccagcctgggcaacagagcaagaccctgtctcaaaaaatatatataaataaaaaagttttaaaaagagaaaaataaacaaagaaa

SEQ ID NO: 144483 - DNA, 736 bp, Homo sapiens
  Payload ID: 8546
  Gene Symbol:
  Gene Name: Iron/zinc purple acid phosphatase-like protein [Source:UniProtKB/Swiss-Prot
  Acc:Q6ZNF0]
  ENST ID: ENST00000601531
  CDS Start-End: 1-682
gggggctgacaacccgaaggccgtcccccggctgcgcagggacacccagcagggcatgtatgacgccgttctccatgtgggagactttgcctacaacctggatcaggacaacgcccgtgttggggataggttcatgcggctcattgaacccgtggctgccagcctgccgtacatgacatgccctgggaatcatgaagaacgctacaacttctctaactacaaggctcgcttcagcatgccgggggataatgagggcctgtggtacagctgggatctgggtcccgcccacatcatctccttctccaccgaggtctatttctttctccattatggccgccacttggtacagaggcagtttcgctggctggagagcgacctccagaaagccaataagaaccgggcagcccggccgtggatcatcactatggggcaccggcccatgtactgctccaacgcagatctggacgactgcacacgacatgaaagcaaggtccgcaaaggcctccaaggcaagctgtacgggttggaggatcttttctacaaatatggagtggatctgcagctgtgggctcatgagcactcgtatgaacgactgtggccaatttacaactaccaggatgggaagatcgtagatgatgtctgggtggtgagacccctgtttggccggaggatgtacctctagggatggcggcagctctcctccagaagcctaggttttgccgccttggctgctgtg

SEQ ID NO: 144484 - DNA, 1149 bp, Homo sapiens
  Payload ID: 8546
  Gene Symbol:
  Gene Name: Iron/zinc purple acid phosphatase-like protein [Source:UniProtKB/Swiss-Prot
  Acc:Q6ZNF0]
  ENST ID: ENST00000594229
  CDS Start-End: 35-1039
cttttccccggtctgccatcaccaccccaccaccatgcacccccttcctggctactggtcctgttactgtctactcctgctattctccttgggagtccaggggtccctgggggctcccagcgctgccccagagcaagtccatctgtcttacccaggtgagccaggctccatgactgtaacttggaccacatgggtcccaacccgctctgaagtgcaattcgggttgcagccgtcggggcccctgcccctccgcgcccagggcaccttcgtcccctttgtggacgggggcattctccggcggaagctctacatacaccgagtcacgcttcgcaagctgctgccaggggttcagtatgtttatcgctgtggcagtgcgcagggctggagccgtcggttccgcttcagggccctcaagaatggggcccactggagtccccgtctggctgtgtttggagacctgggggctgacaacccgaaggccgtcccccggctgcgcagggacacccagcagggcatgtatgacgccgttctccatgtggcaacttctctaactacaaggctcgcttcagcatgccgggggataatgagggcctgtggtacagctgggatctgggtcccgcccacatcatctccttctccaccgaggtctatttctttctccattatggccgccacttggtacagaggcagtttcgctggctggagagcgacctccagaaagccaataagaaccgggcagcccggccgtggatcatcactatggggcaccggcccatgtactgctccaacgcagatctggacgactgcacacgacatgaaagcaaggtccgcaaaggcctccaaggcaagctgtacgggttggaggatcttttctacaaatatggagtggatctgcagctgtgggctcatgagcactcgtatgaacgactgtggccaatttacaactaccaggtatttaacggcagccgagagatgccctacaccaacccgcgagggcctgtccacatcatcacaggatctgctgatgggaagatcgtagatgatgtctgggtggtgagacccctgtttggccggaggatgtacctctagggatggcggcagctctcctccagaagcctaggttttgccgccttggctgctgtgaccaga

SEQ ID NO: 144485 - DNA, 6354 bp, Homo sapiens
  Payload ID: 8547
  Gene Symbol: IREB2
  Gene Name: iron-responsive element binding protein 2
  ENST ID: ENST00000258886
  CDS Start-End: 150-3041
gctctgctgctctcgcgatatttgcgcgagcctgcttccttctttcctcccttgccagtccgcctgtcttcctccccgtcttccctgcccggcctcccccttcttcccccgctggccccctccccggagggataatatggtctccggcgatggacgccccaaaagcaggatacgcctttgagtaccttattgaaacattaaatgacagttcacataagaagttcttcgatgtatctaaacttggcaccaagtatgatgttctgccttactcaatacgggtcttgttggaagctgctgtacgaaattgtgatggctttttaatgaagaaggaagatgttatgaacattttagactggaaaaccaaacaaagcaatgttgaagtgccctttttccctgcccgtgttcttcttcaagattttactggaataccagcaatggtggattttgctgctatgagggaggcagtgaaaactcttggaggtgatcctgagaaagtccatcctgcttgtccgacagatcttacagttgaccattctttacaaattgacttcagtaaatgtgcaatacagaatgcaccaaatcctggaggtggtgacctgcagaaagcaggaaagctctctccacttaaagtgcagcctaagaagcttccctgcagaggccagactacctgccgaggatcttgtgattctggagaactaggccgaaactcaggaacattttcttcgcagattgagaatacacccatcctgtgtccttttcatttgcaaccagtgcctgaacctgaaacagtgttaaaaaatcaagaagtagaattcggcagaaatcgagagaggcttcagttttttaagtggagttcaagagtttttaagaatgtggcagtgatccctcctggaactggaatggctcatcaaataaacttagaatatttgtcaagagtggtttttgaagaaaaagacctcctcttcccagacagtgtagtcggcacagattcacacataacgatggtgaatggtttagggattctggggtggggggttggaggcattgaaacagaagcagttatgcttggtctgccagtttctcttactttaccagaggtggttggatgtgagttaactgggtcatcaaacccttttgttacatccatagatgttgttcttggtattacaaagcacctcaggcaagtaggagtggctggaaagtttgttgagttttttggaagtggagtttcacaattatctatagttgatcgaactacaatagcaaacatgtgtccggaatatggtgctatcctcagctttttccctgttgacaatgtgacattaaaacatttagaacatacaggttttagcaaagccaaactcgaatcaatggaaacataccttaaagctgtgaaattgtttcgaaatgaccagaattcttcaggagaacctgaatactcccaggtgatccagattaatctgaattcaatagttccatctgttagtggtccaaaaagacctcaggatagagttgctgtgacagatatgaaaagcgatttccaggcttgcttaaatgaaaaggttggatttaaaggcttccaaattgcagctgaaaaacaaaaggatattgtctccattcattatgaaggaagtgaatataagctgtctcatggatcagtggtcattgctgcagttatcagttgtaccaataattgcaatccatctgtcatgcttgctgcaggtcttttggctaaaaaggctgttgaagctggtctgcgtgttaaaccttatataagaacaagtttatctccaggcagtgggatggttacacattacctcagttcaagtggagtattaccatatctaagtaagcttggatttgaaatcgttggctatggatgttcaatttgtgtgggaaatacagcacccttatcagacgcagttttaaatgcagtaaaacagggtgatttggttacctgtggaattttatctggaaacaaaaattttgaaggtcgtctttgtgattgtgttcgtgccaattatcttgcctctccacccttagtggtagcttatgccatagcaggcacagtgaatatagatttccagacagaacctttaggtactgaccccaccggcaagaacatttacctgcatgatatttggcctagtcgagaagaagttcatcgagtagaggaagaacatgttatactatccatgtttaaagcattaaaagataaaatagaaatggggaataaacggtggaattccttagaagcaccggattcagttttgtttccatgggacttaaagtctacttatatcagatgcccttcattttttgataaacttaccaaagagccaattgcactccaggctattgaaaatgcccatgtcttattatatttgggagactctgtcacaacagatcatatatcacctgcaggaagtatcgctaggaatagtgctgccgctaagtatttgacaaacagaggccttacccctcgtgaattcaactcttacggagctcgaagaggtaatgatgctgtaatgacaagaggcacttttgcaaatatcaagctttttaataagtttattggaaaaccagctcctaaaacaattcattttccatcaggacagacgctagatgtatttgaggctgcagagctgtaccagaaagaaggtatcccactgattattttagcaggaaagaaatatggttcaggaaactccagagactgggctgccaaaggaccgtatttactgggtgtgaaagctgttttggccgaaagttatgaaaaaatacacaaagatcatttgattggaattggcatagctccacttcagttccttccaggagaaaatgcagattccttgggcctctccggtagagaaacattttctttaacatttcctgaagaactgtctcctggaattacattgaatatacagacaagcactggaaaagtattcagcgtgattgcttcgtttgaagatgatgtggaaataacattatacaaacatggaggattattaaactttgtggcacgaaaattctcatagtatctacttaccatagatacctttcataactggtaactgcaaagccttttgtgctggacccaggaatccttaccatggagcagcagatagtcccagtatactcacttatctcatccatggatgtaaatgatgatgaatcaacatagtaactgaaatgaaatcttcttgattttaaataatatacgaatggtgctattaatattgctaaaatcaacgtgtgaagtgtgttgtggaagagacctgtaagtatggggggggggcgatattttatcagaccattttgtaaataaaggcagaatttgtgttgaagattcttatatgaataaccttcctggatttgtttagttttgcaccaataaaactgtgtactactgtttgttggtttaagagtagcagattgaaatataagaagccagattagactctaaaattgtggccattggaatctcatttataaatggaccttttaagtatattaattcctcttcagaattgagctggacacatttggcattcttagtttgtcatataaccaggtttatccttagtctaactgcaagggatggaacctgccccaggtcacaatcattctgtccaatccagccaaggttccctccacatatgaagatggaccatggcaggatacaactgattgtgtggcaccatgtattagcagtgggaatatgtatcacatatgatgcagcctttcatatttcagcagtttgccactgtgactgtctggcaagcccccagatggcgttatattaattggattagattattttgctcaccttatgtaatactgtaacttcctataacctaatattttcggtatcattaaccaaaatttcacactcatagttgctaaagagaatgttattcaatcattaaactctgaactgatttcttctatacatttaaattatccaccctcaataatacgggtgctcaaccctatgcattttttaagtgttgctatttcttaattaaattgatttcctgtcattttgaatcatttatcacctgcgatgcatgattctattaattttgttatgttactgttttaaccaaagctgaccgtaaggataaaacacttaagttgttgctgagtactatatatcctcaatatgcatgtctgcccatcacatcaaatgttctgtcaacaagatgtttggtaattttttttaaaaaggttggaaaattaattatagaaggttctatactgtttttttaattaagaaactaagtctagcaggctaaaggttaattgtagtgattttttttcacatagatatctttctatgacctagttagttactgcaattcagaattagttcacattgcataaagaattacttgttgtaagcaaaatgctgaaactaccaaaccagtggatgaagaccactaagaactttgcacataatcatacaatcttttgaaaatattttgcaaatatgtgtttagacaataagatggactagagttcgacaaaatgatttctttatttaaattttgtataagtattttcttcgacactttcaaattatattgtgttcttgatatatgctgtatatttatttgttagtgcatgtgtttttaatttacatgaaaacatgagttaggagaaattacaggttgaaagatgaaatgcctgtatgtgctctgaagaaatggtaattccagattgtgcagggggaaacaaatctattttgttttgttttgttttttgagacggagtcttgccctgtggctgggctggagtgcaatggcgcgatcttggctcactgcaacctccgcctcccgggttcaggggattctcctgcctcagcctcctgagtagctgggactacaagcatgcaccaccacgcccagctaatttttgtagttttagtagagatggggtttcaccatgttggccagatgatctgaatctcttgacctcgtgatccgcccgccttggcctccacaagtgctgggattacaggtgtgagccaccacacccggcctatattgttttgaaagcatactctatatatagttatgggcagaggcacaggcatcctcagcagctgattcaggagatgatggtaaagctagctaactatgaattaaacattcacatatccagtctacctggtccagtaataatacaagcaaatcttgtatttcaggaacaaatcaaggttctcttaattttttggcttatatacaatgaagtaaaaacttgataaacatggtttcaaattgaggaggagagtcttggatgtatgttttaatatgtataccttataattctgcctctagccaaatgctatgtttgcaaaatgtggcatctgttagtttttattgtctgtgtcttctttgtttactataccttgggtaattttgtgttaccaaaaaaaaaaaaaaaaaaaggaagtgtaatgtcagacacacaagaaaagcaaatcagtgttgtaagcttaaagtacaatttcaaaggtcactaccaacagcagggttttttttatactttgaaaacattatgctacatatcattgccattttcatattttggggttttgctactcttatacaatggaatcaatggaaatgtcatccagccactgaattgccattattatatctaaaaagtttctaagatgacagttatcactattttgttttatctccatgctgacatttgaaagaaggtactagtatccctctagccagattgcttagtttttcgttggtaatcaaacaacagttgtactaaaggaaagtaaagctaggacctaaatcagaatcatagttgcctgcatatatggtaacaaggtcgtgtgcatttgctttcacagtgatgagtgagaggatgagaagaaattatttgacatttttctgtggttgaatagaagacacctttcttttgtctttaggtttaggaggagatactaagatactggatgtttatcctatcttagtttggttggagtaataagagagaagaagagggtggactttggcttttcagtgttttttcccctaaagagtgatattgctgacgtttctatcaattttacacataatatgtggctatgaaaccatatatctcacttaagtaacaaagtaatcactttgtctatcactaagtaatagacaaaaatcattgtctattatttaaagccaacaaaacagtgtaacagttttaagttcaataatgttaagtattgtatagaaatatattggaggcaaagttcagttgatgacaattgtgtatatgttactgatgctgtaaattatttttaataaagaaaattgtattatcacattt

SEQ ID NO: 144486 - DNA, 4396 bp, Homo sapiens
  Payload ID: 8547
  Gene Symbol: IREB2
  Gene Name: iron-responsive element binding protein 2
  Uniprot ID: P48200
  ENST ID: ENST00000560440
  CDS Start-End: 55-1086
cccccttcttcccccgctggccccctccccggagggataatatggtctccggcgatggacgccccaaaagcaggatacgcctttgagtaccttattgaaacattaaatgacagttcacataagaagttcttcgatgtatctaaacttggcaccaagtatgatgttctgccttactcaatacgggtcttgttggaagctgctgtacgaaattgtgatggctttttaatgaagaaggaagatgttatgaacattttagactggaaaaccaaacaaagcaatgttgaagtgccctttttccctgcccgtgttcttcttcaagattttactggaataccagcaatggtggattttgctgctatgagggaggcagtgaaaactcttggaggtgatcctgagaaagtccatcctgcttgtccgacagatcttacagttgaccattctttacaaattgacttcagtaaatgtgcaatacagaatgcaccaaatcctggaggtggtgacctgcagaaagcaggaaagctctctccacttaaagtgcagcctaagaagcttccctgcagaggccagactacctgccgaggatcttgtgattctggagaactaggccgaaactcaggaacattttcttcgcagattgagaatacacccatcctgtgtccttttcatttgcaaccagtgcctgaacctgaaacagtgttaaaaaatcaagaagtagaattcggcagaaatcgagagaggcttcagttttttaagtggagttcaagagtttttaagaatgtggcagtgatccctcctggaactggaatggctcatcaaataaacttagaatatttgtcaagagtggtttttgaagaaaaagacctcctcttcccagacagtgtagtcggcacagattcacacataacgatggtgaatggtttagggattctggggtggggggttggaggcattgaaacagaagcagttatgcttggtctgccagtttctcttactttaccagaggtggttggatgtgagttaactgggtcatcaaacccttttgttacatccatagatgttgttcttggtattacaaaggtaagttaaagttgtggtagctctatgacttactgaacattatttttataaaaattgaagagctctatgagagcagggatttgggttcattactgcatcctcaggtctcttgacgttagccacatcatcatagttatcatagtaataacaacaaacagagcatttagtttgtactaataaatacaaagaaatttgttgtgttcacttatgttagctcatttagtccttataacaagcctgtgagatggatactattactattctcattgtaactctgagaaaactaaggtacagtagggtttagtgacttaccaaagggtcgaaggcctgagtagtaaggggtagagcaaagattccaggcagtcagattcttgagtccattgtcttaaccattatgccttattagtgccttgttgccttaataaacacttgctgactacattattttttttctcttttttacttgaatttaaaaaaaatgtttagcaaaagttgattgtgtcgtctttaattaaattatttgcccattagaaactgttgctctactaagtaatgctttcaaaaacatggactgtagaaatgtgatatatcatttttctgttgccgttttaacatttctctggattattatgtaaaaatcttctctctgaatttttaaaatactggcttcagaacttcaatacatacactgagcttgttaagcatattaatacacaggctcacggatttcctagtgaacaataatttgtaactcttcttcctaaatgtctggcctttgctaactttattttaatgattaaatcctattttgttaaatgaatgtacctggaaaatgttccacatataattccaatttgagtcccaatctcagcatttttggttagattattggtacgaaggctttccggatactccagtgtaaggaaatgataatgcctccctctcagcatttggtattgatccttcttccctaattagaaaagaatttggcatcttagagaaattattgattcaacgtatgataccaaaagatcaagtagtaaattgggaattgcaggattattcctagaggaaaaggagtatcccattatgtttttacagaaatcaattctttactttagacatcctgaaaactaacgctgctttttagccttctctagctgttttttcctgacaatattactgtgtgttttttgacattttagtttaatgttaaaaaattaatctattatatatgtttacatttattgaatatattattacttcttttttgagatcctgttccatttgtgatccttataggaataatcctgtattgtttttttgatgagagcagcatttggtttgtaatatctaatctgtgtttctttcatcctaaaaaataaaaccataggccgggcgcggtggctcacgcctgtaatcccagcactttgggaggccgaggcgggtggatcatgaggtcaggagatcgagaccatcctggctaacaaggtgaaaccccgtctctactaaaaatacaaaaaattagccgggcgcggtggcgggcgcctgtagtcccagcttctcgggaggctgaggcaggagaatggcgtgaacccgggaggcggagcttgcagtgagccgagattgcgccactgcagtccgcagtccggcctgggcgacagagcgagactctgtctcaaaaaaaaaaaaaaaaaaaaaaaaaccataaatgaggaaacatctttacacttagggtttgagtttctgtatctataaaaaagggtttggattaagtgatccctggcacttataaaatgttagggcttaatattattcatagatcgaggatagtttcattcttagtcgcctccttagtcactcttcctataccaatctgagaccattttacaatttagaaaagacaaataactggttgggttacttgatagtataataaccaagaaaaataattttagaaggaattaagtttgaaaccacatgttaacaaattctaccaaagtgggatttgcctgtgattaaagatgctgtaaacatttgggccagtagttataatttgaaaaatgtttatagccaatatataattttttatttaaatatacagtttcatcagtctattagtatttcattaagtctaagatgccatcagtggttagcaaacaccactgttttatgcactgctaagaaagaataaagggctgtgtgcagtggctcacacctgtgggacgccaaggcaggagcatcacttgaggccagaagttcaagaccaacctggtcaacattgtaagaccctgtctctacaaaaaaaaaaaagttaaaaattagctgggtgcggtggcacatgcctgtagttccagctactctggaggctaaggtgggaggattgctagagccacggtgttggaagctgcagtgagctgtgaccacaccactgcgctccagcctgggcaacagagtgagaccctgtttctaaaagaaagaaagaaaaagggctgccacctaaacagacacactattgagttgaggtaccctgatttcaaagacatgaaaatgttaattatagccaccttgagctttcaggcccctttctaccctgattaacagtgacattggaccagtcttctctttacttcttatcttaaaatacccccaaaaccagaatgagttgattcataaggacaatgaaggatctcattccttcaccatcactagtattggttaaaaattttattttatagttttcagacaatcgttgctaatcttatctttgcaattttgtatgtgtttctgtgtattccttatatagcacctcaggcaagtaggagtggctggaaagtttgttgagttttttggaagtggagtttcacaattatctatagttgatcgaactacaatagcaaacatgtgtccggaatatggtgctatcctcagctttttccctgttgacaatgtgacattaaaacatttagaacatacaggtaagaagataaaagatcactagaataaacatgttacatttccaatgtgtttgataatattttataaattactaccttatccatgttatttactattcacaaaattacattatgttgaaacaacaactttcaagcaaacatcagatgtctttaaagagtgttgtgtcctcaaaccctagttccctgtgacacattgaaagcaatttaaaggaattattcaaaccattgatcctgacttgactgtttccccataatgatggatacctccacctctacttaggggtcataggttgcaatttaatggaagtcagccttaaacatattcacagcagtccccttct

SEQ ID NO: 144487 - DNA, 865 bp, Homo sapiens
  Payload ID: 8547
  Gene Symbol: IREB2
  Gene Name: iron-responsive element binding protein 2
  ENST ID: ENST00000558525
  CDS Start-End: 111-266
ttctttcctcccttgccagtccgcctgtcttcctccccgtcttccctgcccggcctcccccttcttcccccgctggccccctccccggagggataatatggtctccggcgatggacgccccaaaagcaggatacgcctttgagtaccttattgaaacattaaatgacagttcacataagaagttcttcgatgtatctaaacttggcaccaaatgttctgccttactcaatacgggtcttgttggaagctgctgtacgaaattgtgatggctttttaatgaagaaggaagatgttatgaacattttagactggaaaaccaaacaaagcaatgttgaagtgccctttttccctgcccgtgttcttcttcaagattttactggaataccagcaatggtggattttgctgctatgagggaggcagtgaaaactcttggaggtgatcctgagaaagtccatcctgcttgtccgacagatcttacagttgaccattctttacaaattgacttcagtaaatgtgcaatacagaatgcaccaaatcctggaggtggtgacctgcagaaagcaggaaagctctctccacttaaagtgcagcctaagaagcttccctgcagaggccagactacctgccgaggatcttgtgattctggagaactaggccgaaactcaggaacattttcttcgcagattgagaatacacccatcctgtgtccttttcatttgcaaccagtgcctgaacctgaaacagtgttaaaaaatcaagaagtagaattcggcagaaatcgagagaggcttcagttttttaagtggagttcaagagtttttaagaatgtggcagtgatccctcctggaactggaatggctcatc

SEQ ID NO: 144488 - DNA, 558 bp, Homo sapiens
  Payload ID: 8547
  Gene Symbol: IREB2
  Gene Name: iron-responsive element binding protein 2
  ENST ID: ENST00000560840
  CDS Start-End: 444-558
aatgggagagaaccagtcaagattgagatatgtgagattagaaagtggagttatagctggccttggctaaaggcatttctgggagtggaagccagactggaagaggataagaagtgggtgggggagagccgagtatgagcgactctttctggtaagttgctgcgacaggagataatgctgggtaggtggagaacacagggaccggaggagctgaggcggaaggatggagaggcttaagcatgtgttaactgccactgggaagaagtcggcaatcacggaagctaccggagggatacgcctttgagtaccttattgaaacattaaatgacagttcacataagaagttcttcgatgtatctaaacttggcaccaagtatgatgttctgccttactcaatacgggtcttgttggaagctgctgtacgaaattgtgatggctttttaatgaagaaggaagatgttatgaacattttagactggaaaaccaaacaaagcaatgttgaagtgccctttttccctgcccgtgttcttcttcaagattttactggaataccagcaa

SEQ ID NO: 144489 - DNA, 572 bp, Homo sapiens
  Payload ID: 8547
  Gene Symbol: IREB2
  Gene Name: iron-responsive element binding protein 2
  ENST ID: ENST00000559215
  CDS Start-End: 163-303
agacccggggctggctctgctgctctcgcgatatttgcgcgagcctgcttccttctttcctcccttgccagtccgcctgtcttcctccccgtcttccctgcccggcctcccccttcttcccccgctggccccctccccggagggataatatggtctccggcgatggacgccccaaaagcaggatacgcctttgagtaccttattgaaacattaaatgacagttcacataagaagttcttcgatgtatctaaacttggcaccaagtatgtggaataccagcaatggtggattttgctgctatgagggaggcagtgaaaactcttggaggtgatcctgagaaagtccatcctgcttgtccgacagatcttacagttgaccattctttacaaattgacttcagtaaatgtgcaatacagaatgcaccaaatcctggaggtggtgacctgcagaaagcaggaaagctctctccacttaaagtgcagcctaagaagcttccctgcagaggccagactacctgccgaggatcttgtgattctggagaactaggccgaaactcaggaacattttcttcg

SEQ ID NO: 144490 - DNA, 268 bp, Homo sapiens
  Payload ID: 8547
  Gene Symbol: IREB2
  Gene Name: iron-responsive element binding protein 2
  ENST ID: ENST00000559091
  CDS Start-End: 1-268
gaaatatggttcaggaaactccagagactgggctgccaaaggaccgtatttactgggtgtgaaagctgttttggccgaaagttatgaaaaaatacacaaagatcatttgattggaattggcatagctccacttcagttccttccaggagaaaatgcagattccttgggcctctccggtagagaaacattttctttaacatttcctgaagaactgtctcctggaattacattgaatatacaggtatctctaaatttttcaaatatatga

SEQ ID NO: 144491 - DNA, 2917 bp, Homo sapiens
  Payload ID: 8547
  Gene Symbol: IREB2
  Gene Name: iron-responsive element binding protein 2
  ENST ID: ENST00000558570
  CDS Start-End: 30-692
tccccggagggataatatggtctccggcgatggacgccccaaaagcaggatacgcctttgagtaccttattgaaacattaaatgacagttcacataagaagttcttcgatgtatctaaacttggcaccaagtatgatgttctgccttactcaatacgggtcttgttggaagctgctgtacgaaattgtgatggctttttaatgaagaaggaagatgttatgaacattttagactggaaaaccaaacaaagcaatgttgaagtgccctttttccctgcccgtgttcttcttcaagattttactggaataccagcaatggtggattttgctgctatgagggaggcagtgaaaactcttggaggtgatcctgagaaagtccatcctgcttgtccgacagatcttacagttgaccattctttacaaattgacttcagtaaatgtgcaatacagaatgcaccaaatcctggaggtggtgacctgcagaaagcaggaaagctctctccacttaaagtgcagcctaagaagcttccctgcagaggccagactacctgccgaggatcttgtgattctggagaactaggccgaaactcaggaacattttcttcgcagattgagaatacacccatcctgtgtccttttcatttgcaaccagtgcctgatggagttcaagagtttttaagaatgtggcagtgatccctcctggaactggaatggctcatcaaataaacttagaatatttgtcaagagtggtttttgaagaaaaagacctcctcttcccagacagtgtagtcggcacagattcacacataacgatggtgaatggtttagggattctggggtggggggttggaggcattgaaacagaagcagttatgcttggtctgccagtttctcttactttaccagaggtggttggatgtgagttaactgggtcatcaaacccttttgttacatccatagatgttgttcttggtattacaaagcacctcaggcaagtaggagtggctggaaagtttgttgagttttttggaagtggagtttcacaattatctatagttgatcgaactacaatagcaaacatgtgtccggaatatggtgctatcctcagctttttccctgttgacaatgtgacattaaaacatttagaacatacaggttttagcaaagccaaactcgaatcaatggaaacataccttaaagctgtgaaattgtttcgaaatgaccagaattcttcaggagaacctgaatactcccaggtgatccagattaatctgaattcaatagttccatctgttagtggtccaaaaagacctcaggatagagttgctgtgacagatatgaaaagcgatttccaggcttgcttaaatgaaaaggttggatttaaaggcttccaaattgcagctgaaaaacaaaaggatattgtctccattcattatgaaggaagtgaatataagctgtctcatggatcagtggtcattgctgcagttatcagttgtaccaataattgcaatccatctgtcatgcttgctgcaggtcttttggctaaaaaggctgttgaagctggtctgcgtgttaaaccttatataagaacaagtttatctccaggcagtgggatggttacacattacctcagttcaagtggagtattaccatatctaagtaagcttggatttgaaatcgttggctatggatgttcaatttgtgtgggaaatacagcacccttatcagacgcagttttaaatgcagtaaaacagggtgatttggttacctgtggaattttatctggaaacaaaaattttgaaggtcgtctttgtgattgtgttcgtgccaattatcttgcctctccacccttagtggtagcttatgccatagcaggcacagtgaatatagatttccagacagaacctttaggtactgaccccaccggcaagaacatttacctgcatgatatttggcctagtcgagaagaagttcatcgagtagaggaagaacatgttatactatccatgtttaaagcattaaaagataaaatagaaatggggaataaacggtggaattccttagaagcaccggattcagttttgtttccatgggacttaaagtctacttatatcagatgcccttcattttttgataaacttaccaaagagccaattgcactccaggctattgaaaatgcccatgtcttattatatttgggagactctgtcacaacagatcatatatcacctgcaggaagtatcgctaggaatagtgctgccgctaagtatttgacaaacagaggccttacccctcgtgaattcaactcttacggagctcgaagaggtaatgatgctgtaatgacaagaggcacttttgcaaatatcaagctttttaataagtttattggaaaaccagctcctaaaacaattcattttccatcaggacagacgctagatgtatttgaggctgcagagctgtaccagaaagaaggtatcccactgattattttagcaggaaagaaatatggttcaggaaactccagagactgggctgccaaaggaccgtatttactgggtgtgaaagctgttttggccgaaagttatgaaaaaatacacaaagatcatttgattggaattggcatagctccacttcagttccttccaggagaaaatgcagattccttgggcctctccggtagagaaacattttctttaacatttcctgaagaactgtctcctggaattacattgaatatacagacaagcactggaaaagtattcagcgtgattgcttcgtttgaagatgatgtggaaataacattatacaaacatggaggattattaaactttgtggcacgaaaattctcatagtatctacttaccatagatacctttcataactggtaactgcaaagccttttgtgctggacccaggaa

SEQ ID NO: 144492 - DNA, 813 bp, Homo sapiens
  Payload ID: 8548
  Gene Symbol: ISCA1
  Gene Name: iron-sulfur cluster assembly 1
  ENST ID: ENST00000311534
  CDS Start-End: 354-449
tcccgggggtgggcgtccccgggggccgatcgcctccacactcctgccggcctgcgctgttcggccgttccggttaagcagaggctgaacgtgcccggtggcgggggttcccggtggtggcccggagtcctagcctggagacaccttcagcagtaaacaagataaaacaacttcttaaagataagcctgagcatgtaggtgtaaaagttggtgtccgaaccaggggctgtaatggcctttcttatactctagaatatacaaagacaaaaggagattctgatgaagaagttattcaagatggagtcagagtattcatcgaaaagaaagcacagctaacacttttaggaacagaaatggactatgttgaagacaaattatccagtgagtttgtgttcaataacccaaacatcaaagggacttgtggctgtggagaaagctttaatatttgaaatctcaggactcttctggccgtaggttccaggaaagctcgtggaagctttggggctcactgcagaaatcatgtgactgtcacgtgctggaaaataaagtgatacatcttgaaaatgaatccagtgtgttggattccagaagaaatgatatttatattctctataggggacagaaaatgagaagccatcactctttttggatcatttaggtctcttgtatcctttgttttagaaccagtttcattaaagttgccttcctgggcacctgtttatccatttcctgaactgtgtgcactccttagatcgctattgatggcttgatcatccctcagcatttctcccaaccagatcggtgactcctaaa

SEQ ID NO: 144493 - DNA, 1264 bp, Homo sapiens
  Payload ID: 8548
  Gene Symbol: ISCA1
  Gene Name: iron-sulfur cluster assembly 1
  ENST ID: ENST00000326094
  CDS Start-End: 81-341
aatgcgcccgccgtgtccatggagagaagctgaggcggccgaccttcggcccgaggcaccggggcgccgggacggcgaagatgtcggcttccttagtccgggcaactgtccgggctgtgagcaagaggaagctgcagcccacccgggcagccctcaccctgacaccttcagcagtaaacaagataaaacaacttcttaaagataagcctgagcatgtaggtgtaaaagttggtgtccgaaccaggggctgtaatggcctttcttatactctagaatatacaaagacaaaaggagattctgatgaagaagttattcaagatggctggagtgcagtggtgtgatctcggcttgctgcaacctccacctccctggttcaagcgatcctcccacctcagcctcccaagtagctgggattataggcgcccaccaccatgcctggttcatttttgtatttttagtggagctgtattatcaactcatgtttttgaggaatcctgtatttccaatttttattcaaagctatttattataatttaatttataattaaaattaattatatttgctgctgcccccttcttccaccctataatctgttaaaacctatctaaaataaataatttatcttgtcattggaagtatgcacttagcttgcagttcttacctacatgggagaatgaggcctagattcctaagtgtgctttcttattaaactaaagttataactatcaataaagaccttttaaaaatgtattattttaaaaattataacacattataaaccttaagattttcatcttaaagaagaggtgacttaattatatattgtttatatttagctaatggctcaatttcttgtaaggaagaaagtttttttgttgtttcgttgttttgtttgtttgttgagacagagtcttgctctcttacccaggctggagtgcagtggcacaatcatggttcactgtagcctctgtctcccgggctcaagcagtcctcccacctcagcctcccgagtagctgggactacaggtgcccaccactgtgcccggctaatttttgtatttttagtggagccagggttttgccctgtttcccagactagaaagctttcttaaattgattgtatttgttggctgggcactgtggctcacacctgtaatcccagcactttgggaggccgaggtgggaggatcacttgagcccaggaatgcaagaccagcttgggccacgtggtgaaaccctgactctaaaaaaattagttggtcc

SEQ ID NO: 144494 - DNA, 1958 bp, Homo sapiens
  Payload ID: 8548
  Gene Symbol: ISCA1
  Gene Name: iron-sulfur cluster assembly 1
  Uniprot ID: Q9BUE6
  ENST ID: ENST00000375991
  CDS Start-End: 72-461
gccgtgtccatggagagaagctgaggcggccgaccttcggcccgaggcaccggggcgccgggacggcgaagatgtcggcttccttagtccgggcaactgtccgggctgtgagcaagaggaagctgcagcccacccgggcagccctcaccctgacaccttcagcagtaaacaagataaaacaacttcttaaagataagcctgagcatgtaggtgtaaaagttggtgtccgaaccaggggctgtaatggcctttcttatactctagaatatacaaagacaaaaggagattctgatgaagaagttattcaagatggagtcagagtattcatcgaaaagaaagcacagctaacacttttaggaacagaaatggactatgttgaagacaaattatccagtgagtttgtgttcaataacccaaacatcaaagggacttgtggctgtggagaaagctttaatatttgaaatctcaggactcttctggccgtaggttccaggaaagctcgtggaagctttggggctcactgcagaaatcatgtgactgtcacgtgctggaaaataaagtgatacatcttgaaaatgaatccagtgtgttggattccagaagaaatgatatttatattctctataggggacagaaaatgagaagccatcactctttttggatcatttaggtctcttgtatcctttgttttagaaccagtttcattaaagttgccttcctgggcacctgtttatccatttcctgaactgtgtgcactccttagatcgctattgatggcttgatcatccctcagcatttctcccaaccagatcggtgactcctaaaatctgagacaggacatcgtgactgctggtagtaatatggtggtgcattgttttttccacccaaacttaacatagcctttttatacatttttatgaaaaatttcattgtcagctgcctcactgcatactctttaatagtaccaggcaaagattttcttcaactatagtacagattagttctgagtgatggtatcaaaaggtgagaaagacgtcatccgcctttttttaatccatttcttttgccaccctatatgtctgttcagagatgggctctcaagctgactttgattcttttagttgagaagtctcttaaagccatctagcccacctccatcaattccctatgtgaggaagcaaaaccccagggaagccaaagggctcctgtccaccctgacaccacaggccgggggagagtagggactctacccccctctccccttgtaggtgacacatgctctgccctctgaggcagtcagcgaaggcaaatggtctgacttctttatgtggtcaacattttgatagaatttctttataatttgatagagattatattatttttattttattttgagtgggaagaattttaaaacctttttatgtcaattaccatcttgtttctttcacctttgaaacaatggtttgtagcagagatgacattgtagcaacccagaattatgcttttggaatgtggtcctcactgtacaggagaatgtgtaatcttttgttaaaattcccagtgtgcatacattttctggttcctcggtccagttgctaaagttcttagtattttagcctaacatatttatcaccaacttttctttaaaagtgttccttttgtcacttagttactgattttcctgggtttgacataagtattctatgagatgatatatatgctttttttgaaagctgattctcatgaattcaagtagctgagttcctttatgtttcgtttattcactaaagtagctgacacaaaacacaccaaaacctagagcggtagttttatgtaaatgctcatgagtttgtatcaataatataattgttgatccacttataattcgtgcaacactgtatgtatgtagagattgagttgtcaattaaaaaaaatgtggcctctttgtgatcataaaa

SEQ ID NO: 144495 - DNA, 851 bp, Homo sapiens
  Payload ID: 8549
  Gene Symbol: ISCA2
  Gene Name: iron-sulfur cluster assembly 2
  ENST ID: ENST00000298818
  CDS Start-End: 20-346
gcggagcttgtggaggaagatggctgccgcctgggggtcgtccctaacggccgcgacgcagagagcggtcactccctggccgaggggcaggctcctcacggcctccctgggaccccaggcgcgtcgggaggcgtcgtcctccagccccgaggccggcgaagggcagatccgcctcacagacagttgcgtccagaggcttttggaaatcaccgaagggtcagaattcctcaggctgcaagtggagggaggtggatgctccggattccaatacaaattttcactggatacagttatcaaccccgacgacaggcaaggaggaagggggtggggcaagagtggtggttgactctgatagcttggccttcgtgaaaggggcccaggtggacttcagccaagaactgatccgaagctcatttcaagtgttgaacaatcctcaagcacagcaaggctgctcctgtgggtcatctttctctatcaaactttgatgtgatgactggtgactctgggattgtcaccagttgtaccaatttgaagaacctggaattagtagaattctagaagtttacttctaatcatgtccctctcaattttatttcccgcagtccaggagtgttatgttttgccactattattttcagaatgtgaagattttactcttggcttaatttttccctccactcagtgctaaggctgagcctccagatgctgttacctcagatttaatcactggttgaaactccgtataatctgtagagcctccatggctctaaaatttggaattaacttctcttgccttaagagctgcttgtacatatgtggatagctatgtataaaagcttcattttaaagaa

SEQ ID NO: 144496 - DNA, 489 bp, Homo sapiens
  Payload ID: 8549
  Gene Symbol: ISCA2
  Gene Name: iron-sulfur cluster assembly 2
  Uniprot ID: Q86U28
  ENST ID: ENST00000554924
  CDS Start-End: 11-193
gtggaggaagatggctgccgcctgggggtcgtccctaacggccgcgacgcagagagcggtcactccctggccgaggggcaggctcctcacggcctccctgggaccccaggcgcgtcgggaggcgtcgtcctccagccccgaggccggcgaagggcagatccgcctcacagacagttgcgtccagggtatttgaacagggtggggcaagagtggtggttgactctgatagcttggccttcgtgaaaggggcccaggtggacttcagccaagaactgatccgaagctcatttcaagtgttgaacaatcctcaagcacagcaaggctgctcctgtgggtcatctttctctatcaaactttgatgtgatgactggtgactctgggattgtcaccagttgtaccaatttgaagaacctggaattagtagaattctagaagtttacttctaatcatgtccctctcaattttatttcccgcagtccaggagtgtta

SEQ ID NO: 144497 - DNA, 2626 bp, Homo sapiens
  Payload ID: 8549
  Gene Symbol: ISCA2
  Gene Name: iron-sulfur cluster assembly 2
  Uniprot ID: Q86U28
  ENST ID: ENST00000556816
  CDS Start-End: 56-520
cgaggccccgggtgagaaacgggggagacgcgaggggcggagcttgtggaggaagatggctgccgcctgggggtcgtccctaacggccgcgacgcagagagcggtcactccctggccgaggggcaggctcctcacggcctccctgggaccccaggcgcgtcgggaggcgtcgtcctccagccccgaggccggcgaagggcagatccgcctcacagacagttgcgtccagaggcttttggaaatcaccgaagggtcagaattcctcaggctgcaagtggagggaggtggatgctccggattccaatacaaattttcactggatacagttatcaaccccgacgacagggtatttgaacagggtggggcaagagtggtggttgactctgatagcttggccttcgtgaaaggggcccaggtggacttcagccaagaactgatccgaagctcatttcaagtgttgaacaatcctcaagcacagcaaggctgctcctgtgggtcatctttctctatcaaactttgatgtgatgactggtgactctgggattgtcaccagttgtaccaatttgaagaacctggaattagtagaattctagaagtttacttctaatcatgtccctctcaattttatttcccgcagtccaggagtgttatgttttgccactattattttcagaatgtgaagattttactcttggcttaatttttccctccactcagtgctaaggctgagcctccagatgctgttacctcagatttaatcactggttgaaactccgtataatctgtagagcctccatggctctaaaatttggaattaacttctcttgccttaagagctgcttgtacatatgtggatagctatgtataaaagcttcattttaaagaaggttcttattgtgttgtggatcagggtcacagattgggtagcttggacaccagttattagaggatgagaaaagtaaatgaaatgttctctttttcacttcaccctgccagaatgtgccacttgacttatctttattgtctatgcaacccatttgccacttcctgtttgataggacagatacattttactctcatgctcgtggatctgctatgagtcataaaaccaagagcccgttacccagaaaacttggaccaaaccctcactgatagtgaattatttcaaaaatagcctccctactcatacagacattttaagattctgtgacaatttaatgactgaatctttttaggatatgttgctttacctgccttctgttgtaaaatggctctggtctcatgcacagcaggaagtgatccctttattgttataggtaatagattcttgggaacctttttttagattgggttaccagatgaaatgtaggatgcccagttaaatttgaatttcaggtaaataattttttagtatgcatatgtctcaaatattgcatatactaaaaattactatttgaaattcaaatttaactcatatttttatttgctgaccttggcaactctgctttagggtcaccaaacagcttttaaaatcacaaattctagtgaattaaagtacttgtgtaggtgtggcacttaaataggcttcggagcttgaaataatcctgttagagtactgtggagctgtgtggacagacagtgaaagaaatctaccaccatcaccacaccgaatgatttattaatactgatgttggagaaactacaaccaagttgattctggaagagttactggttaaatccatcttttgcttgggagcctagaagtttgttacagtaaagacttgcatttctgcactggattggaattaaggtcatttagtaagaatttactatttaaaaaaatggaaatagagtttagaaaatatctgagacagaaacttagatacatttccaacatggcaaaacctaggacttagagaaaacaaacctatcatgcggttagaggagagaaggggacactcagaaacctgagcacatttcttagagctggtggaaggaggcagaaagcagcataccatgggagcatctgtgtgcacacatgaccaagacagtgccgccagtacctgcgcctgatagggtttcagttcagactacctgtcctttcatcctccttaaaaagattttgctacattttaaacattagaatatattctttaagaatatttttgtgggttatttattgattttgtggttttaaaactcttgagcacgagcagaacagcttttgttgctaaatcaatcaaattacagtggtgcactagacagaaacagtcccttagaatgcagcttatatgtgagtatctactgttaatgggagaattggaattttatgtttagaaaaaggcagatttggggctgggcacggtggctcacgcctgtgatcccagcactttgggaggccaaagcaggcagatcacctgaggtcaggagtttgagaccagcctgggcaacatggtgaaaccccatctctactaaaaatacaaaaattaactgcgtggtggacacctgtaatcccagctactcgggagactgaggcaagagaatcacttgaacccaggaggtggagattgcagtgagccaagattgcaccactggactccagcctgggtggcagagtgagactctg

SEQ ID NO: 144498 - DNA, 994 bp, Homo sapiens
  Payload ID: 8550
  Gene Symbol: ISCU
  Gene Name: iron-sulfur cluster assembly enzyme
  Uniprot ID: Q9H1K1
  ENST ID: ENST00000311893
  CDS Start-End: 23-526
ggcgcaggcgcaagccggcaagatggcggcggctggggctttccgtctgaggcgggcggcatcggctctgctgctgcggagcccccgcctgcccgcccgggagctgtcggccccggcccgactctatcacaagaaggttgttgatcattatgaaaatcctagaaacgtggggtcccttgacaagacatctaaaaatgttggaactggactggtgggggctccagcatgtggtgacgtaatgaaattacagattcaagtggatgaaaaggggaagattgtggatgctaggtttaaaacatttggctgtggttccgcaattgcctccagctcattagccactgaatgggtgaaaggaaagacggtggaggaagccttgactatcaaaaacacagatatcgccaaggagctctgccttcctcccgtgaaactgcactgctccatgctggctgaagatgcaatcaaggccgccctggctgattacaaattgaaacaagaacccaaaaaaggagaggcagagaagaaatgagccctccctcggcgaagcctccagcaggccacaccagctgtttcccacctgctgtgcagtcaccttagatgttcagaagccgcttcctctccactgaagagctatgagatacgcacaatacttgctgttcacgttatgactctcatgcaagcaaaatacacagtttcattgttctgaatcctgtggtttctttcagcccacttttatcgccttaacctagttaatgtatattttgaattgtgtgtatgacctcagaactgaaattgataatgaagttgcaagttttgatagcccgtgaagtgcataagtatctaattttacctgaattgatttggggggaaattaccagtagaatgccttggtctgaatatttgatagaaccaattgttgtacataaaacagattgcgcatatatatatatgtataaaaaataataaaataatggaagatgatggtgttctctagtaa

SEQ ID NO: 144499 - DNA, 1069 bp, Homo sapiens
  Payload ID: 8550
  Gene Symbol: ISCU
  Gene Name: iron-sulfur cluster assembly enzyme
  Uniprot ID: Q9H1K1
  ENST ID: ENST00000392807
  CDS Start-End: 189-617
aggcgcaagccggcaagatggcggcggctggggctttccgtctgaggcgggcggcatcggctctgctgctgcggagcccccgcctgcccgcccgggagctgtcggccccggcccgactctatcacaagaaggtatctcaaatctgtgaagtattgtagaggagacacaaaaggaattgggggtcacaaatggttctcattgacatgagtgtagacctttctactcaggttgttgatcattatgaaaatcctagaaacgtggggtcccttgacaagacatctaaaaatgttggaactggactggtgggggctccagcatgtggtgacgtaatgaaattacagattcaagtggatgaaaaggggaagattgtggatgctaggtttaaaacatttggctgtggttccgcaattgcctccagctcattagccactgaatgggtgaaaggaaagacggtggaggaagccttgactatcaaaaacacagatatcgccaaggagctctgccttcctcccgtgaaactgcactgctccatgctggctgaagatgcaatcaaggccgccctggctgattacaaattgaaacaagaacccaaaaaaggagaggcagagaagaaatgagccctccctcggcgaagcctccagcaggccacaccagctgtttcccacctgctgtgcagtcaccttagatgttcagaagccgcttcctctccactgaagagctatgagatacgcacaatacttgctgttcacgttatgactctcatgcaagcaaaatacacagtttcattgttctgaatcctgtggtttctttcagcccacttttatcgccttaacctagttaatgtatattttgaattgtgtgtatgacctcagaactgaaattgataatgaagttgcaagttttgatagcccgtgaagtgcataagtatctaattttacctgaattgatttggggggaaattaccagtagaatgccttggtctgaatatttgatagaaccaattgttgtacataaaacagattgcgcatatatatatatgtataaaaaataataaaataatggaagatga

SEQ ID NO: 144500 - DNA, 799 bp, Homo sapiens
  Payload ID: 8550
  Gene Symbol: ISCU
  Gene Name: iron-sulfur cluster assembly enzyme
  ENST ID: ENST00000431221
  CDS Start-End: 23-493
ggcgcaggcgcaagccggcaagatggcggcggctggggctttccgtctgaggcgggcggcatcggctctgctgctgcggagcccccgcctgcccgcccgggagctgtcggccccggcccgactctatcacaagaaggttgttgatcattatgaaaatcctagaaacgtggggtcccttgacaagacatctaaaaatgttggaactggactggtgggggctccagcatgtggtgacgtaatgaaattacagattcaagtggatgaaaaggggaagattgtggatgctaggtttaaaacatttggctgtggttccgcaattgcctccagctcattagccactgaatgggtgaaaggaaagacggtggaggaagccttgactatcaaaaacacagatatcgccaaggagctctgccttcctcccgtgaaactgcactgctccaggaaagaaggaatgagaaacattagccttaatgcatcgatggaggtttactaaccaaattagttaaaaatcagcagagagtcaggcctcttgccaagtgctggctgaagatgcaatcaaggccgccctggctgattacaaattgaaacaagaacccaaaaaaggagaggcagagaagaaatgagccctccctcggcgaagcctccagcaggccacaccagctgtttcccacctgctgtgcagtcaccttagatgttcagaagccgcttcctctccactgaagagctatgagatacgcacaatacttgctgttcacgttatgactctcatgcaagcaaaatacacagtttcattgttctg

SEQ ID NO: 144501 - DNA, 1169 bp, Homo sapiens
  Payload ID: 8550
  Gene Symbol: ISCU
  Gene Name: iron-sulfur cluster assembly enzyme
  ENST ID: ENST00000539580
  CDS Start-End: 18-158
aggcgcaagccggcaagatggcggcggctggggctttccgtctgaggcgggcggcatcggctctgctgctgcggagcccccgcctgcccgcccgggagctgtcggccccggcccgactctatcacaagaaggtatctcaaatctgtgaagtattgtagaggagacacaaaaggaattgggggtcacaaatggttctcattgacatgagtgtagacctttctactcaggttgttgatcattatgaaaatcctagaaacgtggggtcccttgacaagacatctaaaaatgttggaactggactggtgggggctccagcatgtggtgacgtaatgaaattacagattcaagtggatgaaaaggggaagattgtggatgctaggtttaaaacatttggctgtggttccgcaattgcctccagctcattagccactgaatgggtgaaaggaaagacggtggaggaagccttgactatcaaaaacacagatatcgccaaggagctctgccttcctcccgtgaaactgcactgctccaaatctgtgctgtttccagcagaggagaaaactcagctttcgccataatcctgtttcctgtgtatttcttcacttcctgtctggatggtattcctgtcgggtgctggctgaagatgcaatcaaggccgccctggctgattacaaattgaaacaagaacccaaaaaaggagaggcagagaagaaatgagccctccctcggcgaagcctccagcaggccacaccagctgtttcccacctgctgtgcagtcaccttagatgttcagaagccgcttcctctccactgaagagctatgagatacgcacaatacttgctgttcacgttatgactctcatgcaagcaaaatacacagtttcattgttctgaatcctgtggtttctttcagcccacttttatcgccttaacctagttaatgtatattttgaattgtgtgtatgacctcagaactgaaattgataatgaagttgcaagttttgatagcccgtgaagtgcataagtatctaattttacctgaattgatttggggggaaattaccagtagaatgccttggtctgaatatttgatagaaccaattgttgtacataaaacagattgcgcatatatatatatgtataaaaaataataaaataatggaagatga

SEQ ID NO: 144502 - DNA, 1071 bp, Homo sapiens
  Payload ID: 8550
  Gene Symbol: ISCU
  Gene Name: iron-sulfur cluster assembly enzyme
  ENST ID: ENST00000539593
  CDS Start-End: 14-478
gcaagccggcaagatggcggcggctggggctttccgtctgaggcgggcggcatcggctctgctgctgcggagcccccgcctgcccgcccgggagctgtcggccccggcccgactctatcacaagaaggttgttgatcattatgaaaatcctagaaacgtggggtcccttgacaagacatctaaaaatgttggaactggactggtgggggctccagcatgtggtgacgtaatgaaattacagattcaagtggatgaaaaggggaagattgtggatgctaggtttaaaacatttggctgtggttccgcaattgcctccagctcattagccactgaatgggtgaaaggaaagacggtggaggaagccttgactatcaaaaacacagatatcgccaaggagctctgccttcctcccgtgaaactgcactgctccagtaagtctctgctctccataccagtcagctgggacatttggcagtaatttcaacttggtttgcaacagtccttttagatcatggagcccacgtttgtaaccctcagaattagagctcatgagtctgtccttataacctgcagagggttagagcccccatggtctcacattcatccctaagagaatcatgccagaaggaggtatgcaccagccatcatactgagcacttcatgggcgtaatttctaaacctcacaaatatccttgagtgcacagtagatgtcattacttccctcttatggatgaggaagctaaggcttgggttgagacgcccacatcacatggctaataagtggaagagccagaatttaagctccaatctttgatttcagaatctgtgctgtttccagcagaggagaaaactcagctttcgccataatcctgtttcctgtgtatttcttcacttcctgtctggatggtattcctgtcggggtctgcatctgtatatatggaacaactaagcccagttgtacaatgtccccctccctgctatcctaaaaaaaagcccagatgccttaagacttgtacttggctttccagtttggtctctgtattaaatctaatgctttttccatcatttctt

SEQ ID NO: 144503 - DNA, 1330 bp, Homo sapiens
  Payload ID: 8550
  Gene Symbol: ISCU
  Gene Name: iron-sulfur cluster assembly enzyme
  ENST ID: ENST00000535729
  CDS Start-End: 23-487
ggcgcaggcgcaagccggcaagatggcggcggctggggctttccgtctgaggcgggcggcatcggctctgctgctgcggagcccccgcctgcccgcccgggagctgtcggccccggcccgactctatcacaagaaggttgttgatcattatgaaaatcctagaaacgtggggtcccttgacaagacatctaaaaatgttggaactggactggtgggggctccagcatgtggtgacgtaatgaaattacagattcaagtggatgaaaaggggaagattgtggatgctaggtttaaaacatttggctgtggttccgcaattgcctccagctcattagccactgaatgggtgaaaggaaagacggtggaggaagccttgactatcaaaaacacagatatcgccaaggagctctgccttcctcccgtgaaactgcactgctccaaatctgtgctgtttccagcagaggagaaaactcagctttcgccataatcctgtttcctgtgtatttcttcacttcctgtctggatggtattcctgtcggggtctgcatctgtatatatggaacaactaagcccagttgtacaatgtccccctccctgctatcctaaaaaaaagcccagatgccttaagacttgtacttggctttccagtttggtctctgtattaaatctaatgctttttccatcatttcttaaccttctcagggaaagaaggaatgagaaacattagccttaatgcatcgatggaggtttactaaccaaattagttaaaaatcagcagagagtcaggcctcttgccaaggtaatactcacagcagaagagccaggtgccggggcagacacactaactcattcttcaggaagcctggtcagacctaagttctttccacttgatctggaattttaagtacccataaagaaaggtcatcacttgtaaacattttcacatggtttcaggaaatccccagcccttttattaggcctttttaggtactgaaacctttagctgatgttctctgttatttgcttgctttctgctgtcattccagctctctcagtttttattttccccatagcctcactttgaatattgactcctaaataaaagtggtcaaactctcgatcactagagggtgatgtggcaaatgccatcccatcaacagattgacatgatcttttttccaaagggcatgtcaacttttttatcatgacaagattttgtccaaagctagactttgatgggagcaggcaagaagtaacatttcctgtgtccctactatgtgtcagacatcttctgtaagtccccacactatcctggcaagaaaagcatgat

SEQ ID NO: 144504 - DNA, 795 bp, Homo sapiens
  Payload ID: 8550
  Gene Symbol: ISCU
  Gene Name: iron-sulfur cluster assembly enzyme
  ENST ID: ENST00000547005
  CDS Start-End: 23-487
ggcgcaggcgcaagccggcaagatggcggcggctggggctttccgtctgaggcgggcggcatcggctctgctgctgcggagcccccgcctgcccgcccgggagctgtcggccccggcccgactctatcacaagaaggttgttgatcattatgaaaatcctagaaacgtggggtcccttgacaagacatctaaaaatgttggaactggactggtgggggctccagcatgtggtgacgtaatgaaattacagattcaagtggatgaaaaggggaagattgtggatgctaggtttaaaacatttggctgtggttccgcaattgcctccagctcattagccactgaatgggtgaaaggaaagacggtggaggaagccttgactatcaaaaacacagatatcgccaaggagctctgccttcctcccgtgaaactgcactgctccaaatctgtgctgtttccagcagaggagaaaactcagctttcgccataatcctgtttcctgtgtatttcttcacttcctgtctggatgtgctggctgaagatgcaatcaaggccgccctggctgattacaaattgaaacaagaacccaaaaaaggagaggcagagaagaaatgagccctccctcggcgaagcctccagcaggccacaccagctgtttcccacctgctgtgcagtcaccttagatgttcagaagccgcttcctctccactgaagagctatgagatacgcacaatacttgctgttcacgttatgactctcatgcaagcaaaatacacagtttcattgttctgaatcctg

SEQ ID NO: 144505 - DNA, 1858 bp, Homo sapiens
  Payload ID: 8551
  Gene Symbol: IRX1
  Gene Name: iroquois homeobox 1
  Uniprot ID: P78414
  ENST ID: ENST00000302006
  CDS Start-End: 53-1495
ctccccgcgcctttaatactcgcccgctgcggcggtcgccgagtccgcggacatgtccttcccgcagctgggctacccgcagtacctgagcgccgcggggccgggcgcctacggcggcgagcgcccgggggtgctggccgcggccgctgcggcggctgccgccgcctcgtcgggccgaccgggggccgcggagctgggcggcggggcaggcgcggctgcagtcacctcggtgctgggcatgtacgcggcggcggggccgtacgcgggcgcgcccaactacagcgccttcctgccctacgccgcggatctcagcctcttctcgcagatgggctcgcagtatgaactgaaggacaaccctggggtgcaccccgccaccttcgcagcccacacggcgccggcttattacccctacggccagttccaatacggggaccccgggcggcccaagaacgccacccgcgagagcaccagcacgctcaaggcctggctcaacgagcaccgcaagaatccctaccccaccaagggcgagaagatcatgctggccatcatcaccaagatgaccctcacgcaggtctccacctggttcgccaacgcgcgccggcgcctcaagaaggagaacaaggtgacatggggagcgcgcagcaaggaccaggaagatggagcgctcttcggcagcgacaccgagggcgacccggagaaggccgaggacgacgaggagatcgacctggaaagcatcgacattgacaagatcgacgagcacgatggcgaccagagcaacgaggatgacgaggacaaggccgaggctccgcacgcgcccgcagccccttctgctcttgcccgggaccaaggctcgccgctggcagcagccgacgttctcaagccccaggactcgcccttgggcctggcaaaggaggccccagagccgggcagcacgcgcctgctgagccccggcgctgcagcgggcggcctgcagggtgcgccgcacggcaagcccaagatctggtcgctggcggagacagccacgagccccgacggtgcgcccaaggcttcgccaccaccacccgcgggccaccccggcgcgcacgggccctccgccggggcgccgctgcaacaccccgccttcctgcctagccacggactgtacacctgccacatcggcaagttctccaactggaccaacagcgcattcctcgcacagggctccctgctcaacatgcgctccttcctgggcgttggcgctccccacgccgcgccccatggccctcaccttcctgcacctccaccaccgcagccgccggtcgctattgccccgggggcactcaatggagacaaggcctcggtccgcagcagccccacgctcccagagagagacctcgtccccaggccagattcgccggcacagcagttaaagtcgcccttccagccggtacgcgacaactctctggccccgcaggagggaacgccgcggatcctagcagccctcccgtccgcctgattaagggtcttcttttacttttgcgggggggaggggggaggagttggggagggagggaatgtgggaggaattaagacaaatatttcagactggtgtaaaggacaaatatgacaacgacgtcaaggactcgcatccgtcgctttctgcagaaaggggcttcttcggtcccgagctcgcgtccaggtggccaggcctctgccggcggctccagtggctgcgattatcgggttcggtaaatgcccccacgtgcttgtgtctctttccccccttttctgtatatagagtggtttcagattgtaaatagcgcgtcagcgaacttgtctaaatcatatatttttgtctaataaactaaatgaaatgaca

SEQ ID NO: 144506 - DNA, 2456 bp, Homo sapiens
  Payload ID: 8552
  Gene Symbol: IRX2
  Gene Name: iroquois homeobox 2
  Uniprot ID: Q9BZI1
  ENST ID: ENST00000302057
  CDS Start-End: 243-1658
aaaccccgaccgccggcctggcgcgcggctgcgcccaccggctccgcgctgctgccgccgccaccgccaccccgccgccgccccggcccgcgggccgcccaggctagtacccgggccggcctgcctccgccggccgtccgggtgcccgccgccgcgccgcgccccggccgggcgtggatggagggcgccgcgcgccctgcccgctgctcggcgtgacgcgggccccgcgccccgcgcccaccatgtcctacccgcagggctacctgtaccaggcgcccggctcgctggcgctctactcgtgcccggcctacggcgcgtcggctttggcggctccgcgcagcgaggagctggcgcgctcggcgtcgggctcggcgttcagcccctacccgggctcggcggccttcacggcgcaggcggccaccggcttcgggagcccgctgcagtactcggccgacgccgccgccgccgccgccggcttcccgtcctacatgggcgcaccctacgacgcgcacaccaccggcatgaccggcgccatcagctaccacccgtacggcagcgcggcctacccgtaccagctcaacgaccccgcgtaccgcaagaacgccacgcgggacgccacggccactctcaaggcctggctcaacgagcaccgcaagaacccctaccccaccaagggcgagaagatcatgctagccatcatcaccaagatgaccctcacccaggtctccacctggttcgccaacgcgcgccggcgcctcaagaaggagaacaagatgacctgggccccgagaaacaaaagcgaagatgaggacgaggacgagggcgacgctaccagaagcaaggacgagagtcccgacaaggcgcaggagggcacggagacctcggcagaggacgaagggatcagcctgcacgtggactcgctcacggatcactcgtgctcggccgagtcggacggggagaagcttccgtgccgcgccggggaccccctgtgcgaatcgggctcggagtgcaaggacaagtatgacgacctggaggacgacgaggacgacgacgaggagggcgagcggggcctggcgccgcccaagcccgtgacctcgtcgccgcttaccggcttggaggcgccgctgctgagccccccgcccgaggccgcgccccgcggtggccgcaagacgccccagggcagccggacgtctccgggcgcgccgccccccgccagcaagcccaagctgtggtcgctggccgagatcgccacgtcggacctcaagcagccgagcctgggcccgggctgcgggccaccggggctgcccgcggccgccgcgccggcctcaaccggggcaccgccaggaggctcgccctaccctgcctcgccgctgctgggccgccccctctactacacgtcgcccttctacggcaactacacaaactacgggaacttgaacgcggcgctgcagggccagggtctcctgcggtacaactctgcggccgcggcccccggcgaggccctgcacaccgcgccaaaggcggccagcgacgcgggcaaggcgggcgcgcacccgctcgagtcccactaccggtccccgggcggcggctacgagcccaagaaagatgccagcgagggctgcaccgtggttggcgggggcgtccagccctacctatagaagggccgagcacagcaatgcaagtaagtgggcaccctggtgcttcccagaccctgtggagcctcccagcaccaacttgcttaatgtgtttttcttgcttctggtcatggggttagaagacagagcatttcaatcttgtccagcttttctttccttaagggggaaactatattttctgttttatagattccctctttttggcacaagttctatcactcctttacctagggaaggaaaaaaaaaatatatatatatatgtgtgtgtgtgtgtgtgtaatatatatatgtatatatatagtacatgtatatatatagtacatgtgtatatatatattacacactactgttgttttcttttgaaacaatagattattaaaatctgggcatttatatgcaatttagagccatttttactatgctagacacataatagacacatgctttgatgagcttgggctaccaaaacttggagtagcaaaaacctttatagatgatgtttgcaaaataagactgaagagacacgaggcgtactagtcttttatcagccctgtccaacctcccctccacccatgtccaagtggacaggactctgacattctcccggggctcacaacagtatctcaaaaaatatgttgctttgcaacgagtcagaattactaatcatagatcttgaagataagaaagatttggaaccacttcagatcaactcgtttttataatggtgttgttgtggaactgaaagattggggatgatttggttttttccttggtccacaggtaggtgtcacaattgctttg

SEQ ID NO: 144507 - DNA, 2630 bp, Homo sapiens
  Payload ID: 8552
  Gene Symbol: IRX2
  Gene Name: iroquois homeobox 2
  Uniprot ID: Q9BZI1
  ENST ID: ENST00000382611
  CDS Start-End: 250-1665
ctcccccaaaccccgaccgccggcctggcgcgcggctgcgcccaccggctccgcgctgctgccgccgccaccgccaccccgccgccgccccggcccgcgggccgcccaggctagtacccgggccggcctgcctccgccggccgtccgggtgcccgccgccgcgccgcgccccggccgggcgtggatggagggcgccgcgcgccctgcccgctgctcggcgtgacgcgggccccgcgccccgcgcccaccatgtcctacccgcagggctacctgtaccaggcgcccggctcgctggcgctctactcgtgcccggcctacggcgcgtcggctttggcggctccgcgcagcgaggagctggcgcgctcggcgtcgggctcggcgttcagcccctacccgggctcggcggccttcacggcgcaggcggccaccggcttcgggagcccgctgcagtactcggccgacgccgccgccgccgccgccggcttcccgtcctacatgggcgcaccctacgacgcgcacaccaccggcatgaccggcgccatcagctaccacccgtacggcagcgcggcctacccgtaccagctcaacgaccccgcgtaccgcaagaacgccacgcgggacgccacggccactctcaaggcctggctcaacgagcaccgcaagaacccctaccccaccaagggcgagaagatcatgctagccatcatcaccaagatgaccctcacccaggtctccacctggttcgccaacgcgcgccggcgcctcaagaaggagaacaagatgacctgggccccgagaaacaaaagcgaagatgaggacgaggacgagggcgacgctaccagaagcaaggacgagagtcccgacaaggcgcaggagggcacggagacctcggcagaggacgaagggatcagcctgcacgtggactcgctcacggatcactcgtgctcggccgagtcggacggggagaagcttccgtgccgcgccggggaccccctgtgcgaatcgggctcggagtgcaaggacaagtatgacgacctggaggacgacgaggacgacgacgaggagggcgagcggggcctggcgccgcccaagcccgtgacctcgtcgccgcttaccggcttggaggcgccgctgctgagccccccgcccgaggccgcgccccgcggtggccgcaagacgccccagggcagccggacgtctccgggcgcgccgccccccgccagcaagcccaagctgtggtcgctggccgagatcgccacgtcggacctcaagcagccgagcctgggcccgggctgcgggccaccggggctgcccgcggccgccgcgccggcctcaaccggggcaccgccaggaggctcgccctaccctgcctcgccgctgctgggccgccccctctactacacgtcgcccttctacggcaactacacaaactacgggaacttgaacgcggcgctgcagggccagggtctcctgcggtacaactctgcggccgcggcccccggcgaggccctgcacaccgcgccaaaggcggccagcgacgcgggcaaggcgggcgcgcacccgctcgagtcccactaccggtccccgggcggcggctacgagcccaagaaagatgccagcgagggctgcaccgtggttggcgggggcgtccagccctacctatagaagggccgagcacagcaatgcaagtaggtgtcacaattgctttgaaaaaaaaaaaaaaaaaaaagtcagcaggccattctctcttcccaagctcataaatttacagatacaacaaacagatgtctaaatccagaccacatcttgtgccactgtaaaagagaaggatccacacagcactgtcagcccacagactctaacaattggaacagactattgttggacatatgtgaatttgttggcatagtatagtttccccgatgtatgtgtgacttttgaaaacaatctgtttttctcaggatatcttgaattgatcacttcattgccacggtatatattctataggtgtgataggatttactgtaaagtttatttgtaaaagatgtacacagtagaaataaaacgtgatggaagaacttgagtacttcagaagtggaaacaaatttgatatttatttttataatgatataaagcttctagtaatttatgcaagttgtattgcaatggaatctaaactttttgtaaataaattctgcctggtttttatttgaacattgctggttatacaatctttgttggttgtttaacacgaattctttactaatttatatcttaaattgtaaataaaaacagactagtctacaataatatgatgtttggggcttatttttcctagaagaatgatttggggtagagcgctagtgaataacctccaggtgatctgacctcacctttttaatgaaaacctgtgtgaaataaactctcctttctctcctgagcattgaaaaaaaaaaaaaaaggcagatggaagagaagtatataatcgggagaaacatgtgctgtagatgatttctatacaggtattgcaaaaaaaccaaaaaacataagatttttgtgccctgagtgtgctaattacttgttagtgtaaatttttaaaacttggcaaaataaaatgatctgacacccta

SEQ ID NO: 144508 - DNA, 2601 bp, Homo sapiens
  Payload ID: 8553
  Gene Symbol: IRX3
  Gene Name: iroquois homeobox 3
  Uniprot ID: P78415
  ENST ID: ENST00000329734
  CDS Start-End: 714-2219
cgcgcggcaccctaagtgtccacaacttttggctgccttacttagcccagggcgcagaggctggaaaggtcgcggggagtatcgtgtgagtaaagagagagatttacaaaatagaagtagtgagaaaggaagaagtgaagggaacggaccggagagcaaaagccctcgtgagaaagggaaagagaaggggagaggagaaaggagagtttcatagcgtccagggcagtgcaggagcccgaagcagcggaagcgatcctggggggaagaggagtgcggagaggggaggggagaggaagggcgaggagggggagtgaaaactagaggagggcgaaggaagcgaggcgcgacactgctggggagaggagggcagtgaggagcgaggagcgggcagaggcagctccggcggccgagaggagggagcgcggcgcagagaggaggggcttgcgccccgtagaaatgtcaatcagagcccggagccccgggaatctccgccaatctgttcggacctgacctggctcctcgccgccgccctcgccgccgccgtcgccgccgcggagcagatcaataggcgaacgcggagcacagcgcagcgcgggcggcagcgcggccccaagcccggcccagcccccgatgcgcgccggagcccgcgggcggcgctgagctgggcggcccgggggtcggcccccctctccgtccgtgccccgcgggccaccatgtccttcccccagctgggataccaatacatccgcccgctttacccgtccgagcgcccgggggccgctggcggcagcggcggcagcgcgggggcccggggcggcctgggtgccggagcctcggagctgaacgcctcggggtccctgtccaacgtgctctcgtccgtgtacggggcgccctacgccgcggccgctgcggccgccgccgcccaaggctacggcgccttcctgccctacgccgcggagctgcccatcttcccgcagctgggcgcgcagtatgagctgaaggacagccccggggtgcagcatccggccgcggctgccgcgtttccgcacccgcaccccgccttctacccgtatggccagtaccagttcggggacccgtcccgtcccaagaacgccaccagggagagcaccagcacgctgaaggcctggctcaacgagcaccgcaagaacccctaccccaccaagggcgagaagatcatgctggccatcatcaccaagatgaccctcacccaggtgtccacctggttcgccaacgcgcgccggcgcctcaagaaggagaataagatgacttgggcgcctcgcagccgcactgacgaggagggaaacgcttatgggagcgagcgcgaggaggaagacgaagaggaggacgaggaggacggcaaacgcgagctagagctggaggaggaggagctcgggggggaggaggaggacacggggggcgagggcctggctgacgacgacgaggacgaggagatcgatttggagaacttagacggcgcggccaccgagcctgagctgtccctggctggggcggcgcgcagggatggcgacctaggcctgggacccatttcggactccaaaaatagcgactcggaagatagctctgagggcttagaggaccggccactaccggtcctgagtctggctccagcgccaccaccagtggccgtggcctcgccgtctctgccgtcgccccccgtgagcctggacccctgcgctcccgcaccagcccccgcctccgccctgcagaagcccaagatctggtccctcgcggagactgccacaagcccggacaacccgcgccgctcgcctcccggcgcgggggggtctccaccgggggcagcggtcgcgccttccgccctgcagctctctccggccgccgccgccgccgccgctcacagactggtctcagcgccgctgggcaagttcccggcttggaccaaccggccgtttccaggcccaccgcccggcccccgcctgcacccgctctccctgctgggctctgcccctccgcacctgctgggacttcccggagccgcgggccacccggctgccgccgccgccttcgctcggccagcggagcccgaaggcggaacagatcgctgtagtgccttggaagtggagaaaaagttactcaagacagctttccagcccgtgcccaggcggccccagaaccatctggacgccgccctggtcttatcggctctctcctcatcctagttctttaaaaaaaacaaaaaaacaaaaaaaactttttttaatcgttgtaataattgtataaaaaaaatcgctctgtatagttacaacttgtaagcatgtccgtgtataaatacctaaaagcaaaactaaacaaagaaagtaagaaaaagaaataaaaccagtcctcctcagccctccccaagtcgcttctgtggcaccccgcattcgctgtgaggtttgtttgtccggttgattttggggggtggagtttcagtgagaataaacgtgtctgcctttgtgtgtgtgtatatatacagagaaatgtacatatgtgtgaaccaaattgtacgagaaagtatctatttttggctaaataaatgagctgctgccactttgactataa

SEQ ID NO: 144509 - DNA, 444 bp, Homo sapiens
  Payload ID: 8553
  Gene Symbol: IRX3
  Gene Name: iroquois homeobox 3
  ENST ID: ENST00000558054
  CDS Start-End: 1-255
gcggccgccgccgcccaaggctacggcgccttcctgccctacgccgcggagctgcccatcttcccgcagctgatcgctgtagtgccttggaagtggagaaaaagttactcaagacagctttccagcccgtgcccaggcggccccagaaccatctggacgccgccctggtcttatcggctctctcctcatcctagttctttaaaaaaaacaaaaaaacaaaaaaaactttttttaatcgttgtaataattgtataaaaaaaatcgctctgtatagttacaacttgtaagcatgtccgtgtataaatacctaaaagcaaaactaaacaaagaaagtaagaaaaagaaataaaaccagtcctcctcagccctccccaagtcgcttctgtggcaccccgcattcgctgtgaggtttgtttgtccggttgattttggggggtggagttt

SEQ ID NO: 144510 - DNA, 2221 bp, Homo sapiens
  Payload ID: 8554
  Gene Symbol: IRX4
  Gene Name: iroquois homeobox 4
  Uniprot ID: P78413
  ENST ID: ENST00000231357
  CDS Start-End: 120-1679
tcctgcttcgccctcccagcgcctagaagcctgcagctccggagcagtggccgcgccacgccggccccagcgcgcagaaccctgcaggccccgcccgtccgccccgggccgcgcccgccatgtcctacccgcagtttggatacccctactcctcggctccccagttcttgatggccaccaactccctgagcacgtgctgcgagtccggaggccgcacgctggcggactccgggcccgccgcctcggcccaggcgccggtctactgcccggtctacgagagccggctgctggccaccgcgcgccacgagctcaactcggccgcggcgctgggcgtctatgggggtccctatggcggatcgcagggctatggcaactacgtgacctacggctcggaggcgtccgccttctactcgctgaacagctttgattccaaggatggttcgggatctgcgcatgggggcctggcaccagccgctgccgcctactacccttacgagccagctctgggccagtacccctatgacaggtatggaaccatggacagcggcacgcggcgcaagaacgccacgcgcgagaccaccagcacgctcaaggcctggctgcaggagcaccgcaagaacccctaccccaccaagggcgagaagatcatgctggccatcatcaccaagatgaccctcacacaggtctccacctggttcgccaacgcgcgccggcgcctcaagaaggagaacaagatgacgtggccgccgcggaacaagtgcgcagacgagaagcggccctacgcggagggcgaggaggaggaggggggcgaggaggaggcgcgggaggagcccctcaagagctccaagaacgcagagcccgtgggcaaagaggagaaggagctggagcttagtgacttggacgacttcgacccgctggaagcagagccgccggcgtgcgagctgaagccgcccttccactccctggacggcggtctggagcgcgtccccgccgcgcccgacggcccggtcaaggaggcctcaggcgcgctccggatgtctctggccgcgggtggcggagctgctctggacgaggacctggagagggcccggagctgtctccgcagcgcggcggccgggccggagccactgccgggcgcagagggcggccctcaggtctgcgaggccaagctggggtttgtgccggcgggggcgtcggcaggcctggaggctaagccgcgcatctggtccctggcccacacagccaccgccgccgccgccgccgccacctccctgagccagactgagtttccgtcgtgcatgctcaagcgccaaggtcccgcggcccctgcggctgtgtcctccgcgcccgccacgtccccgtctgtggcccttccccactctggcgccctggacaggcaccaggactccccggtaaccagtctcagaaactgggtggacggggtcttccacgaccccatcctcaggcacagcactttgaaccaggcctgggccaccgccaagggcgccctcctggaccccgggcctctgggacgctcgctgggggcgggcgcgaacgtgctgactgcacccctggcccgcgcctttccgcctgccgtgccccaggacgccccagctgcaggcgccgccagggagctgctcgccctgcccaaggccggcggcaaacccttctgcgcctgaggcgggcgggtcccgagcccaggagggaacccgcgctcaggcggacggcgccgactcttttcactgagtttccagaggaagactagcgcggccaccgcgaagccgccaacccaccggagagggggcttctgaacttggactcctgggaacatggacaagcccggcgctgccacgccggggcctccaccgcctgggcctgagcctgaccgggccattcccaaatttgggacgcggaaggagaggctctcggagcagaagaggccagataccctgaagcataaagtttacgtcaaaagtttacatggagaaggcggttccgttctgaagcgtggtctgctgtcccctgggcgtgaggcctcctgggcctgtcgggcctccgatttcatcctcagcacgtaatgctcaccaacagcacttgcactgagttgactcttgcacactcttgactccataatatgatgctttttaagatgtatgttcacaccaataattgcctgcttcagaggctaatataacaaaaccaataaaaccgagtgatggtg

SEQ ID NO: 144511 - DNA, 745 bp, Homo sapiens
  Payload ID: 8554
  Gene Symbol: IRX4
  Gene Name: iroquois homeobox 4
  ENST ID: ENST00000511126
  CDS Start-End: 98-745
ctagaagcctgcagctccggagcagtggccgcgccacgccggccccagcgcgcagaaccctgcaggccccgcccgtccgccccgggccgcgcccgccatgtcctacccgcagtttggatacccctactcctcggctccccagttcttgatggccaccaactccctgagcacgtgctgcgagtccggaggccgcacgctggcggactccgggcccgccgcctcggcccaggcgccggtctactgcccggtctacgagagccggctgctggccaccgcgcgccacgagctcaactcggccgcggcgctgggcgtctatgggggtccctatggcggatcgcagggctatggcaactacgtgacctacggctcggaggcgtccgccttctactcgctgaacagctttgattccaaggatggttcgggatctgcgcatgggggcctggcaccagccgctgccgcctactacccttacgagccagctctgggccagtacccctatgacaggatcaaacggctaggcggtcatccccataaaggaattggcctggacctctctggcttgggaaggagcccaggctccctgtatggaaccatggacagcggcacgcggcgcaagaacgccacgcgcgagaccaccagcacgctcaaggcctggctgcaggagcaccgcaagaacccctaccccaccaagggcgagaagatcatgctggccatcatcaccaagatgaccctcacacaggtctcc

SEQ ID NO: 144512 - DNA, 1858 bp, Homo sapiens
  Payload ID: 8554
  Gene Symbol: IRX4
  Gene Name: iroquois homeobox 4
  ENST ID: ENST00000508261
  CDS Start-End: 106-696
cccagcgcctagaagcctgcagctccggagcagtggccgcgccacgccggccccagcgcgcagaaccctgcaggccccgcccgtccgccccgggccgcgcccgccatgtcctacccgcagtttggatacccctactcctcggctccccagttcttgatggccaccaactccctgagcacgtgctgcgagtccggaggccgcacgctggcggactccgggcccgccgcctcggcccaggcgccggtctactgcccggtctacgagagccggctgctggccaccgcgcgccacgagctcaactcggccgcggcgctgggcgtctatgggggtccctatggcggatcgcagggctatggcaactacgtgacctacggctcggaggcgtccgccttctactcgctgaacagctttgattccaaggatggttcgggatctgcgcatgggggcctggcaccagccgctgccgcctactacccttacgagccagctctgggccagtacccctatgacagagggcccagcctgagcccattgcagagcctgtctccaggtatggaaccatggacagcggcacgcggcgcaagaacgccacgcgcgagaccaccagcacgctcaaggcctggctgcaggagcaccgcaagaacccctaccccaccaagggcgagaagatcatgctggccatcatcaccaagatgaccctcacacaggtctccacctggttcgccaacgcgcgccggcgcctcaagaaggagaacaagatgacgtggccgccgcggaacaagtgcgcagacgagaagcggccctacgcggagggcgaggaggaggaggggggcgaggaggaggcgcgggaggagcccctcaagagctccaagaacgcagagcccgtgggcaaagaggagaaggagctggagcttagtgacttggacgacttcgacccgctggaagcagagccgccggcgtgcgagctgaagccgcccttccactccctggacggcggtctggagcgcgtccccgccgcgcccgacggcccggtcaaggaggcctcaggcgcgctccggatgtctctggccgcgggtggcggagctgctctggacgaggacctggagagggcccggagctgtctccgcagcgcggcggccgggccggagccactgccgggcgcagagggcggccctcaggtctgcgaggccaagctggggtttgtgccggcgggggcgtcggcaggcctggaggctaagccgcgcatctggtccctggcccacacagccaccgccgccgccgccgccgccacctccctgagccagactgagtttccgtcgtgcatgctcaagcgccaaggtcccgcggcccctgcggctgtgtcctccgcgcccgccacgtccccgtctgtggcccttccccactctggcgccctggacaggcaccaggactccccggtaaccagtctcagaaactgggtggacggggtcttccacgaccccatcctcaggcacagcactttgaaccaggcctgggccaccgccaagggcgccctcctggaccccgggcctctgggacgctcgctgggggcgggcgcgaacgtgctgactgcacccctggcccgcgcctttccgcctgccgtgccccaggacgccccagctgcaggcgccgccagggagctgctcgccctgcccaaggccggcggcaaacccttctgcgcctgaggcgggcgggtcccgagcccaggagggaacccgcgctcaggcggacggcgccgactcttttcactgagtttccagaggaagactagcgcggccaccgcgaagccgccaacccaccggagagggggcttctgaacttggactcctgggaacatgga

SEQ ID NO: 144513 - DNA, 2538 bp, Homo sapiens
  Payload ID: 8554
  Gene Symbol: IRX4
  Gene Name: iroquois homeobox 4
  Uniprot ID: P78413
  ENST ID: ENST00000505790
  CDS Start-End: 458-2017
gaccgcggcgcctggggacgccggcgcgctccgctcgccaggtgctccgcctggaaatgtctccattagttgtcgccggctccccgctggagcgcgcgcgccgagcttccgcgcggagccctcgcgggctgccgggagcggcccagcgccaccgcaggtaggtgaggtcccccgctcccgcccccgccccggggttccgagacccctccccccttccgaggaggcggaggctccgcgcggccgccgaggggagcgggcggcggcggctgcggcgactccccggtgcgtcccgggctgcgagctgctccccgcggccccggcagccacacggcgcgggcgggagcttccccagctcagcgcctagaagcctgcagctccggagcagtggccgcgccacgccggccccagcgcgcagaaccctgcaggccccgcccgtccgccccgggccgcgcccgccatgtcctacccgcagtttggatacccctactcctcggctccccagttcttgatggccaccaactccctgagcacgtgctgcgagtccggaggccgcacgctggcggactccgggcccgccgcctcggcccaggcgccggtctactgcccggtctacgagagccggctgctggccaccgcgcgccacgagctcaactcggccgcggcgctgggcgtctatgggggtccctatggcggatcgcagggctatggcaactacgtgacctacggctcggaggcgtccgccttctactcgctgaacagctttgattccaaggatggttcgggatctgcgcatgggggcctggcaccagccgctgccgcctactacccttacgagccagctctgggccagtacccctatgacaggtatggaaccatggacagcggcacgcggcgcaagaacgccacgcgcgagaccaccagcacgctcaaggcctggctgcaggagcaccgcaagaacccctaccccaccaagggcgagaagatcatgctggccatcatcaccaagatgaccctcacacaggtctccacctggttcgccaacgcgcgccggcgcctcaagaaggagaacaagatgacgtggccgccgcggaacaagtgcgcagacgagaagcggccctacgcggagggcgaggaggaggaggggggcgaggaggaggcgcgggaggagcccctcaagagctccaagaacgcagagcccgtgggcaaagaggagaaggagctggagcttagtgacttggacgacttcgacccgctggaagcagagccgccggcgtgcgagctgaagccgcccttccactccctggacggcggtctggagcgcgtccccgccgcgcccgacggcccggtcaaggaggcctcaggcgcgctccggatgtctctggccgcgggtggcggagctgctctggacgaggacctggagagggcccggagctgtctccgcagcgcggcggccgggccggagccactgccgggcgcagagggcggccctcaggtctgcgaggccaagctggggtttgtgccggcgggggcgtcggcaggcctggaggctaagccgcgcatctggtccctggcccacacagccaccgccgccgccgccgccgccacctccctgagccagactgagtttccgtcgtgcatgctcaagcgccaaggtcccgcggcccctgcggctgtgtcctccgcgcccgccacgtccccgtctgtggcccttccccactctggcgccctggacaggcaccaggactccccggtaaccagtctcagaaactgggtggacggggtcttccacgaccccatcctcaggcacagcactttgaaccaggcctgggccaccgccaagggcgccctcctggaccccgggcctctgggacgctcgctgggggcgggcgcgaacgtgctgactgcacccctggcccgcgcctttccgcctgccgtgccccaggacgccccagctgcaggcgccgccagggagctgctcgccctgcccaaggccggcggcaaacccttctgcgcctgaggcgggcgggtcccgagcccaggagggaacccgcgctcaggcggacggcgccgactcttttcactgagtttccagaggaagactagcgcggccaccgcgaagccgccaacccaccggagagggggcttctgaacttggactcctgggaacatggacaagcccggcgctgccacgccggggcctccaccgcctgggcctgagcctgaccgggccattcccaaatttgggacgcggaaggagaggctctcggagcagaagaggccagataccctgaagcataaagtttacgtcaaaagtttacatggagaaggcggttccgttctgaagcgtggtctgctgtcccctgggcgtgaggcctcctgggcctgtcgggcctccgatttcatcctcagcacgtaatgctcaccaacagcacttgcactgagttgactcttgcacactcttgactccataatatgatgctttttaagatgtatgttcacaccaataattgcctgcttcagaggctaatataacaaaac

SEQ ID NO: 144514 - DNA, 2391 bp, Homo sapiens
  Payload ID: 8554
  Gene Symbol: IRX4
  Gene Name: iroquois homeobox 4
  Uniprot ID: P78413
  ENST ID: ENST00000513692
  CDS Start-End: 276-1835
ggtgcgggctcggctgacgaccgcggcgcctggggacgccggcgcgctccgctcgccaggtgctccgcctggaaatgtctccattagttgtcgccggctccccgctggagcgcgcgcgccgagcttccgcgcggagccctcgcgggctgccgggagcggcccagcgccaccgcagcgcctagaagcctgcagctccggagcagtggccgcgccacgccggccccagcgcgcagaaccctgcaggccccgcccgtccgccccgggccgcgcccgccatgtcctacccgcagtttggatacccctactcctcggctccccagttcttgatggccaccaactccctgagcacgtgctgcgagtccggaggccgcacgctggcggactccgggcccgccgcctcggcccaggcgccggtctactgcccggtctacgagagccggctgctggccaccgcgcgccacgagctcaactcggccgcggcgctgggcgtctatgggggtccctatggcggatcgcagggctatggcaactacgtgacctacggctcggaggcgtccgccttctactcgctgaacagctttgattccaaggatggttcgggatctgcgcatgggggcctggcaccagccgctgccgcctactacccttacgagccagctctgggccagtacccctatgacaggtatggaaccatggacagcggcacgcggcgcaagaacgccacgcgcgagaccaccagcacgctcaaggcctggctgcaggagcaccgcaagaacccctaccccaccaagggcgagaagatcatgctggccatcatcaccaagatgaccctcacacaggtctccacctggttcgccaacgcgcgccggcgcctcaagaaggagaacaagatgacgtggccgccgcggaacaagtgcgcagacgagaagcggccctacgcggagggcgaggaggaggaggggggcgaggaggaggcgcgggaggagcccctcaagagctccaagaacgcagagcccgtgggcaaagaggagaaggagctggagcttagtgacttggacgacttcgacccgctggaagcagagccgccggcgtgcgagctgaagccgcccttccactccctggacggcggtctggagcgcgtccccgccgcgcccgacggcccggtcaaggaggcctcaggcgcgctccggatgtctctggccgcgggtggcggagctgctctggacgaggacctggagagggcccggagctgtctccgcagcgcggcggccgggccggagccactgccgggcgcagagggcggccctcaggtctgcgaggccaagctggggtttgtgccggcgggggcgtcggcaggcctggaggctaagccgcgcatctggtccctggcccacacagccaccgccgccgccgccgccgccacctccctgagccagactgagtttccgtcgtgcatgctcaagcgccaaggtcccgcggcccctgcggctgtgtcctccgcgcccgccacgtccccgtctgtggcccttccccactctggcgccctggacaggcaccaggactccccggtaaccagtctcagaaactgggtggacggggtcttccacgaccccatcctcaggcacagcactttgaaccaggcctgggccaccgccaagggcgccctcctggaccccgggcctctgggacgctcgctgggggcgggcgcgaacgtgctgactgcacccctggcccgcgcctttccgcctgccgtgccccaggacgccccagctgcaggcgccgccagggagctgctcgccctgcccaaggccggcggcaaacccttctgcgcctgaggcgggcgggtcccgagcccaggagggaacccgcgctcaggcggacggcgccgactcttttcactgagtttccagaggaagactagcgcggccaccgcgaagccgccaacccaccggagagggggcttctgaacttggactcctgggaacatggacaagcccggcgctgccacgccggggcctccaccgcctgggcctgagcctgaccgggccattcccaaatttgggacgcggaaggagaggctctcggagcagaagaggccagataccctgaagcataaagtttacgtcaaaagtttacatggagaaggcggttccgttctgaagcgtggtctgctgtcccctgggcgtgaggcctcctgggcctgtcgggcctccgatttcatcctcagcacgtaatgctcaccaacagcacttgcactgagttgactcttgcacactcttgactccataatatgatgctttttaagatgtatgttcacaccaataattgcctgcttcagaggctaatataacaaaaccaataaaaccgagtgatggtgtttgtattgcaaaa

SEQ ID NO: 144515 - DNA, 2398 bp, Homo sapiens
  Payload ID: 8554
  Gene Symbol: IRX4
  Gene Name: iroquois homeobox 4
  Uniprot ID: P78413
  ENST ID: ENST00000622814
  CDS Start-End: 219-1856
aggtgctccgcctggaaatgtctccattagttgtcgccggctccccgctggagcgcgcgcgccgagcttccgcgcggagccctcgcgggctgccgggagcggcccagcgccaccgcagcgcctagaagcctgcagctccggagcagtggccgcgccacgccggccccagcgcgcagaaccctgcaggccccgcccgtccgccccgggccgcgcccgccatgtcctacccgcagtttggatacccctactcctcggctccccagttcttgatggccaccaactccctgagcacgtgctgcgagtccggaggccgcacgctggcggactccgggcccgccgcctcggcccaggcgccggtctactgcccggtctacgagagccggctgctggccaccgcgcgccacgagctcaactcggccgcggcgctgggcgtctatgggggtccctatggcggatcgcagggctatggcaactacgtgacctacggctcggaggcgtccgccttctactcgctgaacagctttgattccaaggatggttcgggatctgcgcatgggggcctggcaccagccgctgccgcctactacccttacgagccagctctgggccagtacccctatgacaggatcaaacggctaggcggtcatccccataaaggaattggcctggacctctctggcttgggaaggagcccaggctccctgtatggaaccatggacagcggcacgcggcgcaagaacgccacgcgcgagaccaccagcacgctcaaggcctggctgcaggagcaccgcaagaacccctaccccaccaagggcgagaagatcatgctggccatcatcaccaagatgaccctcacacaggtctccacctggttcgccaacgcgcgccggcgcctcaagaaggagaacaagatgacgtggccgccgcggaacaagtgcgcagacgagaagcggccctacgcggagggcgaggaggaggaggggggcgaggaggaggcgcgggaggagcccctcaagagctccaagaacgcagagcccgtgggcaaagaggagaaggagctggagcttagtgacttggacgacttcgacccgctggaagcagagccgccggcgtgcgagctgaagccgcccttccactccctggacggcggtctggagcgcgtccccgccgcgcccgacggcccggtcaaggaggcctcaggcgcgctccggatgtctctggccgcgggtggcggagctgctctggacgaggacctggagagggcccggagctgtctccgcagcgcggcggccgggccggagccactgccgggcgcagagggcggccctcaggtctgcgaggccaagctggggtttgtgccggcgggggcgtcggcaggcctggaggctaagccgcgcatctggtccctggcccacacagccaccgccgccgccgccgccgccacctccctgagccagactgagtttccgtcgtgcatgctcaagcgccaaggtcccgcggcccctgcggctgtgtcctccgcgcccgccacgtccccgtctgtggcccttccccactctggcgccctggacaggcaccaggactccccggtaaccagtctcagaaactgggtggacggggtcttccacgaccccatcctcaggcacagcactttgaaccaggcctgggccaccgccaagggcgccctcctggaccccgggcctctgggacgctcgctgggggcgggcgcgaacgtgctgactgcacccctggcccgcgcctttccgcctgccgtgccccaggacgccccagctgcaggcgccgccagggagctgctcgccctgcccaaggccggcggcaaacccttctgcgcctgaggcgggcgggtcccgagcccaggagggaacccgcgctcaggcggacggcgccgactcttttcactgagtttccagaggaagactagcgcggccaccgcgaagccgccaacccaccggagagggggcttctgaacttggactcctgggaacatggacaagcccggcgctgccacgccggggcctccaccgcctgggcctgagcctgaccgggccattcccaaatttgggacgcggaaggagaggctctcggagcagaagaggccagataccctgaagcataaagtttacgtcaaaagtttacatggagaaggcggttccgttctgaagcgtggtctgctgtcccctgggcgtgaggcctcctgggcctgtcgggcctccgatttcatcctcagcacgtaatgctcaccaacagcacttgcactgagttgactcttgcacactcttgactccataatatgatgctttttaagatgtatgttcacaccaataattgcctgcttcagaggctaatataacaaaaccaataaaaccgagtgatggtg

SEQ ID NO: 144516 - DNA, 2403 bp, Homo sapiens
  Payload ID: 8554
  Gene Symbol: IRX4
  Gene Name: iroquois homeobox 4
  Uniprot ID: P78413
  ENST ID: ENST00000613726
  CDS Start-End: 224-1861
gcgcggccgccgaggggagcgggcggcggcggctgcggcgactccccggtgcgtcccgggctgcgagctgctccccgcggccccggcagccacacggcgcgggcgggagcttccccagctcagcgcctagaagcctgcagctccggagcagtggccgcgccacgccggccccagcgcgcagaaccctgcaggccccgcccgtccgccccgggccgcgcccgccatgtcctacccgcagtttggatacccctactcctcggctccccagttcttgatggccaccaactccctgagcacgtgctgcgagtccggaggccgcacgctggcggactccgggcccgccgcctcggcccaggcgccggtctactgcccggtctacgagagccggctgctggccaccgcgcgccacgagctcaactcggccgcggcgctgggcgtctatgggggtccctatggcggatcgcagggctatggcaactacgtgacctacggctcggaggcgtccgccttctactcgctgaacagctttgattccaaggatggttcgggatctgcgcatgggggcctggcaccagccgctgccgcctactacccttacgagccagctctgggccagtacccctatgacaggatcaaacggctaggcggtcatccccataaaggaattggcctggacctctctggcttgggaaggagcccaggctccctgtatggaaccatggacagcggcacgcggcgcaagaacgccacgcgcgagaccaccagcacgctcaaggcctggctgcaggagcaccgcaagaacccctaccccaccaagggcgagaagatcatgctggccatcatcaccaagatgaccctcacacaggtctccacctggttcgccaacgcgcgccggcgcctcaagaaggagaacaagatgacgtggccgccgcggaacaagtgcgcagacgagaagcggccctacgcggagggcgaggaggaggaggggggcgaggaggaggcgcgggaggagcccctcaagagctccaagaacgcagagcccgtgggcaaagaggagaaggagctggagcttagtgacttggacgacttcgacccgctggaagcagagccgccggcgtgcgagctgaagccgcccttccactccctggacggcggtctggagcgcgtccccgccgcgcccgacggcccggtcaaggaggcctcaggcgcgctccggatgtctctggccgcgggtggcggagctgctctggacgaggacctggagagggcccggagctgtctccgcagcgcggcggccgggccggagccactgccgggcgcagagggcggccctcaggtctgcgaggccaagctggggtttgtgccggcgggggcgtcggcaggcctggaggctaagccgcgcatctggtccctggcccacacagccaccgccgccgccgccgccgccacctccctgagccagactgagtttccgtcgtgcatgctcaagcgccaaggtcccgcggcccctgcggctgtgtcctccgcgcccgccacgtccccgtctgtggcccttccccactctggcgccctggacaggcaccaggactccccggtaaccagtctcagaaactgggtggacggggtcttccacgaccccatcctcaggcacagcactttgaaccaggcctgggccaccgccaagggcgccctcctggaccccgggcctctgggacgctcgctgggggcgggcgcgaacgtgctgactgcacccctggcccgcgcctttccgcctgccgtgccccaggacgccccagctgcaggcgccgccagggagctgctcgccctgcccaaggccggcggcaaacccttctgcgcctgaggcgggcgggtcccgagcccaggagggaacccgcgctcaggcggacggcgccgactcttttcactgagtttccagaggaagactagcgcggccaccgcgaagccgccaacccaccggagagggggcttctgaacttggactcctgggaacatggacaagcccggcgctgccacgccggggcctccaccgcctgggcctgagcctgaccgggccattcccaaatttgggacgcggaaggagaggctctcggagcagaagaggccagataccctgaagcataaagtttacgtcaaaagtttacatggagaaggcggttccgttctgaagcgtggtctgctgtcccctgggcgtgaggcctcctgggcctgtcgggcctccgatttcatcctcagcacgtaatgctcaccaacagcacttgcactgagttgactcttgcacactcttgactccataatatgatgctttttaagatgtatgttcacaccaataattgcctgcttcagaggctaatataacaaaaccaataaaaccgagtgatggtg

SEQ ID NO: 144517 - DNA, 2061 bp, Homo sapiens
  Payload ID: 8555
  Gene Symbol: IRX5
  Gene Name: iroquois homeobox 5
  Uniprot ID: P78411
  ENST ID: ENST00000320990
  CDS Start-End: 1-1449
atgtcctatccgcagggctacttgtaccagccgtccgcctcgctggcgctctactcgtgcccggcgtacagcaccagcgtcatttcggggccccgcacggatgagctcggccgctcttcttcgggctccgcgttctcgccctacgctggctcgactgccttcacggcgccctcgccgggctacaactcgcacctccagtacggcgccgaccccgcggccgccgccgccgccgccttctcctcgtacgtgggctctccctacgaccacacacccggcatggcgggctccttggggtaccatccttacgcggcgcccctgggatcgtacccttacggggacccagcgtaccggaagaacgccacaagggacgccacggctaccctcaaggcctggctcaacgagcaccgcaagaacccctaccccaccaagggcgagaagatcatgctggccatcatcaccaagatgaccctcacccaggtgtccacctggttcgccaacgcgcgccggcgcctcaagaaagagaataaaatgacgtggacgccgcggaaccgcagcgaggacgaggaagaggaggagaacattgacctggagaagaacgacgaggacgagccccagaagcccgaggacaagggcgaccccgagggccccgaagcaggagctgagcagaaggcggcttcgggctgcgaacggcttcagggaccacccacccctgcaggcaaggagacggagggcagcctcagcgactcggattttaaggagccgccctcggagggccgcctcgacgcgctgcagggccccccccgcaccggcgggccctccccggctgggccagcggcggcgcggctggcggaggacccggcccctcactaccccgccggagcgccggcgcccggcccgcatccagccgcgggcgaggtgcctccgggtcccggcgggccctcggttatccattcgccgcctccgccgccgcctcctgcggtgctcgccaagcccaaactgtggtctttggcagagatcgccacatcgtcggacaaggtcaaggacgggggcggcgggaacgagggctctccatgcccaccgtgtcccgggcccatagccgggcaagccctaggaggcagccgggcgtcgccggccccggcgccgtcacgctcgccctcggcgcagtgtccttttccaggcgggacggtgctgtcccggcctctctactacaccgcgcccttctatcccggctacacgaactatggctccttcggacaccttcatggccacccggggcccgggccaggccccacaaccggtccggggtctcatttcaatggattaaaccagaccgtgttgaaccgagcggacgctttggctaaagacccgaaaatgttgcggagccagtctcagctagacctgtgcaaagactctccctatgaattgaagaaaggtatgtccgacatttaacgcgggctgcgtcggtcccggacttttctaatttattaaaaacatggccttggcagttatttttccatcaccgagagagagagacagagagagaaaataaactacccctcctattcagaagtttatagtttatggagatggatgacataaaaatgtaaacatctccacacaaaaaaaaaaatgtcttaaccaaccgaaaagaaaaattaaaaaaggatttgtattaaatcttattctgtatatttaatgtagcatttttgtatttaaattgataattcaatatctttgaagtaaattatgaaatcaagacacctgtacaggcatttaatgtttttttgtaatataaatatatacatttgtgtttcccccaaaactgtttcatagttaaaaaatacaagtttaatttaattttttacacctattgattctgctgggtatgagctaaagtattacagaaaggaaacaggttatactcttagatttaaaaagtgaaagaaactgcaggcgcctttgtaaaatgcaaaatatttaattaaaagagattttaacataatgagagccactcattactttttagaagcctcaataaactgtccattgccttggtcaaaa

SEQ ID NO: 144518 - DNA, 2401 bp, Homo sapiens
  Payload ID: 8555
  Gene Symbol: IRX5
  Gene Name: iroquois homeobox 5
  Uniprot ID: P78411
  ENST ID: ENST00000394636
  CDS Start-End: 338-1789
cttagcatcttggcaggacctttgcaaaggcaaaagcagagccccccggtgcaaagagcgaggggaaaaaagagaaagcagcaagggaggggaggggaggggaaaaaaagcccagctggggcgagcgaggcgcgcagaggagcgggcgcggcggtcgcagccggaggcgcgcgggaagccagcgaggaggcgccgcgggccggagccccggagccggggccagaggagcggcggcccagggcagccagaggccaggtgcccgcccgctcgccctcgcagggcgccgcccggctcgttggcggccgcggcgcggcgcgccccatgcccgtgtgtggccatgtcctatccgcagggctacttgtaccagccgtccgcctcgctggcgctctactcgtgcccggcgtacagcaccagcgtcatttcggggccccgcacggatgagctcggccgctcttcttcgggctccgcgttctcgccctacgctggctcgactgccttcacggcgccctcgccgggctacaactcgcacctccagtacggcgccgaccccgcggccgccgccgccgccgccttctcctcgtacgtgggctctccctacgaccacacacccggcatggcgggctccttggggtaccatccttacgcggcgcccctgggatcgtacccttacggggacccagcgtaccggaagaacgccacaagggacgccacggctaccctcaaggcctggctcaacgagcaccgcaagaacccctaccccaccaagggcgagaagatcatgctggccatcatcaccaagatgaccctcacccaggtgtccacctggttcgccaacgcgcgccggcgcctcaagaaagagaataaaatgacgtggacgccgcggaaccgcagcgaggacgaggaagaggaggagaacattgacctggagaagaacgacgaggacgagccccagaagcccgaggacaagggcgaccccgagggccccgaagcaggaggagctgagcagaaggcggcttcgggctgcgaacggcttcagggaccacccacccctgcaggcaaggagacggagggcagcctcagcgactcggattttaaggagccgccctcggagggccgcctcgacgcgctgcagggccccccccgcaccggcgggccctccccggctgggccagcggcggcgcggctggcggaggacccggcccctcactaccccgccggagcgccggcgcccggcccgcatccagccgcgggcgaggtgcctccgggtcccggcgggccctcggttatccattcgccgcctccgccgccgcctcctgcggtgctcgccaagcccaaactgtggtctttggcagagatcgccacatcgtcggacaaggtcaaggacgggggcggcgggaacgagggctctccatgcccaccgtgtcccgggcccatagccgggcaagccctaggaggcagccgggcgtcgccggccccggcgccgtcacgctcgccctcggcgcagtgtccttttccaggcgggacggtgctgtcccggcctctctactacaccgcgcccttctatcccggctacacgaactatggctccttcggacaccttcatggccacccggggcccgggccaggccccacaaccggtccggggtctcatttcaatggattaaaccagaccgtgttgaaccgagcggacgctttggctaaagacccgaaaatgttgcggagccagtctcagctagacctgtgcaaagactctccctatgaattgaagaaaggtatgtccgacatttaacgcgggctgcgtcggtcccggacttttctaatttattaaaaacatggccttggcagttatttttccatcaccgagagagagagacagagagagaaaataaactacccctcctattcagaagtttatagtttatggagatggatgacataaaaatgtaaacatctccacacaaaaaaaaaaatgtcttaaccaaccgaaaagaaaaattaaaaaaggatttgtattaaatcttattctgtatatttaatgtagcatttttgtatttaaattgataattcaatatctttgaagtaaattatgaaatcaagacacctgtacaggcatttaatgtttttttgtaatataaatatatacatttgtgtttcccccaaaactgtttcatagttaaaaaatacaagtttaatttaattttttacacctattgattctgctgggtatgagctaaagtattacagaaaggaaacaggttatactcttagatttaaaaagtgaaagaaactgcaggcgcctttgtaaaatgcaaaatatttaattaaaagagattttaacataatgagagccactcattactttttagaagcctcaataaactgtccattgccttggtcaaaa

SEQ ID NO: 144519 - DNA, 879 bp, Homo sapiens
  Payload ID: 8555
  Gene Symbol: IRX5
  Gene Name: iroquois homeobox 5
  ENST ID: ENST00000560154
  CDS Start-End: 1-792
atgtcctatccgcagggctacttgtaccagccgtccgcctcgctggcgctctactcgtgcccggcgtacagcaccagcgtcatttcggggccccgcacggatgagctcggccgctcttcttcgggctccgcgttctcgccctacgctggctcgactgccttcacggcgccctcgccgggctacaactcgcacctccagtacggcgccgaccccgcggccgccgccgccgccgccttctcctcgtacgtgctgttgaaaaaagaaaaaaagagccttgacttcccttgttttccccccttgcgcccaacgtgcgtccgctcccccgccgagcgcggagtcgcctcagttgcccaggcctctatctgcatggagggccgggccgccgtggccagatctgcgcacgggggctctccatgcccaccgtgtcccgggcccatagccgggcaagccctaggaggcagccgggcgtcgccggccccggcgccgtcacgctcgccctcggcgcagtgtccttttccaggcgggacggtgctgtcccggcctctctactacaccgcgcccttctatcccggctacacgaactatggctccttcggacaccttcatggccacccggggcccgggccaggccccacaaccggtccggggtctcatttcaatggattaaaccagaccgtgttgaaccgagcggacgctttggctaaagacccgaaaatgttgcggagccagtctcagctagacctgtgcaaagactctccctatgaattgaagaaaggtatgtccgacatttaacgcgggctgcgtcggtcccggacttttctaatttattaaaaacatggccttggcagttatttttccatcaccgagagagagagacag

SEQ ID NO: 144520 - DNA, 1825 bp, Homo sapiens
  Payload ID: 8555
  Gene Symbol: IRX5
  Gene Name: iroquois homeobox 5
  Uniprot ID: P78411
  ENST ID: ENST00000558597
  CDS Start-End: 376-1629
aagagccttgacttcccttgttttccccccttgcgcccaacgtgcgtccgctcccccgccgagcgcggagtcgcctcagttgcccaggcctctatctgcatggagggccgggccgccgtggccagatctgcgcacggggtacggacgtgcccgggcagatgggggcctacggggtgacaccgaggccgggacagcttcaggggccccagaaggacctgacccagaaattgaggtccccgctgccttctgaggagggggaggagttgctcctaggtctgaaccccgccagccttgccccgtaggaagctggagtgcgggcctcgtccacccacagaccccggggagcgcagggaaaagggtgcttcggtcgttccgatggcagtggagaccacggtccacactcacctctctgcgtctccaccgcagggctctccctacgaccacacacccggcatggcgggctccttggggtaccatccttacgcggcgcccctgggatcgtacccttacggggacccagcgtaccggaagaacgccacaagggacgccacggctaccctcaaggcctggctcaacgagcaccgcaagaacccctaccccaccaagggcgagaagatcatgctggccatcatcaccaagatgaccctcacccaggtgtccacctggttcgccaacgcgcgccggcgcctcaagaaagagaataaaatgacgtggacgccgcggaaccgcagcgaggacgaggaagaggaggagaacattgacctggagaagaacgacgaggacgagccccagaagcccgaggacaagggcgaccccgagggccccgaagcaggaggagctgagcagaaggcggcttcgggctgcgaacggcttcagggaccacccacccctgcaggcaaggagacggagggcagcctcagcgactcggattttaaggagccgccctcggagggccgcctcgacgcgctgcagggccccccccgcaccggcgggccctccccggctgggccagcggcggcgcggctggcggaggacccggcccctcactaccccgccggagcgccggcgcccggcccgcatccagccgcgggcgaggtgcctccgggtcccggcgggccctcggttatccattcgccgcctccgccgccgcctcctgcggtgctcgccaagcccaaactgtggtctttggcagagatcgccacatcgtcggacaaggtcaaggacgggggcggcgggaacgagggctctccatgcccaccgtgtcccgggcccatagccgggcaagccctaggaggcagccgggcgtcgccggccccggcgccgtcacgctcgccctcggcgcagtgtccttttccaggcgggacggtgctgtcccggcctctctactacaccgcgcccttctatcccggctacacgaactatggctccttcggacaccttcatggccacccggggcccgggccaggccccacaaccggtccggggtctcatttcaatggattaaaccagaccgtgttgaaccgagcggacgctttggctaaagacccgaaaatgttgcggagccagtctcagctagacctgtgcaaagactctccctatgaattgaagaaaggtatgtccgacatttaacgcgggctgcgtcggtcccggacttttctaatttattaaaaacatggccttggcagttatttttccatcaccgagagagagagacagagagagaaaataaactacccctcctattcagaagtttatagtttatggagatggatgacataaaaatgtaaacatctccacacaaaaaaaaaaatgtcttaaccaaccg

SEQ ID NO: 144521 - DNA, 881 bp, Homo sapiens
  Payload ID: 8555
  Gene Symbol: IRX5
  Gene Name: iroquois homeobox 5
  ENST ID: ENST00000620085
  CDS Start-End: 1-441
atgtcctatccgcagggctacttgtaccagccgtccgcctcgctggcgctctactcgtgcccggcgtacagcaccagcgtcatttcggggccccgcacggatgagctcggccgctcttcttcgggctccgcgttctcgccctacgctggctcgactgccttcacggcgccctcgccgggctacaactcgcacctccagtacggcgccgaccccgcggccgccgccgccgccgccttctcctcgtacgtgctgttgaaaaaagaaaaaaagagccttgacttcccttgttttccccccttgcgcccaacgtgcgtccgctcccccgccgagcgcggagtcgcctcagttgcccaggcctctatctgcatggagggccgggccgccgtggccagatctgcgcacgggggctctccctacgcccaccgtgtcccgggcccatagccgggcaagccctaggaggcagccgggcgtcgccggccccggcgccgtcacgctcgccctcggcgcagtgtccttttccaggcgggacggtgctgtcccggcctctctactacaccgcgcccttctatcccggctacacgaactatggctccttcggacaccttcatggccacccggggcccgggccaggccccacaaccggtccggggtctcatttcaatggattaaaccagaccgtgttgaaccgagcggacgctttggctaaagacccgaaaatgttgcggagccagtctcagctagacctgtgcaaagactctccctatgaattgaagaaaggtatgtccgacatttaacgcgggctgcgtcggtcccggacttttctaatttattaaaaacatggccttggcagttatttttccatcaccgagagagagagacag

SEQ ID NO: 144522 - DNA, 3128 bp, Homo sapiens
  Payload ID: 8556
  Gene Symbol: IRX6
  Gene Name: iroquois homeobox 6
  Uniprot ID: P78412
  ENST ID: ENST00000290552
  CDS Start-End: 1333-2673
ggccactgcgggaggcgcgcgcgcgaggcagccaagccttgccttcggaggagatgcccagggatcttagcaagcagcctgcggctgccagggatcggacctggcgagtttcccgacggaatctgagggatcccgaacctcggcctcgagggggcgctatccggcctactcgaggaccaggcagctgcagagaagctccaaggtcaaggccctgggccaggccagggcttggagagccggaatctagcccgagtcctggggaggctgaggcggggaaccagatccccgaggacaaagatgggcgggccagtgggatccaccgacgctgcccggagctgctccaacgagagccgggcctgtggcgtgaacaaactttacttcagcgcaggggcggaggaaccgggctggaggcttctcccccgggcctctgctctcctccacctgccagtgctcagcctccgcccagccttcgcccaccccagctccctccccctcccccacgcgcctctgttcactcagactcctgtctcccctctcccctcctccttctccctcttgcctttctcccccacttttctcctgtctcttcttttgtattctctcctccctcgccgccccggttgcctctcgcctcctccgggccgcaggggaggaggtgagcgcgctgcgcccggggcctgcgcggctcagagggaggcgtttctcctacttctcccgggtaatttggagaggttgtgtgtgtgtgcgcgcgcgcgtgagctccaggcgaaaaggggtaggattcagcgccgagcagagagggtcagggtttttgacgttcctcgccagctgcacaaacctcccggagcaagtgtgagtgtgggtgagagtgcgcgcgcgcgcacgggctggctgcgcttggcacgcttggtggcccagggtcccggggcccggggtcccgtctggcggcccgggattaccgtgacgtcacattgagcctctggccaccttggactgggacacctccggagcctcacagccccgcgccgcgccgcgcctcacctcgccaccacgcgcctttgggaacccgcatcttcttccttcccctgcccatccatgggcccttctgtcttccggaccccacgggccggaggggcgccttccggagcgcagggctcggcagccgggctgccctcggctctgcctccactggggccaaccaggcgaaggaaccggcgctgggcatccgcagcggtgtaaggaactgagacacctcactgctgggggcgcggaacagctgggctgagacgggaactcgacagggaagagagagacgggccagggacagccaccatgtccttcccacactttggacacccgtaccgcggcgcttcccagtttctggcgtcggcaagttccagcaccacatgctgcgaatctacccaacgctctgtctcagatgtggcatcaggctccaccccagcgcccgctctctgctgcgcaccctacgatagtcgactgctgggcagtgcgcgaccggagctgggcgccgccttgggcatctatggagcaccctatgcggccgctgcagctgcccagagctaccctggctacctgccctatagcccagagcccccctcactgtatggggcactgaatccacagtatgaatttaaggaggctgcagggagttttacatccagcctggcacaaccaggagcctattatccctatgagcggactctggggcagtaccaatatgaacggtatggcgcagtggaattgagtggcgccggtcgccgaaagaacgcgacccgggagaccaccagtacactcaaggcctggctcaacgagcaccgcaaaaacccctaccccactaagggtgagaagatcatgctggccatcatcaccaagatgaccctcacccaggtgtccacctggttcgccaacgcacgccggcgcctcaagaaagagaacaaaatgacatgggcgcccaagaacaaaggtggggaggagaggaaggcagagggaggagaggaggactcactaggctgcctaactgctgacaccaaagaagttactgctagccaggaggcccgggggctccggctgagtgacctggaagacctggaggaagaggaggaggaggaggaggaagctgaagacgaggaggtagtggccacagctggggacaggctgacggagttccgaaagggcgcgcagtcactgcctgggccgtgcgctgcagctcgagagggccgattggagcgcagggagtgcggcctggctgcgccccgcttctccttcaatgacccttccggatcggaagaagctgacttcctctcggcggagacaggcagccctaggttgaccatgcactacccatgcttggagaaaccgcgcatctggtctctggcgcacaccgcgacagccagcgctgttgaaggtgcacccccagcccggcctaggccacgaagtcctgagtgccgtatgattcctggacagcctcctgcctctgcccggcgactctcagtccccagagactccgcgtgcgacgagtcttcctgcatacccaaagcctttggaaaccccaagtttgccctgcagggactaccgctgaactgtgcgccgtgcccgcggaggagcgagcctgtagtgcagtgccagtacccgtctggagcagaagcaggttagcgcaatggctgcgatttgcgaaagaatcttggaaatgggccccacgtttcgaattcatctccaggttaagaagctgccagaccttgccagggaccaggagctctcactttgcctaagagacagacacacagaaaccctcctagcagctgtccttgcacgcagagctggggtggtgggccgacttgaaccttagcagtccccacgggagatggcagggcaccttggggaaggccaagtgggaggctgggaggctgccccacccaccgactctaccaagtctctcttcctcctgtggattcagcaaggcttcctctcctgctcacccctgtctctcacctccaccaaccccactcactttgtaacttcatcactgacccggccaataaggaccctgtgcgtcttctccccctcctaagcccttgtgtccttaaaaataatcagtccgaacccatgta

SEQ ID NO: 144523 - DNA, 711 bp, Homo sapiens
  Payload ID: 8557
  Gene Symbol: ISG15
  Gene Name: ISG15 ubiquitin-like modifier
  Uniprot ID: P05161
  ENST ID: ENST00000379389
  CDS Start-End: 152-649
cgcaggctcggcggcacgccccctgacgtgtgtgcctcaggcttataatagggccggtgctgcctgccgaagccggcggctgagaggcagcgaactcatctttgccagtacaggagcttgtgccgtggcccacagcccacagcccacagccatgggctgggacctgacggtgaagatgctggcgggcaacgaattccaggtgtccctgagcagctccatgtcggtgtcagagctgaaggcgcagatcacccagaagatcggcgtgcacgccttccagcagcgtctggctgtccacccgagcggtgtggcgctgcaggacagggtcccccttgccagccagggcctgggccccggcagcacggtcctgctggtggtggacaaatgcgacgaacctctgagcatcctggtgaggaataacaagggccgcagcagcacctacgaggtacggctgacgcagaccgtggcccacctgaagcagcaagtgagcgggctggagggtgtgcaggacgacctgttctggctgaccttcgaggggaagcccctggaggaccagctcccgctgggggagtacggcctcaagcccctgagcaccgtgttcatgaatctgcgcctgcggggaggcggcacagagcctggcgggcggagctaagggcctccaccagcatccgagcaggatcaagggccggaaataaaggctgttgtaaagagaaa

SEQ ID NO: 144524 - DNA, 657 bp, Homo sapiens
  Payload ID: 8557
  Gene Symbol: ISG15
  Gene Name: ISG15 ubiquitin-like modifier
  ENST ID: ENST00000624652
  CDS Start-End: 227-657
acgcgtccgtgcagcggaggcttcctgagccccctggagagcctggcctgggcccgggtgtggagaccctcccgggctttcaatccgggcaggaggcagatggcagactcagcagtcacgaatcgcttaattctgaaagtctggtgagaagacacggcgagaatcggggtccagcacagatgatggcgacagcggagaagggaagggctgggacctgacggtgaagatgctggcgggcaacgaattccaggtgtccctgagcagctccatgtcggtgtcagagctgaaggcgcagatcacccagaagatcggcgtgcacgccttccagcagcgtctggctgtccacccgagcggtgtggcgctgcaggacagggtcccccttgccagccagggcctgggccccggcagcacggtcctgctggtggtggacaaatgcgacgaacctctgagcatcctggtgaggaataacaagggccgcagcagcacctacgaggtacggctgacgcagaccgtggcccacctgaagcagcaagtgagcgggctggagggtgtgcaggacgacctgttctggctgaccttcgaggggaagcccctggaggaccagctcccgctgggggagtacggcctcaagcccctgagcaccgtgttcatgaatct

SEQ ID NO: 144525 - DNA, 788 bp, Homo sapiens
  Payload ID: 8557
  Gene Symbol: ISG15
  Gene Name: ISG15 ubiquitin-like modifier
  ENST ID: ENST00000624697
  CDS Start-End: 252-725
cggcctcacgcgtccgtgcagcggaggcttcctgagccccctggagagcctggcctgggcccgggtgtggagaccctcccgggctttcaatccgggcaggaggcagatggcagactcagcagtcacgtaagagaaccgaattaggaatcgcttaattctgaaagtctggtgagaagacacggcgagaatcggggtccagcacagatgatggcgacagcggagaagggaagggctgggacctgacggtgaagatgctggcgggcaacgaattccaggtgtccctgagcagctccatgtcggtgtcagagctgaaggcgcagatcacccagaagatcggcgtgcacgccttccagcagcgtctggctgtccacccgagcggtgtggcgctgcaggacagggtcccccttgccagccagggcctgggccccggcagcacggtcctgctggtggtggacaaatgcgacgaacctctgagcatcctggtgaggaataacaagggccgcagcagcacctacgaggtacggctgacgcagaccgtggcccacctgaagcagcaagtgagcgggctggagggtgtgcaggacgacctgttctggctgaccttcgaggggaagcccctggaggaccagctcccgctgggggagtacggcctcaagcccctgagcaccgtgttcatgaatctgcgcctgcggggaggcggcacagagcctggcgggcggagctaagggcctccaccagcatccgagcaggatcaagggccggaaataaaggctgttgtaaagagaaat

SEQ ID NO: 144526 - DNA, 2459 bp, Homo sapiens
  Payload ID: 8558
  Gene Symbol: ISL1
  Gene Name: ISL LIM homeobox 1
  Uniprot ID: P61371
  ENST ID: ENST00000230658
  CDS Start-End: 282-1331
agttggagcagagaagtttgagtaagagataaggaagagaggtgcccgagccgcgccgagtctgccgccgccgcagcgcctccgctccgccaactccgccggcttaaattggactcctagatccgcgagggcgcggcgcagccgagcagcggctctttcagcattggcaaccccaggggccaatatttcccacttagccacagctccagcatcctctctgtgggctgttcaccaactgtacaaccaccatttcactgtggacattactccctcttacagatatgggagacatgggagatccaccaaaaaaaaaacgtctgatttccctatgtgttggttgcggcaatcagattcacgatcagtatattctgagggtttctccggatttggaatggcatgcggcatgtttgaaatgtgcggagtgtaatcagtatttggacgagagctgtacatgctttgttagggatgggaaaacctactgtaaaagagattatatcaggttgtacgggatcaaatgcgccaagtgcagcatcggcttcagcaagaacgacttcgtgatgcgtgcccgctccaaggtgtatcacatcgagtgtttccgctgtgtggcctgcagccgccagctcatccctggggacgaatttgcgcttcgggaggacggtctcttctgccgagcagaccacgatgtggtggagagggccagtctaggcgctggcgacccgctcagtcccctgcatccagcgcggccactgcaaatggcagcggagcccatctccgccaggcagccagccctgcggccccacgtccacaagcagccggagaagaccacccgcgtgcggactgtgctgaacgagaagcagctgcacaccttgcggacctgctacgccgcaaacccgcggccagatgcgctcatgaaggagcaactggtagagatgacgggcctcagtccccgtgtgatccgggtctggtttcaaaacaagcggtgcaaggacaagaagcgaagcatcatgatgaagcaactccagcagcagcagcccaatgacaaaactaatatccaggggatgacaggaactcccatggtggctgccagtccagagagacacgacggtggcttacaggctaacccagtggaagtacaaagttaccagccaccttggaaagtactgagcgacttcgccttgcagagtgacatagatcagcctgcttttcagcaactggtcaatttttcagaaggaggaccgggctctaattccactggcagtgaagtagcatcaatgtcctctcaacttccagatacacctaacagcatggtagccagtcctattgaggcatgaggaacattcattctgtattttttttccctgttggagaaagtgggaaattataatgtcgaactctgaaacaaaagtatttaacgacccagtcaatgaaaactgaatcaagaaatgaatgctccatgaaatgcacgaagtctgttttaatgacaaggtgatatggtagcaacactgtgaagacaatcatgggattttactagaattaaacaacaaacaaaacgcaaaacccagtatatgctattcaatgatcttagaagtactgaaaaaaaaagacgtttttaaaacgtagaggatttatattcaaggatctcaaagaaagcattttcatttcactgcacatctagagaaaaacaaaaatagaaaattttctagtccatcctaatctgaatggtgctgtttctatattggtcattgccttgccaaacaggagctccagcaaaagcgcaggaagagagactggcctccttggctgaaagagtcctttcaggaaggtggagctgcattggtttgatatgtttaaagttgactttaacaaggggttaattgaaatcctgggtctcttggcctgtcctgtagctggtttattttttactttgccccctccccactttttttgagatccatcctttatcaagaagtctgaagcgactataaaggtttttgaattcagatttaaaaaccaacttataaagcattgcaacaaggttacctctattttgccacaagcgtctcgggattgtgtttgacttgtgtctgtccaagaacttttcccccaaagatgtgtatagttattggttaaaatgactgttttctctctctatggaaataaaaaggaaaaaaaaaaaggaaactttttttgtttgctcttgcattgcaaaaattataaagtaatttattatttattgtcggaagacttgccacttttcatgtcatttgacattttttgtttgctgaagtgaaaaaaaaagataaaggttgtacggtggtctttgaattatatgtctaattctatgtgttttgtctttttcttaaatattatgtgaaatcaaagcgccatatgtagaattatatcttcaggactatttcactaataaacatttggcatagataaataaataaacacagtga

SEQ ID NO: 144527 - DNA, 981 bp, Homo sapiens
  Payload ID: 8558
  Gene Symbol: ISL1
  Gene Name: ISL LIM homeobox 1
  ENST ID: ENST00000511384
  CDS Start-End: 1-981
atgggagacatgggagatccaccaaaaaaaaaacgtctgatttccctatgtgttggttgcggcaatcagattcacgatcagtatattctgagggtttctccggatttggaatggcatgcggcatgtttgaaatgtgcggagtgtaatcagtatttggacgagagctgtacatgctttgttagggatgggaaaacctactgtaaaagagattatatcaggttgtacgggatcaaatgcgccaagtgcagcatcggcttcagcaagaacgacttcgtgatgcgtgcccgctccaaggtgtatcacatcgagtgtttccgctgtgtggcctgcagccgccagctcatccctggggacgaatttgcgcttcgggaggacggtctcttctgccgagcagaccacgatgtggtggagagggccagtctaggcgctggcgacccgctcagtcccctgcatccagcgcggccactgcaaatggcagcggagcccatctccgccaggcagccagccctgcggccccacgtccacaagcagccggagaagaccacccgcgtgcggactgtgctgaacgagaagcagctgcacaccttgcggacctgctacgccgcaaacccgcggccagatgcgctcatgaaggagcaactggtagagatgacgggcctcagtccccgtgtgatccgggtctggtttcaaaacaagcggtgcaaggacaagaagcgaagcatcatgatgaagcaactccagcagcagcagcccaatgacaaaactgctaacccagtggaagtacaaagttaccagccaccttggaaagtactgagcgacttcgccttgcagagtgacatagatcagcctgcttttcagcaactggtcaatttttcagaaggaggaccgggctctaattccactggcagtgaagtagcatcaatgtcctctcaacttccagatacacctaacagcatggtagccagtcctattgaggcatga

SEQ ID NO: 144528 - DNA, 1881 bp, Homo sapiens
  Payload ID: 8559
  Gene Symbol: ISL2
  Gene Name: ISL LIM homeobox 2
  Uniprot ID: Q96A47
  ENST ID: ENST00000290759
  CDS Start-End: 161-1240
gctagtgcgtgttgacgtcatgctgcgtgcgggccggtgcggaatcgctccttcaactccgcggggcagtaggagttagttagcaaagagccgaggccgggcgcgcgaccctcgtccttctgcccctggccgcacactttgcgcacatctctttttctgcatggtggatattatttttcattatccttttctgggtgctatgggtgatcattccaagaagaagcccgggacggccatgtgcgtgggctgcgggagtcagatccacgaccagtttatcctgcgggtgtcgcccgacctcgagtggcacgcggcctgcctcaagtgtgccgagtgcagccagtacctggacgagacgtgcacgtgcttcgtgagagacgggaagacctactgcaagcgggactatgtcaggctgttcggcatcaagtgcgccaagtgccaggtgggcttcagcagcagcgacctggtgatgagggcgcgggacagcgtgtaccacatcgagtgcttccgctgctccgtgtgcagccgccagctgctgcctggggacgagttctcgctgcgggagcacgagctgctctgccgcgccgaccacggcctcctgctcgagcgcgccgcggccggcagcccgcgcagccccggcccgcttcccggcgcccgcggcctgcatctgcccgacgctgggtcgggccggcagcccgcgttgcgcccgcacgtgcacaagcagacggagaagacgacccgcgtgcggactgtgctgaacgagaagcagctgcacactctgcggacctgctacgccgccaacccgcggcccgacgctctcatgaaggagcagctggtggagatgaccggcctgagcccgcgggtcatccgcgtctggttccagaacaagcgctgcaaggacaagaagaaatccattctcatgaagcagctgcagcagcagcagcacagcgacaagacgagccttcagggactgactgggacgcccctggtggcgggcagtcccatccgccatgagaacgccgtgcagggcagcgcagtggaggtgcagacgtaccagccgccgtggaaggcgctcagcgagtttgccctccagagcgacctggaccaacccgccttccaacagctggtctccttctccgagtccggctccctaggcaactcctccggcagcgacgtgacctccctgtcctcgcagctcccggacacccccaacagtatggtgccgagtcccgtggagacgtgagggggacccctccctgccagcccgcggacctcgcatgctccctgcatgagactcacccatgctcaggccattccagttccgaaagctctctcgccttcgtaattattctattgttatttatgagagagtaccgagagacacggtctggacagcccaaggcgccaggatgcaacctgctttcaccagactgcagacccctgctccgaggactcttagtttttcaaaaccagaatctgggacttaccagggttagctctgccctctcctctcctctctacgtggccgccgctctgtctctccacgccccacctgtgtccccatctcggccggcccggagctcgcccacgcggacccccgccctgccccagctcagcgctccctggcggcttcgcccgggctcctagcggggaaaaggaaggggataactcagaggaacagacactcaaactcccaaagcgcatgattgctgggaaacagtagaaaccagacttgccttgaaagtgtttaagttattcgacggaggacagagtatgtgagcctttgccgaacaaacaaacgtaagttattgttatttattgtgagaacagccagttcatagtgggacttgtattttgatcttaataaaaaataataacccgggg

SEQ ID NO: 144529 - DNA, 1446 bp, Homo sapiens
  Payload ID: 8559
  Gene Symbol: ISL2
  Gene Name: ISL LIM homeobox 2
  ENST ID: ENST00000558656
  CDS Start-End: 77-664
aaagagccgaggccgggcgcgcgaccctcgtccttctgcccctggccgcacactttgcgcacatctctttttctgcatggtggatattatttttcattatccttttctgggtgctatgggtgatcattccaagaagaagcccgggacggccatgtgcgtgggctgcgggagtcagatccacgaccagtttatcctgcgggtgtcgcccgacctcgagtggcacgcggcctgcctcaagtgtgccgagtgcagccagtacctggacgagacgtgcacgtgcttcgtgagagacgggaagacctactgcaagcgggactatgtcagacgctgggtcgggccggcagcccgcgttgcgcccgcacgtgcacaagcagacggagaagacgacccgcgtgcggactgtgctgaacgagaagcagctgcacactctgcggacctgctacgccgccaacccgcggcccgacgctctcatgaaggagcagctggtggagatgaccggcctgagcccgcgggtcatccgcgtctggttccagaacaagcgctgcaaggacaagaagaaatccattctcatgaagcagctgcagcagcagcagcacagcgacaagacgagccttcagggactgactgggacgcccctggtggcgggcagtcccatccgccatgagaacgccgtgcagggcagcgcagtggaggtgcagacgtaccagccgccgtggaaggcgctcagcgagtttgccctccagagcgacctggaccaacccgccttccaacagctggtctccttctccgagtccggctccctaggcaactcctccggcagcgacgtgacctccctgtcctcgcagctcccggacacccccaacagtatggtgccgagtcccgtggagacgtgagggggacccctccctgccagcccgcggacctcgcatgctccctgcatgagactcacccatgctcaggccattccagttccgaaagctctctcgccttcgtaattattctattgttatttatgagagagtaccgagagacacggtctggacagcccaaggcgccaggatgcaacctgctttcaccagactgcagacccctgctccgaggactcttagtttttcaaaaccagaatctgggacttaccagggttagctctgccctctcctctcctctctacgtggccgccgctctgtctctccacgccccacctgtgtccccatctcggccggcccggagctcgcccacgcggacccccgccctgccccagctcagcgctccctggcggcttcgcccgggctcctagcggggaaaaggaaggggataactcagaggaacagacactcaaactcccaaagcgcatgattgctgggaaacagtagaaaccagacttgccttgaaagtgtttaagttattcgacggaggacagagtatgtgagcctttgccgaacaaac

SEQ ID NO: 144530 - DNA, 1958 bp, Homo sapiens
  Payload ID: 8560
  Gene Symbol: IAPP
  Gene Name: islet amyloid polypeptide
  Uniprot ID: P10997
  ENST ID: ENST00000240652
  CDS Start-End: 137-406
gattactagttagcaaatgagggggtaaatattccagtggatacaagcttggactcttttcttgaagctttctttctatcagaagcatttgctgatattgctgacattgaaacattaaaagaaaatttgagaagcaatgggcatcctgaagctgcaagtatttctcattgtgctctctgttgcattgaaccatctgaaagctacacccattgaaagtcatcaggtggaaaagcggaaatgcaacactgccacatgtgcaacgcagcgcctggcaaattttttagttcattccagcaacaactttggtgccattctctcatctaccaacgtgggatccaatacatatggcaagaggaatgcagtagaggttttaaagagagagccactgaattacttgcccctttagaggacaatgtaactctatagttattgttttatgttctagtgatttcctgtataatttaacagtgcccttttcatctccagtgtgaatatatggtctgtgtgtctgatgtttgttgctaggacatataccttctcaaaagattgttttatatgtagtactaactaaggtcccataataaaaagatagtatcttttaaaatgaaatgtttttgctatagatttgtattttaaaacataagaacgtcattttgggacctatatctcagtggcacaggtttaagaacgaaggagaaaaaggtagtttgaaccttggtaaattgtaaacagctaataatgaagttattcttgacatgagaaaatcagtaattggaccaggcgcggtggctcttgcctgtaatcccagcactttgggaggccgaggcaggcagatcacaaggtcaggagttcgagaccagcctgaccaacatggtgaaaccctgtctctactaaaaatacaaaaattagccgggggtggtgacatgtgcctgtaatcccagctactcaggaggctaaggcaggagaatcgcttaaacccaggaggcggaggttgcagtgagccgagattgcaccactgcactccagcctgggtggcagagtgagactcgtctcaaaaaaaagaaagaaaattagtaattgtaagtacccctgataagcaaattagtaattgtcaatacccctgttaagcaattcctttttgcagtatatttctgaaatgacagaatgctgttttaaaaacaaagaaataaaatcctgctcctgactcggtcaaaatattttttaaagtctattgtttgttgtgcttgctggtactaagaggctatttaaaagtataaaactgctttgtatccatgagggtttcattgtgtgttagcagcagtgagcttctattaaatgtatatgtcatttattttgtttaagtggctttcagcaaacctcagtcatattcttatgcagggtattgcgaaacaacttgtgttctattaatcgtgtcttcaattaaaagaccacagacttctggaaactctttgctgtataagaattatttcttttgtttaacaaattagacatttctggcagaggttatgtatatgatacactttttttgatagcagctgcaatgttggacagaagatgaaatgctttgctttgagtcagattcttatgaatatctgcttttccctgactttgagttaggtagctttggaagtagcattaattcagataaactgccatcatgctgcgttatgccatttctaaagacactcaacttgtacttttaaaaaaatagaaaaaataagcatttcaatctaagtggaaatttgactcattgacttacatttctaagttaaaatttccctttatgaagtgtgccttaggttaccaaattgtagaggctttcgttggtggtggtaagtggtagcggtagtgagtgtatagaggcagggaaatatatttataataaattctatgtcatgaattacatattgaaataaataggtgaatatacaaattta

SEQ ID NO: 144531 - DNA, 409 bp, Homo sapiens
  Payload ID: 8560
  Gene Symbol: IAPP
  Gene Name: islet amyloid polypeptide
  Uniprot ID: P10997
  ENST ID: ENST00000539393
  CDS Start-End: 71-340
agctttgcacatctccaggtcagacctatcctaatatctacatctacatttccagaaaatttgagaagcaatgggcatcctgaagctgcaagtatttctcattgtgctctctgttgcattgaaccatctgaaagctacacccattgaaagtcatcaggtggaaaagcggaaatgcaacactgccacatgtgcaacgcagcgcctggcaaattttttagttcattccagcaacaactttggtgccattctctcatctaccaacgtgggatccaatacatatggcaagaggaatgcagtagaggttttaaagagagagccactgaattacttgcccctttagaggacaatgtaactctatagttattgttttatgttctagtgatttcctgtataatttaacagtgccctt

SEQ ID NO: 144532 - DNA, 460 bp, Homo sapiens
  Payload ID: 8560
  Gene Symbol: IAPP
  Gene Name: islet amyloid polypeptide
  ENST ID: ENST00000535428
  CDS Start-End: 1-257
atctgaaagctacacccattgaaagatgtttggaccaaattccaatttttactgtttttcaagaaaatcatcaggtggaaaagcggaaatgcaacactgccacatgtgcaacgcagcgcctggcaaattttttagttcattccagcaacaactttggtgccattctctcatctaccaacgtgggatccaatacatatggcaagaggaatgcagtagaggttttaaagagagagccactgaattacttgcccctttagaggacaatgtaactctatagttattgttttatgttctagtgatttcctgtataatttaacagtgcccttttcatctccagtgtgaatatatggtctgtgtgtctgatgtttgttgctaggacatataccttctcaaaagattgttttatatgtagtactaactaaggtcccataataaaaagatagtatcttttaaaatgaaa

SEQ ID NO: 144533 - DNA, 2015 bp, Homo sapiens
  Payload ID: 8560
  Gene Symbol: IAPP
  Gene Name: islet amyloid polypeptide
  ENST ID: ENST00000542023
  CDS Start-End: 102-341
agtggatacaagcttggactcttttcttgaagctttctttctatcagaagcatttgctgatattgctgacattgaaacattaaaagaaaatttgagaagcaatgggcatcctgaagctgcaagtatttctcattgtgctctctgttgcattgaaccatctgaaagctacacccattgaaagacaggaatggataattccagttttgtcaagaaatatactcttggaacttagaggggcaaagccagaacatgaagcgggaaaaaaatcaaaagtcatcaggtggaaaagcggaaatgcaacactgccacatgtgcaacgcagcgcctggcaaattttttagttcattccagcaacaactttggtgccattctctcatctaccaacgtgggatccaatacatatggcaagaggaatgcagtagaggttttaaagagagagccactgaattacttgcccctttagaggacaatgtaactctatagttattgttttatgttctagtgatttcctgtataatttaacagtgcccttttcatctccagtgtgaatatatggtctgtgtgtctgatgtttgttgctaggacatataccttctcaaaagattgttttatatgtagtactaactaaggtcccataataaaaagatagtatcttttaaaatgaaatgtttttgctatagatttgtattttaaaacataagaacgtcattttgggacctatatctcagtggcacaggtttaagaacgaaggagaaaaaggtagtttgaaccttggtaaattgtaaacagctaataatgaagttattcttgacatgagaaaatcagtaattggaccaggcgcggtggctcttgcctgtaatcccagcactttgggaggccgaggcaggcagatcacaaggtcaggagttcgagaccagcctgaccaacatggtgaaaccctgtctctactaaaaatacaaaaattagccgggggtggtgacatgtgcctgtaatcccagctactcaggaggctaaggcaggagaatcgcttaaacccaggaggcggaggttgcagtgagccgagattgcaccactgcactccagcctgggtggcagagtgagactcgtctcaaaaaaaagaaagaaaattagtaattgtaagtacccctgataagcaaattagtaattgtcaatacccctgttaagcaattcctttttgcagtatatttctgaaatgacagaatgctgttttaaaaacaaagaaataaaatcctgctcctgactcggtcaaaatattttttaaagtctattgtttgttgtgcttgctggtactaagaggctatttaaaagtataaaactgctttgtatccatgagggtttcattgtgtgttagcagcagtgagcttctattaaatgtatatgtcatttattttgtttaagtggctttcagcaaacctcagtcatattcttatgcagggtattgcgaaacaacttgtgttctattaatcgtgtcttcaattaaaagaccacagacttctggaaactctttgctgtataagaattatttcttttgtttaacaaattagacatttctggcagaggttatgtatatgatacactttttttgatagcagctgcaatgttggacagaagatgaaatgctttgctttgagtcagattcttatgaatatctgcttttccctgactttgagttaggtagctttggaagtagcattaattcagataaactgccatcatgctgcgttatgccatttctaaagacactcaacttgtacttttaaaaaaatagaaaaaataagcatttcaatctaagtggaaatttgactcattgacttacatttctaagttaaaatttccctttatgaagtgtgccttaggttaccaaattgtagaggctttcgttggtggtggtaagtggtagcggtagtgagtgtatagaggcagggaaatatatttataataaattctatgtcatgaattacatattgaaataaataggtgaatatacaaattta

SEQ ID NO: 144534 - DNA, 351 bp, Homo sapiens
  Payload ID: 8560
  Gene Symbol: IAPP
  Gene Name: islet amyloid polypeptide
  ENST ID: ENST00000537593
  CDS Start-End: 113-351
aagcttggactcttttcttgaagctttctttctatcagaagcatttgctgatattgctgacattgaaacattaaaagtgctggattattctttgcagaaaatttgagaagcaatgggcatcctgaagctgcaagtatttctcattgtgctctctgttgcattgaaccatctgaaagctacacccattgaaagtcatcaggtggaaaagcggaaatgcaacactgccacatgtgcaacgcagcgcctggcaaattttttagttcattccagcaacaactttggtgccattctctcatctaccaacgtgggatccaatacatatggcaagaggaatgcagtagaggttttaaa

SEQ ID NO: 144535 - DNA, 2309 bp, Homo sapiens
  Payload ID: 8561
  Gene Symbol: ICA1
  Gene Name: islet cell autoantigen 1, 69kDa
  Uniprot ID: Q05084
  ENST ID: ENST00000265577
  CDS Start-End: 193-1641
ctgcgctccccccgcccctttccctcgccttcggctgacgctgacgtcggatgagtgatccggagggacgctccgaccgcggccgggaggctcctgggggccggggctccgaggttataatataacttatcctctcatgcttttttcctgccccttctccccaaatcatcaacaatagaagaagaagaaaacatgtcaggacacaaatgttatccctgggacttacaggatcgatatgctcaagataagtcagttgtaaataagatgcaacagaaatattgggagacgaagcaggcctttattaaagccacagggaagaaggaagatgaacatgttgttgcctctgacgcggacctggatgccaagctagagctgtttcattcaattcagagaacctgtctggacttatcgaaagcaattgtactctatcaaaagaggatatgtttcttgtctcaagaagaaaacgaactgggaaaatttcttcgatcccaaggtttccaagataaaaccagagcaggaaagatgatgcaagcgacaggaaaggccctctgcttttcttcccagcaaaggttggccttacgaaatcctttgtgtcgatttcaccaagaagtggagacttttcggcatcgggccatctcagatacttggctgacggtgaaccgcatggaacagtgcaggacggaatatagaggagcactattatggatgaaggacgtgtctcaggagcttgatccagacctctacaagcaaatggagaagttcaggaaggtacaaacacaagtgcgccttgcaaaaaaaaactttgacaaattgaagatggatgtttgtcaaaaagtggatcttcttggagcgagcagatgcaatctcttgtctcacatgctagcaacataccagaccactctgcttcatttttgggagaaaacttctcacactatggcagccatccatgagagtttcaaaggttatcaaccatatgaatttactactttaaagagcttacaagaccctatgaaaaaattagttgagaaagaagagaagaagaaaatcaaccagcaggaaagtacagatgcagccgtgcaggagccgagccaattaatttcattagaggaagaaaaccagcgcaaggaatcctctagttttaagactgaagatggaaaaagtattttatctgccttagacaaaggctctacacatactgcatgctcaggacccatagatgaactattagacatgaaatctgaggaaggtgcttgcctgggaccagtggcagggaccccggaacctgaaggtgctgacaaagatgacctgctgctgttgagtgagatcttcaatgcttcctccttggaagagggcgagttcagcaaagagtgggccgctgtgtttggagacggccaagtgaaggagccagtgcccactatggccctgggagagccagaccccaaggcccagacaggctcaggtttccttccttcgcagcttttagaccaaaatatgaaagacttacaggcctcgctacaagaacctgctaaggctgcctcagacctgactgcctggttcagcctcttcgctgacctcgacccactctcaaatcctgatgctgttgggaaaaccgataaagaacacgaattgctcaatgcatgaatctgtacccttcgggagggcactcacatgccgcccccagcagctcccctgggggctagcagaagtataaagtgatcagtatgctgttttaataattatgtgccattttaataaaatgaaagggtcaacggccctgtttatattggtataattatttactcttatttggtataaagggttttcgtgtatctctatgtggatctaaataatacaggattgtctagaagcggtttccaggccaccgctctcctgcctacatcccatcatggctgctgcggtgtcactgggctaccgtgagatccaagttgaaatcagaagcctactttgatggtaggtttgaatgacgtgtcctacagcctcagaggcagcaggaggctagcaaagcttaaatgcctccttctctgcccccagcctctgtcccccttggaggagggctgtaggaagattccctcttcctgccaagccaccttccagtgagctctggatgaagctctggccaaccaaagacactgtccccacagcaggtgcctggtgggccacgtgttctcacactggtggaggagctgggcttctgtccaaggcacaaaccttactatggaaagcagccatatttgcagataccactgtctccttttgtcctcttcgtggctggaattcaaaagcatgta

SEQ ID NO: 144536 - DNA, 946 bp, Homo sapiens
  Payload ID: 8561
  Gene Symbol: ICA1
  Gene Name: islet cell autoantigen 1, 69kDa
  ENST ID: ENST00000317367
  CDS Start-End: 179-946
ctcactctggcagctagaggttttgcctctggccagtgaccattcctttgagtagtgagctttctgttctttccagtaactgctggttataatataacttatcctctcatgcttttttcctgccccttctccccaaatcatcaacaatagaagaagaagaaaacatgtcaggacacaaatggatcgatatgctcaagataagtcagttgtaaataagatgcaacagaaatattgggagacgaagcaggcctttattaaagccacagggaagaaggaagatgaacatgttgttgcctctgacgcggacctggatgccaagctagagctgtttcattcaattcagagaacctgtctggacttatcgaaagcaattgtactctatcaaaagaggatatgtttcttgtctcaagaagaaaacgaactgggaaaatttcttcgatcccaaggtttccaagataaaaccagagcaggaaagatgatgcaagcgacaggaaaggccctctgcttttcttcccagcaaaggttggccttacgaaatcctttgtgtcgatttcaccaagaagtggagacttttcggcatcgggccatctcagatacttggctgacggtgaaccgcatggaacagtgcaggacggaatatagaggagcactattatggatgaaggacgtgtctcaggagcttgatccagacctctacaagcaaatggagaagttcaggaaggtacaaacacaagtgcgccttgcaaaaaaaaactttgacaaattgaagatggatgtttgtcaaaaagtggatcttcttggagcgagcagatgcaatctcttgtctcacatgctagcaacataccagaccactctgcttcatttttgggagaaaacttctcacactatggcagccatccatgagagtttcaaaggttatcaaccatatgaatttactactttaaag

SEQ ID NO: 144537 - DNA, 1415 bp, Homo sapiens
  Payload ID: 8561
  Gene Symbol: ICA1
  Gene Name: islet cell autoantigen 1, 69kDa
  ENST ID: ENST00000339809
  CDS Start-End: 168-941
taccccaggagatgggggtcgaggagagaccccggggagtagagagagagaaactcactccccgagtccccgaccctccccaagcaaggttataatataacttatcctctcatgcttttttcctgccccttctccccaaatcatcaacaatagaagaagaagaaaacatgtcaggacacaaatgcagttatccctgggacttacaggatcgatatgctcaagataagtcagttgtaaataagatgcaacagaaatattgggagacgaagcaggcctttattaaagccacagggaagaaggaagatgaacatgttgttgcctctgacgcggacctggatgccaagctagagctgtttcattcaattcagagaacctgtctggacttatcgaaagcaattgtactctatcaaaagaggatatgtttcttgtctcaagaagaaaacgaactgggaaaatttcttcgatcccaaggtttccaagataaaaccagagcaggaaagatgatgcaagcgacaggaaaggccctctgcttttcttcccagcaaaggttggccttacgaaatcctttgtgtcgatttcaccaagaagtggagacttttcggcatcgggccatctcagatacttggctgacggtgaaccgcatggaacagtgcaggacggaatatagaggagcactattatggatgaaggacgtgtctcaggagcttgatccagacctctacaagcaaatggagaagttcaggaaggtacaaacacaagtgcgccttgcaaaaaaaaactttgacaaattgaagatggatgtttgtcaaaaagtggatcttcttggagcgagcagatgcaatctcttgtctcacatgctagcaacataccagcttgcctgggaccagtggcagggaccccggaacctgaaggtgctgacaaagatgacctgctgctgttgagtgagatcttcaatgcttcctccttggaagagggcgagttcagcaaagagtgggccgctgtgtttggagacggccaagtgaaggagccagtgcccactatggccctgggagagccagaccccaaggcccagacaggctcaggtttccttccttcgcagcttttagaccaaaatatgaaagacttacaggcctcgctacaagaacctgctaaggctgcctcagacctgactgcctggttcagcctcttcgctgacctcgacccactctcaaatcctgatgctgttgggaaaaccgataaagaacacgaattgctcaatgcatgaatctgtacccttcgggagggcactcacatgccgcccccagcagctcccctgggggctagcagaagtataaagtgatcagtatgctgttttaataattatgtgccattttaataaaatgaaagggtcaacggccctgtttatattggtataa

SEQ ID NO: 144538 - DNA, 2133 bp, Homo sapiens
  Payload ID: 8561
  Gene Symbol: ICA1
  Gene Name: islet cell autoantigen 1, 69kDa
  Uniprot ID: Q05084
  ENST ID: ENST00000396675
  CDS Start-End: 68-1519
gctgcaggaagcagcaggagacgcccggcagccgggacggtcggggacgcctgaagaagaagaaaacatgtcaggacacaaatgcagttatccctgggacttacaggatcgatatgctcaagataagtcagttgtaaataagatgcaacagaaatattgggagacgaagcaggcctttattaaagccacagggaagaaggaagatgaacatgttgttgcctctgacgcggacctggatgccaagctagagctgtttcattcaattcagagaacctgtctggacttatcgaaagcaattgtactctatcaaaagaggatatgtttcttgtctcaagaagaaaacgaactgggaaaatttcttcgatcccaaggtttccaagataaaaccagagcaggaaagatgatgcaagcgacaggaaaggccctctgcttttcttcccagcaaaggttggccttacgaaatcctttgtgtcgatttcaccaagaagtggagacttttcggcatcgggccatctcagatacttggctgacggtgaaccgcatggaacagtgcaggacggaatatagaggagcactattatggatgaaggacgtgtctcaggagcttgatccagacctctacaagcaaatggagaagttcaggaaggtacaaacacaagtgcgccttgcaaaaaaaaactttgacaaattgaagatggatgtttgtcaaaaagtggatcttcttggagcgagcagatgcaatctcttgtctcacatgctagcaacataccagaccactctgcttcatttttgggagaaaacttctcacactatggcagccatccatgagagtttcaaaggttatcaaccatatgaatttactactttaaagagcttacaagaccctatgaaaaaattagttgagaaagaagagaagaagaaaatcaaccagcaggaaagtacagatgcagccgtgcaggagccgagccaattaatttcattagaggaagaaaaccagcgcaaggaatcctctagttttaagactgaagatggaaaaagtattttatctgccttagacaaaggctctacacatactgcatgctcaggacccatagatgaactattagacatgaaatctgaggaaggtgcttgcctgggaccagtggcagggaccccggaacctgaaggtgctgacaaagatgacctgctgctgttgagtgagatcttcaatgcttcctccttggaagagggcgagttcagcaaagagtgggccgctgtgtttggagacggccaagtgaaggagccagtgcccactatggccctgggagagccagaccccaaggcccagacaggctcaggtttccttccttcgcagcttttagaccaaaatatgaaagacttacaggcctcgctacaagaacctgctaaggctgcctcagacctgactgcctggttcagcctcttcgctgacctcgacccactctcaaatcctgatgctgttgggaaaaccgataaagaacacgaattgctcaatgcatgaatctgtacccttcgggagggcactcacatgccgcccccagcagctcccctgggggctagcagaagtataaagtgatcagtatgctgttttaataattatgtgccattttaataaaatgaaagggtcaacggccctgtttatattggtataattatttactcttatttggtataaagggttttcgtgtatctctatgtggatctaaataatacaggattgtctagaagcggtttccaggccaccgctctcctgcctacatcccatcatggctgctgcggtgtcactgggctaccgtgagatccaagttgaaatcagaagcctactttgatggtaggtttgaatgacgtgtcctacagcctcagaggcagcaggaggctagcaaagcttaaatgcctccttctctgcccccagcctctgtcccccttggaggagggctgtaggaagattccctcttcctgccaagccaccttccagtgagctctggatgaagctctggccaaccaaagacactgtccccacagcaggtgcctggtgggccacgtgttctcacactggtggaggagctgggcttctgtccaaggcacaaaccttactatggaaagcagccatatttg

SEQ ID NO: 144539 - DNA, 1742 bp, Homo sapiens
  Payload ID: 8561
  Gene Symbol: ICA1
  Gene Name: islet cell autoantigen 1, 69kDa
  ENST ID: ENST00000401396
  CDS Start-End: 183-1598
ctcactctggcagctagaggttttgcctctggccagtgaccattcctttgagtagtgagctttctgttctttccagtaactgctggcaagttataatataacttatcctctcatgcttttttcctgccccttctccccaaatcatcaacaatagaagaagaagaaaacatgtcaggacacaaatggatcgatatgctcaagataagtcagttgtaaataagatgcaacagaaatattgggagacgaagcaggcctttattaaagccacagggaagaaggaagatgaacatgttgttgcctctgacgcggacctggatgccaagctagagctgtttcattcaattcagagaacctgtctggacttatcgaaagcaattgtactctatcaaaagaggatatgtttcttgtctcaagaagaaaacgaactgggaaaatttcttcgatcccaaggtttccaagataaaaccagagcaggaaagatgatgcaagcgacaggaaaggccctctgcttttcttcccagcaaaggttggccttacgaaatcctttgtgtcgatttcaccaagaagtggagacttttcggcatcgggccatctcagatacttggctgacggtgaaccgcatggaacagtgcaggacggaatatagaggagcactattatggatgaaggacgtgtctcaggagcttgatccagacctctacaagcaaatggagaagttcaggaaggtacaaacacaagtgcgccttgcaaaaaaaaactttgacaaattgaagatggatgtttgtcaaaaagtggatcttcttggagcgagcagatgcaatctcttgtctcacatgctagcaacataccagaccactctgcttcatttttgggagaaaacttctcacactatggcagccatccatgagagtttcaaaggttatcaaccatatgaatttactactttaaagagcttacaagaccctatgaaaaaattagttgagaaagaagagaagaagaaaatcaaccagcaggaaagtacagatgcagccgtgcaggagccgagccaattaatttcattagaggaagaaaaccagcgcaaggaatcctctagttttaagactgaagatggaaaaagtattttatctgccttagacaaaggctctacacatactgcatgctcaggacccatagatgaactattagacatgaaatctgaggaaggtgcttgcctgggaccagtggcagggaccccggaacctgaaggtgctgacaaagatgacctgctgctgttgagtgagatcttcaatgcttcctccttggaagagggcgagttcagcaaagagtgggccgctgtgtttggagacggccaagtgaaggagccagtgcccactatggccctgggagagccagaccccaaggcccagacaggctcaggtttccttccttcgcagcttttagaccaaaatatgaaagacttacaggcctcgctacaagaacctgctaaggctgcctcagacctgactgcctggttcagcctcttcgctgacctcgacccactctcaaatcctgatgctgttgggaaaaccgataaagaacacgaattgctcaatgcatgaatctgtacccttcgggagggcactcacatgccgcccccagcagctcccctgggggctagcagaagtataaagtgatcagtatgctgttttaataattatgtgccattttaataaaatgaaagggtcaacggccctgtttatatt

SEQ ID NO: 144540 - DNA, 2458 bp, Homo sapiens
  Payload ID: 8561
  Gene Symbol: ICA1
  Gene Name: islet cell autoantigen 1, 69kDa
  Uniprot ID: Q05084
  ENST ID: ENST00000402384
  CDS Start-End: 268-1719
gctgcgctgcggtgcgcacgggctccgccggttgctattccggctggtggcggccgccgcaggaagggccggttcctgcgctccccccgcccctttccctcgccttcggctgacgctgacgtcggatgagtgatccggagggacgctccgaccgcggccgggaggctcctgggggccggggctccgaggttataatataacttatcctctcatgcttttttcctgccccttctccccaaatcatcaacaatagaagaagaagaaaacatgtcaggacacaaatgcagttatccctgggacttacaggatcgatatgctcaagataagtcagttgtaaataagatgcaacagaaatattgggagacgaagcaggcctttattaaagccacagggaagaaggaagatgaacatgttgttgcctctgacgcggacctggatgccaagctagagctgtttcattcaattcagagaacctgtctggacttatcgaaagcaattgtactctatcaaaagaggatatgtttcttgtctcaagaagaaaacgaactgggaaaatttcttcgatcccaaggtttccaagataaaaccagagcaggaaagatgatgcaagcgacaggaaaggccctctgcttttcttcccagcaaaggttggccttacgaaatcctttgtgtcgatttcaccaagaagtggagacttttcggcatcgggccatctcagatacttggctgacggtgaaccgcatggaacagtgcaggacggaatatagaggagcactattatggatgaaggacgtgtctcaggagcttgatccagacctctacaagcaaatggagaagttcaggaaggtacaaacacaagtgcgccttgcaaaaaaaaactttgacaaattgaagatggatgtttgtcaaaaagtggatcttcttggagcgagcagatgcaatctcttgtctcacatgctagcaacataccagaccactctgcttcatttttgggagaaaacttctcacactatggcagccatccatgagagtttcaaaggttatcaaccatatgaatttactactttaaagagcttacaagaccctatgaaaaaattagttgagaaagaagagaagaagaaaatcaaccagcaggaaagtacagatgcagccgtgcaggagccgagccaattaatttcattagaggaagaaaaccagcgcaaggaatcctctagttttaagactgaagatggaaaaagtattttatctgccttagacaaaggctctacacatactgcatgctcaggacccatagatgaactattagacatgaaatctgaggaaggtgcttgcctgggaccagtggcagggaccccggaacctgaaggtgctgacaaagatgacctgctgctgttgagtgagatcttcaatgcttcctccttggaagagggcgagttcagcaaagagtgggccgctgtgtttggagacggccaagtgaaggagccagtgcccactatggccctgggagagccagaccccaaggcccagacaggctcaggtttccttccttcgcagcttttagaccaaaatatgaaagacttacaggcctcgctacaagaacctgctaaggctgcctcagacctgactgcctggttcagcctcttcgctgacctcgacccactctcaaatcctgatgctgttgggaaaaccgataaagaacacgaattgctcaatgcatgaatctgtacccttcgggagggcactcacatgccgcccccagcagctcccctgggggctagcagaagtataaagtgatcagtatgctgttttaataattatgtgccattttaataaaatgaaagggtcaacggccctgtttatattggtataattatttactcttatttggtataaagggttttcgtgtatctctatgtggatctaaataatacaggattgtctagaagcggtttccaggccaccgctctcctgcctacatcccatcatggctgctgcggtgtcactgggctaccgtgagatccaagttgaaatcagaagcctactttgatggtaggtttgaatgacgtgtcctacagcctcagaggcagcaggaggctagcaaagcttaaatgcctccttctctgcccccagcctctgtcccccttggaggagggctgtaggaagattccctcttcctgccaagccaccttccagtgagctctggatgaagctctggccaaccaaagacactgtccccacagcaggtgcctggtgggccacgtgttctcacactggtggaggagctgggcttctgtccaaggcacaaaccttactatggaaagcagccatatttgcagataccactgtctccttttgtcctcttcgtggctggaattcaaaagcatgtatttctgaagcctcttgtgacattgttttttttttttttttaattaaacagaaaagatatttgacatgcaaa

SEQ ID NO: 144541 - DNA, 2440 bp, Homo sapiens
  Payload ID: 8561
  Gene Symbol: ICA1
  Gene Name: islet cell autoantigen 1, 69kDa
  Uniprot ID: Q05084
  ENST ID: ENST00000406470
  CDS Start-End: 253-1704
ttgtgacgcaaacgctatggccacgtggaacacctgccggagagcaggggcggggtcactctgggcggcggatccgagcgggggataccccaggagatgggggtcgaggagagaccccggggagtagagagagagaaactcactccccgagtccccgaccctccccaagcaaggttataatataacttatcctctcatgcttttttcctgccccttctccccaaatcatcaacaatagaagaagaagaaaacatgtcaggacacaaatgcagttatccctgggacttacaggatcgatatgctcaagataagtcagttgtaaataagatgcaacagaaatattgggagacgaagcaggcctttattaaagccacagggaagaaggaagatgaacatgttgttgcctctgacgcggacctggatgccaagctagagctgtttcattcaattcagagaacctgtctggacttatcgaaagcaattgtactctatcaaaagaggatatgtttcttgtctcaagaagaaaacgaactgggaaaatttcttcgatcccaaggtttccaagataaaaccagagcaggaaagatgatgcaagcgacaggaaaggccctctgcttttcttcccagcaaaggttggccttacgaaatcctttgtgtcgatttcaccaagaagtggagacttttcggcatcgggccatctcagatacttggctgacggtgaaccgcatggaacagtgcaggacggaatatagaggagcactattatggatgaaggacgtgtctcaggagcttgatccagacctctacaagcaaatggagaagttcaggaaggtacaaacacaagtgcgccttgcaaaaaaaaactttgacaaattgaagatggatgtttgtcaaaaagtggatcttcttggagcgagcagatgcaatctcttgtctcacatgctagcaacataccagaccactctgcttcatttttgggagaaaacttctcacactatggcagccatccatgagagtttcaaaggttatcaaccatatgaatttactactttaaagagcttacaagaccctatgaaaaaattagttgagaaagaagagaagaagaaaatcaaccagcaggaaagtacagatgcagccgtgcaggagccgagccaattaatttcattagaggaagaaaaccagcgcaaggaatcctctagttttaagactgaagatggaaaaagtattttatctgccttagacaaaggctctacacatactgcatgctcaggacccatagatgaactattagacatgaaatctgaggaaggtgcttgcctgggaccagtggcagggaccccggaacctgaaggtgctgacaaagatgacctgctgctgttgagtgagatcttcaatgcttcctccttggaagagggcgagttcagcaaagagtgggccgctgtgtttggagacggccaagtgaaggagccagtgcccactatggccctgggagagccagaccccaaggcccagacaggctcaggtttccttccttcgcagcttttagaccaaaatatgaaagacttacaggcctcgctacaagaacctgctaaggctgcctcagacctgactgcctggttcagcctcttcgctgacctcgacccactctcaaatcctgatgctgttgggaaaaccgataaagaacacgaattgctcaatgcatgaatctgtacccttcgggagggcactcacatgccgcccccagcagctcccctgggggctagcagaagtataaagtgatcagtatgctgttttaataattatgtgccattttaataaaatgaaagggtcaacggccctgtttatattggtataattatttactcttatttggtataaagggttttcgtgtatctctatgtggatctaaataatacaggattgtctagaagcggtttccaggccaccgctctcctgcctacatcccatcatggctgctgcggtgtcactgggctaccgtgagatccaagttgaaatcagaagcctactttgatggtaggtttgaatgacgtgtcctacagcctcagaggcagcaggaggctagcaaagcttaaatgcctccttctctgcccccagcctctgtcccccttggaggagggctgtaggaagattccctcttcctgccaagccaccttccagtgagctctggatgaagctctggccaaccaaagacactgtccccacagcaggtgcctggtgggccacgtgttctcacactggtggaggagctgggcttctgtccaaggcacaaaccttactatggaaagcagccatatttgcagataccactgtctccttttgtcctcttcgtggctggaattcaaaagcatgtatttctgaagcctcttgtgacattgttttttttttttttttaattaaacagaaaagatatttgacatgc

SEQ ID NO: 144542 - DNA, 1615 bp, Homo sapiens
  Payload ID: 8561
  Gene Symbol: ICA1
  Gene Name: islet cell autoantigen 1, 69kDa
  ENST ID: ENST00000407906
  CDS Start-End: 253-1305
ttgtgacgcaaacgctatggccacgtggaacacctgccggagagcaggggcggggtcactctgggcggcggatccgagcgggggataccccaggagatgggggtcgaggagagaccccggggagtagagagagagaaactcactccccgagtccccgaccctccccaagcaaggttataatataacttatcctctcatgcttttttcctgccccttctccccaaatcatcaacaatagaagaagaagaaaacatgtcaggacacaaatgcagttatccctgggacttacaggatcgatatgctcaagataagtcagttgtaaataagatgcaacagaaatattgggagacgaagcaggcctttattaaagccacagggaagaaggaagatgaacatgttgttgcctctgacgcggacctggatgccaagctagagctgtttcattcaattcagagaacctgtctggacttatcgaaagcaattgtactctatcaaaagaggatatgtttcttgtctcaagaagaaaacgaactgggaaaatttcttcgatcccaaggtttccaagataaaaccagagcaggaaagatgatgcaagcgacaggaaaggccctctgcttttcttcccagcaaaggttggccttacgaaatcctttgtgtcgatttcaccaagaagtggagacttttcggcatcgggccatctcagatacttggctgacggtgaaccgcatggaacagtgcaggacggaatatagaggagcactattatggatgaaggacgtgtctcaggagcttgatccagacctctacaagcaaatggagaagttcaggaaggtacaaacacaagtgcgccttgcaaaaaaaaactttgacaaattgaagatggatgtttgtcaaaaagtggatcttcttggagcgagcagatgcaatctcttgtctcacatgctagcaacataccagaccactctgcttcatttttgggagaaaacttctcacactatggcagccatccatgagagtttcaaaggttatcaaccatatgaatttactactttaaaggtatggaagctagaggggccactagaaaatcttgagaaaagtaaagttttgtttatatcacaagcaaagtccattgcagaaagcatcattattccaggactcagaatgctgaagagagaactgtgcccccagcagagtctttttctttctttctttctttctttttttttttttttttttttttttactgcatcaggattcaatacaatgagaatctactgcaatccaaaagcgcgaattgaaccttgaaccttgagatacatgttcctgggagatgaattgtggtgaacttgagtctaatgattggtcctgctcctttaaaatacttgtttgacattgctaaaggggagattgtacaagtcccataaactcagttacttttaattattatattcaaatatcctcacttgagaaggtgtcctcctttcctctcttacttctgaaatgtatcattttattctgagagtattatccaacataaaattgaatttttctgtaagactacagcaatattttctaattgaaaaagcagtattaaactcaatgatttttcatctca

SEQ ID NO: 144543 - DNA, 530 bp, Homo sapiens
  Payload ID: 8561
  Gene Symbol: ICA1
  Gene Name: islet cell autoantigen 1, 69kDa
  ENST ID: ENST00000457755
  CDS Start-End: 157-414
gacgctgacgtcggatgagtgatccggagggacgctccgaccgcggccgggaggctcctgggggccggggctccgaggttataatataacttatcctctcatgcttttttcctgccccttctccccaaatcatcaacaatagaagaagaagaaaacatgtcaggacacaaatgcagttatccctgggacttacaggatcgatatgctcaagataagtcagttgtaaataagatgcaacagaaatattgggagacgaagcaggcctttattaaagccacagggaagaaggaagatgaacatgttgttgcctctgacgcggacctggatgccaagctagagctgtttcattcaattcagagaacctgtctggacttatcgaaagcaattgtactctatcaaaagaggatatgttaatgaccatcccttctcagaaaatctaaccttgaccctgatggagctcacacttctttccactgccctctgatcttgtctcaagaagaaaacgaactgggaaaatttcttcgatccca

SEQ ID NO: 144544 - DNA, 551 bp, Homo sapiens
  Payload ID: 8561
  Gene Symbol: ICA1
  Gene Name: islet cell autoantigen 1, 69kDa
  ENST ID: ENST00000430867
  CDS Start-End: 150-551
gggggcgcgccgggcgggctgcaggaagcagcaggagacgcccggcagccgggacggtcggggacgcctggttataatataacttatcctctcatgcttttttcctgccccttctccccaaatcatcaacaatagaagaagaagaaaacatgtcaggacacaaatgttatccctgggacttacaggatcgatatgctcaagataagtcagttgtaaataagatgcaacagaaatattgggagacgaagcaggcctttattaaagccacagggaagaaggaagatgaacatgttgttgcctctgacgcggacctggatgccaagctagagctgtttcattcaattcagagaacctgtctggacttatcgaaagcaattgtactctatcaaaagaggatatgtttcttgtctcaagaagaaaacgaactgggaaaatttcttcgatcccaaggtttccaagataaaaccagagcaggaaagatgatgcaagcgacaggaaaggccctctgcttttcttcccagcaaaggttggccttacgaaatcctttgtgt

SEQ ID NO: 144545 - DNA, 604 bp, Homo sapiens
  Payload ID: 8561
  Gene Symbol: ICA1
  Gene Name: islet cell autoantigen 1, 69kDa
  ENST ID: ENST00000447326
  CDS Start-End: 119-604
ggatccgagcgggggataccccaggagatgggggtcgaggagagaccccggggagtagagagagagaaactcactccccgagtccccgaccctccccaagcaagaagaagaagaaaacatgtcaggacacaaatgcagttatccctgggacttacaggatcgatatgctcaagataagtcagttgtaaataagatgcaacagaaatattgggagacgaagcaggcctttattaaagccacagggaagaaggaagatgaacatgttgttgcctctgacgcggacctggatgccaagctagagctgtttcattcaattcagagaacctgtctggacttatcgaaagcaattgtactctatcaaaagaggatatgtttcttgtctcaagaagaaaacgaactgggaaaatttcttcgatcccaaggtttccaagataaaaccagagcaggaaagatgatgcaagcgacaggaaaggccctctgcttttcttcccagcaaaggttggccttacgaaatcctttgtgtcgatttcaccaagaagtggagacttttcggcatcgggccatctcagatacttggctgacggtgaaccgcatggaacagtgc

SEQ ID NO: 144546 - DNA, 1539 bp, Homo sapiens
  Payload ID: 8561
  Gene Symbol: ICA1
  Gene Name: islet cell autoantigen 1, 69kDa
  Uniprot ID: Q05084
  ENST ID: ENST00000422063
  CDS Start-End: 1-1539
atgtcaggacacaaatgcagttatccctgggacttacaggatcgatatgctcaagataagtcagttgtaaataagatgcaacagaaatattgggagacgaagcaggcctttattaaagccacagggaagaaggaagatgaacatgttgttgcctctgacgcggacctggatgccaagctagagctgtttcattcaattcagagaacctgtctggacttatcgaaagcaattgtactctatcaaaagaggatatgtttcttgtctcaagaagaaaacgaactgggaaaatttcttcgatcccaaggtttccaagataaaaccagagcaggaaagatgatgcaagcgacaggaaaggccctctgcttttcttcccagcaaaggttggccttacgaaatcctttgtgtcgatttcaccaagaagtggagacttttcggcatcgggccatctcagatacttggctgacggtgaaccgcatggaacagtgcaggacggaatatagaggagcactattatggatgaaggacgtgtctcaggagcttgatccagacctctacaagcaaatggagaagttcaggaaggtacaaacacaagtgcgccttgcaaaaaaaaactttgacaaattgaagatggatgtttgtcaaaaagtggatcttcttggagcgagcagatgcaatctcttgtctcacatgctagcaacataccagaccactctgcttcatttttgggagaaaacttctcacactatggcagccatccatgagagtttcaaaggttatcaaccatatgaatttactactttaaagagcttacaagaccctatgaaaaaattagttgagaaagaagagaagaagaaaatcaaccagcaggaaagtacagatgcagccgtgcaggagccgagccaatatttacagaatatttgcctcgagatgaaagcaaattcagatattaagatgctacagaaagggaaagaaggccagcaaattggcatattaatttcattagaggaagaaaaccagcgcaaggaatcctctagttttaagactgaagatggaaaaagtattttatctgccttagacaaaggctctacacatactgcatgctcaggacccatagatgaactattagacatgaaatctgaggaaggtgcttgcctgggaccagtggcagggaccccggaacctgaaggtgctgacaaagatgacctgctgctgttgagtgagatcttcaatgcttcctccttggaagagggcgagttcagcaaagagtgggccgctgtgtttggagacggccaagtgaaggagccagtgcccactatggccctgggagagccagaccccaaggcccagacaggctcaggtttccttccttcgcagcttttagaccaaaatatgaaagacttacaggcctcgctacaagaacctgctaaggctgcctcagacctgactgcctggttcagcctcttcgctgacctcgacccactctcaaatcctgatgctgttgggaaaaccgataaagaacacgaattgctcaatgcatga

SEQ ID NO: 144547 - DNA, 539 bp, Homo sapiens
  Payload ID: 8561
  Gene Symbol: ICA1
  Gene Name: islet cell autoantigen 1, 69kDa
  ENST ID: ENST00000446305
  CDS Start-End: 328-539
aagcagtaggcactacgcacagcacagagggaaccctggggtgtacgctgtggctcccacctgtccgccaggtcattgtgacgcaaacgctatggccacgtggaacacctgccggagagcaggggcggggtcactctgggcggcggatccgagcgggggataccccaggagatgggggtcgaggagagaccccggggagtagagagagagaaactcactccccgagtccccgaccctccccaagcaaggttataatataacttatcctctcatgcttttttcctgccccttctccccaaatcatcaacaatagaagaagaagaaaacatgtcaggacacaaatgttatccctgggacttacaggatcgatatgctcaagataagtcagttgtaaataagatgcaacagaaatattgggagacgaagcaggcctttattaaagccacagggaagaaggaagatgaacatgttgttgcctctgacgcggacctggatgccaagctagagctgtttcattcaattcagagaacctgtctgga

SEQ ID NO: 144548 - DNA, 1956 bp, Homo sapiens
  Payload ID: 8561
  Gene Symbol: ICA1
  Gene Name: islet cell autoantigen 1, 69kDa
  ENST ID: ENST00000455539
  CDS Start-End: 140-403
agtgatccggagggacgctccgaccgcggccgggaggctcctgggggccggggctccgaggttataatataacttatcctctcatgcttttttcctgccccttctccccaaatcatcaacaatagaagaagaagaaaacatgtcaggacacaaatgcagttatccctgggacttacaggatcgatatgctcaagataagtcagttgtaaataagatgcaacagaaatattgggagacgaagcaggcctttattaaagccacagggaagaaggaagatgaacatgttgttgcctctgacgcggacctggatgccaagctagagctgtttcattcaattcagagaacctgtctggacttatcgaaagcaattgtactctatcaaaagaggatatgttcattttaggaggccaaggcaggaggatcacttggagccaggagtttgagaccagcctgggcaacaaagtgagacccccatctctacaaaaaataaaaacacttaaaaattatccgggtaccgtgcatgtgcagtcccagctactcaggaggctgaggcaggaggatcacagtgacctataatgagccgttgtgctccagcctgggcgacagaagtcttgtctcaagaagaaaacgaactgggaaaatttcttcgatcccaaggtttccaagataaaaccagagcaggaaagatgatgcaagcgacaggaaaggccctctgcttttcttcccagcaaaggttggccttacgaaatcctttgtgtcgatttcaccaagaagtggagacttttcggcatcgggccatctcagatacttggctgacggtgaaccgcatggaacagtgcaggacggaatatagaggagcactattatggatgaaggacgtgtctcaggagcttgatccagacctctacaagcaaatggagaagttcaggaaggtacaaacacaagtgcgccttgcaaaaaaaaactttgacaaattgaagatggatgtttgtcaaaaagtggatcttcttggagcgagcagatgcaatctcttgtctcacatgctagcaacataccagaccactctgcttcatttttgggagaaaacttctcacactatggcagccatccatgagagtttcaaaggttatcaaccatatgaatttactactttaaagagcttacaagaccctatgaaaaaattagttgagaaagaagagaagaagaaaatcaaccagcaggaaagtacagatgcagccgtgcaggagccgagccaattaatttcattagaggaagaaaaccagcgcaaggaatcctctagttttaagactgaagatggaaaaagtattttatctgccttagacaaaggctctacacatactgcatgctcaggacccatagatgaactattagacatgaaatctgaggaaggtgcttgcctgggaccagtggcagggaccccggaacctgaaggtgctgacaaagatgacctgctgctgttgagtgagatcttcaatgcttcctccttggaagagggcgagttcagcaaagagtgggccgctgtgtttggagacggccaagtgaaggagccagtgcccactatggccctgggagagccagaccccaaggcccagacaggctcaggtttccttccttcgcagcttttagaccaaaatatgaaagacttacaggcctcgctacaagaacctgctaaggctgcctcagacctgactgcctggttcagcctcttcgctgacctcgacccactctcaaatcctgatgctgttgggaaaaccgataaagaacacgaattgctcaatgcatgaatctgtacccttcgggagggcactcacatgccgcccccagcagctcccctgggggctagcagaagtataaagtgatcagtatgctgttttaataattatgtgccattttaataaaatgaaagggtcaacggccctgtttatattggtataa

SEQ ID NO: 144549 - DNA, 3457 bp, Homo sapiens
  Payload ID: 8562
  Gene Symbol: ICA1L
  Gene Name: islet cell autoantigen 1,69kDa-like
  Uniprot ID: Q8NDH6
  ENST ID: ENST00000358299
  CDS Start-End: 375-1823
aatgttctgaccggtttggtgtttgtcatttcactttattaagtaaagaggaaatcgggaaaggaggaatagagagggtccccgagttcattcaagagcagaccgagagatgctccgatcccgagtcgggccggtggcggggtcaggccggcgcccgaggggggcgaacgcggacgccaggtcgcgcggtttaaatctcccgcctcccgcagcgggagcctgacacctccacgcactggtgcggaggggcactggctgccggagggccgggagtcggcgcggggctcgcgggcggtggccggaacgggtgccgggacggatcaccgtacggccgaacgcgacccgaggaggcggaagagcggcgccgtcactccatggattcctttgggcaacccagaccagaagataatcagtcagtagtcagaagaatgcaaaagaaatactggaaaactaaacaggtctttatcaaagcaacaggaaaaaaagaggatgagcacttggtggcgtctgatgctgaactggatgctaaacttgaggtttttcactctgttcaagagacatgcactgaacttctgaagataatcgagaaataccagctaagactcaatgttatatcagaggaagaaaatgagctagggctctttttaaaatttcaagcagaacgggatgcaactcaagctggcaaaatgatggatgccactggcaaggcactttgttcttcagccaagcaaagattggccctgtgtactcctctgtctcgtctgaagcaagaagtagcaacattcagtcaaagggcagtatctgataccttgatgacaattaatcggatggagcaggcacgcacagaatacagaggagctctactgtggatgaaagatgtatcccaagagctggacccagacaccttaaagcaaatggaaaagtttagaaaagtacagatgcaagtgagaaatagcaaagcttcttttgacaagttaaagatggatgtttgtcagaaagtggatttacttggagctagtcgctgcaatatgctatctcattcgctcactacctaccagagaacactgcttggattctggaagaaaacagctcgaatgatgtcccaaattcatgaagcctgtattggctttcatccgtatgattttgtagctctcaagcaactacaagacacgccaagcaagattagtgaagacaataaagatgaacaaataggcggttttcttactgaacagctcaataagctagttttgtctgatgaggaagcaagctttgagagtgaacaagcaaacaaagatcacaatgaaaaacattctcaaatgagagaatttggagcacctcagttttctaactctgaaaatgttgcaaaagatctacctgtagattcattggaaggagaagattttgagaaggaattctcatttctgaacaacctcctaagttctggttcttcaagtactagtgaatttacccaagaatgccagactgcctttgggagccccagtgccagtctcacatcccaggagccttccatggggtctgagcccctcgctcattcttctcgattccttccttcacaactctttgaccttggctttcatgtggctggagcgttcaacaactgggtctcccaagaggaatcagaactttgtctttcacacactgataaccagccagtgccttcacagagtccaaagaaattaacaagatcccccaacaatggcaaccaagacatgtcagcctggttcaatctgtttgcagacttggatccactttcaaacccagatgctattggacactcagatgatgaacttcttaatgcttgactgaagttataatgtcacttcagtggccttgagacatcaattttgcaacgtatttccttcgtggaaaggatttagattgtaacccgcacacaaaagcacggtgtttgtgaatataacacctgtcagccaactttagacagatggtaaagaccacatttgaataagtacacatctttcatatcttggatttgcagctgttggtactatgtggaaaatattagaaacttctatgtggaaaatattagaaactacagagtttgcgatatttagatactgaaatttatgtcaaaataacggctaggaataattctgtcaatatggagttgagcttatttctttggaaacccttttaagttgccttgctggctgtgagaattttatatgtggataacaaagatagatagatagcatgtaaattgggttgtggtttggggtcagtttttaaatgaaatagtagcgaggaggattttctgttttggaaaacaccattagaaccagaccagctttgttttgggttagagagagtaagatttgagaactcagtttgctttaatgaaatcacagagaaacttggtacttgtttttcttcatttggaggctaaaatgtaatgttttttcattcatacaaaataatggacactccctaattccattattaaatcttgaaggggaagtagcaggataattaatttgctaagcccatcctctgcagaaacagaaaaatctatcttcccatctcctaaaactcagaatgcacagtaatacttaaggcttgtacaagtgtcttcagacccactttttcatacacttgctatatagtagtatgcagtatttatattattcctgaaaataaaatgaggggagaatattccctaagcaactggcaatagtattcctgaaatacctagaaatttctatctgaatgagggagacacttatgaacaccttatccttacatatatttgcatacttatctcatattttgtgacataattatttaacccagaatactttctggcagacatacagaaagctctgtgtgatcaataagggagtgtctcatttttctacttccctctttctgtgggtgacatgatctgaggttctatttgattactaagcaaaatctgttacccctacagggtttagaacctaagtattagagaggaaggctatttaatggaagttagtgtaagctgataaaaacgtagctaccgtacacacacatcaatcactcaatttcctgtccttttaaattgcccaccctttaattttgaagcaatttcccaagtgtgtgtttgttttatatttgtcatccagtccattgcatttccataagaagacattttgactggctgggtgcggtggctcacgcttgtaatcccagcactttgggaggctgaggcaggcggatcacgaggtcaggagatggagaccatcctggctaacatggtgaaaccccgtctctactaaaaatacaaaaaattagccaggcgtggtggcacgtgcctgtagtcccagctactccggaggctgaggcaggagaatggcgtgaacccgggaggcggagcttgcagtgagctgagatggcgccactgcactccagcctaggcaacagagcaagactccgtctc

SEQ ID NO: 144550 - DNA, 5173 bp, Homo sapiens
  Payload ID: 8562
  Gene Symbol: ICA1L
  Gene Name: islet cell autoantigen 1,69kDa-like
  Uniprot ID: Q8NDH6
  ENST ID: ENST00000392237
  CDS Start-End: 159-1607
cgaggaggcggaagagcggcgccggcgacgtactgtaagacgatattactttaatcatcttcacatcagtatttatggaatagccacaggtgcctcatcctttagtaggagttaattatacatttactggccgagtaaacatctccgaatgtcactccatggattcctttgggcaacccagaccagaagataatcagtcagtagtcagaagaatgcaaaagaaatactggaaaactaaacaggtctttatcaaagcaacaggaaaaaaagaggatgagcacttggtggcgtctgatgctgaactggatgctaaacttgaggtttttcactctgttcaagagacatgcactgaacttctgaagataatcgagaaataccagctaagactcaatgttatatcagaggaagaaaatgagctagggctctttttaaaatttcaagcagaacgggatgcaactcaagctggcaaaatgatggatgccactggcaaggcactttgttcttcagccaagcaaagattggccctgtgtactcctctgtctcgtctgaagcaagaagtagcaacattcagtcaaagggcagtatctgataccttgatgacaattaatcggatggagcaggcacgcacagaatacagaggagctctactgtggatgaaagatgtatcccaagagctggacccagacaccttaaagcaaatggaaaagtttagaaaagtacagatgcaagtgagaaatagcaaagcttcttttgacaagttaaagatggatgtttgtcagaaagtggatttacttggagctagtcgctgcaatatgctatctcattcgctcactacctaccagagaacactgcttggattctggaagaaaacagctcgaatgatgtcccaaattcatgaagcctgtattggctttcatccgtatgattttgtagctctcaagcaactacaagacacgccaagcaagattagtgaagacaataaagatgaacaaataggcggttttcttactgaacagctcaataagctagttttgtctgatgaggaagcaagctttgagagtgaacaagcaaacaaagatcacaatgaaaaacattctcaaatgagagaatttggagcacctcagttttctaactctgaaaatgttgcaaaagatctacctgtagattcattggaaggagaagattttgagaaggaattctcatttctgaacaacctcctaagttctggttcttcaagtactagtgaatttacccaagaatgccagactgcctttgggagccccagtgccagtctcacatcccaggagccttccatggggtctgagcccctcgctcattcttctcgattccttccttcacaactctttgaccttggctttcatgtggctggagcgttcaacaactgggtctcccaagaggaatcagaactttgtctttcacacactgataaccagccagtgccttcacagagtccaaagaaattaacaagatcccccaacaatggcaaccaagacatgtcagcctggttcaatctgtttgcagacttggatccactttcaaacccagatgctattggacactcagatgatgaacttcttaatgcttgactgaagttataatgtcacttcagtggccttgagacatcaattttgcaacgtatttccttcgtggaaaggatttagattgtaacccgcacacaaaagcacggtgtttgtgaatataacacctgtcagccaactttagacagatggtaaagaccacatttgaataagtacacatctttcatatcttggatttgcagctgttggtactatgtggaaaatattagaaacttctatgtggaaaatattagaaactacagagtttgcgatatttagatactgaaatttatgtcaaaataacggctaggaataattctgtcaatatggagttgagcttatttctttggaaacccttttaagttgccttgctggctgtgagaattttatatgtggataacaaagatagatagatagcatgtaaattgggttgtggtttggggtcagtttttaaatgaaatagtagcgaggaggattttctgttttggaaaacaccattagaaccagaccagctttgttttgggttagagagagtaagatttgagaactcagtttgctttaatgaaatcacagagaaacttggtacttgtttttcttcatttggaggctaaaatgtaatgttttttcattcatacaaaataatggacactccctaattccattattaaatcttgaaggggaagtagcaggataattaatttgctaagcccatcctctgcagaaacagaaaaatctatcttcccatctcctaaaactcagaatgcacagtaatacttaaggcttgtacaagtgtcttcagacccactttttcatacacttgctatatagtagtatgcagtatttatattattcctgaaaataaaatgaggggagaatattccctaagcaactggcaatagtattcctgaaatacctagaaatttctatctgaatgagggagacacttatgaacaccttatccttacatatatttgcatacttatctcatattttgtgacataattatttaacccagaatactttctggcagacatacagaaagctctgtgtgatcaataagggagtgtctcatttttctacttccctctttctgtgggtgacatgatctgaggttctatttgattactaagcaaaatctgttacccctacagggtttagaacctaagtattagagaggaaggctatttaatggaagttagtgtaagctgataaaaacgtagctaccgtacacacacatcaatcactcaatttcctgtccttttaaattgcccaccctttaattttgaagcaatttcccaagtgtgtgtttgttttatatttgtcatccagtccattgcatttccataagaagacattttgactggctgggtgcggtggctcacgcttgtaatcccagcactttgggaggctgaggcaggcggatcacgaggtcaggagatggagaccatcctggctaacatggtgaaaccccgtctctactaaaaatacaaaaaattagccaggcgtggtggcacgtgcctgtagtcccagctactccggaggctgaggcaggagaatggcgtgaacccgggaggcggagcttgcagtgagctgagatggcgccactgcactccagcctaggcaacagagcaagactccgtctcaaaaaaaaaaaaaaaaaaaaaagacattttaactaagttattcacagtagcttccatgtgctcttagttctattctaaacaggcttatttagaaaaggattgcttgtaatgtttgtcatggtacatagaaaacattggaccagagtaggtaaaatgcagtccatgtcccatccatagccatctacaatagtaactgcccacaggctctccagaaaactactacaatggccaagtacagtataggctggaaagaccttatctgaaggtcagaaacattgactcagaaaaaaggtatgaagtctttccataaaatcttttcacaatattactcctatttcttttagattttaatgagccattacttatctcttcagaagacttaagtcttcctttatactcagtgaaatttcccagaatgtaatactgtcactgttctgccaagttccaatcaccaagatcatgattacgaatcccaatctgaattctatacccatggtgactctgatgctctcaacttttgagtgcctcaaaaaatgctaaaactttggctgggcatggtggctcacgcctgtaatcccagcactttgggaggccatggcgggtggaacatttgagggcatgagttcgagaccagcctggccaacatggtgaaaccctgtctctactaaaaatacaaaaattagccaggtgtggaggtacatgcctgtaatcccagctactcaggaggctgaggcagaagaattgcttgaacccaggcggcagaggttgcagtgagtcgagattgcaccactacactccagcctgggcaacagagagcgactctctcaaaaaaaaaaaaaaaaaaaaaaaaaaaagctaactttatgtcttgagagtttgtaccatttttctttgtagtggtcaccttgctaatgcattagttctgagatatttatctccctcacatgtgtgcaaggaagtccctgttatcgaatacagatactttaacaagcagacaaagcagaaacccaaagtccatactaggaacaccctaaattttccaaaagcaaaagttctcccgaaatggagacatacaagggacttttattattctgttactagtttctataacatttcttctttcaacagagtatatgtttcccatttaacccagagcaacattaacttccttagcaagtccagttctaacttccaacaagtccaaccactgtttttgaagagcatatcagtaactatattaagatgaaggtaaccacattcgtattttctcaagattagttatttgaagctcagcagtttttgtggtcagaaagaaattttgctctattaaaccaatactgctaatataaaaaaccaccacactgaagaaacgagggaaaggacgggataagcacagaacagagaatgactggttgctttttgtctcaatctagataatccattcaataagaagtaaattaattatccttaaccaatggtaggctgagaacaaccctcaaaatagatattttttatgttaaatggggagaaatatctatactttatgttatactggataaaaatgtgttttaagtctaaaaaaaaccagacgagctaaactttgcctagtgtgtctacaaccattttttaggagacgcaggaataccagggcataataagatcagattggtgtaattttgtatgtttttgaaatccttcattaattgtagaaccttgatatgattagaaacaaactgtatttcaacaaacaggtttcagtatttgcacactgaaaaagtgttttgtattttaactataaatatttcacgtatctgtatagaccatctagaaatgtagaggtcttacagcattagaacgaaggaagtttacatgtgctctatctatttttctgagcctcttttaataaagattgcaagaaggcataaaacaaga

SEQ ID NO: 144551 - DNA, 595 bp, Homo sapiens
  Payload ID: 8562
  Gene Symbol: ICA1L
  Gene Name: islet cell autoantigen 1,69kDa-like
  ENST ID: ENST00000412210
  CDS Start-End: 238-595
aacgcgacccgaggaggcggaagagcggcgccggcgacgtactgtaagacgatattactttaatcatcttcacatcagtatttatggaatagccacaggtgcctcatcctttagtaggagttaattatacatttactggccgagtaaacatctccgaatgtatttttttagataaggaaataaaacatttccaataaagctgaagtctcatcccacccatccgttatcagtcactccatggattcctttgggcaacccagaccagaagataatcagtcagtagtcagaagaatgcaaaagaaatactggaaaactaaacaggtctttatcaaagcaacaggaaaaaaagaggatgagcacttggtggcgtctgatgctgaactggatgctaaacttgaggtttttcactctgttcaagagacatgcactgaacttctgaagataatcgagaaataccagctaagactcaatgttatatcagaggaagaaaatgagctagggctctttttaaaatttcaagcagaacgggatgcaactcaagctggcaaaatgatggatgccactggcaaggcactttgttcttcagccaagcaaa

SEQ ID NO: 144552 - DNA, 562 bp, Homo sapiens
  Payload ID: 8562
  Gene Symbol: ICA1L
  Gene Name: islet cell autoantigen 1,69kDa-like
  ENST ID: ENST00000416760
  CDS Start-End: 268-562
gacccgaggaggcggaagagcggcgccgggaagcctctggtgattcagttacctctgactggcttgttgaatttaattttagtgctcggttatgaagattatttggctctcacaattttttgagatggggtctcactgtgtccctctggctgtagtgcagtggcacattcatagctcactacagcctcaaactcctgggctcaagtgatcctcccacttcagcatcccaggtagctgggactacaggcatatgccacaattcactccatggattcctttgggcaacccagaccagaagataatcagtcagtagtcagaagaatgcaaaagaaatactggaaaactaaacaggtctttatcaaagcaacaggaaaaaaagaggatgagcacttggtggcgtctgatgctgaactggatgctaaacttgaggtttttcactctgttcaagagacatgcactgaacttctgaagataatcgagaaataccagctaagactcaatgttatatcagaggaagaaaatgagctagggctctttttaaaatttcaagcagaacgggatg

SEQ ID NO: 144553 - DNA, 689 bp, Homo sapiens
  Payload ID: 8562
  Gene Symbol: ICA1L
  Gene Name: islet cell autoantigen 1,69kDa-like
  ENST ID: ENST00000432273
  CDS Start-End: 393-689
agatacctgatgctctaaggaagacggagaggggaaagcggggagtccatcctggcagctcacccgcgatgctggggcgttgccagtagagggggtggaatcatttttcgtgtaatagatgatcttgatgcacacagcataaaagctgttataaactatgggtctctgtaaaatagattgttgggaaggtaacatttttccatggttttgatttttcccaaaagtatttatgtattgatttatttggttctgactcaggcgacgtactgtaagacgatattactttaatcatcttcacatcagtatttatggaatagccacaggtgcctcatcctttagtaggagttaattatacatttactggccgagtaaacatctccgaatgtcactccatggattcctttgggcaacccagaccagaagataatcagtcagtagtcagaagaatgcaaaagaaatactggaaaactaaacaggtctttatcaaagcaacaggaaaaaaagaggatgagcacttggtggcgtctgatgctgaactggatgctaaacttgaggtttttcactctgttcaagagacatgcactgaacttctgaagataatcgagaaataccagctaagactcaatgttatatcagaggaagaaaatgagctagggctctttttaaaatttcaagcagaacgggatgca

SEQ ID NO: 144554 - DNA, 575 bp, Homo sapiens
  Payload ID: 8562
  Gene Symbol: ICA1L
  Gene Name: islet cell autoantigen 1,69kDa-like
  ENST ID: ENST00000437978
  CDS Start-End: 261-443
ggcggtggaggtcgctcctaatagaggcggcggcggatcacccgaacagccttcaggcgacgtactgtaagacgatattactttaatcatcttcacatcagtatttatggaatagccacaggtgcctcatcctttagtaggagttaattatacatttactggccgagtaaacatctccgaatgtatttttttagataaggaaataaaacatttccaataaagctgaagtctcatcccacccatccgttatcagtcactccatggattcctttgggcaacccagaccagaagataatcagtcagtagtcagaagaatgcaaaagaaatactggaaaactaaacaggtctttatcaaagcaacaggaaaaaaagaggatgagcacttggtggcgtctgatgctgaactggatgctaaacttgagagacatgcactgaacttctgaagataatcgagaaataccagctaagactcaatgttatatcagaggaagaaaatgagctagggctctttttaaaatttcaagcagaacgggatgcaactcaagctggcaaaatgatggatgccactggcaagg

SEQ ID NO: 144555 - DNA, 2481 bp, Homo sapiens
  Payload ID: 8562
  Gene Symbol: ICA1L
  Gene Name: islet cell autoantigen 1,69kDa-like
  ENST ID: ENST00000438804
  CDS Start-End: 470-1789
ctcggttctctgggggaccccggccgctgcctgcggccttcttccaggcgaggccctgctcggggttcttccggcctccccccaggcaaaacccgcaaggagcggtttctggcgtggctgggtcccctgcggcggaagggcgcctcccggccacgctcgctgtagtgaaggagcgcggcagcctggggctcgtttgggtgatttccctcggcggtggaggtcgctcctaatagaggcggcggcggatcacccgaacagccttcaggcgacgtactgtaagacgatattactttaatcatcttcacatcagtatttatggaatagccacaggtgcctcatcctttagtaggagttaattatacatttactggccgagtaaacatctccgaatgtatttttttagataaggaaataaaacatttccaataaagctgaagtctcatcccacccatccgttatcagtcactccatggattcctttgggcaacccagaccagaagataatcagtcagtagtcagaagaatgcaaaagaaatactggaaaactaaacaggtctttatcaaagcaacaggaaaaaaagaggatgagcacttggtggcgtctgatgctgaactggatgctaaacttgaggtttttcactctgttcaagagacatgcactgaacttctgaagataatcgagaaataccagctaagactcaatgttatatcagaggaagaaaatgagctagggctctttttaaaatttcaagcagaacgggatgcaactcaagctggcaaaatgatggatgccactggcaaggcactttgttcttcagccaagcaaagattggccctgtgtactcctctgtctcgtctgaagcaagaagtagcaacattcagtcaaagggcagtatctgataccttgatgacaattaatcggatggagcaggcacgcacagaatacagaggagctctactgtggatgaaagatgtatcccaagagctggacccagacaccttaaagcaaatggaaaagtttagaaaagtacagatgcaagtgagaaatagcaaagcttcttttgacaagttaaagatggatgtttgtcagaaagtggatttacttggagctagtcgctgcaatatgctatctcattcgctcactacctaccagagaacactgcttggattctggaagaaaacagctcgaatgatgtcccaaattcatgaagcctgtattggctttcatccgtatgattttgtagctctcaagcaactacaagacacgccaagcaagattagtgaagacaataaagatgaacaaataggcggttttcttactgaacagctcaataagctagttttgtctgatgaggaagcaagctttgagagtgaacaagcaaacaaagatcacaatgaaaaacattctcaaatgagagaatttggagcacctcagttttctaactctgaaaatgttgcaaaagatctacctgtagattcattggaaggagaagattttgagaaggaattctcatttctgaacaacctcctaagttctggttcttcaagtactagtgaatttacccaagaatgccagactgcctttgggagccccagtgccagtctcacatcccaggagccttccatggggtctgagcccctcgctcattcttctcgattccttccttcacaactctttgaccttggctttcatgtggctggagcgttcaacaataatgctgcaaaaaaaaaaaaatcatgcatgtacttcttccttcagctaaattatttccttaagaaaaattgctaggaatgggatcactgagtccaaggactgggtctcccaagaggaatcagaactttgtctttcacacactgataaccagccagtgccttcacagagtccaaagaaattaacaagatcccccaacaatggcaaccaagacatgtcagcctggttcaatctgtttgcagacttggatccactttcaaacccagatgctattggacactcagatgatgaacttcttaatgcttgactgaagttataatgtcacttcagtggccttgagacatcaattttgcaacgtatttccttcgtggaaaggatttagattgtaacccgcacacaaaagcacggtgtttgtgaatataacacctgtcagccaactttagacagatggtaaagaccacatttgaataagtacacatctttcatatcttggatttgcagctgttggtactatgtggaaaatattagaaacttctatgtggaaaatattagaaactacagagtttgcgatatttagatactgaaatttatgtcaaaataacggctaggaataattctgtcaatatggagttgagcttatttctttggaaacccttttaagttgccttgctggctgtgagaattttatatgtggataacaaagatagatagatagcatgtaaattgggttgtggtttggggtcagtttttaaatgaaatagtagcgagga

SEQ ID NO: 144556 - DNA, 572 bp, Homo sapiens
  Payload ID: 8562
  Gene Symbol: ICA1L
  Gene Name: islet cell autoantigen 1,69kDa-like
  ENST ID: ENST00000420558
  CDS Start-End: 240-572
aactatgggtctctgtaaaatagattgttgggaaggtaacatttttccatggttttgatttttcccaaaagtatttatgtattgatttatttggttctgactcaggcgacgtactgtaagacgatattactttaatcatcttcacatcagtatttatggaatagccacaggtgcctcatcctttagtaggagttaattatacatttactggccgagtaaacatctccgaatgtcactccatggattcctttgggcaacccagaccagaagataatcagtcagtagtcagaagaatgcaaaagaaatactggaaaactaaacaggtctttatcaaagcaacaggaaaaaaagaggatgagcacttggtggcgtctgatgctgaactggatgctaaacttgaggtttttcactctgttcaagagacatgcactgaacttctgaagataatcgagaaataccagctaagactcaatgttgcaaaagatctacctgtagattcattggaaggagaagattttgagaaggaattctcatttctgaacaacctcctaagttctggttcttcaagtact

SEQ ID NO: 144557 - DNA, 879 bp, Homo sapiens
  Payload ID: 8562
  Gene Symbol: ICA1L
  Gene Name: islet cell autoantigen 1,69kDa-like
  Uniprot ID: Q8NDH6
  ENST ID: ENST00000425178
  CDS Start-End: 226-789
ggactacaggcgcccgccaccatgcccggctaatttttttttgtatttttagtagagacagggtttcaccgtgttagccaggatggtctcgatctcatgaccgcgtgatccgctcgcctcagcctcccaaagttgtggaattacaggcgtgagccaccgtgcccagcctattattgagaatttttaaaagaagtttaattttagtctgttcattgtagtcactccatggattcctttgggcaacccagaccagaagataatcagtcagtagtcagaagaatgcaaaagaaatactggaaaactaaacaggtctttatcaaagcaacaggaaaaaaagaggatgagcacttggtggcgtctgatgctgaactggatgctaaacttgaggtttttcactctgttcaagagacatgcactgaacttctgaagataatcgagaaataccagctaagactcaatgttatatcagaggaagaaaatgagctagggctctttttaaaatttcaagcagaacgggatgcaactcaagctggcaaaatgatggatgccactggcaaggcactttgttcttcagccaagcaaagattggccctgtgtactcctctgtctcgtctgaagcaagaagtagcaacattcagtcaaagggcagtatctgataccttgatgacaattaatcggatggagcaggcacgcacagaatacagaggagctctactgtggatgaaagatgtatcccaagagctggacccagacaccttaaagcaaatggaaaagtttagaaaagtatgaaaacgtatccctttccttttcttggtgtatgaaatatgaaactgccacagaataattaagataataaaatttcagatgttttttggtaaa

SEQ ID NO: 144558 - DNA, 526 bp, Homo sapiens
  Payload ID: 8562
  Gene Symbol: ICA1L
  Gene Name: islet cell autoantigen 1,69kDa-like
  ENST ID: ENST00000441547
  CDS Start-End: 168-526
tagataaggaaataaaacatttccaataaagctgaagtctcatcccacccatccgttatcaggctggagtgcagtggcatgatcgtagtttactgtaaccttgaactcctgggctcaagcaatcttcccccatcagcctcctgagtagctaggactacagtcactccatggattcctttgggcaacccagaccagaagataatcagtcagtagtcagaagaatgcaaaagaaatactggaaaactaaacaggtctttatcaaagcaacaggaaaaaaagaggatgagcacttggtggcgtctgatgctgaactggatgctaaacttgaggtttttcactctgttcaagagacatgcactgaacttctgaagataatcgagaaataccagctaagactcaatgttatatcagaggaagaaaatgagctagggctctttttaaaatttcaagcagaacgggatgcaactcaagctggcaaaatgatggatgccactggcaaggcactttgttcttcagccaagcaaag

SEQ ID NO: 144559 - DNA, 559 bp, Homo sapiens
  Payload ID: 8562
  Gene Symbol: ICA1L
  Gene Name: islet cell autoantigen 1,69kDa-like
  ENST ID: ENST00000457524
  CDS Start-End: 260-559
gggaccccggccgctgcctgcggccttcttccaggcgaggccctgctcggggttcttccggcctccccccaggcaaaacccgcaaggagcggtttctggcgtggctgggtcccctgcggcggaagggcgcctcccggccacgctcgctgtagtgaaggagcgcggcagcctggggctcgtttgggtgatttccctcggcggtggaggtcgctcctaatagaggcggcggcggatcacccgaacagccttcagtcactccatggattcctttgggcaacccagaccagaagataatcagtcagtagtcagaagaatgcaaaagaaatactggaaaactaaacaggtctttatcaaagcaacaggaaaaaaagaggatgagcacttggtggcgtctgatgctgaactggatgctaaacttgaggtttttcactctgttcaagagacatgcactgaacttctgaagataatcgagaaataccagctaagactcaatgttatatcagaggaagaaaatgagctagggctctttttaaaatttcaagcagaacgggatgcaact

SEQ ID NO: 144560 - DNA, 515 bp, Homo sapiens
  Payload ID: 8562
  Gene Symbol: ICA1L
  Gene Name: islet cell autoantigen 1,69kDa-like
  ENST ID: ENST00000435143
  CDS Start-End: 114-515
tcgtttgggtgatttccctcggcggtggaggtcgctcctaatagaggcggcggcggatcacccgaacagccttcaggtgcttccctgctgacctctttttaacgtgtcactccatggattcctttgggcaacccagaccagaagataatcagtcagtagtcagaagaatgcaaaagaaatactggaaaactaaacaggtctttatcaaagcaacaggaaaaaaagaggatgagcacttggtggcgtctgatgctgaactggatgctaaacttgaggtttttcactctgttcaagagacatgcactgaacttctgaagataatcgagaaataccagctaagactcaatgttatatcagaggaagaaaatgagctagggctctttttaaaatttcaagcagaacgggatgcaactcaagctggcaaaatgatggatgccactggcaaggcactttgttcttcagccaagcaaagattggccctgtgtactcctctgtctcgtctgaagcaagaagta

SEQ ID NO: 144561 - DNA, 556 bp, Homo sapiens
  Payload ID: 8562
  Gene Symbol: ICA1L
  Gene Name: islet cell autoantigen 1,69kDa-like
  ENST ID: ENST00000411681
  CDS Start-End: 322-556
agaatgcacgggcccgcgaggggctccgcgcacagatcctgctccttaggccggcaacccgaccccacggcacagatatggctcctggaaacgcgcgtcagctggtcaggtgcccaggcgacgtactgtaagacgatattactttaatcatcttcacatcagtatttatggaatagccacaggtgcctcatcctttagtaggagttaattatacatttactggccgagtaaacatctccgaatgtatttttttagataaggaaataaaacatttccaataaagctgaagtctcatcccacccatccgttatcagtcactccatggattcctttgggcaacccagaccagaagataatcagtcagtagtcagaagaatgcaaaagaaatactggaaaactaaacaggtctttatcaaagcaacaggaaaaaaagaggatgagcacttggtggcgtctgatgctgaactggatgctaaacttgaggtttttcactctgttcaagagacatgcactgaacttctgaagataatcgagaaataccagctaagactcaatg

SEQ ID NO: 144562 - DNA, 566 bp, Homo sapiens
  Payload ID: 8562
  Gene Symbol: ICA1L
  Gene Name: islet cell autoantigen 1,69kDa-like
  ENST ID: ENST00000419460
  CDS Start-End: 195-566
actggctgccggagggccgggagtcggcgcggggctcgcgggcggtggccggaacgggtgccgggacggatcaccgtacggccgaacgcgacccgaggaggcggaagagcggcgccgtatttttttagataaggaaataaaacatttccaataaagctgaagtctcatcccacccatccgttatcagtcactccatggattcctttgggcaacccagaccagaagataatcagtcagtagtcagaagaatgcaaaagaaatactggaaaactaaacaggtctttatcaaagcaacaggaaaaaaagaggatgagcacttggtggcgtctgatgctgaactggatgctaaacttgaggtttttcactctgttcaagagacatgcactgaacttctgaagataatcgagaaataccagctaagactcaatgttatatcagaggaagaaaatgagctagggctctttttaaaatttcaagcagaacgggatgcaactcaagctggcaaaatgatggatgccactggcaaggcactttgttcttcagccaagcaaagattggccctgtgt

SEQ ID NO: 144563 - DNA, 576 bp, Homo sapiens
  Payload ID: 8562
  Gene Symbol: ICA1L
  Gene Name: islet cell autoantigen 1,69kDa-like
  ENST ID: ENST00000450143
  CDS Start-End: 125-576
agaatgcacgggcccgcgaggggctccgcgcacagatcctgctccttaggccggcaacccgaccccacggcacagatatggctcctggaaacgcgcgtcagctggtcaggtgcccagtcactccatggattcctttgggcaacccagaccagaagataatcagtcagtagtcagaagaatgcaaaagaaatactggaaaactaaacaggtctttatcaaagcaacaggaaaaaaagaggatgagcacttggtggcgtctgatgctgaactggatgctaaacttgaggtttttcactctgttcaagagacatgcactgaacttctgaagataatcgagaaataccagctaagactcaatgttatatcagaggaagaaaatgagctagggctctttttaaaatttcaagcagaacgggatgcaactcaagctggcaaaatgatggatgccactggcaaggcactttgttcttcagccaagcaaagattggccctgtgtactcctctgtctcgtctgaagcaagaagtagcaacattcagtcaaagggcagtatctgataccttgatgacaattaatcg

SEQ ID NO: 144564 - DNA, 602 bp, Homo sapiens
  Payload ID: 8562
  Gene Symbol: ICA1L
  Gene Name: islet cell autoantigen 1,69kDa-like
  ENST ID: ENST00000418208
  CDS Start-End: 267-500
gatgcacacagcataaaagctgttataaactatgggtctctgtaaaatagattgttgggaaggtaacatttttccatggttttgatttttcccaaaagtatttatgtattgatttatttggttctgactcaggcgacgtactgtaagacgatattactttaatcatcttcacatcagtatttatggaatagccacaggtgcctcatcctttagtaggagttaattatacatttactggccgagtaaacatctccgaatgtcactccatggattcctttgggcaacccagaccagaagataatcagtcagtagtcagaagaatgcaaaagaaatactggaaaactaaacaggtctttatcaaagcaacaggaaaaaaagaggatgagcacttggtggcgtctgatgctgaactggatgctaaacttgagattggccctgtgtactcctctgtctcgtctgaagcaagaagtagcaacattcagtcaaagggcagtatctgataccttgatgacaattaatcggatggagcaggcacgcacagaatacagaggagctctactgtggatgaaagatgtatcccaagagctggacccagacacctt

SEQ ID NO: 144565 - DNA, 799 bp, Homo sapiens
  Payload ID: 8562
  Gene Symbol: ICA1L
  Gene Name: islet cell autoantigen 1,69kDa-like
  ENST ID: ENST00000421334
  CDS Start-End: 673-799
cttgctggcctcctcggttctctgggggaccccggccgctgcctgcggccttcttccaggcgaggccctgctcggggttcttccggcctccccccaggcaaaacccgcaaggagcggtttctggcgtggctgggtcccctgcggcggaagggcgcctcccggccacgctcgctgtagtgaaggagcgcggcagcctggggctcgtttgggtgatttccctcggcggtggaggtcgctcctaatagaggcggcggcggatcacccgaacagccttcaggtgcttccctgctgacctctttttaacgtggtgcttatttttatttcgctattattttgtaatgggaatgtcttccttagaaactaattggcaaccgatggataaaaacaaaacatagtaaatgtgcagtttgagctgaactgcagaatgcacgggcccgcgaggggctccgcgcacagatcctgctccttaggccggcaacccgaccccacggcacagatatggctcctggaaacgcgcgtcagctggtcaggtgcccaggcgacgtactgtaagacgatattactttaatcatcttcacatcagtatttatggaatagccacaggtgcctcatcctttagtaggagttaattatacatttactggccgagtaaacatctccgaatgtcactccatggattcctttgggcaacccagaccagaagataatcagtcagtagtcagaagaatgcaaaagaaatactggaaaactaaacaggtctttatcaaagcaacaggaaaaaaagaggatgagcacttgg

SEQ ID NO: 144566 - DNA, 714 bp, Homo sapiens
  Payload ID: 8562
  Gene Symbol: ICA1L
  Gene Name: islet cell autoantigen 1,69kDa-like
  ENST ID: ENST00000454326
  CDS Start-End: 425-714
cggggagtccatcctggcagctcacccgcgatgctggggcgttgccagtagagggggtggaatcatttttcgtgtaatagatgatcttgatgcacacagcataaaagctgttataaactatgggtctctgtaaaatagattgttgggaaggtaacatttttccatggttttgatttttcccaaaagtatttatgtattgatttatttggttctgactcaggcgacgtactgtaagacgatattactttaatcatcttcacatcagtatttatggaatagccacaggtgcctcatcctttagtaggagttaattatacatttactggccgagtaaacatctccgaatgtatttttttagataaggaaataaaacatttccaataaagctgaagtctcatcccacccatccgttatcagtcactccatggattcctttgggcaacccagaccagaagataatcagtcagtagtcagaagaatgcaaaagaaatactggaaaactaaacaggtctttatcaaagcaacaggaaaaaaagaggatgagcacttggtggcgtctgatgctgaactggatgctaaacttgaggtttttcactctgttcaagagacatgcactgaacttctgaagataatcgagaaataccagctaagactcaatgttatatcagaggaagaaaatgagctagggctctttttaaaatttcaagcagaacg

SEQ ID NO: 144567 - DNA, 8151 bp, Homo sapiens
  Payload ID: 8562
  Gene Symbol: ICA1L
  Gene Name: islet cell autoantigen 1,69kDa-like
  Uniprot ID: Q8NDH6
  ENST ID: ENST00000617388
  CDS Start-End: 320-1768
ggggccttgctggcctcctcggttctctgggggaccccggccgctgcctgcggccttcttccaggcgaggccctgctcggggttcttccggcctccccccaggcaaaacccgcaaggagcggtttctggcgtggctgggtcccctgcggcggaagggcgcctcccggccacgctcgctgtagtgaaggagcgcggcagcctggggctcgtttgggtgatttccctcggcggtggaggtcgctcctaatagaggcggcggcggatcacccgaacagccttcaggtgcttccctgctgacctctttttaacgtgtcactccatggattcctttgggcaacccagaccagaagataatcagtcagtagtcagaagaatgcaaaagaaatactggaaaactaaacaggtctttatcaaagcaacaggaaaaaaagaggatgagcacttggtggcgtctgatgctgaactggatgctaaacttgaggtttttcactctgttcaagagacatgcactgaacttctgaagataatcgagaaataccagctaagactcaatgttatatcagaggaagaaaatgagctagggctctttttaaaatttcaagcagaacgggatgcaactcaagctggcaaaatgatggatgccactggcaaggcactttgttcttcagccaagcaaagattggccctgtgtactcctctgtctcgtctgaagcaagaagtagcaacattcagtcaaagggcagtatctgataccttgatgacaattaatcggatggagcaggcacgcacagaatacagaggagctctactgtggatgaaagatgtatcccaagagctggacccagacaccttaaagcaaatggaaaagtttagaaaagtacagatgcaagtgagaaatagcaaagcttcttttgacaagttaaagatggatgtttgtcagaaagtggatttacttggagctagtcgctgcaatatgctatctcattcgctcactacctaccagagaacactgcttggattctggaagaaaacagctcgaatgatgtcccaaattcatgaagcctgtattggctttcatccgtatgattttgtagctctcaagcaactacaagacacgccaagcaagattagtgaagacaataaagatgaacaaataggcggttttcttactgaacagctcaataagctagttttgtctgatgaggaagcaagctttgagagtgaacaagcaaacaaagatcacaatgaaaaacattctcaaatgagagaatttggagcacctcagttttctaactctgaaaatgttgcaaaagatctacctgtagattcattggaaggagaagattttgagaaggaattctcatttctgaacaacctcctaagttctggttcttcaagtactagtgaatttacccaagaatgccagactgcctttgggagccccagtgccagtctcacatcccaggagccttccatggggtctgagcccctcgctcattcttctcgattccttccttcacaactctttgaccttggctttcatgtggctggagcgttcaacaactgggtctcccaagaggaatcagaactttgtctttcacacactgataaccagccagtgccttcacagagtccaaagaaattaacaagatcccccaacaatggcaaccaagacatgtcagcctggttcaatctgtttgcagacttggatccactttcaaacccagatgctattggacactcagatgatgaacttcttaatgcttgactgaagttataatgtcacttcagtggccttgagacatcaattttgcaacgtatttccttcgtggaaaggatttagattgtaacccgcacacaaaagcacggtgtttgtgaatataacacctgtcagccaactttagacagatggtaaagaccacatttgaataagtacacatctttcatatcttggatttgcagctgttggtactatgtggaaaatattagaaacttctatgtggaaaatattagaaactacagagtttgcgatatttagatactgaaatttatgtcaaaataacggctaggaataattctgtcaatatggagttgagcttatttctttggaaacccttttaagttgccttgctggctgtgagaattttatatgtggataacaaagatagatagatagcatgtaaattgggttgtggtttggggtcagtttttaaatgaaatagtagcgaggaggattttctgttttggaaaacaccattagaaccagaccagctttgttttgggttagagagagtaagatttgagaactcagtttgctttaatgaaatcacagagaaacttggtacttgtttttcttcatttggaggctaaaatgtaatgttttttcattcatacaaaataatggacactccctaattccattattaaatcttgaaggggaagtagcaggataattaatttgctaagcccatcctctgcagaaacagaaaaatctatcttcccatctcctaaaactcagaatgcacagtaatacttaaggcttgtacaagtgtcttcagacccactttttcatacacttgctatatagtagtatgcagtatttatattattcctgaaaataaaatgaggggagaatattccctaagcaactggcaatagtattcctgaaatacctagaaatttctatctgaatgagggagacacttatgaacaccttatccttacatatatttgcatacttatctcatattttgtgacataattatttaacccagaatactttctggcagacatacagaaagctctgtgtgatcaataagggagtgtctcatttttctacttccctctttctgtgggtgacatgatctgaggttctatttgattactaagcaaaatctgttacccctacagggtttagaacctaagtattagagaggaaggctatttaatggaagttagtgtaagctgataaaaacgtagctaccgtacacacacatcaatcactcaatttcctgtccttttaaattgcccaccctttaattttgaagcaatttcccaagtgtgtgtttgttttatatttgtcatccagtccattgcatttccataagaagacattttgactggctgggtgcggtggctcacgcttgtaatcccagcactttgggaggctgaggcaggcggatcacgaggtcaggagatggagaccatcctggctaacatggtgaaaccccgtctctactaaaaatacaaaaaattagccaggcgtggtggcacgtgcctgtagtcccagctactccggaggctgaggcaggagaatggcgtgaacccgggaggcggagcttgcagtgagctgagatggcgccactgcactccagcctaggcaacagagcaagactccgtctcaaaaaaaaaaaaaaaaaaaaaagacattttaactaagttattcacagtagcttccatgtgctcttagttctattctaaacaggcttatttagaaaaggattgcttgtaatgtttgtcatggtacatagaaaacattggaccagagtaggtaaaatgcagtccatgtcccatccatagccatctacaatagtaactgcccacaggctctccagaaaactactacaatggccaagtacagtataggctggaaagaccttatctgaaggtcagaaacattgactcagaaaaaaggtatgaagtctttccataaaatcttttcacaatattactcctatttcttttagattttaatgagccattacttatctcttcagaagacttaagtcttcctttatactcagtgaaatttcccagaatgtaatactgtcactgttctgccaagttccaatcaccaagatcatgattacgaatcccaatctgaattctatacccatggtgactctgatgctctcaacttttgagtgcctcaaaaaatgctaaaactttggctgggcatggtggctcacgcctgtaatcccagcactttgggaggccatggcgggtggaacatttgagggcatgagttcgagaccagcctggccaacatggtgaaaccctgtctctactaaaaatacaaaaattagccaggtgtggaggtacatgcctgtaatcccagctactcaggaggctgaggcagaagaattgcttgaacccaggcggcagaggttgcagtgagtcgagattgcaccactacactccagcctgggcaacagagagcgactctctcaaaaaaaaaaaaaaaaaaaaaaaaaaaagctaactttatgtcttgagagtttgtaccatttttctttgtagtggtcaccttgctaatgcattagttctgagatatttatctccctcacatgtgtgcaaggaagtccctgttatcgaatacagatactttaacaagcagacaaagcagaaacccaaagtccatactaggaacaccctaaattttccaaaagcaaaagttctcccgaaatggagacatacaagggacttttattattctgttactagtttctataacatttcttctttcaacagagtatatgtttcccatttaacccagagcaacattaacttccttagcaagtccagttctaacttccaacaagtccaaccactgtttttgaagagcatatcagtaactatattaagatgaaggtaaccacattcgtattttctcaagattagttatttgaagctcagcagtttttgtggtcagaaagaaattttgctctattaaaccaatactgctaatataaaaaaccaccacactgaagaaacgagggaaaggacgggataagcacagaacagagaatgactggttgctttttgtctcaatctagataatccattcaataagaagtaaattaattatccttaaccaatggtaggctgagaacaaccctcaaaatagatattttttatgttaaatggggagaaatatctatactttatgttatactggataaaaatgtgttttaagtctaaaaaaaaccagacgagctaaactttgcctagtgtgtctacaaccattttttaggagacgcaggaataccagggcataataagatcagattggtgtaattttgtatgtttttgaaatccttcattaattgtagaaccttgatatgattagaaacaaactgtatttcaacaaacaggtttcagtatttgcacactgaaaaagtgttttgtattttaactataaatatttcacgtatctgtatagaccatctagaaatgtagaggtcttacagcattagaacgaaggaagtttacatgtgctctatctatttttctgagcctcttttaataaagattgcaagaaggcataaaacaagagtttgtttcctgaagtttttagtacaattattgttttcctattcaaaaacttgggttttacctcaagatcatagtattaggaaagtacattgagttgatacggacatgggagaacgaaaataaaaccagggcaattaatatccttgtaaggccaggcgcggtagctcacgcctatataacagcactttgggaggccaaggcaggcagatcacttgaagttgggagtttgagaccaccctggccaacatggtgaaaccccatctctatgaaaaatataaaaattagctgggcatggtggcagatgcctgtaatcccagctacttgggaggctgaggcaggagaatcgcttgaacccgggaggtggaggttgcagtgagctgagatcaggccatgcactccagcctgggtgacagagtgagactccgtctcaaaagaaaatccttgtgagatgaattcgttcttatttcatatacaaggggactatgtaagatatgggaaataatataatgtacgttatttatgtaaatactttcagtaacaaaaactaacaaatatcaaaaatctgagcctagacacaaacaattaaatataagccatagtatgtaacctgacttattgaaggcaggaataaaaagaagagagccagaattgattcagttatttttgtcttccatagtgttggcagggccctgcatttctctaccttgagcaatgaagcagtcccagaattttggaatatagaaattaggaaggaaaaacgaactttaaaatattaatttagtagaactgaaagtaatgcatttcatgcaacagtaaagtgcttaaacatggcaaagaaaactaagggacaagataagaaaaatggttggtaaagatgggtcacatccagaagcccaacataagctatttttccatctttttctgtaccatttaaaagactactaaagagttcaaaacaaactgtccttggcatttaaagtcaaaacatggttcttcactcagtggtgtaaattaactactcattggccaaagagtaaatacaaaaaggagatgaagttctgactggtgttgtgggtgagattttgcagtgtatgtttttacatttgtagtgtacgttttaaacttccggttttcttgctgcctcaacatctccacaaacaggctgtgagcacctggcccagtgtgatatgggtggcccctgccacaagtttcccttgctaccttgcccatgacctagtaacatttaaatgcaccagtgaaattctctttttcttgtgtgcttctccctgacccaaaggctcctgcccatgtcttaggcctctccgctccccacctgcttggctgagccccctcccatgtgaccccctctcagcatgcagtgactggtctctctaggacctgtgagtatattacaactttttttcctgtgtctctcctgtgatatctcttgtggctaaacctcactgaccataacctaaaaaaacacatacaaaaaacatgaaagaaaaagttgtttcttgagctggcctggacgaacggggagccaggggctcgaccctggctgttggaggcgcagtgaggcctggtctccggctgccagaccacgctgagcggagcgcgcggcaggctcgcctcagcgctgcggggaacgcgcgcgccgccgtccgcggtcgcccgtaggtgcctgcacgcgtcggggtcacggcctttggccgacaggagcgagaagactcaggagccgccccgcgccttcgatccggcgctgctggagttcctggtgtgcccgctctccaagaagccgctcagatatgaagcatcaacaaatgaattgattaatgaagagttgagaatagcttatccaatcattgatgggattcctaatattatcatattaggcagctaggatgacacatcaaagaagcaagaagtggagcagcgctagttcataatttaaaaaaataaaacagccaactcttcttagtaccatataccttttaaaacacagtggcaagtaataagcggaagagaagaatctttctgtctctttctacgttgactgttcttattccactggtttatttagcaggactgttccactcagcctctgtagaagaaaacttcccacagggctgcacttgcacagctagcctttgcttttacagcctgctcttgcctattaccataccggtgtatgtattcttccacctttggacctggatggttattaaactcttcatgcataactgatgcaactagagtcaatatgctgtatatattaatgatagctcttgggcatctatctctgaaagctcaaatggatggaatttagtttgtgggaaagaggctttgctttgagcatatcaggcttaggactgtggacggcttaagttgcagacgcttcttttattgtactcttgttctgcccgtgttttttgaaggctctgacataactgctttatcagaagaaacattttgacagtgtcttgttggagataaacatccctaattgacatgtgatgactacttcttattccattcatctaagagtcattgaaattttgttttctttgtttgtttagcttcaaggtctttggtagtcacatgttagggatgactgaaataattccaaaggagtgatgttggaatagtccctctaagggaaagaaatgcatttgaacgaatgtgatataaaaccacataatcaaatagaaatttcatgtacttacaaaaatttagtttgtaaaattaccttcatttctttgacattaaatgcttatattagcaataaagatgttgacactttctcataaaaaattt

SEQ ID NO: 144568 - DNA, 837 bp, Homo sapiens
  Payload ID: 8563
  Gene Symbol: IAH1
  Gene Name: isoamyl acetate-hydrolyzing esterase 1 homolog
  ENST ID: ENST00000351760
  CDS Start-End: 1-226
cgaggccgcgggctgcgggagtgccctgctctggcctcgcttgttgctcttcggggactccatcacccagttttccttccagcagggtggatggggagcatcgctggctgacaggctggtcaggttacaataccaggtgggccaaaattatccttccaagattaatcaggaaaggaaacagtttggacatcccagtagcagttacaattttctttggggccaatgacagtgcactaaaagatgagaatcccaagcagcacattcccctggaggagtacgctgcgaacctaaagagcatggtgcagtacctgaagtccgtggacatccctgagaatcgagtcattctcatcacgccgaccccactttgtgaaacagcctgggaagaacagtgcatcatacaaggttgcaaactaaatcgcctgaactctgttgttggtgaatatgccaatgcgtgtttacaagtggcccaagactgtgggactgacgtacttgacctgtggaccctgatgcaggacagccaggacttctcatcttatttatcagatggactacatttgtctccaaaggggaatgaatttttgttctcgcatctctggcctttgatagagaaaaaggtctcttctctacctttgctgcttccttactggcgggatgtagcagaagcaaaacctgaattaagtctgctgggagatggagaccattagccaatcacaggagacccaaatctgcttgttatctacagaactcaaagttgtcaatacgtagaggtacgcttttttcctcaggcttaaacctttgccactgatattaataataaaagtattagatgatttttca

SEQ ID NO: 144569 - DNA, 1266 bp, Homo sapiens
  Payload ID: 8563
  Gene Symbol: IAH1
  Gene Name: isoamyl acetate-hydrolyzing esterase 1 homolog
  Uniprot ID: Q2TAA2
  ENST ID: ENST00000497473
  CDS Start-End: 38-784
tggctggcggccccgccccgccccgcccggctgctccatggcgctgtgcgaggccgcgggctgcgggagtgccctgctctggcctcgcttgttgctcttcggggactccatcacccagttttccttccagcagggtggatggggagcatcgctggctgacaggctggtcagaaaatgtgatgttctgaatcgtggattttcaggttacaataccaggtgggccaaaattatccttccaagattaatcaggaaaggaaacagtttggacatcccagtagcagttacaattttctttggggccaatgacagtgcactaaaagatgagaatcccaagcagcacattcccctggaggagtacgctgcgaacctaaagagcatggtgcagtacctgaagtccgtggacatccctgagaatcgagtcattctcatcacgccgaccccactttgtgaaacagcctgggaagaacagtgcatcatacaaggttgcaaactaaatcgcctgaactctgttgttggtgaatatgccaatgcgtgtttacaagtggcccaagactgtgggactgacgtacttgacctgtggaccctgatgcaggacagccaggacttctcatcttatttatcagatggactacatttgtctccaaaggggaatgaatttttgttctcgcatctctggcctttgatagagaaaaaggtctcttctctacctttgctgcttccttactggcgggatgtagcagaagcaaaacctgaattaagtctgctgggagatggagaccattagccaatcacaggagacccaaatctgcttgttatctacagaactcaaagttgtcaatacgtagaggtacgcttttttcctcaggcttaaacctttgccactgatattaataataaaagtattagatgatttttcagggaagttttatacttaggtccattgtgtttcgacagtatttattaatgcagatatcagtgctacagctataaaatataccctgagcagcttgttaattctataaatgacaaagactatgtttttaaaaagtcacaattttataaaaatggtttttcttacattcttttgagaactgtttcactcatacatacacccacacaccccactcaaccttgtatcaaattccaaaagtgtaactaaagtataagaatatcatgactagttaaaagatagcaaataccataaggtacaagttcaagtattagtataacaagtatctgagtaacaaatgtccttggaaatggggg

SEQ ID NO: 144570 - DNA, 670 bp, Homo sapiens
  Payload ID: 8563
  Gene Symbol: IAH1
  Gene Name: isoamyl acetate-hydrolyzing esterase 1 homolog
  ENST ID: ENST00000496603
  CDS Start-End: 448-670
gaatgagggccctaggttggatcttagttgtaaagctcccccaggtgatccaagcgagcttgggacgagcaacctaaagaaagtcatgctctacgcccatcgccccgccccagggagcggggtcggcctctgcgccggcgcccctggcccttctgttactcatctacagctccgtgatttcaaggcatccttcccacccgttcgtttttagctcggctgccgaacttcattgcacagttgagaaaatgtgatgttctgaatcgtggattttcaggttacaataccaggtgggccaaaattatccttccaagattaatcaggaaaggaaacagtttggacatcccagtagcagttacaattttctttggggccaatgacagtgcactaaaagatgagaatcccaagcagcacattcccctggaggagtacgctgcgaacctaaagagcatggtgcagtacctgaagtccgtggacatccctgagaatcgagtcattctcatcacgccgaccccactttgtgaaacagcctgggaagaacagtgcatcatacaaggttgcaaactaaatcgcctgaactctgttgttggtgaatatgccaatgcgtgtttacaagtggcccaagactgtgggactgacgtacttgacctgtggaccctgatgcaggacagcc

SEQ ID NO: 144571 - DNA, 863 bp, Homo sapiens
  Payload ID: 8563
  Gene Symbol: IAH1
  Gene Name: isoamyl acetate-hydrolyzing esterase 1 homolog
  Uniprot ID: Q2TAA2
  ENST ID: ENST00000482918
  CDS Start-End: 341-748
catctacagctccgtgatttcaaggcatccttcccacccgttcgtttttagctcggctgccgaacttcattgcacagttgagttttccttccagcagggtggatggggagcatcgctggctgacaggctggtcagaaaatgtgatgttctgaatcgtggattttcaggttacaataccaggtgggccaaaattatccttccaagattaatcaggaaaggaaacagtttggacatcccagtagcagttacaattttctttggggccaatgacagtgcactaaaagatgagaatcccaagcagcacattcccctggaggagtacgctgcgaacctaaagagcatggtgcagtacctgaagtccgtggacatccctgagaatcgagtcattctcatcacgccgaccccactttgtgaaacagcctgggaagaacagtgcatcatacaaggttgcaaactaaatcgcctgaactctgttgttggtgaatatgccaatgcgtgtttacaagtggcccaagactgtgggactgacgtacttgacctgtggaccctgatgcaggacagccaggacttctcatcttatttatcagatggactacatttgtctccaaaggggaatgaatttttgttctcgcatctctggcctttgatagagaaaaaggtctcttctctacctttgctgcttccttactggcgggatgtagcagaagcaaaacctgaattaagtctgctgggagatggagaccattagccaatcacaggagacccaaatctgcttgttatctacagaactcaaagttgtcaatacgtagaggtacgcttttttcctcaggcttaaacctttgccactgatattaataataaaa

SEQ ID NO: 144572 - DNA, 2137 bp, Homo sapiens
  Payload ID: 8563
  Gene Symbol: IAH1
  Gene Name: isoamyl acetate-hydrolyzing esterase 1 homolog
  Uniprot ID: Q2TAA2
  ENST ID: ENST00000470914
  CDS Start-End: 317-724
cggccccgccccgccccgcccggctgctccatggcgctgtgcgaggccgcgggctgcgggagtgccctgctctggcctcgcttgttgctcttcggggactccatcacccagaaaatgtgatgttctgaatcgtggattttcaggttacaataccaggtgggccaaaattatccttccaagattaatcaggaaaggaaacagtttggacatcccagtagcagttacaattttctttggggccaatgacagtgcactaaaagatgagaatcccaagcagcacattcccctggaggagtacgctgcgaacctaaagagcatggtgcagtacctgaagtccgtggacatccctgagaatcgagtcattctcatcacgccgaccccactttgtgaaacagcctgggaagaacagtgcatcatacaaggttgcaaactaaatcgcctgaactctgttgttggtgaatatgccaatgcgtgtttacaagtggcccaagactgtgggactgacgtacttgacctgtggaccctgatgcaggacagccaggacttctcatcttatttatcagatggactacatttgtctccaaaggggaatgaatttttgttctcgcatctctggcctttgatagagaaaaaggtctcttctctacctttgctgcttccttactggcgggatgtagcagaagcaaaacctgaattaagtctgctgggagatggagaccattagccaatcacaggagacccaaatctgcttgttatctacagaactcaaagttgtcaatacgtagaggtacgcttttttcctcaggcttaaacctttgccactgatattaataataaaagtattagatgatttttcagggaagttttatacttaggtccattgtgtttcgacagtatttattaatgcagatatcagtgctacagctataaaatataccctgagcagcttgttaattctataaatgacaaagactatgtttttaaaaagtcacaattttataaaaatggtttttcttacattcttttgagaactgtttcactcatacatacacccacacaccccactcaaccttgtatcaaattccaaaagtgtaactaaagtataagaatatcatgactagttaaaagatagcaaataccataaggtacaagttcaagtattagtataacaagtatctgagtaacaaatgtccttggaaatggggggtaggaggagatatgattagtcacaggtttggttaactgccctcaaaatttacaagttaaaatgttttggctggtgagcacatttcagttcttaggggaaaaaaagcttttaatggcaatttatagaaatcagaatccaggctaatgatttttatccttcacacagtaaatgcagcccatccagaatcctggagcaataaagtaagaagtaattcaaatatctgcttgtgggtcaataaaaagggtttctgaagtatcaagtcttgtggggacagcccccaaccctaagggcaggtagtattctatctcctggctggctcatcacattcaaaacaacctgttttttttgttgttgttgttgttaagaaatatctcaccctcttattcaatagtgtttgaaaacaggcaatctttgtattttaaatattctaggtttgtagatagtgaattttttttttttttttttttttttgaggcagagtctcactctgtcacccaggctggagtgtagtggcgcaacctcagcctctccaagtgctgggattacaggcatgagccaccactcccagccaatagtgaattttctaagagcatgtatccctatcagtaacagggatacatgaagatacttataaaatacagaaaaactgcccagcaaatcagggccctaaacagttggtagattccataaattcaactggctaccatgtatagccctcactgtaaggtaggtggttaggtttctagagagcattagtcttagaattatgaagagccatattaacccaaatgatttctaaatttagatatatattttccctgctacataaaaactctgggtaataactagaaatagacccacaatttagagacaatgtatactagatttatctcctttgtttttagttgaaggcaaaaaaaaaaaaaaaaa

SEQ ID NO: 144573 - DNA, 818 bp, Homo sapiens
  Payload ID: 8563
  Gene Symbol: IAH1
  Gene Name: isoamyl acetate-hydrolyzing esterase 1 homolog
  ENST ID: ENST00000492223
  CDS Start-End: 29-151
gccccgccccgccccgcccggctgctccatggcgctgtgcgaggccgcgggctgcgggagtgccctgctctggcctcgcttgttgctcttcggggactccatcacccaggttacaataccaggtgggccaaaattatccttccaagattaatcaggaaaggaaacagtttggacatcccagtagcagttacaattttctttggggccaatgacagtgcactaaaagatgagaatcccaagcagcacattcccctggaggagtacgctgcgaacctaaagagcatggtgcagtacctgaagtccgtggacatccctgagaatcgagtcattctcatcacgccgaccccactttgtgaaacagcctgggaagaacagtgcatcatacaaggttgcaaactaaatcgcctgaactctgttgttggtgaatatgccaatgcgtgtttacaagtggcccaagactgtgggactgacgtacttgacctgtggaccctgatgcaggacagccaggacttctcatcttatttatcagatggactacatttgtctccaaaggggaatgaatttttgttctcgcatctctggcctttgatagagaaaaaggtctcttctctacctttgctgcttccttactggcgggatgtagcagaagcaaaacctgaattaagtctgctgggagatggagaccattagccaatcacaggagacccaaatctgcttgttatctacagaactcaaagttgtcaatacgtagaggtacgcttttttcctcaggcttaaacctttgccactgatattaataataaaagtattagatgatt

SEQ ID NO: 144574 - DNA, 1137 bp, Homo sapiens
  Payload ID: 8563
  Gene Symbol: IAH1
  Gene Name: isoamyl acetate-hydrolyzing esterase 1 homolog
  ENST ID: ENST00000481367
  CDS Start-End: 1-686
gtgcgaggccgcgggctgcgggagtgccctgctctggcctcgcttgttgctcttcggggactccatcacccagaaaatgtgatgttctgaatcgtggattttcaggttacaataccaggtgggccaaaattatccttccaagattaatcaggaaaggaaacagtttggacatcccagtagcagttacaattttctttggggccaatgacagtgcactaaaagatgagaatcccaagcagcacattcccctggaggagtacgctgcgaacctaaagagcatggtgcagtacctgaagtccgtggacatccctgagaatcgagtcattctcatcacgccgaccccactttgtgaaacagcctgggaagaacagtgcatcatacaaggttgcaaactaaatcgcctgaactctgttgttggtgaatatgccaatgcgtgtttacaagtggcccaagactgtgggactgacgtacttgacctgtggaccctgatgcaggacagccaggacttctcatcttatttatcagatggactacatttgtctccaaaggggaatgaatttttgttctcgcatctctggcctttgatagagaaaaaggtctcttctctacctttgctgcttccttactggcgggatgtagcagaagcaaaacctgaattaagtctgctgggagatggagaccattagccaatcacaggagacccaaatctgcttgttatctacagaactcaaagttgtcaatacgtagagcatcgacatagggcacacagcggccagaaaggtccctgcagcacaccttgcaggagttgtcagtttctggaacagagaacacgcattgacagctggattgttctgagacctgcctctcctcctgcctcctctttcctccctgaccatgctcccaaagagagacagcgttttgccatgttgaccaagctgctctcaaactcctgacctcaagtgatctgcccacctcggcctcccaaagtgatgggattacaggtgtgagtcaccacacctggctctctgtctattttgaaagcaagagaactccctcatcgactcccatggtttaagtggggtgggaagcagagtccagccagtccctgaccagtccatgaggatgccctcaaaccca

SEQ ID NO: 144575 - DNA, 1011 bp, Homo sapiens
  Payload ID: 8563
  Gene Symbol: IAH1
  Gene Name: isoamyl acetate-hydrolyzing esterase 1 homolog
  ENST ID: ENST00000481688
  CDS Start-End: 355-834
gagagcccgggctccaggcacagacgcgaggggacccggccgcgctgcccgccccgcgccgcctcccacccgggtcgagatgcgcggtcttcccctcagcgccctcctgggcagcggcctttcccctccgggtccgggttagcggccgcgggcgaccgcgcgctgtgtcccaggaggccccgcggccagctccgggcagaggcgccaggagctctctcgccccattccctgcgggcacaggtggggccgttaggggttgaccttggaagtaaaacgccttcaggaattaggtagaaaaggaccatccgttcatccaagatcatctcacctcccatgaagggaacggtcttctaaatgcagttttccttccagcagggtggatggggagcatcgctggctgacaggctggtcagaaaatgtgatgttctgaatcgtggattttcaggttacaataccaggtgggccaaaattatccttccaagattaatcaggaaaggaaacagtttggacatcccagtagcagttacaattttctttggggccaatgacagtgcactaaaagatgagaatcccaagcagcacattcccctggaggagtacgctgcgaacctaaagagcatggtgcagtacctgaagtccgtggacatccctgagaatcgagtcattctcatcacgccgaccccactttgtgaaacagcctgggaagaacagtgcatcatacaaggttgcaaactaaatcgcctgaactctgttgttggtgaatatgccaatgcgtgtttacaagtggcccaagactgtgggactgacgtacttgacctgtggaccctgatgcaggacagccaggacttctcatcttatttatcagatggactacatttgtctccaaaggggaatgaatttttgttctcgcatctctggcctttgatagagaaaaaggtctcttctctacctttgctgcttccttactggcgggatgtagcagaagcaaaacctgaattaagtctgctggga

SEQ ID NO: 144576 - DNA, 478 bp, Homo sapiens
  Payload ID: 8563
  Gene Symbol: IAH1
  Gene Name: isoamyl acetate-hydrolyzing esterase 1 homolog
  ENST ID: ENST00000495797
  CDS Start-End: 337-478
agaggcgccaggagctctctcgccccattccctgcgggcacaggtggggccgttaggggttgaccttggaagtaaaacgccttcaggaattaggtagaaaaggaccatccgttcatccaagatcatctcacctcccatgaagggaacggtcttctaaatgcaggttacaataccaggtgggccaaaattatccttccaagattaatcaggaaaggaaacagtttggacatcccagtagcagttacaattttctttggggccaatgacagtgcactaaaagatgagaatcccaagcagcacattcccctggaggagtacgctgcgaacctaaagagcatggtgcagtacctgaagtccgtggacatccctgagaatcgagtcattctcatcacgccgaccccactttgtgaaacagcctgggaagaacagtgcatcatacaaggttgcaaactaaatcgcctgaactctgttgttggtg

SEQ ID NO: 144577 - DNA, 1940 bp, Homo sapiens
  Payload ID: 8564
  Gene Symbol: ISOC1
  Gene Name: isochorismatase domain containing 1
  Uniprot ID: Q96CN7
  ENST ID: ENST00000173527
  CDS Start-End: 17-913
agacgctcgggggaacatggcggctgcggagccggcggtccttgcgctccccaacagcggcgccgggggcgcgggggcgccgtcgggcacagtcccggtgctcttctgtttctcagtcttcgcgcgaccctcgtcggtgccacacggggcgggctacgagctgctcatccagaagttcctcagcctgtacggcgaccagatcgacatgcaccgcaaattcgtggtgcagctgttcgccgaggagtggggccagtacgtggacttgcccaagggcttcgcggtgagcgagcgctgcaaggtgcgcctcgtgccgttgcagatccagctcactaccctgggaaatcttacaccttcaagcactgtgtttttctgctgtgatatgcaggaaaggttcagaccagccatcaagtattttggggatattattagcgtgggacagagattgttgcaaggggcccggattttaggaattcctgttattgtaacagaacaataccctaaaggtcttgggagcacggttcaagaaattgatttaacaggtgtaaaactggtacttccaaagaccaagttttcaatggtattaccagaagtagaagcggcattagcagagattcccggagtcaggagtgttgtattatttggagtagaaactcatgtgtgcatccaacaaactgccctggagctagttggccgaggagtcgaggttcacattgttgctgatgccacctcatcaagaagcatgatggacaggatgtttgccctcgagcgtctcgctcgaaccgggatcatagtgaccacgagtgaggctgttctgcttcagctggtagctgataaggaccatccaaaattcaaggaaattcagaatctaattaaggcgagtgctccagagtcgggtctgctttccaaagtataggacatttgaagaactggtatgctactcactggtgaaggacagtcaggtgaaggactgtaagcccacacaagctcttcttatctctactagaattaaaatgttaagtcaaaaacggctccttttttgcgcctcctagtgaaacttaaccagctagaccatttgagtaccagcatttagttacaaacgtcaaaggcttccggtgctgcttaccttccttttttgttaatgtgcttttatttattaaaaaaaattacaatgaagatgcctgttttgtctctactgtgtactctgatcgtatctttccaaagtgcagactcttgtgaagttttcttaaattgttcactttaaagaaaatgacgtaccaacaatgatttggcttttatattactgtaagatgttataatgttaatgtggatgtagtgcttttactttacagattgattggaataagattattgcatatgaatttacccacaggactctgaatcatgttacccactcccctcacaatgttgtccacttagtgagttgcattgatctatccgtaccaaatgatgttgaataattacatatctttcttgactatactgatttcttattttggtcactattactaaatctctgttaatattctctcttttaactgaaaagggatgggatagaagggtttgcaatgccatattattggtggagggctgttttaacatctttgaagtatggcttgctgaatatctttaccaacatcttgaatatatattctagtgtccacaagatttagcaaaaagataaagcttgggtggaatatcattttaaaatgttcatgttctgttctatattttcttcacctactctccaaatattgtaatgcaaaaagtctcagtaatgatttggtagtattaattttgtggtcattgtttctcttcgataaatttattttcattaaatacttgttagagggttttgaaatgtttttcaaatatgtgaaatgtgaaactgctgtcttttatattaaagtaattaaagaaaa

SEQ ID NO: 144578 - DNA, 581 bp, Homo sapiens
  Payload ID: 8564
  Gene Symbol: ISOC1
  Gene Name: isochorismatase domain containing 1
  ENST ID: ENST00000514194
  CDS Start-End: 17-581
agacgctcgggggaacatggcggctgcggagccggcggtccttgcgctccccaacagcggcgccgggggcgcgggggcgccgtcgggcacagtcccggtgctcttctgtttctcagtcttcgcgcgaccctcgtcggtgccacacggggcgggctacgagctgctcatccagaagttcctcagcctgtacggcgaccagatcgacatgcaccgcaaattcgtggtgcagctgttcgccgaggagtggggccagtacgtggacttgcccaagggcttcgcggtgagcgagcgctgcaagctcactaccctgggaaatcttacaccttcaagcactgtgtttttctgctgtgatatgcaggaaaggttcagaccagccatcaagtattttggggatattattagcgtgggacagagattgttgcaaggggcccggattttaggaattcctgttattgtaacagaacaataccctaaaggtcttgggagcacggttcaagaaattgatttaacaggtgtaaaactggtacttccaaagaccaagttttcaatggtattaccagaagtagaagcggcattagcag

SEQ ID NO: 144579 - DNA, 1122 bp, Homo sapiens
  Payload ID: 8565
  Gene Symbol: ISOC2
  Gene Name: isochorismatase domain containing 2
  Uniprot ID: Q96AB3
  ENST ID: ENST00000085068
  CDS Start-End: 138-803
cctaacgaaacggtaaccagccctgggaagcccgcaagaggcctcagcggtggccgtccgagagccgagaggtgagggtgcccccgcctcacctgcagaggggccgttccgggctcgaacccggcaccttccggaaaatggcggctgccaggcccagcctgggccgagtcctcccaggatcctctgtcctgttcctgtgtgacatgcaggagaagttccgccacaacatcgcctacttcccacagatcgtctcagtggctgcccgcatgctcaaggtggcccggctgcttgaggtgccagtcatgctgacggagcagtacccacaaggcctgggccccacggtgcccgagctggggactgagggccttcggccgctggccaagacctgcttcagcatggtgcctgccctgcagcaggagctggacagtcggccccagctgcgctctgtgctgctctgtggcattgaggcacaggcctgcatcttggacccccgttcttatccggggttggccctgacctctctctacccacagaacacgaccctggacctcctagaccgggggctgcaggtccatgtggtggtggacgcctgctcctcacgcagccaggtggaccggctggtggctctggcccgcatgagacagagtggtgccttcctctccaccagcgaagggctcattctgcagcttgtgggcgatgccgtccacccccagttcaaggagatccagaaactcatcaaggagcccgccccagacagcggactgctgggcctcttccaaggccagaactccctcctccactgaactccaaccctgccttgagggaagaccaccctcctgtcacccggacctcagtggaagcccgttccccccatccctggatcccaagagtggtgcgatccaccaggagtgccgcccccttgtggggggggcagggtgctgccttcccattggacagctgctcccggaaatgcaaatgagactcctggaaactgggtgggaattggctgagccaagatggaggcggggctcggccccgggccacttcacggggcgggaaggggaggggaagaagagtctcagactgtgggacacggactcgcagaataaacatatatgtggc

SEQ ID NO: 144580 - DNA, 998 bp, Homo sapiens
  Payload ID: 8565
  Gene Symbol: ISOC2
  Gene Name: isochorismatase domain containing 2
  Uniprot ID: Q96AB3
  ENST ID: ENST00000425675
  CDS Start-End: 62-679
ggtgcccccgcctcacctgcagaggggccgttccgggctcgaacccggcaccttccggaaaatggcggctgccaggcccagcctgggccgagtcctcccaggatcctctgtcctgttcctgtgtgacatgcaggagaagttccgccacaacatcgcctacttcccacagatcgtctcagtggctgcccgcatgctcaaggtggcccggctgcttgaggtgccagtcatgctgacggagcagtacccacaaggcctgggccccacggtgcccgagctggggactgagggccttcggccgctggccaagacctgcttcagcatggtgcctgccctgcagcaggagctggacagtcggccccagctgcgctctgtgctgctctgtggcattgaggcacaggcctgcatcttgaacacgaccctggacctcctagaccgggggctgcaggtccatgtggtggtggacgcctgctcctcacgcagccaggtggaccggctggtggctctggcccgcatgagacagagtggtgccttcctctccaccagcgaagggctcattctgcagcttgtgggcgatgccgtccacccccagttcaaggagatccagaaactcatcaaggagcccgccccagacagcggactgctgggcctcttccaaggccagaactccctcctccactgaactccaaccctgccttgagggaagaccaccctcctgtcacccggacctcagtggaagcccgttccccccatccctggatcccaagagtggtgcgatccaccaggagtgccgcccccttgtggggggggcagggtgctgccttcccattggacagctgctcccggaaatgcaaatgagactcctggaaactgggtgggaattggctgagccaagatggaggcggggctcggccccgggccacttcacggggcgggaaggggaggggaagaagagtctcagactgtgggacacggactcgcagaataaacatatatgtggc

SEQ ID NO: 144581 - DNA, 1566 bp, Homo sapiens
  Payload ID: 8565
  Gene Symbol: ISOC2
  Gene Name: isochorismatase domain containing 2
  Uniprot ID: Q96AB3
  ENST ID: ENST00000438389
  CDS Start-End: 836-1243
ctttctctcaacctccatttccaagcacagagtctaaattattctaaacaccacccgaggaggcaggtgctgtacagatggggaaactgaggcagcacagagcgcaaaggacaggggggcgtcaaattcctcacttgatcgctccctcagccagccccttcctggaaagtgcttgggtatctttgtaagcctccgtttcttgagagagggccaggtttcgaaccgcagacatgcctctactctaggtaagacccctctctctctctcccggcctcggcggtctgctctgtgcaatggggccggccgagacgccctctctccagccagagtctgagccttcggagaccaccgcgcgactccgccccgtcggccgccactcacgccctctacggctctccattggcagaacgacctgctgccccgcccccacggcgcctttgcgagctaatcattttcttgagactgacagccttgccggcaccgccccccctggggcgggagcaaagcagctgcatatgcggattggttgagaggcagggggcggggtgagttggtgagcgccgattgcgggcagaggcagtggcacatgcggattggccggagagagcggcgaggcagagcatgatgagtgtcgattggacggctgggcccaagtgggcggaaaacggacggtgcagggggtgggccacgtgtccagccctaacgaaacggtaaccagccctgggaagcccgcaagaggcctcagcggtggccgtccgagagccgagaggtgagggtgcccccgcctcacctgcagaggggccgttccgggctcgaacccggcaccttccggaaaatggcggctgccaggcccagcctgggccgagtcctcccaggatcctctgtcctgttcctgtgtgacatgcaggagaagttccgccacaacatcgcctacttcccacagatcgtctcagtggctgcccgcatgctcaagaacacgaccctggacctcctagaccgggggctgcaggtccatgtggtggtggacgcctgctcctcacgcagccaggtggaccggctggtggctctggcccgcatgagacagagtggtgccttcctctccaccagcgaagggctcattctgcagcttgtgggcgatgccgtccacccccagttcaaggagatccagaaactcatcaaggagcccgccccagacagcggactgctgggcctcttccaaggccagaactccctcctccactgaactccaaccctgccttgagggaagaccaccctcctgtcacccggacctcagtggaagcccgttccccccatccctggatcccaagagtggtgcgatccaccaggagtgccgcccccttgtggggggggcagggtgctgccttcccattggacagctgctcccggaaatgcaaatgagactcctggaaactgggtgggaattggctgagccaagatggaggcggggctcggccccgggccacttcacggggcgggaaggggaggggaagaagagtctcagactgtgggacacggactcgcagaataaacatatatgtggctgtg

SEQ ID NO: 144582 - DNA, 854 bp, Homo sapiens
  Payload ID: 8565
  Gene Symbol: ISOC2
  Gene Name: isochorismatase domain containing 2
  ENST ID: ENST00000587226
  CDS Start-End: 319-854
agagggtttgtgtatccatcattttgagaaatgcagctgctcggctgtccctaggagttgttgtgacccacactcctaccaggccagaggggagttcctgggtgctccacatgcctgtcctaggcttttggacatgctggcccccagatctgcccctccatggctcctcactgccctcagcagagagactccagggcccttgtgacccacctgtcagctctccagctcctggttccctcagaaccatcccttggggcccgggtgtccaggtcccgcctcctgcacaggggaggaagagttagcacatgagtggccaaaatggcggctgccaggcccagcctgggccgagtcctcccaggatcctctgtcctgttcctgtgtgacatgcaggagaagttccgccacaacatcgcctacttcccacagatcgtctcagtggctgcccgcatgctcaaggtggcccggctgcttgaggtgccagtcatgctgacggagcagtacccacaaggcctgggccccacggtgcccgagctggggactgagggccttcggccgctggccaagacctgcttcagcatggtgcctgccctgcagcaggagctggacagtcggccccagctgcgctctgtgctgctctgtggcattgaggcacaggcctgcatcttgaacacgaccctggacctcctagaccgggggctgcaggtccatgtggtggtggacgcctgctcctcacgcagccaggtggaccggctggtggctctggcccgcatgagacagagtggtgccttcctctccaccagcgaagggctcattctgcagcttgtgggcgatgccgtccacccccagttcaagga

SEQ ID NO: 144583 - DNA, 763 bp, Homo sapiens
  Payload ID: 8565
  Gene Symbol: ISOC2
  Gene Name: isochorismatase domain containing 2
  ENST ID: ENST00000589080
  CDS Start-End: 240-763
gccctgggaagcccgcaagaggcctcagcggtggccgtccgagagccgagaggtgagggtgcccccgcctcacctgcagaggggccgttccgggctcgaacccggcaccttccgggaaaacgggatcgcacgctccgtggtctttgtgttgagatctatccaggttgtggcctgtgcagggtcccccttctttcctatggctgaagaatatggcctcagtttcctcttggagcaggaaaatggcggctgccaggcccagcctgggccgagtcctcccaggatcctctgtcctgttcctgtgtgacatgcaggagaagttccgccacaacatcgcctacttcccacagatcgtctcagtggctgcccgcatgctcaaggtggcccggctgcttgaggtgccagtcatgctgacggagcagtacccacaaggcctgggccccacggtgcccgagctggggactgagggccttcggccgctggccaagacctgcttcagcatggtgcctgccctgcagcaggagctggacagtcggccccagctgcgctctgtgctgctctgtggcattgaggcacaggcctgcatcttgaacacgaccctggacctcctagaccgggggctgcaggtccatgtggtggtggacgcctgctcctcacgcagccaggtggaccggctggtggctctggcccgcatgagacagagtggtgccttcctctccaccagcgaagggctcattctgcagcttgtgggcgatgccgtccaccc

SEQ ID NO: 144584 - DNA, 2382 bp, Homo sapiens
  Payload ID: 8566
  Gene Symbol: IDH1
  Gene Name: isocitrate dehydrogenase 1 (NADP+), soluble
  Uniprot ID: O75874
  ENST ID: ENST00000345146
  CDS Start-End: 286-1530
ggcggggcctgggaggggacaaagccgggaagaggaaaagctcggacctaccctgtggtcccgggtttctgcagagtctacttcagaagcggaggcactgggagtccggtttgggattgccaggctgtggttgtgagtctgagcttgtgagcggctgtggcgccccaactcttcgccagcatatcatcccggcaggcgataaactacattcagttgagtctgcaagactgggaggaactggggtgataagaaatctattcactgtcaaggtttattgaagtcaaaatgtccaaaaaaatcagtggcggttctgtggtagagatgcaaggagatgaaatgacacgaatcatttgggaattgattaaagagaaactcatttttccctacgtggaattggatctacatagctatgatttaggcatagagaatcgtgatgccaccaacgaccaagtcaccaaggatgctgcagaagctataaagaagcataatgttggcgtcaaatgtgccactatcactcctgatgagaagagggttgaggagttcaagttgaaacaaatgtggaaatcaccaaatggcaccatacgaaatattctgggtggcacggtcttcagagaagccattatctgcaaaaatatcccccggcttgtgagtggatgggtaaaacctatcatcataggtcgtcatgcttatggggatcaatacagagcaactgattttgttgttcctgggcctggaaaagtagagataacctacacaccaagtgacggaacccaaaaggtgacatacctggtacataactttgaagaaggtggtggtgttgccatggggatgtataatcaagataagtcaattgaagattttgcacacagttccttccaaatggctctgtctaagggttggcctttgtatctgagcaccaaaaacactattctgaagaaatatgatgggcgttttaaagacatctttcaggagatatatgacaagcagtacaagtcccagtttgaagctcaaaagatctggtatgagcataggctcatcgacgacatggtggcccaagctatgaaatcagagggaggcttcatctgggcctgtaaaaactatgatggtgacgtgcagtcggactctgtggcccaagggtatggctctctcggcatgatgaccagcgtgctggtttgtccagatggcaagacagtagaagcagaggctgcccacgggactgtaacccgtcactaccgcatgtaccagaaaggacaggagacgtccaccaatcccattgcttccatttttgcctggaccagagggttagcccacagagcaaagcttgataacaataaagagcttgccttctttgcaaatgctttggaagaagtctctattgagacaattgaggctggcttcatgaccaaggacttggctgcttgcattaaaggtttacccaatgtgcaacgttctgactacttgaatacatttgagttcatggataaacttggagaaaacttgaagatcaaactagctcaggccaaactttaagttcatacctgagctaagaaggataattgtcttttggtaactaggtctacaggtttacatttttctgtgttacactcaaggataaaggcaaaatcaattttgtaatttgtttagaagccagagtttatcttttctataagtttacagcctttttcttatatatacagttattgccacctttgtgaacatggcaagggacttttttacaatttttattttattttctagtaccagcctaggaattcggttagtactcatttgtattcactgtcactttttctcatgttctaattataaatgaccaaaatcaagattgctcaaaagggtaaatgatagccacagtattgctccctaaaatatgcataaagtagaaattcactgccttcccctcctgtccatgaccttgggcacagggaagttctggtgtcatagatatcccgttttgtgaggtagagctgtgcattaaacttgcacatgactggaacgaagtaggagtgcaactcaaatgtgttgaagatactgcagtcatttttgtaaagaccttgctgaatgtttccaatagactaaatactgtttaggccgcaggagagtttggaatccggaataaatactacctggaggtttgtcctctccatttttctctttctcctcctggcctggcctgaatattatactactctaaatagcatatttcatccaagtgcaataatgtaagctgaatcttttttggacttctgctggcctgttttatttcttttatataaatgtgatttctcagaaattgatattaaacactatcttatcttctcctgaactgttgattttaattaaaattaagtgctaattaccatt

SEQ ID NO: 144585 - DNA, 2441 bp, Homo sapiens
  Payload ID: 8566
  Gene Symbol: IDH1
  Gene Name: isocitrate dehydrogenase 1 (NADP+), soluble
  Uniprot ID: O75874
  ENST ID: ENST00000415913
  CDS Start-End: 383-1627
aggggaggggaggggcgggcgtggagacctggaaggaggtaccgatccagccttgattgcagccctcttgcacaacggccataaggacgggtgcaggccaagagcaaggacatgcaaaccccaagacctgctaacgggcggcgaagcgggggcacgccctcgcacacgcagagataaattgtgctcccatgacctttatttggaaagtgcctgcgggcctaaaattggcctttgtcccaccgagtacactcagcactgtactttaaaccggataaactgggctgtctggcaggcgataaactacattcagttgagtctgcaagactgggaggaactggggtgataagaaatctattcactgtcaaggtttattgaagtcaaaatgtccaaaaaaatcagtggcggttctgtggtagagatgcaaggagatgaaatgacacgaatcatttgggaattgattaaagagaaactcatttttccctacgtggaattggatctacatagctatgatttaggcatagagaatcgtgatgccaccaacgaccaagtcaccaaggatgctgcagaagctataaagaagcataatgttggcgtcaaatgtgccactatcactcctgatgagaagagggttgaggagttcaagttgaaacaaatgtggaaatcaccaaatggcaccatacgaaatattctgggtggcacggtcttcagagaagccattatctgcaaaaatatcccccggcttgtgagtggatgggtaaaacctatcatcataggtcgtcatgcttatggggatcaatacagagcaactgattttgttgttcctgggcctggaaaagtagagataacctacacaccaagtgacggaacccaaaaggtgacatacctggtacataactttgaagaaggtggtggtgttgccatggggatgtataatcaagataagtcaattgaagattttgcacacagttccttccaaatggctctgtctaagggttggcctttgtatctgagcaccaaaaacactattctgaagaaatatgatgggcgttttaaagacatctttcaggagatatatgacaagcagtacaagtcccagtttgaagctcaaaagatctggtatgagcataggctcatcgacgacatggtggcccaagctatgaaatcagagggaggcttcatctgggcctgtaaaaactatgatggtgacgtgcagtcggactctgtggcccaagggtatggctctctcggcatgatgaccagcgtgctggtttgtccagatggcaagacagtagaagcagaggctgcccacgggactgtaacccgtcactaccgcatgtaccagaaaggacaggagacgtccaccaatcccattgcttccatttttgcctggaccagagggttagcccacagagcaaagcttgataacaataaagagcttgccttctttgcaaatgctttggaagaagtctctattgagacaattgaggctggcttcatgaccaaggacttggctgcttgcattaaaggtttacccaatgtgcaacgttctgactacttgaatacatttgagttcatggataaacttggagaaaacttgaagatcaaactagctcaggccaaactttaagttcatacctgagctaagaaggataattgtcttttggtaactaggtctacaggtttacatttttctgtgttacactcaaggataaaggcaaaatcaattttgtaatttgtttagaagccagagtttatcttttctataagtttacagcctttttcttatatatacagttattgccacctttgtgaacatggcaagggacttttttacaatttttattttattttctagtaccagcctaggaattcggttagtactcatttgtattcactgtcactttttctcatgttctaattataaatgaccaaaatcaagattgctcaaaagggtaaatgatagccacagtattgctccctaaaatatgcataaagtagaaattcactgccttcccctcctgtccatgaccttgggcacagggaagttctggtgtcatagatatcccgttttgtgaggtagagctgtgcattaaacttgcacatgactggaacgaagtaggagtgcaactcaaatgtgttgaagatactgcagtcatttttgtaaagaccttgctgaatgtttccaatagactaaatactgtttaggccgcaggagagtttggaatccggaataaatactacctggaggtttgtcctctccatttttctctttctcctcctggcctggcctgaatattatactactctaaatagcatatttcatccaagtgcaataatgtaagctgaatcttttttggacttctgctggcctgttttatttcttttatataaatgtgatttctcagaaattgatattaaacactatcttatcttctcctgaa

SEQ ID NO: 144586 - DNA, 942 bp, Homo sapiens
  Payload ID: 8566
  Gene Symbol: IDH1
  Gene Name: isocitrate dehydrogenase 1 (NADP+), soluble
  ENST ID: ENST00000415282
  CDS Start-End: 471-942
ccagcaccagcgaggggaggggaggggaggggcgggcgtggagacctggaaggaggtaccgatccagccttgattgcagccctcttgcacaacggccataaggacgggtgcaggccaagagcaaggacatgcaaaccccaagacctgctaacgggcggcgaagcgggggcacgccctcgcacacgcagagataaattgtgctcccatgacctttatttggaaagtgcctgcgggcctaaaattggcctttgtcccaccgagtacactcagcactgtactttaaaccggataaactgggctgtctggcaggtactaaaaacagctaaattctcctgtgagtgttctgtatgttaacacttttattccttgttttgttttaggcgataaactacattcagttgagtctgcaagactgggaggaactggggtgataagaaatctattcactgtcaaggtttattgaagtcaaaatgtccaaaaaaatcagtggcggttctgtggtagagatgcaaggagatgaaatgacacgaatcatttgggaattgattaaagagaaactcatttttccctacgtggaattggatctacatagctatgatttaggcatagagaatcgtgatgccaccaacgaccaagtcaccaaggatgctgcagaagctataaagaagcataatgttggcgtcaaatgtgccactatcactcctgatgagaagagggttgaggagttcaagttgaaacaaatgtggaaatcaccaaatggcaccatacgaaatattctgggtggcacggtcttcagagaagccattatctgcaaaaatatcccccggcttgtgagtggatgggtaaaacctatcatcataggtcgtcatgcttatggggatcaatacagagcaactgattttgttgttcctgggcctggaaaagtagagataacctacacac

SEQ ID NO: 144587 - DNA, 563 bp, Homo sapiens
  Payload ID: 8566
  Gene Symbol: IDH1
  Gene Name: isocitrate dehydrogenase 1 (NADP+), soluble
  ENST ID: ENST00000451391
  CDS Start-End: 378-563
aagaagccagggggactgcgcgcgtgagcgtcacgcatgcggggtcaacggatgggtgcttggtgctctgggcactgcaggggtgctggctggactgcggttaccgcagcgcggaaccccctaggcgaccccgcgctggccgggagcactctttcttcagccaaagagtctacttcagaagcggaggcactgggagtccggtttgggattgccaggctgtggttgtgagtctgagcttgtgagcggctgtggcgccccaactcttcgccagcatatcatcccggcaggcgataaactacattcagttgagtctgcaagactgggaggaactggggtgataagaaatctattcactgtcaaggtttattgaagtcaaaatgtccaaaaaaatcagtggcggttctgtggtagagatgcaaggagatgaaatgacacgaatcatttgggaattgattaaagagaaactcatttttccctacgtggaattggatctacatagctatgatttaggcatagagaatcgtgatgccaccaacgaccaagtcaccaaggatgctgcagaa

SEQ ID NO: 144588 - DNA, 702 bp, Homo sapiens
  Payload ID: 8566
  Gene Symbol: IDH1
  Gene Name: isocitrate dehydrogenase 1 (NADP+), soluble
  ENST ID: ENST00000417583
  CDS Start-End: 482-702
cttgagcccaggaagtcaaggctgcagtgagcggtgatcgctccactgcactccagccagggcaacagagcaaggccctgtcttaaaaaagaaaataataagaatcccattcattatcttctaatgcaaacaatcaatggagtttctaaagacctagacataggtggtgtcaggacctgcttctgtaacttttccatcctttgcattaggcagcgcggaaccccctaggcgaccccgcgctggccgggagcactctttcttcagccaaagagtctacttcagaagcggaggcactgggagtccggtttgggattgccaggctgtggttgtgagtctgagcttgtgagcggctgtggcgccccaactcttcgccagcatatcatcccggcaggcgataaactacattcagttgagtctgcaagactgggaggaactggggtgataagaaatctattcactgtcaaggtttattgaagtcaaaatgtccaaaaaaatcagtggcggttctgtggtagagatgcaaggagatgaaatgacacgaatcatttgggaattgattaaagagaaactcatttttccctacgtggaattggatctacatagctatgatttaggcatagagaatcgtgatgccaccaacgaccaagtcaccaaggatgctgcagaagctataaagaagcataatgttggcgtcaaatgtgc

SEQ ID NO: 144589 - DNA, 2298 bp, Homo sapiens
  Payload ID: 8566
  Gene Symbol: IDH1
  Gene Name: isocitrate dehydrogenase 1 (NADP+), soluble
  Uniprot ID: O75874
  ENST ID: ENST00000446179
  CDS Start-End: 207-1451
agggggcgtggaggggcggagctccagcggccttcagaggggtcgctaggccacacggggcgagagggggctgggggaaacacccccgccagttccgggtgcctggagtttaaaaggcgataaactacattcagttgagtctgcaagactgggaggaactggggtgataagaaatctattcactgtcaaggtttattgaagtcaaaatgtccaaaaaaatcagtggcggttctgtggtagagatgcaaggagatgaaatgacacgaatcatttgggaattgattaaagagaaactcatttttccctacgtggaattggatctacatagctatgatttaggcatagagaatcgtgatgccaccaacgaccaagtcaccaaggatgctgcagaagctataaagaagcataatgttggcgtcaaatgtgccactatcactcctgatgagaagagggttgaggagttcaagttgaaacaaatgtggaaatcaccaaatggcaccatacgaaatattctgggtggcacggtcttcagagaagccattatctgcaaaaatatcccccggcttgtgagtggatgggtaaaacctatcatcataggtcgtcatgcttatggggatcaatacagagcaactgattttgttgttcctgggcctggaaaagtagagataacctacacaccaagtgacggaacccaaaaggtgacatacctggtacataactttgaagaaggtggtggtgttgccatggggatgtataatcaagataagtcaattgaagattttgcacacagttccttccaaatggctctgtctaagggttggcctttgtatctgagcaccaaaaacactattctgaagaaatatgatgggcgttttaaagacatctttcaggagatatatgacaagcagtacaagtcccagtttgaagctcaaaagatctggtatgagcataggctcatcgacgacatggtggcccaagctatgaaatcagagggaggcttcatctgggcctgtaaaaactatgatggtgacgtgcagtcggactctgtggcccaagggtatggctctctcggcatgatgaccagcgtgctggtttgtccagatggcaagacagtagaagcagaggctgcccacgggactgtaacccgtcactaccgcatgtaccagaaaggacaggagacgtccaccaatcccattgcttccatttttgcctggaccagagggttagcccacagagcaaagcttgataacaataaagagcttgccttctttgcaaatgctttggaagaagtctctattgagacaattgaggctggcttcatgaccaaggacttggctgcttgcattaaaggtttacccaatgtgcaacgttctgactacttgaatacatttgagttcatggataaacttggagaaaacttgaagatcaaactagctcaggccaaactttaagttcatacctgagctaagaaggataattgtcttttggtaactaggtctacaggtttacatttttctgtgttacactcaaggataaaggcaaaatcaattttgtaatttgtttagaagccagagtttatcttttctataagtttacagcctttttcttatatatacagttattgccacctttgtgaacatggcaagggacttttttacaatttttattttattttctagtaccagcctaggaattcggttagtactcatttgtattcactgtcactttttctcatgttctaattataaatgaccaaaatcaagattgctcaaaagggtaaatgatagccacagtattgctccctaaaatatgcataaagtagaaattcactgccttcccctcctgtccatgaccttgggcacagggaagttctggtgtcatagatatcccgttttgtgaggtagagctgtgcattaaacttgcacatgactggaacgaagtaggagtgcaactcaaatgtgttgaagatactgcagtcatttttgtaaagaccttgctgaatgtttccaatagactaaatactgtttaggccgcaggagagtttggaatccggaataaatactacctggaggtttgtcctctccatttttctctttctcctcctggcctggcctgaatattatactactctaaatagcatatttcatccaagtgcaataatgtaagctgaatcttttttggacttctgctggcctgttttatttcttttatataaatgtgatttctcagaaattgatattaaacactatcttatcttctcctgaactgttgattttaattaaaattaagtgctaatta

SEQ ID NO: 144590 - DNA, 2694 bp, Homo sapiens
  Payload ID: 8567
  Gene Symbol: IDH2
  Gene Name: isocitrate dehydrogenase 2 (NADP+), mitochondrial
  Uniprot ID: P48735
  ENST ID: ENST00000330062
  CDS Start-End: 115-1473
gtgcccgcgcggccagcgcccgccaggcccagcgttagcccgcggccaggcagccgggaggagcggcgcgcgctcggacctctcccgccctgctcgttcgctctccagcttgggatggccggctacctgcgggtcgtgcgctcgctctgcagagcctcaggctcgcggccggcctgggcgccggcggccctgacagcccccacctcgcaagagcagccgcggcgccactatgccgacaaaaggatcaaggtggcgaagcccgtggtggagatggatggtgatgagatgacccgtattatctggcagttcatcaaggagaagctcatcctgccccacgtggacatccagctaaagtattttgacctcgggctcccaaaccgtgaccagactgatgaccaggtcaccattgactctgcactggccacccagaagtacagtgtggctgtcaagtgtgccaccatcacccctgatgaggcccgtgtggaagagttcaagctgaagaagatgtggaaaagtcccaatggaactatccggaacatcctgggggggactgtcttccgggagcccatcatctgcaaaaacatcccacgcctagtccctggctggaccaagcccatcaccattggcaggcacgcccatggcgaccagtacaaggccacagactttgtggcagaccgggccggcactttcaaaatggtcttcaccccaaaagatggcagtggtgtcaaggagtgggaagtgtacaacttccccgcaggcggcgtgggcatgggcatgtacaacaccgacgagtccatctcaggttttgcgcacagctgcttccagtatgccatccagaagaaatggccgctgtacatgagcaccaagaacaccatactgaaagcctacgatgggcgtttcaaggacatcttccaggagatctttgacaagcactataagaccgacttcgacaagaataagatctggtatgagcaccggctcattgatgacatggtggctcaggtcctcaagtcttcgggtggctttgtgtgggcctgcaagaactatgacggagatgtgcagtcagacatcctggcccagggctttggctcccttggcctgatgacgtccgtcctggtctgccctgatgggaagacgattgaggctgaggccgctcatgggaccgtcacccgccactatcgggagcaccagaagggccggcccaccagcaccaaccccatcgccagcatctttgcctggacacgtggcctggagcaccgggggaagctggatgggaaccaagacctcatcaggtttgcccagatgctggagaaggtgtgcgtggagacggtggagagtggagccatgaccaaggacctggcgggctgcattcacggcctcagcaatgtgaagctgaacgagcacttcctgaacaccacggacttcctcgacaccatcaagagcaacctggacagagccctgggcaggcagtagggggaggcgccacccatggctgcagtggaggggccagggctgagccggcgggtcctcctgagcgcggcagagggtgagcctcacagcccctctctggaggcctttctaggggatgtttttttataagccagatgtttttaaaagcatatgtgtgtttcccctcatggtgacgtgaggcaggagcagtgcgttttacctcagccagtcagtatgttttgcatactgtaatttatattgcccttggaacacatggtgccatatttagctactaaaaagctcttcacaaaattgtctgctgtgtttgtccctgaggggaggaggtagtgggaccctgaggcagaggccctgctagagctggcaggttcccctggggcagaccagagcacctcaggaaggggctgccacggcagggaagggaccaggcagccctgggagcccgcattccacaggggcccactgcggagttctcggacactcagggcacaggcctgtgggttccctggaattttctagcatgatccagtttctgtgtccagttctccattctgagagtcaatcagttcctgataggttgtcattgatttttttcttcgttggttttaaccttctaaacatctccaggccactttcttagcctttttctaggtactaaaaagaggtcctacccacacctgcctcacacttctcctttccaaggctgcctgagtttggaggggcttgggtgtgtgtgaacaagggccctgcattgtctaggcctgcagttcccaggcttgggttcactttcaccatgcattggcaaaactagaaaagtaagcttgtgacaaattgttctcggccgggcacagtggcgcacgcctataatccctgtactttgggaggctgaggtgggtggatcacttgaggccaggagttcgagaccagcctggccaacatggtgaaaccccatctctactcaaaatacaaaaattagccaggcgtggtgatgcgcacctgcagtcccagctactcgggaggctgaggcaggaaaatggcttgaacctgggaggcagaggttgcagtgagccgagactgcaccactgcactccagcctgggtgacagagcaagactctgtctcaaaaaaaaaaaaaaaaaaaaaaaaaaaaaaattgctctatgcaagttttttagccccatgtaaaaaggaaaaataaaagttgctctaaagctacatataatcaaaa

SEQ ID NO: 144591 - DNA, 1453 bp, Homo sapiens
  Payload ID: 8567
  Gene Symbol: IDH2
  Gene Name: isocitrate dehydrogenase 2 (NADP+), mitochondrial
  Uniprot ID: P48735
  ENST ID: ENST00000540499
  CDS Start-End: 162-1364
aaggaaagaatattttggggctaaaagagccccgtgtctttgctgcctggtaattcctgcacgcatcttttcctattttgcaacgccataggcttccagcgactgctggtgatgtttctgatgccgacaaaaggatcaaggtggcgaagcccgtggtggagatggatggtgatgagatgacccgtattatctggcagttcatcaaggagaagctcatcctgccccacgtggacatccagctaaagtattttgacctcgggctcccaaaccgtgaccagactgatgaccaggtcaccattgactctgcactggccacccagaagtacagtgtggctgtcaagtgtgccaccatcacccctgatgaggcccgtgtggaagagttcaagctgaagaagatgtggaaaagtcccaatggaactatccggaacatcctgggggggactgtcttccgggagcccatcatctgcaaaaacatcccacgcctagtccctggctggaccaagcccatcaccattggcaggcacgcccatggcgaccagtacaaggccacagactttgtggcagaccgggccggcactttcaaaatggtcttcaccccaaaagatggcagtggtgtcaaggagtgggaagtgtacaacttccccgcaggcggcgtgggcatgggcatgtacaacaccgacgagtccatctcaggttttgcgcacagctgcttccagtatgccatccagaagaaatggccgctgtacatgagcaccaagaacaccatactgaaagcctacgatgggcgtttcaaggacatcttccaggagatctttgacaagcactataagaccgacttcgacaagaataagatctggtatgagcaccggctcattgatgacatggtggctcaggtcctcaagtcttcgggtggctttgtgtgggcctgcaagaactatgacggagatgtgcagtcagacatcctggcccagggctttggctcccttggcctgatgacgtccgtcctggtctgccctgatgggaagacgattgaggctgaggccgctcatgggaccgtcacccgccactatcgggagcaccagaagggccggcccaccagcaccaaccccatcgccagcatctttgcctggacacgtggcctggagcaccgggggaagctggatgggaaccaagacctcatcaggtttgcccagatgctggagaaggtgtgcgtggagacggtggagagtggagccatgaccaaggacctggcgggctgcattcacggcctcagcaatgtgaagctgaacgagcacttcctgaacaccacggacttcctcgacaccatcaagagcaacctggacagagccctgggcaggcagtagggggaggcgccacccatggctgcagtggaggggccagggctgagccggcgggtcctcctgagcgcggcagagggtgagcctcacagccc

SEQ ID NO: 144592 - DNA, 1278 bp, Homo sapiens
  Payload ID: 8567
  Gene Symbol: IDH2
  Gene Name: isocitrate dehydrogenase 2 (NADP+), mitochondrial
  ENST ID: ENST00000559482
  CDS Start-End: 88-1026
cccagcgttagcccgcggccaggcagccgggaggagcggcgcgcgctcggacctctcccgccctgctcgttcgctctccagcttgggatggccggctacctgcgggtcgtgcgctcgctctgcagagcctcaggctcgcggccggcctgggcgccggcggccctgacagcccccacctcgcaagagcagccgcggcgccactatgccgacaaaaggatcaaggtggcgaagcccgtggtggagatggatggtgatgagatgacccgtattatctggcagttcatcaaggagaagtacaaggccacagactttgtggcagaccgggccggcactttcaaaatggtcttcaccccaaaagatggcagtggtgtcaaggagtgggaagtgtacaacttccccgcaggcggcgtgggcatgggcatgtacaacaccgacgagtccatctcaggttttgcgcacagctgcttccagtatgccatccagaagaaatggccgctgtacatgagcaccaagaacaccatactgaaagcctacgatgggcgtttcaaggacatcttccaggagatctttgacaagcactataagaccgacttcgacaagaataagatctggtatgagcaccggctcattgatgacatggtggctcaggtcctcaagtcttcgggtggctttgtgtgggcctgcaagaactatgacggagatgtgcagtcagacatcctggcccagggctttggctcccttggcctgatgacgtccgtcctggtctgccctgatgggaagacgattgaggctgaggccgctcatgggaccgtcacccgccactatcgggagcaccagaagggccggcccaccagcaccaaccccatcgccagcatctttgcctggacacgtggcctggagcaccgggggaagctggatgggaaccaagacctcatcagtgtgaagctgaacgagcacttcctgaacaccacggacttcctcgacaccatcaagagcaacctggacagagccctgggcaggcagtagggggaggcgccacccatggctgcagtggaggggccagggctgagccggcgggtcctcctgagcgcggcagagggtgagcctcacagcccctctctggaggcctttctaggggatgtttttttataagccagatgtttttaaaagcatatgtgtgtttcccctcatggtgacgtgaggcaggagcagtgcgttttacctcagccagtcagtatgttttgcatactgtaatttatattgcccttggaacacatg

SEQ ID NO: 144593 - DNA, 1449 bp, Homo sapiens
  Payload ID: 8567
  Gene Symbol: IDH2
  Gene Name: isocitrate dehydrogenase 2 (NADP+), mitochondrial
  ENST ID: ENST00000560061
  CDS Start-End: 79-195
agcccgcggccaggcagccgggaggagcggcgcgcgctcggacctctcccgccctgctcgttcgctctccagcttgggatggccggctacctgcgggtcgtgcgctcgctctgcagagcctcaggctcgcggccggcctgggcgccggcggccctgacagcccccacctcgcaagagcagccgcggcgccactagttcaagctgaagaagatgtggaaaagtcccaatggaactatccggaacatcctgggggggactgtcttccgggagcccatcatctgcaaaaacatcccacgcctagtccctggctggaccaagcccatcaccattggcaggcacgcccatggcgaccagtacaaggccacagactttgtggcagaccgggccggcactttcaaaatggtcttcaccccaaaagatggcagtggtgtcaaggagtgggaagtgtacaacttccccgcaggcggcgtgggcatgggcatgtacaacaccgacgagtccatctcaggttttgcgcacagctgcttccagtatgccatccagaagaaatggccgctgtacatgagcaccaagaacaccatactgaaagcctacgatgggcgtttcaaggacatcttccaggagatctttgacaagcactataagaccgacttcgacaagaataagatctggtatgagcaccggctcattgatgacatggtggctcaggtcctcaagtcttcgggtggctttgtgtgggcctgcaagaactatgacggagatgtgcagtcagacatcctggcccagggctttggctcccttggcctgatgacgtccgtcctggtctgccctgatgggaagacgattgaggctgaggccgctcatgggaccgtcacccgccactatcgggagcaccagaagggccggcccaccagcaccaaccccatcgccagcatctttgcctggacacgtggcctggagcaccgggggaagctggatgggaaccaagacctcatcaggtttgcccagatgctggagaaggtgtgcgtggagacggtggagagtggagccatgaccaaggacctggcgggctgcattcacggcctcagcaatgtgaagctgaacgagcacttcctgaacaccacggacttcctcgacaccatcaagagcaacctggacagagccctgggcaggcagtagggggaggcgccacccatggctgcagtggaggggccagggctgagccggcgggtcctcctgagcgcggcagagggtgagcctcacagcccctctctggaggcctttctaggggatgtttttttataagccagatgtttttaaaagcatatgtgtgtttcccctcatggtgacgtgaggcaggagcagtgcgttttacctcagccagtcagtatgttttgcatactgtaatttatattgcccttggaacacatggtgccatatttagctact

SEQ ID NO: 144594 - DNA, 4128 bp, Homo sapiens
  Payload ID: 8568
  Gene Symbol: IDH3A
  Gene Name: isocitrate dehydrogenase 3 (NAD+) alpha
  Uniprot ID: P50213
  ENST ID: ENST00000299518
  CDS Start-End: 84-1184
cgtgcaggggcgggctccgagcgtggggtgggcgcttgcgcactgccgctgcggctgttgctgcggagccaggaggggaagcgatggctgggcccgcgtggatctctaaggtctctcggctgctgggggcattccacaacccaaaacaggtgaccagaggttttactggtggtgttcagacagtaactttaattccaggagatggtattggcccagaaatttcagctgcagttatgaagatttttgatgctgccaaagcacctattcagtgggaggagcggaacgtcactgccattcaaggacctggaggaaagtggatgatcccttcagaggctaaagagtccatggataagaacaagatgggcttgaaaggccctttgaagaccccaatagcagccggtcacccatctatgaatttactgctgcgcaaaacatttgacctttacgcgaatgtccgaccatgtgtctctatcgaaggctataaaaccccttacaccgatgtaaatattgtgaccattcgagagaacacagaaggagaatacagtggaattgagcatgtgattgttgatggagtcgtgcagagtatcaagctcatcaccgagggggcgagcaagcgcattgctgagtttgcctttgagtatgcccggaacaaccaccggagcaacgtcacggcggtgcacaaagccaacatcatgcggatgtcagatgggctttttctacaaaaatgcagggaagttgcagaaagctgtaaagatattaaatttaatgagatgtaccttgatacagtatgtttgaatatggtacaagatccttcccaatttgatgttcttgttatgccaaatttgtatggagacatccttagtgacttgtgtgcaggattgatcggaggtctcggtgtgacaccaagtggcaacattggagccaatggggttgcaatttttgagtcggttcatgggacggctccagacattgcaggcaaggacatggcgaatcccacagccctcctgctcagtgccgtgatgatgctgcgccacatgggactttttgaccatgctgcaagaattgaggctgcgtgttttgctacaattaaggacggaaagagcttgacaaaagatttgggaggcaatgcaaaatgctcagacttcacagaggaaatctgtcgccgagtaaaagatttagattaacacttctacaactggcatttacatcagtcactctaaatggacaccacatgaacctctgtttagaatacctacgtatgtatgcattggtttgcttgtttcttgacagtacatttttagatctggccttttcttaacaaaatctgtgcaaaagatgcaggtggatgtccctaggtctgttttcaaagaactttttccaagtgcttgttttatttattaagtgtctacctggtaaatgttttttttgtaaactctgagtggactgtatcatttgctattctaaaccattttacacttaagttaaaatagtttctcttcagctgtaaataacaggatacagaattaacaagagaaaatgtctaactttttaagaaaaaccttattttcttcggtttttgaaaaacataatggaaataaaacaggatattgacataatagcacaaaatgacactcttctaaaactaaatgggcacaagagaattttcctgggaaagttcacatcaaaaagagtgaatgtggtatatttctaaatgatatggaaaatagagacagatttgtcctttacagaaattactgagtgtgaataaaaacttcagatccaagaaatatataatgagagatataatttttgttaataagacaaaggtaatatattggatacaaagacacaaatgtattgtgtgttcaattattttgttgtcttgagatttaatattctttccaagagcttttaatgaagcagagagctagtacttcattttcactggatacattttcagcatcatgagttgtcacagcctctgagcccctgatctgaagccagaagggctgagtgtattgtaaacttattcttgcatgttgctgtctgggaatggaccacactacagcaggtagttctgggggcgatactgccgaaaggcccgaacacatgtattttggctgcaattgaggaacttgggatgctattaattttgtatttcagcaactgccccttctcctatcccaaagcaccaattactgccctctgcctcagcagtaccagtataagatgacattccaaagactggaggcaactcagcctgagttaattcacaaaattatgccatgctggggcttgagcttgagcttgggcttaggcttgggctcagcttttgaccctcaggcatctcctttcccttcctgtcttcctctcccttctcctctgctgcagcatgattttcttaatcttcagacactcactattttcatgaacagttaccctctgtccccacaaccaaagacaactcatggcctcctttggcccttgtgtaacattgcaaacctgtggctttgcaaaatgtacccaggtcacaaggggatttttttttttttagcaatgatatccctgtctgggtcactttttaagcttgtaaccgcccccccagacttataatcttaaatgtattttcctttgtttaagctgctgcttcctctgtttcattggattgtgccagttatcagtggctcttgggttcaaagtaataaagaattccaaaactgagatgtttgctttctctacctgtttcctgttcagatgccttcggtcattttggctcagcttgctactgagaatggctgcttcccgtattcagaatggaagtggggtggtctggtggcgacaggctaacgtagagctggctgcttttatgagaatgcgccacttgaccccatcctgcacctttgtttattccagggcactaatggtcactcgcatgcccgctgtgcacagtcctgtgagttaaatgcccactactctctgcactggtcccacctgctcaattgacaaaaaaaatcaggtccttgttgacagttctgttaaaaggtttaatattcaaattatacattaaatagaatcaaacaggcagcagcagttttattaagcatcaagtcagttggcatgtgggtggcggagtgcctggtaatggaataatagggtcggcgatgcccgccaagattccagagtaagtcaggtcgctaggtgagttgtgactgattgcttttcctgcagcgcacgtgagcagtatcagccatctctctcctacccgctccacagcctactgctggctgtcctgtatgtgagctagcagctttttaatctacctggaactaaggccaaaaattatcagccctttcgttctggaaggagagctgatctcatttgtcacctgaacaaaaagcaatacttaaactgaattaaaactacccacacgtgaagcttcttggaattgtcagctattgttggcgtaagacctggtaaatgtagagccagtgctgtgccctgacctggagatctaacagacttggcagaaatgcctgtgcccagactgaagagacctggggctcaggaagaggctcggaacgcctgccctctattctatagaaactgcaggcataggccctgattacattttttgctcttggtaaaaggagtcaatgatacctttgtacttctccaaaactgtgagccgtttcagtttcatcgtgggacctaaaagggaaatgagaagaaatgagtgaggcccaggctctgagaactctgagaatgtgtgtggtaaagactcacactcagtcctatatataactcaggaattaagccagataatcaggaccgtcagtagccagcctccaagacagtgatcgctcctggtattcatatggcttgtgtgtagtctcctgtgttataccactggttgtggccagtggagtatagatgaagggttggtatgtcacctctgagaataggttataaaagatcagtttcttttatacacataggaaagtagtgtaagctacatctgccttttccttgacctgtacccagttttgaccctcagtccattttctctgaaatggatttatttgttccatctcttgaatgaataaattgttgaagcaattaaaaaataga

SEQ ID NO: 144595 - DNA, 878 bp, Homo sapiens
  Payload ID: 8568
  Gene Symbol: IDH3A
  Gene Name: isocitrate dehydrogenase 3 (NAD+) alpha
  ENST ID: ENST00000558933
  CDS Start-End: 79-261
aggggcgggctccgagcgtggggtgggcgcttgcgcactgccgctgcggctgttgctgcggagccaggaggggaagcgatggctgggcccgcgtggatctctaaggtctctcggctgctgggggcattccacaacccaaaacaggtgaccagaggttttactggtggtgttcagacagtaactttaattccaggagatggtattggcccagaaatttcagctgcagttatgaagatttttgatgctgccaaagccctttgaagaccccaatagcagccggtcacccatctatgaatttactgctgcgcaaaacatttgacctttacgcgaatgtccgaccatgtgtctctatcgaaggctataaaaccccttacaccgatgtaaatattgtgaccattcgagagaacacagaaggagaatacagtggaattgagcatgtgattgttgatggagtcgtgcagagtatcaagctcatcaccgagggggcgagcaagcgcattgctgagtttgcctttgagtatgcccggaacaaccaccggagcaacgtcacggcggtgcacaaagccaacatcatgcggatgtcagatgggctttttctacaaaaatgcagggaagttgcagaaagctgtaaagatattaaatttaatgagatgtaccttgatacagtatgtttgaatatggtacaagatccttcccaatttgatgttcttgttatgccaaatttgtatggagacatccttagtgacttgtgtgcaggattgatcggaggtctcggtgtgacaccaagtggcaacattggagccaatggggttgcaatttttgagtcggttcatgggacggctccagacattgcaggcaaggacatggcgaatcccaca

SEQ ID NO: 144596 - DNA, 744 bp, Homo sapiens
  Payload ID: 8568
  Gene Symbol: IDH3A
  Gene Name: isocitrate dehydrogenase 3 (NAD+) alpha
  ENST ID: ENST00000559186
  CDS Start-End: 418-744
gctgcggctgttgctgcggagccaggaggggaagcgatggctgggcccgcgtggatctctaaggtctctcggctgctgggggcattccacaacccaaaacagatcaactttgccaagcttatgtagattactcttagatttaagcagacagttttatagaggaactaagaaaaaaatggaagctctcttgataaaaagtctgattttccctgagtaccaaaacagacctcagtaatattttggaaatgtgtctgaaaatgttttgcaagactgaagaagttgcatgagaagctttccaggatcacaatggaaaggaaaggaaaacacttgccttcatgagaaaccgtctaaattttagttcagacagtaactttaattccaggagatggtattggcccagaaatttcagctgcagttatgaagatttttgatgctgccaaagcacctattcagtgggaggagcggaacgtcactgccattcaaggacctggaggaaagtggatgatcccttcagaggctaaagagtccatggataagaacaagatgggcttgaaaggccctttgaagaccccaatagcagccggtcacccatctatgaatttactgctgcgcaaaacatttgacctttacgcgaatgtccgaccatgtgtctctatcgaaggctataaaaccccttacaccgatgtaaatattgtgaccattcgagagaacacagaaggagaatacagtggaattgagcatgtg

SEQ ID NO: 144597 - DNA, 567 bp, Homo sapiens
  Payload ID: 8568
  Gene Symbol: IDH3A
  Gene Name: isocitrate dehydrogenase 3 (NAD+) alpha
  ENST ID: ENST00000559106
  CDS Start-End: 1-109
tgggcccgcgtggatctctaaggtctctcggctgctgggggcattccacaacccaaaacaggtgaccagaggttttactggtggtatcaactttgccaagcttatgtagattactcttagatttaagcagacagttttatagaggaactaagaaaaaaatggaagctctcttgataaaaagtctgattttccctgagtaccaaaacagacctcagtaatattttggaaatgtgtctgaaaatgttttgcaagactgaagaagttgcatgagaagctttccaggatcacaatggaaaggaaaggaaaacacttgccttcatgagaaaccgtctaaattttagagatggtattggcccagaaatttcagctgcagttatgaagatttttgatgctgccaaagcacctattcagtgggaggagcggaacgtcactgccattcaaggacctggaggaaagtggatgatcccttcagaggctaaagagtccatggataagaacaagatgggcttgaaaggccctttgaagaccccaatagcagccggtcacccatctatgaatttactgctg

SEQ ID NO: 144598 - DNA, 2110 bp, Homo sapiens
  Payload ID: 8568
  Gene Symbol: IDH3A
  Gene Name: isocitrate dehydrogenase 3 (NAD+) alpha
  ENST ID: ENST00000560667
  CDS Start-End: 45-158
gcactgccgctgcggctgttgctgcggagccaggaggggaagcgatggctgggcccgcgtggatctctaaggtctctcggctgctgggggcattccacaacccaaaacaggtgaccagaggttttactggtggtatcaactttgccaagcttatgtagattactcttagatttaagcagacagttttatagaggaactaagaaaaaaatggaagctctcttgataaaaagtctgattttccctgagtaccaaaacagacctcagtaatattttggaaatgtgtctgaaaatgttttgcaagactgaagaagttgcatgagaagctttccaggatcacaatggaaaggaaaggaaaacacttgccttcatgagaaaccgtctaaattttagttcagacagtaactttaattccaggagatggtattggcccagaaatttcagctgcagttatgaagatttttgatgctgccaaagcacctattcagtgggaggagcggaacgtcactgccattcaaggacctggaggaaagtggatgatcccttcagaggctaaagagtccatggataagaacaagatgggcttgaaaggccctttgaagaccccaatagcagccggtcacccatctatgaatttactgctgcgcaaaacatttgacctttacgcgaatgtccgaccatgtgtctctatcgaaggctataaaaccccttacaccgatgtaaatattgtgaccattcgagagaacacagaaggagaatacagtggaattgagcatgtgattgttgatggagtcgtgcagagtatcaagctcatcaccgagggggcgagcaagcgcattgctgagtttgcctttgagtatgcccggaacaaccaccggagcaacgtcacggcggtgcacaaagccaacatcatgcggatgtcagatgggctttttctacaaaaatgcagggaagttgcagaaagctgtaaagatattaaatttaatgagatgtaccttgatacagtatgtttgaatatggtacaagatccttcccaatttgatgttcttgttatgccaaatttgtatggagacatccttagtgacttgtgtgcaggattgatcggaggtctcggtgtgacaccaagtggcaacattggagccaatggggttgcaatttttgagtcggttcatgggacggctccagacattgcaggcaaggacatggcgaatcccacagccctcctgctcagtgccgtgatgatgctgcgccacatgggactttttgaccatgctgcaagaattgaggctgcgtgttttgctacaattaaggacggaaagagcttgacaaaagatttgggaggcaatgcaaaatgctcagacttcacagaggaaatctgtcgccgagtaaaagatttagattaacacttctacaactggcatttacatcagtcactctaaatggacaccacatgaacctctgtttagaatacctacgtatgtatgcattggtttgcttgtttcttgacagtacatttttagatctggccttttcttaacaaaatctgtgcaaaagatgcaggtggatgtccctaggtctgttttcaaagaactttttccaagtgcttgttttatttattaagtgtctacctggtaaatgttttttttgtaaactctgagtggactgtatcatttgctattctaaaccattttacacttaagttaaaatagtttctcttcagctgtaaataacaggatacagaattaacaagagaaaatgtctaactttttaagaaaaaccttattttcttcggtttttgaaaaacataatggaaataaaacaggatattgacataatagcacaaaatgacactcttctaaaactaaatgggcacaagagaattttcctgggaaagttcacatcaaaaagagtgaatgtggtatatttctaaatgatatggaaaatagagacagatttgtcctttacagaaattactgagtgtgaataaaaacttcagatccaagaaatatataatgagagatataatttttgttaataagacaaaggtaatatattggatacaaagacacaaatgtattgtgtgttcaattattttgttgtcttgagatttaat

SEQ ID NO: 144599 - DNA, 1595 bp, Homo sapiens
  Payload ID: 8568
  Gene Symbol: IDH3A
  Gene Name: isocitrate dehydrogenase 3 (NAD+) alpha
  ENST ID: ENST00000558554
  CDS Start-End: 45-1040
gcactgccgctgcggctgttgctgcggagccaggaggggaagcgatggctgggcccgcgtggatctctaaggtctctcggctgctgggggcattccacaacccaaaacaggtgaccagaggttttactggtggtgttcagacagtaactttaattccaggagatggtattggcccagaaatttcagctgcagttatgaagatttttgatgctgccaaagcacctattcagtgggaggagcggaacgtcactgccattcaaggacctggaggaaagtggatgatcccttcagaggctaaagagtccatggataagaacaagatgggcttgaaaggctataaaaccccttacaccgatgtaaatattgtgaccattcgagagaacacagaaggagaatacagtggaattgagcatgtgattgttgatggagtcgtgcagagtatcaagctcatcaccgagggggcgagcaagcgcattgctgagtttgcctttgagtatgcccggaacaaccaccggagcaacgtcacggcggtgcacaaagccaacatcatgcggatgtcagatgggctttttctacaaaaatgcagggaagttgcagaaagctgtaaagatattaaatttaatgagatgtaccttgatacagtatgtttgaatatggtacaagatccttcccaatttgatgttcttgttatgccaaatttgtatggagacatccttagtgacttgtgtgcaggattgatcggaggtctcggtgtgacaccaagtggcaacattggagccaatggggttgcaatttttgagtcggttcatgggacggctccagacattgcaggcaaggacatggcgaatcccacagccctcctgctcagtgccgtgatgatgctgcgccacatgggactttttgaccatgctgcaagaattgaggctgcgtgttttgctacaattaaggacggaaagagcttgacaaaagatttgggaggcaatgcaaaatgctcagacttcacagaggaaatctgtcgccgagtaaaagatttagattaacacttctacaactggcatttacatcagtcactctaaatggacaccacatgaacctctgtttagaatacctacgtatgtatgcattggtttgcttgtttcttgacagtacatttttagatctggccttttcttaacaaaatctgtgcaaaagatgcaggtggatgtccctaggtctgttttcaaagaactttttccaagtgcttgttttatttattaagtgtctacctggtaaatgttttttttgtaaactctgagtggactgtatcatttgctattctaaaccattttacacttaagttaaaatagtttctcttcagctgtaaataacaggatacagaattaacaagagaaaatgtctaactttttaagaaaaaccttattttcttcggtttttgaaaaacataatggaaataaaacaggatattgacataatagcacaaaatgacactcttctaaaactaaatgggcacaagagaattttcctgggaaagttcacatcaaaaagagtgaatgtggtatatttctaaatgatatggaaaatagagacagatttgt

SEQ ID NO: 144600 - DNA, 483 bp, Homo sapiens
  Payload ID: 8568
  Gene Symbol: IDH3A
  Gene Name: isocitrate dehydrogenase 3 (NAD+) alpha
  ENST ID: ENST00000560396
  CDS Start-End: 32-160
ggctgttgctgcggagccaggaggggaagcgatggctgggcccgcgtggatctctaaggtctctcggctgctgggggcattccacaacccaaaacaggtgaccagaggttttactggtggtgagatggtattggcccagaaatttcagctgcagttatgaagatttttgatgctgccaaagcacctattcagtgggaggagcggaacgtcactgccattcaaggacctggaggaaagtggatgatcccttcagaggctaaagagtccatggataagaacaagatgggcttgaaaggccctttgaagaccccaatagcagccggtcacccatctatgaatttactgctgcgcaaaacatttgacctttacgcgaatgtccgaccatgtgtctctatcgaaggctataaaaccccttacaccgatgtaaatattgtgaccattcgagagaacacagaaggagaatacagtggaattgagcatgtg

SEQ ID NO: 144601 - DNA, 738 bp, Homo sapiens
  Payload ID: 8568
  Gene Symbol: IDH3A
  Gene Name: isocitrate dehydrogenase 3 (NAD+) alpha
  ENST ID: ENST00000559881
  CDS Start-End: 335-738
gttgctgcggagccaggaggggaagcgatggctgggcccgcgtggatctctaagattctactttgtcaccctcttcagacccagatttgcttgtgatgataactcttatgtcacatttgctcctaaaagtaaagcaacttctgtgtcactgtgaaaactgaactcagtcctttaatctctgaacttacatttaacacccaattcatctttggtctctcggctgctgggggcattccacaacccaaaacaggtgaccagaggttttactggtggtgttcagacagtaactttaattccaggagatggtattggcccagaaatttcagctgcagttatgaagatttttgatgctgccaaagcacctattcagtgggaggagcggaacgtcactgccattcaaggacctggaggaaagtggatgatcccttcagaggctaaagagtccatggataagaacaagatgggcttgaaaggccctttgaagaccccaatagcagccggtcacccatctatgaatttactgctgcgcaaaacatttgacctttacgcgaatgtccgaccatgtgtctctatcgaaggctataaaaccccttacaccgatgtaaatattgtgaccattcgagagaacacagaaggagaatacagtggaattgagcatgtgattgttgatggagtcgtgcagagtatcaagctcatcaccgagggggcgagcaagcgcattgctgagtttgcctttga

SEQ ID NO: 144602 - DNA, 1008 bp, Homo sapiens
  Payload ID: 8568
  Gene Symbol: IDH3A
  Gene Name: isocitrate dehydrogenase 3 (NAD+) alpha
  ENST ID: ENST00000559803
  CDS Start-End: 25-207
gctgcggagccaggaggggaagcgatggctgggcccgcgtggatctctaaggtctctcggctgctgggggcattccacaacccaaaacaggtgaccagaggttttactggtggtgttcagacagtaactttaattccaggagatggtattggcccagaaatttcagctgcagttatgaagatttttgatgctgccaaagccctttgaagaccccaatagcagccggtcacccatctatgaatttactgctgcgcaaaacatttgacctttacgcgaatgtccgaccatgtgtctctatcgaaggctataaaaccccttacaccgatgtaaatattgtgaccattcgagagaacacagaaggagaatacagtggaattgagcatgtgattgttgatggagtcgtgcagagtatcaagctcatcaccgagggggcgagcaagcgcattgctgagtttgcctttgagtatgcccggaacaaccaccggagcaacgtcacggcggtgcacaaagccaacatcatacttttttttcagcagtttttatttgattaaatacaggcggatgtcagatgggctttttctacaaaaatgcagggaagttgcagaaagctgtaaagatattaaatttaatgagatgtaccttgatacagtatgtttgaatatggtacaagatccttcccaatttgatgttcttgttatgccaaatttgtatggagacatccttagtgacttgtgtgcaggattgatcggaggtctcggtgtgacaccaagtggcaacattggagccaatggggttgcaatttttgagtcggttcatgggacggctccagacattgcaggcaaggacatggcgaatcccacagccctcctgctcagtgccgtgatgatgctgcgccacatgggactttttgaccatgctgcaagaattgaggctgcgtgttttgctacaattaaggacggaaagagcttgacaaaagatttgggaggcaatgcaaaatgctcagacttc

SEQ ID NO: 144603 - DNA, 568 bp, Homo sapiens
  Payload ID: 8568
  Gene Symbol: IDH3A
  Gene Name: isocitrate dehydrogenase 3 (NAD+) alpha
  ENST ID: ENST00000559865
  CDS Start-End: 28-141
gttgctgcggagccaggaggggaagcgatggctgggcccgcgtggatctctaaggtctctcggctgctgggggcattccacaacccaaaacaggtgaccagaggttttactggtggtatcaactttgccaagcttatgtagattactcttagatttaagcagacagttttatagaggaactaagaaaaaaatggaagctctcttgataaaaagtctgattttccctgagtaccaaaacagacctcagtaatattttggaaatgtgtctgaaaatgttttgcaagactgaagaagttgcatgagaagctttccaggatcacaatggaaaggaaaggaaaacacttgccttcatgagaaaccgtctaaattttagttcagacagtaactttaattccaggagatggtattggcccagaaatttcagctgcagttatgaagatttttgatgctgccaaagccctttgaagaccccaatagcagccggtcacccatctatgaatttactgctgcgcaaaacatttgacctttacgcgaatgtccgaccatgtgtctctatcgaaggctataa

SEQ ID NO: 144604 - DNA, 424 bp, Homo sapiens
  Payload ID: 8568
  Gene Symbol: IDH3A
  Gene Name: isocitrate dehydrogenase 3 (NAD+) alpha
  ENST ID: ENST00000557960
  CDS Start-End: 1-146
gactttttgaccatgctgcaagaattgaggctgcgtgttttgctacaattaaggacggaaagagcttgacaaaagatttgggaggcaatgcaaaatgctcagacttcacagaggaaatctgtcgccgagtaaaagatttagattaacacttctacaactggcatttacatcagtcactctaaatggacaccacatgaacctctgtttagaatacctaccgcacgtgagcagtatcagccatctctctcctacccgctccacagcctactgctggctgtcctgtatgtgagctagcagctttttaatctacctggaactaaggccaaaaattatcagccctttcgttctggaaggagagctgatctcatttgtcacctgaacaaaaagcaatacttaaactgaattaaaactacccacacgtgaa

SEQ ID NO: 144605 - DNA, 587 bp, Homo sapiens
  Payload ID: 8568
  Gene Symbol: IDH3A
  Gene Name: isocitrate dehydrogenase 3 (NAD+) alpha
  ENST ID: ENST00000557826
  CDS Start-End: 449-587
actgccgctgcggctgttgctgcggagccaggaggggaagcgatggctgggcccgcgtggatctctaaggttgtggccaggcatggtggctcatgcctgtaattctagcactttgggaggccaaagtgggcggatcacttgaggtcgggagttcaagaccagcctggccaacatggcgaaaccccatctctactaaaaatacaaaaatttgctgggcgtggtggcgcacgcctgtaatcccagctactcgggaggctgaggcaggagagtcacttgaacccaggaggtggaggctgcggtgagaggagatcatgctcctacctgggtctctcggctgctgggggcattccacaacccaaaacaggtgaccagaggttttactggtggtgttcagacagtaactttaattccaggagatggtattggcccagaaatttcagctgcagttatgaagatttttgatgctgccaaagcacctattcagtgggaggagcggaacgtcactgccattcaaggacctggaggaaagtggatgatcccttcagaggctaaagagtccatggataagaacaagatgggcttgaaag

SEQ ID NO: 144606 - DNA, 569 bp, Homo sapiens
  Payload ID: 8568
  Gene Symbol: IDH3A
  Gene Name: isocitrate dehydrogenase 3 (NAD+) alpha
  ENST ID: ENST00000561279
  CDS Start-End: 43-569
actgccgctgcggctgttgctgcggagccaggaggggaagcgatggctgggcccgcgtggatctctaaggtctctcggctgctgggggcattccacaacccaaaacaggtgaccagaggttttactggtggtgcacctattcagtgggaggagcggaacgtcactgccattcaaggacctggaggaaagtggatgatcccttcagaggctaaagagtccatggataagaacaagatgggcttgaaaggccctttgaagaccccaatagcagccggtcacccatctatgaatttactgctgcgcaaaacatttgacctttacgcgaatgtccgaccatgtgtctctatcgaaggctataaaaccccttacaccgatgtaaatattgtgaccattcgagagaacacagaaggagaatacagtggaattgagcatgtgattgttgatggagtcgtgcagagtatcaagctcatcaccgagggggcgagcaagcgcattgctgagtttgcctttgagtatgcccggaacaaccaccggagcaacgtcacggcggtgcacaaagccaacatcat

SEQ ID NO: 144607 - DNA, 389 bp, Homo sapiens
  Payload ID: 8568
  Gene Symbol: IDH3A
  Gene Name: isocitrate dehydrogenase 3 (NAD+) alpha
  ENST ID: ENST00000561366
  CDS Start-End: 1-138
atggtacaagatccttcccaatttgatgttcttgttatgccaaatttgtatggagacatccttaggttcatgggacggctccagacattgcaggcaaggacatggcgaatcccacagccctcctgctcagtgccgtgatgatgctgcgccacatgggactttttgaccatgctgcaagaattgaggctgcgtgttttgctacaattaaggacggaaaggtaacaggaatcttgatttacttgtgctgggtaaaatgcattgcttccatgtgttttatctgagtgaaagggacagtgacagataatagttctcaggcgggcccaagcatttgatgttgaacaaggattcttaacgtgggtcccagattgaacagggtatgtgtgcacatg

SEQ ID NO: 144608 - DNA, 586 bp, Homo sapiens
  Payload ID: 8568
  Gene Symbol: IDH3A
  Gene Name: isocitrate dehydrogenase 3 (NAD+) alpha
  ENST ID: ENST00000560770
  CDS Start-End: 563-586
gttgctgcggagccaggaggggaagcgatggctgggcccgcgtggatctctaagaatagatataatgtataattgaaggagcactggaccaggagtcagaagacctgtatgtgggtttccattttgccaattattcgctgtgtgaccttaggcaaatgcttttctttgggaccagcatctccgcttatgaaataagcaagttgccaggtgtcgtggtgcacacctgtaatcccacctactcaggaggctgaggcaagagggtcacttgagcccaggagttggagactgcagtgagttatgattgtgcctttgaatagtcactgcactccatcctgggcaacctagggagaccccatctcaaaaagcctaaaacaacaacaagaaataagtgagttgtgctctggatttcatgaggaacatcctggctctaaaattaatggtctctcggctgctgggggcattccacaacccaaaacaggtgaccagaggttttactggtggtgttcagacagtaactttaattccaggagatggtattggcccagaaatttcagctgcagttatgaagatttttgatgctgccaaa

SEQ ID NO: 144609 - DNA, 566 bp, Homo sapiens
  Payload ID: 8568
  Gene Symbol: IDH3A
  Gene Name: isocitrate dehydrogenase 3 (NAD+) alpha
  ENST ID: ENST00000559205
  CDS Start-End: 25-288
gctgcggagccaggaggggaagcgatggctgggcccgcgtggatctctaaggttcatgggacggctccagacattgcaggcaaggacatggcgaatcccacagccctcctgctcagtgccgtgatgatgctgcgccacatgggactttttgaccatgctgcaagaattgaggctgcgtgttttgctacaattaaggacggaaagagcttgacaaaagatttgggaggcaatgcaaaatgctcagacttcacagaggaaatctgtcgccgagtaaaagatttagattaacacttctacaactggcatttacatcagtcactctaaatggacaccacatgaacctctgtttagaatacctacgtatgtatgcattggtttgcttgtttcttgacagtacatttttagatctggccttttcttaacaaaatctgtgcaaaagatgcaggtggatgtccctaggtctgttttcaaagaactttttccaagtgcttgttttatttattaagtgtctacctggtaaatgttttttttgtaaactctgagtggactgtatcatttgctattct

SEQ ID NO: 144610 - DNA, 617 bp, Homo sapiens
  Payload ID: 8568
  Gene Symbol: IDH3A
  Gene Name: isocitrate dehydrogenase 3 (NAD+) alpha
  ENST ID: ENST00000558509
  CDS Start-End: 28-210
gttgctgcggagccaggaggggaagcgatggctgggcccgcgtggatctctaaggtctctcggctgctgggggcattccacaacccaaaacaggtgaccagaggttttactggtggtgttcagacagtaactttaattccaggagatggtattggcccagaaatttcagctgcagttatgaagatttttgatgctgccaaagccctttgaagaccccaatagcagccggtcacccatctatgaatttactgctgcgcaaaacatttgacctttacgcgaatgtccgaccatgtgtctctatcgaaggctataaaaccccttacaccgatgtaaatattgtgaccattcgagagaacacagaaggagaatacagtggaattgagcatgtgattgttgatggagtcgtgcagagtatcaagctcatcaccgagggggcgagcaagcgcattgctgagtttgcctttgagtatgcccggaacaaccaccggagcaacgtcacggcggtgcacaaagccaacatcatacttttttttcagcagtttttatttgattaaatacaggcggatgtcagatgggctttttctacaaaaatgcagggaagttgcagaaagctgtaa

SEQ ID NO: 144611 - DNA, 114 bp, Homo sapiens
  Payload ID: 8568
  Gene Symbol: IDH3A
  Gene Name: isocitrate dehydrogenase 3 (NAD+) alpha
  ENST ID: ENST00000629769
  CDS Start-End: 1-114
atggctgggcccgcgtggatctctaaggtctctcggctgctgggggcattccacaacccaaaacaggtgaccagaggttttactggtggtatcaactttgccaagcttatgtag

SEQ ID NO: 144612 - DNA, 1545 bp, Homo sapiens
  Payload ID: 8569
  Gene Symbol: IDH3B
  Gene Name: isocitrate dehydrogenase 3 (NAD+) beta
  Uniprot ID: O43837
  ENST ID: ENST00000380843
  CDS Start-End: 32-1189
gtcacttcccacgcgacttcctgcgggaaacatggcggcattgagcggagtccgctggctgacccgagcgctggtctccgccgggaaccctggggcatggagaggtctgagtacctcggccgcggcgcacgctgcatcgcggagccaggccgaggacgtgagggtggagggctcctttcccgtgaccatgcttccgggagacggtgtggggcctgagctgatgcacgccgtcaaggaggtgttcaaggctgccgctgtcccagtggagttccaggagcaccacctgagtgaggtgcagaatatggcatctgaggagaagctggagcaggtgctgagttccatgaaggagaacaaagtggccatcattggaaagattcataccccgatggagtataagggggagctagcctcctatgatatgcggctgaggcgtaagttggacttatttgccaacgtagtccatgtgaagtcacttcctgggtatatgactcggcacaacaatctagacctggtgatcattcgagagcagacagaaggggagtacagctctctggaacatgagagtgcaaggggtgtgattgagtgtttgaagattgtcacacgagccaagtctcagcggattgcaaagttcgcctttgactatgccaccaagaaggggcggggcaaggtcactgctgtccacaaggccaacatcatgaaacttggggatgggttgttcctgcagtgctgtgaggaagttgctgaactgtaccccaaaatcaaatttgagacaatgatcatagacaactgctgcatgcagctggtgcagaatccttaccagtttgatgtgcttgtgatgcccaatctctatgggaacattattgacaatctggctgctggcctggttgggggagctggtgtggtccctggtgagagctatagtgcagaatacgcagtctttgagacgggtgcccggcacccatttgcccaggcagtgggcaggaatatagccaatcccacggccatgctgctgtcggcttccaacatgctgcggcatcttaatcttgagtatcactccagcatgatcgcagatgcggtgaagaaggtgatcaaagttggcaaggtgcggactcgagacatgggcggctacagcaccacaaccgacttcatcaagtctgtcatcggtcacctgcagactaaagggagctagagccctttatttcttccaaccttgcaaggaccacactccccatacccttcagtgcagtgtaccagggaagagaccttgtgcctctaagcagtggaccatggtcaccttgctgggtagagcctaggttgtccttgggccggcttccttaggggacagactgttgggtggtgatggggattgttaggatggagcccaggccacatggatgatgatgattctcccccacaggttcgaacctctgacatgggtggctatgctacttgccatgacttcactgaggctgtcattgctgccttgccccacccataggccctgtccatacccatgtaaggtgttcaataaagaacatgaaccaa

SEQ ID NO: 144613 - DNA, 1230 bp, Homo sapiens
  Payload ID: 8569
  Gene Symbol: IDH3B
  Gene Name: isocitrate dehydrogenase 3 (NAD+) beta
  Uniprot ID: O43837
  ENST ID: ENST00000380851
  CDS Start-End: 32-1183
gtcacttcccacgcgacttcctgcgggaaacatggcggcattgagcggagtccgctggctgacccgagcgctggtctccgccgggaaccctggggcatggagaggtctgagtacctcggccgcggcgcacgctgcatcgcggagccaggccgaggacgtgagggtggagggctcctttcccgtgaccatgcttccgggagacggtgtggggcctgagctgatgcacgccgtcaaggaggtgttcaaggctgccgctgtcccagtggagttccaggagcaccacctgagtgaggtgcagaatatggcatctgaggagaagctggagcaggtgctgagttccatgaaggagaacaaagtggccatcattggaaagattcataccccgatggagtataagggggagctagcctcctatgatatgcggctgaggcgtaagttggacttatttgccaacgtagtccatgtgaagtcacttcctgggtatatgactcggcacaacaatctagacctggtgatcattcgagagcagacagaaggggagtacagctctctggaacatgagagtgcaaggggtgtgattgagtgtttgaagattgtcacacgagccaagtctcagcggattgcaaagttcgcctttgactatgccaccaagaaggggcggggcaaggtcactgctgtccacaaggccaacatcatgaaacttggggatgggttgttcctgcagtgctgtgaggaagttgctgaactgtaccccaaaatcaaatttgagacaatgatcatagacaactgctgcatgcagctggtgcagaatccttaccagtttgatgtgcttgtgatgcccaatctctatgggaacattattgacaatctggctgctggcctggttgggggagctggtgtggtccctggtgagagctatagtgcagaatacgcagtctttgagacgggtgcccggcacccatttgcccaggcagtgggcaggaatatagccaatcccacggccatgctgctgtcggcttccaacatgctgcggcatcttaatcttgagtatcactccagcatgatcgcagatgcggtgaagaaggtgatcaaagttggcaaggttcgaacctctgacatgggtggctatgctacttgccatgacttcactgaggctgtcattgctgccttgccccacccataggccctgtccatacccatgtaaggtgttcaataaagaacatgaaccaa

SEQ ID NO: 144614 - DNA, 1279 bp, Homo sapiens
  Payload ID: 8569
  Gene Symbol: IDH3B
  Gene Name: isocitrate dehydrogenase 3 (NAD+) beta
  ENST ID: ENST00000474315
  CDS Start-End: 2-1165
catggcggcattgagcggagtccgctggctgacccgagcgctggtctccgccgggaaccctggggcatggagaggtctgagtacctcggccgcggcgcacgctgcatcgcggagccaggccgaggacgtgagggtggagggctcctttcccgtgaccatgcttccgggagacggtgtggggcctgagctgatgcacgccgtcaaggaggtgttcaaggctgccgctgtcccagtggagttccaggagcaccacctgagtgaggtgcagaatatggcatctgaggagaagctggagcaggtgctgagttccatgaaggagaacaaagtggccatcattggaaagattcataccccgatggagtataagggggagctagcctcctatgatatgcggctgaggcgtaagttggacttatttgccaacgtagtccatgtgaagtcacttcctgggtatatgactcggcacaacaatctagacctggtgatcattcgagagcagacagaaggggagtacagctctctggaacatgagagtgcaaggggtgtgattgagtgtttgaagattgtcacacgagccaagtctcagcggattgcaaagttcgcctttgactatgccaccaagaaggggcggggcaaggtcactgctgtccacaaggccaacatcatgaaacttggggatgggttgttcctgcagtgctgtgaggaagttgctgaactgtaccccaaaatcaaatttgagacaatgatcatagacaactgctgcatgcagctggtgcagaatccttaccagtttgatgtgcttgtgatgcccaatctctatgggaacattattgacaatctggctgctggcctggttgggggagctggtgtggtccctggtgagagctatagtgcagaatacgcagtctttgagacgggtgcccggcacccatttgcccaggcagtgggcaggaatatagccaatcccacggccatgctgctgtcggcttccaacatgctgcggcatcttaatcttgagtatcactccagcatgatcgcagatgcggtgaagaaggtgatcaaagttggcaaggtgcggactcgagacatgggcggctacagcaccacaaccgacttcatcaagtctgtcatcggtcacctgcagactaaaggttcgaacctctgacatgggtggctatgctacttgccatgacttcactgaggctgtcattgctgccttgccccacccataggccctgtccatacccatgtaaggtgttcaataaagaacatgaaccaa

SEQ ID NO: 144615 - DNA, 1400 bp, Homo sapiens
  Payload ID: 8569
  Gene Symbol: IDH3B
  Gene Name: isocitrate dehydrogenase 3 (NAD+) beta
  ENST ID: ENST00000613370
  CDS Start-End: 32-1162
gtcacttcccacgcgacttcctgcgggaaacatggcggcattgagcggagtccgctggctgacccgagcgctggtctccgccgggaaccctggggcatggagaggtctgagtacctcggccgcggcgcacgctgcatcgcggagccaggccgaggacgtgagggtggagggctcctttcccgtgaccatgcttccgggagacggtgtggggcctgagctgatgcacgccgtcaaggaggtgttcaaggctgccgctgtcccagtggagttccaggagcaccacctgagtgaggtgcagaatatggcatctgaggagaagctggagcaggtgctgagttccatgaaggagaacaaagtggccatcattggaaagattcataccccgatggagtataagggggagctagcctcctatgatatgcggctgaggcgtaagttggacttatttgccaacgtagtccatgtgaagtcacttcctgggtatatgactcggcacaacaatctagacctggtgatcattcgagagcagacagaaggggagtacagctctctggaacatgagagtgcaaggggtgtgattgagtgtttgaagattgtcacacgagccaagtctcagcggattgcaaagttcgcctttgactatgccaccaagaaggggcggggcaaggtcactgctgtccacaaggccaacatcatgaaacttggggatgggttgttcctgcagtgctgtgaggaagttgctgaactgtaccccaaaatcaaatttgagacaatgatcatagacaactgctgcatgcagctggtgcagaatccttaccagtttgatgtgcttgtgatgcccaatctctatgggaacattattgacaatctggctgctggcctggttgggggagctggtgtggtccctggtgagagctatagtgcagaatacgcagtctttgagacgggtgcccggcacccatttgcccaggcagtgggcaggaatatagccaatcccacggccatgctgctgtcggcttccaacatgctgcggcatcttaatcttgagtatcactccagcatgatcgcagatgcggtgaagaaggtgatcaaagttggcaagatcccatctgctgttccctctttcctgctccatccactgcccttttcatgggccatctgaatgcagaacttgcagctctccttgggggtggaacagcaagggatacaggcaggctgaagcatcagcttcaccttcacgccccatctccttttcgctgtgattctttccttccacctggtcttgtctctatttcttccaaggaaggtagccacatcctgcctctgatctgcgtttcccatcatctttgcctgctcagcctcctgtcctgccctggctgcagcacagctaatagtggctt

SEQ ID NO: 144616 - DNA, 608 bp, Homo sapiens
  Payload ID: 8569
  Gene Symbol: IDH3B
  Gene Name: isocitrate dehydrogenase 3 (NAD+) beta
  ENST ID: ENST00000477689
  CDS Start-End: 1-251
ccaaaatcaaatttgagacaatgatcatagacaactgctgcatgcagctggtgcagaatccttaccagtttgatgtgcttgtgatgcccaatctctatgggaacattattgacaatctggctgctggcctggttgggggagctggtgtggtccctgggtgcccggcacccatttgcccaggcagtgggcaggaatatagccaatcccacggccatgctgctgtcggcttccaacatgctgcggcatcttaatcttgagtatcactccagcatgatcgcagatgcggtgaagaaggtgatcaaagttggcaaggtgcggactcgagacatgggcggctacagcaccacaaccgacttcatcaagtctgtcatcggtcacctgcagactaaagggagctagagccctttatttcttccaaccttgcaaggaccacactccccatacccttcagtgcagtgtaccagggaagagaccttgtgcctctaagcagtggaccatggtcaccttgctgggtagagcctaggttgtccttgggccggcttccttaggggacagactgttgggtggtgatggggattgttaggatggagcccaggccacatggatga

SEQ ID NO: 144617 - DNA, 677 bp, Homo sapiens
  Payload ID: 8569
  Gene Symbol: IDH3B
  Gene Name: isocitrate dehydrogenase 3 (NAD+) beta
  ENST ID: ENST00000466494
  CDS Start-End: 1-436
caaaatcaaatttgagacaatgatcatagacaactgctgcatgcagctggtgcagaatccttaccagtttgatgtgcttgtgatgcccaatctctatgggaacattattgacaatctggctgctggcctggttgggggagctggtgtggtccctggtgagagctatagtgcagaatacgcagtctttgagacgggtgcccggcacccatttgcccaggcagtgggcaggaatatagccaatcccacggccatgctgctgtcggcttccaacatgctgcggcatcttaatcttgagtatcactccagcatgatcgcagatgcggtgaagaaggtgatcaaagttggcaaggtgcggactcgagacatgggcggctacagcaccacaaccgacttcatcaagtctgtcatcggtcacctgcagactaaagggagctagagccctttatttcttccaaccttgcaaggaccacactccccatacccttcagtgcagtgtaccagggaagagaccttgtgcctctaagcagtggaccatggtcaccttgctgggttcgaacctctgacatgggtggctatgctacttgccatgacttcactgaggctgtcattgctgccttgccccacccataggccctgtccatacccatgtaaggtgttcaataaagaacatgaaccaa

SEQ ID NO: 144618 - DNA, 1485 bp, Homo sapiens
  Payload ID: 8570
  Gene Symbol: IDH3G
  Gene Name: isocitrate dehydrogenase 3 (NAD+) gamma
  Uniprot ID: P51553
  ENST ID: ENST00000217901
  CDS Start-End: 198-1379
ggggcccagctggtcgcggtccccccctcaacatggcggcagcggtgctctaggcgccggaagggggcgtgaatcggtgcgaccgcgcgcgtgcgcagtaccgggtccgcgcctgtccccgaaacttcgcaccccgtcgaactctcgcgagagcggtatctgcgtgtcgggacgtgcggaggctctcactttccgtcatggcgctgaaggtagcgaccgtcgccggcagcgccgcgaaggcggtgctcgggccagcccttctctgccgtccctgggaggttctaggcgcccacgaggtcccctcgaggaacatcttttcagaacaaacaattcctccgtccgctaagtatggcgggcggcacacggtgaccatgatcccaggggatggcatcgggccagagctcatgctgcatgtcaagtccgtcttcaggcacgcatgtgtaccagtggactttgaagaggtgcacgtgagttccaatgctgatgaagaggacattcgcaatgccatcatggccatccgccggaaccgcgtggccctgaagggcaacatcgaaaccaaccataacctgccaccgtcgcacaaatctcgaaacaacatccttcgcaccagcctggacctctatgccaacgtcatccactgtaagagccttccaggcgtggtgacccggcacaaggacatagacatcctcattgtccgggagaacacagagggcgagtacagcagcctggagcatgagagtgtggcgggagtggtggagagcctgaagatcatcaccaaggccaagtccctgcgcattgccgagtatgccttcaagctggcgcaggagagcgggcgcaagaaagtgacggccgtgcacaaggccaacatcatgaaactgggcgatgggcttttcctccagtgctgcagggaggtggcagcccgctaccctcagatcaccttcgagaacatgattgtggataacaccaccatgcagctggtgtcccggccccagcagtttgatgtcatggtgatgcccaatctctatggcaacatcgtcaacaatgtctgcgcgggactggtcgggggcccaggccttgtggctggggccaactatggccatgtgtacgcggtgtttgaaacagctacgaggaacaccggcaagagtatcgccaataagaacatcgccaaccccacggccaccctgctggccagctgcatgatgctggaccacctcaagctgcactcctatgccacctccatccgtaaggctgtcctggcatccatggacaatgagaatatgcacactccggacatcgggggccagggcacaacatctgaagccatccaggacgtcatccgccacatccgcgtcatcaacggccgggccgtggaggcctaggctggccctaggaccttcttggtttgctccttggattccccttcccactccagcaccccagccagcctggtacgcagatcccagaataaagcaccttctccctaga

SEQ ID NO: 144619 - DNA, 1712 bp, Homo sapiens
  Payload ID: 8570
  Gene Symbol: IDH3G
  Gene Name: isocitrate dehydrogenase 3 (NAD+) gamma
  Uniprot ID: P51553
  ENST ID: ENST00000370092
  CDS Start-End: 187-1329
ggtcgcggtccccccctcaacatggcggcagcggtgctctaggcgccggaagggggcgtgaatcggtgcgaccgcgcgcgtgcgcagtaccgggtccgcgcctgtccccgaaacttcgcaccccgtcgaactctcgcgagagcggtatctgcgtgtcgggacgtgcggaggctctcactttccgtcatggcgctgaaggtagcgaccgtcgccggcagcgccgcgaaggcggtgctcgggccagcccttctctgccgtccctgggaggttctaggcgcccacgaggtcccctcgaggaacatcttttcagaacaaacaattcctccgtccgctaagtatggcgggcggcacacggtgaccatgatcccaggggatggcatcgggccagagctcatgctgcatgtcaagtccgtcttcaggcacgcatgtgtaccagtggactttgaagaggtgcacgtgagttccaatgctgatgaagaggacattcgcaatgccatcatggccatccgccggaaccgcgtggccctgaagggcaacatcgaaaccaaccataacctgccaccgtcgcacaaatctcgaaacaacatccttcgcaccagcctggacctctatgccaacgtcatccactgtaagagccttccaggcgtggtgacccggcacaaggacatagacatcctcattgtccgggagaacacagagggcgagtacagcagcctggagcatgagagtgtggcgggagtggtggagagcctgaagatcatcaccaaggccaagtccctgcgcattgccgagtatgccttcaagctggcgcaggagagcgggcgcaagaaagtgacggccgtgcacaaggccaacatcatgaaactgggcgatgggcttttcctccagtgctgcagggaggtggcagcccgctaccctcagatcaccttcgagaacatgattgtggataacaccaccatgcagctggtgtcccggccccagcagtttgatgtcatggtgatgcccaatctctatggcaacatcgtcaacaatgtctgcgcgggactggtcgggggcccaggccttgtggctggggccaactatggccatgtgtacgcggtgtttgaaacagctacgaggaacaccggcaagagtatcgccaataagaacatcgccaaccccacggccaccctgctggccagctgcatgatgctggaccacctcaagctgcactcctatgccacctccatccgtaaggctgtcctggcatccatggacaatgagaatgtgaggttcccctcgcaccctaccctgctgccccgcccagtctccccctgcagcctcctgtagcccgcctcatgcactgaccacagcccccaggggaggatggtactggatctggccccatcttctggcccttagctggtgccacttccctcctgtggcaatcccagtcctgcacgtcacaggagacagcggggggtggcagggcctggtgtgtgccgagcctgcctgtgtcctacagatgcacactccggacatcgggggccagggcacaacatctgaagccatccaggacgtcatccgccacatccgcgtcatcaacggccgggccgtggaggcctaggctggccctaggaccttcttggtttgctccttggattccccttcccactccagcaccccagccagcctggtacgcagatcccagaataaagcaccttctccctaga

SEQ ID NO: 144620 - DNA, 1662 bp, Homo sapiens
  Payload ID: 8570
  Gene Symbol: IDH3G
  Gene Name: isocitrate dehydrogenase 3 (NAD+) gamma
  ENST ID: ENST00000370093
  CDS Start-End: 56-1078
tctcgcgagagcggtatctgcgtgtcgggacgtgcggaggctctcactttccgtcatggcgctgaaggtagcgaccgtcgccggcagcgccgcgaaggcggtgctcgggccagcccttctctgccgtccctgggaggttctaggcgcccacgaggtcccctcgaggaacatcttttcagaacaaacaattcctccgtccgctaagtatggcgggcggcacacggtgaccatgatcccaggggatggcatcgggccagagctcatgctgcatgtcaagtccgtcttcaggcacgcatgtgtaccagtggactttgaagaggtgcacgtgagttccaatgctgatgaagaggacattcgcaatgccatcatggccatccgccggaaccgcgtggccctgaagggcaacatcgaaaccaaccataacctgccaccgtcgcacaaatctcgaaacaacatccttcgcaccagcctggacctctatgccaacgtcatccactgtaagagccttccaggcgtggtgacccggcacaaggacatagacatcctcattgtccgggagaacacagagggcgagtacagcagcctggagcatgagagtgtggcgggagtggtggagagcctgaagatcatcaccaaggccaagtccctgcgcattgccgagtatgccttcaagctggcgcaggagagcgggcgcaagaaagtgacggccgtgcacaaggccaacatcatgaaactgggcgatgggcttttcctccagtgctgcagggaggtggcagcccgctaccctcagatcaccttcgagaacatgattgtggataacaccaccatgcagctggtgtcccggccccagcagtttgatgtcatggtgatgcccaatctctatggcaacatcgtcaacaatgtctgcgcgggactggtcgggggcccaggccttgtggctggggccaactatggccatgtgtacgcggtgtttgaaacagctacgaggaacaccggcaagagtatcgccaataagaacatcgccaaccccacggccaccctgctggccagctgcatgatgctggaccacctcaagtgagtggctcccagtgccccgcaagcccctggccagccctccgggccccagggactgaaggctggctgtcccatcctctaggctgcactcctatgccacctccatccgtaaggctgtcctggcatccatggacaatgagaatgtgaggttcccctcgcaccctaccctgctgccccgcccagtctccccctgcagcctcctgtagcccgcctcatgcactgaccacagcccccaggggaggatggtactggatctggccccatcttctggcccttagctggtgccacttccctcctgtggcaatcccagtcctgcacgtcacaggagacagcggggggtggcagggcctggtgtgtgccgagcctgcctgtgtcctacagatgcacactccggacatcgggggccagggcacaacatctgaagccatccaggacgtcatccgccacatccgcgtcatcaacggccgggccgtggaggcctaggctggccctaggaccttcttggtttgctccttggattccccttcccactccagcaccccagccagcctggtacgcagatcccagaataaagcaccttctccctag

SEQ ID NO: 144621 - DNA, 739 bp, Homo sapiens
  Payload ID: 8570
  Gene Symbol: IDH3G
  Gene Name: isocitrate dehydrogenase 3 (NAD+) gamma
  ENST ID: ENST00000454076
  CDS Start-End: 1-634
caagtccctgcgcattgccgagtatgccttcaagctggcgcaggagagcgggcgcaagaaagtgacggccgtgcacaaggccaacatcatgaaactgggcgatgggcttttcctccagtgctgcagggaggtggcagcccgctaccctcagatcaccttcgagaacatgattgtggataacaccaccatgcagctggtgtcccggccccagcagtttgatgtcatggtgatgcccaatctctatggcaacatcgtcaacaatgtctgcgcgggactggtcgggggcccaggccttgtggctggggccaactatggccatgtgtacgcggtgtttgaaacagctacgaggaacaccggcaagagtatcgccaataagaacatcgccaaccccacggccaccctgctggccagctgcatgatgctggaccacctcaagctgcactcctatgccacctccatccgtaaggctgtcctggcatccatggacaatgagaatggcctggtgtgtgccgagcctgcctgtgtcctacagatgcacactccggacatcgggggccagggcacaacatctgaagccatccaggacgtcatccgccacatccgcgtcatcaacggccgggccgtggaggcctaggctggccctaggaccttcttggtttgctccttggattccccttcccactccagcaccccagccagcctggtacgcagatcccagaataaagcaccttctccctag

SEQ ID NO: 144622 - DNA, 888 bp, Homo sapiens
  Payload ID: 8570
  Gene Symbol: IDH3G
  Gene Name: isocitrate dehydrogenase 3 (NAD+) gamma
  ENST ID: ENST00000444450
  CDS Start-End: 34-888
tgtcgggacgtgcggaggctctcactttccgtcatggcgctgaaggttctaggcgcccacgaggtcccctcgaggaacatcttttcagaacaaacaattcctccgtccgctaagtatggcgggcggcacacggtgaccatgatcccaggggatggcatcgggccagagctcatgctgcatgtcaagtccgtcttcaggcacgcatgtgtaccagtggactttgaagaggtgcacgtgagttccaatgctgatgaagaggacattcgcaatgccatcatggccatccgccggaaccgcgtggccctgaagggcaacatcgaaaccaaccataacctgccaccgtcgcacaaatctcgaaacaacatccttcgcaccagcctggacctctatgccaacgtcatccactgtaagagccttccaggcgtggtgacccggcacaaggacatagacatcctcattgtccgggagaacacagagggcgagtacagcagcctggagcatgagagtgtggcgggagtggtggagagcctgaagatcatcaccaaggccaagtccctgcgcattgccgagtatgccttcaagctggcgcaggagagcgggcgcaagaaagtgacggccgtgcacaaggccaacatcatgaaactgggcgatgggcttttcctccagtgctgcagggaggtggcagcccgctaccctcagatcaccttcgagaacatgattgtggataacaccaccatgcagctggtgtcccggccccagcagtttgatgtcatggtgatgcccaatctctatggcaacatcgtcaacaatgtctgcgcgggactggtcgggggcccaggccttgtggctggggccaactatggccatgtgtacgcggtgtttgaaaca

SEQ ID NO: 144623 - DNA, 597 bp, Homo sapiens
  Payload ID: 8570
  Gene Symbol: IDH3G
  Gene Name: isocitrate dehydrogenase 3 (NAD+) gamma
  ENST ID: ENST00000444338
  CDS Start-End: 1-597
cacgtgagttccaatgctgatgaagaggacattcgcaatgccatcatggccatccgccggaaccgcgtggccctgaaggggcttgtctggctagagaggaccctcgtgcttggagactgggtggacgcctcctcgggcctgtttgcgctgcgatgctgggattcgagcaacatcgaaaccaaccataacctgccaccgtcgcacaaatctcgaaacaacatccttcgcaccagcctggacctctatgccaacgtcatccactgtaagagccttccaggcgtggtgacccggcacaaggacatagacatcctcattgtccgggagaacacagagggcgagtacagcagcctggagcatgagagtgtggcgggagtggtggagagcctgaagatcatcaccaaggccaagtccctgcgcattgccgagtatgccttcaagctggcgcaggagagcgggcgcaagaaagtgacggccgtgcacaaggccaacatcatgaaactgggcgatgggcttttcctccagtgctgcagggaggtggcagcccgctaccctcagatcaccttcgagaacatgattgtggataacaccaccatgcag

SEQ ID NO: 144624 - DNA, 1526 bp, Homo sapiens
  Payload ID: 8570
  Gene Symbol: IDH3G
  Gene Name: isocitrate dehydrogenase 3 (NAD+) gamma
  ENST ID: ENST00000427365
  CDS Start-End: 207-1175
cgggacgtgcggaggctctcactttccgtcatggcgctgaaggtagcgaccgtcgccggcagcgccgcgaaggcggtgctcgggccagcccttctctgccgtccctgggaggttctaggcgcccacgaggtcccctcgaggaacatcttttcagtaagtacctgccccctccgtccgctaagtatggcgggcggcacacggtgaccatgatcccaggggatggcatcgggccagagctcatgctgcatgtcaagtccgtcttcaggcacgcatgtgtaccagtggactttgaagaggtgcacgtgagttccaatgctgatgaagaggacattcgcaatgccatcatggccatccgccggaaccgcgtggccctgaagggcaacatcgaaaccaaccataacctgccaccgtcgcacaaatctcgaaacaacatccttcgcaccagcctggacctctatgccaacgtcatccactgtaagagccttccaggcgtggtgacccggcacaaggacatagacatcctcattgtccgggagaacacagagggcgagtacagcagcctggagcatgagagtgtggcgggagtggtggagagcctgaagatcatcaccaaggccaagtccctgcgcattgccgagtatgccttcaagctggcgcaggagagcgggcgcaagaaagtgacggccgtgcacaaggccaacatcatgaaactgggcgatgggcttttcctccagtgctgcagggaggtggcagcccgctaccctcagatcaccttcgagaacatgattgtggataacaccaccatgcagctggtgtcccggccccagcagtttgatgtcatggtgatgcccaatctctatggcaacatcgtcaacaatgtctgcgcgggactggtcgggggcccaggccttgtggctggggccaactatggccatgtgtacgcggtgtttgaaacagctacgaggaacaccggcaagagtatcgccaataagaacatcgccaaccccacggccaccctgctggccagctgcatgatgctggaccacctcaagctgcactcctatgccacctccatccgtaaggctgtcctggcatccatggacaatgagaatgtgaggttcccctcgcaccctaccctgctgccccgcccagtctccccctgcagcctcctgtagcccgcctcatgcactgaccacagcccccaggggaggatggtactggatctggccccatcttctggcccttagctggtgccacttccctcctgtggcaatcccagtcctgcacgtcacaggagacagcggggggtggcagggcctggtgtgtgccgagcctgcctgtgtcctacagatgcacactccggacatcgggggccagggcacaacatctgaagccatccaggacgtcatccgccacatccgcgtcatcaacggccgggccgtggaggcctaggctggccctaggaccttcttggtttgctccttggattccccttcccactccagcaccccagccagcctggtacg

SEQ ID NO: 144625 - DNA, 1339 bp, Homo sapiens
  Payload ID: 8570
  Gene Symbol: IDH3G
  Gene Name: isocitrate dehydrogenase 3 (NAD+) gamma
  ENST ID: ENST00000619865
  CDS Start-End: 371-1339
ggggcccagctggtcgcggtccccccctcaacatggcggcagcggtgctctaggcgccggaagggggcgtgaatcggtgcgaccgcgcgcgtgcgcagtaccgggtccgcgcctgtccccgaaacttcgcaccccgtcgaactctcgcgagagcggtatctgcgtgtcgggacgtgcggaggctctcactttccgtcatggcgctgaaggtagcgaccgtcgccggcagcgccgcgaaggcggtgctcgggccagcccttctctgccgtccctgggaggttctaggcgcccacgaggtcccctcgaggaacatcttttcagtaacccacagcctccgtccgctaagtatggcgggcggcacacggtgaccatgatcccaggggatggcatcgggccagagctcatgctgcatgtcaagtccgtcttcaggcacgcatgtgtaccagtggactttgaagaggtgcacgtgagttccaatgctgatgaagaggacattcgcaatgccatcatggccatccgccggaaccgcgtggccctgaagggcaacatcgaaaccaaccataacctgccaccgtcgcacaaatctcgaaacaacatccttcgcaccagcctggacctctatgccaacgtcatccactgtaagagccttccaggcgtggtgacccggcacaaggacatagacatcctcattgtccgggagaacacagagggcgagtacagcagcctggagcatgagagtgtggcgggagtggtggagagcctgaagatcatcaccaaggccaagtccctgcgcattgccgagtatgccttcaagctggcgcaggagagcgggcgcaagaaagtgacggccgtgcacaaggccaacatcatgaaactgggcgatgggcttttcctccagtgctgcagggaggtggcagcccgctaccctcagatcaccttcgagaacatgattgtggataacaccaccatgcagctggtgtcccggccccagcagtttgatgtcatggtgatgcccaatctctatggcaacatcgtcaacaatgtctgcgcgggactggtcgggggcccaggccttgtggctggggccaactatggccatgtgtacgcggtgtttgaaacagctacgaggaacaccggcaagagtatcgccaataagaacatcgccaaccccacggccaccctgctggccagctgcatgatgctggaccacctcaagctgcactcctatgccacctccatccgtaaggctgtcctggcatccatggacaatgagaatgtgaggttcccctcgcaccctaccctgctgccccgcccagtctccccctgcagcctcctgtag

SEQ ID NO: 144626 - DNA, 697 bp, Homo sapiens
  Payload ID: 8571
  Gene Symbol: IARS
  Gene Name: isoleucyl-tRNA synthetase
  ENST ID: ENST00000375627
  CDS Start-End: 81-605
ctgattaacagtgtagctgcttctccatagggaccattgttgtggaaggccatgaattgcacgatgaagacatccgcctcatgtacacctttgatcaggccacaggtgggactgcgcaatttgaagcacactcagatgctcaggctttggtcctcttagatgtcactcctgaccagtcaatggtagatgaaggaatggctcgggaagtcatcaatcgcatacagaaacttcgcaaaaagtgcaatctggttccaactgatgaaatcacagtgtactataaagcaaagtctgaaggaacatatctgaatagtgttattgaaagccacacagagttcatatttaccaccataaaggctcccttgaaaccatatccagtttctccatcggataaagtccttattcaagaaaaaacacagttgaagggatctgaactggaaattacactcaccagaggatcttcccttcctggtcctgcttgtgcatatgtcaatcttaacatttgtgcaaatggcagtgaacaaggcgagatgcagtggatcattcctgaaatctaccacttttggaagccaaggtggagtattgctcctggaaaatccaaaaggtgacaataggttggaccttttaaagctgaagagtgttgtcactagcatttttggtgtgaaaaatacagagctggctgtcttccatgatgaaacag

SEQ ID NO: 144627 - DNA, 4656 bp, Homo sapiens
  Payload ID: 8571
  Gene Symbol: IARS
  Gene Name: isoleucyl-tRNA synthetase
  Uniprot ID: P41252
  ENST ID: ENST00000375643
  CDS Start-End: 268-4056
tccgtgcgcccggttgcagcgtggacgccggatgagttgcttttaggcttgctggcccgcggggctgtccaggcacgcgaggcccctcaggtacgccctctcttccctgcaggatccggccctcaaagacgagggtcacgcacgcgttacaaccccgaaacagtagcacaagatttaatttttaaaagagcgtgtttcttcggggcttgccgttcgttcgtttccagcctcaggaatttatggtcgcctttttgaatgagcaacaaaatgcttcaacaagttccagaaaacataaattttcctgctgaagaagagaaaatcttggagttttggactgaatttaattgttttcaggaatgcttaaagcaatcaaaacataaaccaaaatttaccttctatgatggtcctccttttgcaactggactgcctcactatggacatatacttgcgggtacaattaaagatatagttacaagatatgctcaccagagtgggtttcatgttgacagaagatttggatgggattgccatggcttacctgtggaatatgaaattgataagacactgggaatcagaggaccagaggatgtggccaaaatggggattacagagtataacaatcagtgccgagcaattgtgatgagatattctgctgagtggaagtctactgttagcagacttggccgatggattgactttgacaatgactataaaactctgtatccacaattcatggaatcagtctggtgggtcttcaaacaactctatgataaaggccttgtttatagaggtgtgaaagtcatgcccttctctacggcatgtaacactccactttccaacttcgagtcacaccagaattataaggatgttcaagatccttcagtatttgtaactttccctttggaagaagatgaaactgtatctttagttgcttggacaaccactccctggactctacctagtaaccttgctgtgtgtgttaatccagaaatgcaatatgtgaaaattaaagatgttgccagaggacgattactcattttaatggaagccagattgtcagccctctataaattggagagtgactatgagatccttgaaagatttcctggtgcctatcttaaaggcaagaagtacaggcccctgtttgactatttcctgaagtgtaaagagaatggcgctttcactgtgcttgttgacaactatgtgaaggaagaagaaggcacaggggttgtccaccaagctccttacttcggtgctgaggactatcgggtctgtatggactttaacattattcggaaagactcactccctgtttgccctgtggatgcttcaggctgcttcacaacggaggtgacagatttcgcaggacagtatgtgaaggatgctgacaaaagtatcatcaggactttgaaggaacaaggccgacttctggttgccaccaccttcactcacagctaccctttttgctggagatcagacactcctctaatttacaaagcagtgcccagctggtttgtgcgagtggagaacatggtggaccagctcctaaggaacaatgacctgtgctactgggtcccagagttggtacgagaaaaacgatttggaaattggctgaaagatgcacgtgactggacaatttccagaaacagatactggggcacccccatcccactgtgggtcagcgatgactttgaggaggtggtatgcattgggtcagtggcggaacttgaagaactgtcaggagcaaagatctcagatctccacagagagagtgttgaccacctgaccattccttcacgctgtgggaagggatccttgcaccgcatctctgaagtgtttgactgttggtttgagagtggcagcatgccctatgctcaggttcattacccgtttgaaaacaagagggagtttgaggatgcttttcctgcagatttcattgccgagggcatcgaccaaaccagaggatggttttataccctgctggtgctggccacggccctctttggacaaccgcctttcaagaacgtaattgtgaatgggcttgtcctggcaagtgatggccaaaaaatgagcaaacggaaaaagaattatccagatccagtttccatcatccagaagtatggtgctgatgccctcagattatatctgattaactcccctgtggtgagagcagaaaacctccgctttaaagaagagggtgtgcgggacgtccttaaggatgtactgctcccatggtacaatgcctatcgcttcttaatccagaacgttctgaggctccagaaggaggaagaaatagaatttctctacaatgagaacacggttagagaaagccccaacattacagaccggtggatcctgtccttcatgcagtctctcattggcttctttgagactgaaatggcagcttataggctttatactgtggtgcctcgcctggtcaagtttgtagatattctgaccaattggtatgttagaatgaaccgcagaagattaaagggtgaaaatgggatggaggattgtgtcatggccctagaaaccttgtttagtgttctgctttctctttgcagacttatggctccctacacaccttttctcactgaattgatgtaccagaatctaaaggtgctgattgaccctgtttctgttcaggacaaggacacactcagcattcactacctcatgctgccccgtgttcgagaagaattgattgacaagaaaacagagagtgcagtatctcagatgcagtctgtgattgaacttggaagagtgatcagagaccgaaaaactattcccataaagtatcctttgaaagaaattgtggttatccatcaagatccagaagctcttaaagatatcaagtctttggagaagtatatcattgaggaactcaatgttcgaaaagttacactgtctacagataaaaacaagtatggcattcggctaagggcagaaccagatcacatggtcctggggaagcgtctgaagggagcctttaaggcagtgatgacgtccatcaagcagttgagcagtgaggagctggagcagttccagaagactgggaccattgttgtggaaggccatgaattgcacgatgaagacatccgcctcatgtacacctttgatcaggccacaggtgggactgcgcaatttgaagcacactcagatgctcaggctttggtcctcttagatgtcactcctgaccagtcaatggtagatgaaggaatggctcgggaagtcatcaatcgcatacagaaacttcgcaaaaagtgcaatctggttccaactgatgaaatcacagtgtactataaagcaaagtctgaaggaacatatctgaatagtgttattgaaagccacacagagttcatatttaccaccataaaggctcccttgaaaccatatccagtttctccatcggataaagtccttattcaagaaaaaacacagttgaagggatctgaactggaaattacactcaccagaggatcttcccttcctggtcctgcttgtgcatatgtcaatcttaacatttgtgcaaatggcagtgaacaaggtggagtattgctcctggaaaatccaaaaggtgacaataggttggaccttttaaagctgaagagtgttgtcactagcatttttggtgtgaaaaatacagagctggctgtcttccatgatgaaacagaaatacaaaaccaaactgacttactgagtcttagtggaaaaacactttgtgtgactgcaggatcggctccctctctgatcaacagttctagtactcttctttgtcagtatatcaacctacagctcctgaatgcaaagccacaagagtgtttaatggggacagtgggcactctcctgcttgaaaacccacttgggcagaatggactcacccaccaaggtcttctgtatgaagcagccaaggtgtttggccttcggagcaggaagctaaagctgtttctgaatgagacccaaacgcaggaaattacagaagacatccccgtgaagactttgaatatgaagactgtgtatgtttctgtgttaccaacaacagcagacttctagcatgtacttatcaatgttgttcggtcagcccttccctaattacacctatcccctacacatacatgcacatagacacacacatgaacacactgaagatatttccttcaggtgtgtgtaaaatatgctgcttggattgaaattcaaatgggattgattagtcaagtaacttgagacctcacagtaatcttcacacttaaccttagacacctatgcagtcatgttgggagcaggttacaatgttacttcagcccacagtttatttctatacttgagttcttaagtacagaagatagaagtgatttaaatggcatagtatatatatcattttctggccttttaaaatttatttgagacctcttgatgaaatggacatattatatatttctgccacctggattttcctggataatttgatggaatattttaagtttcagtaaatcagaacaataaacaaactcagatataaatgtgttgaaagtaattcattctcccatagataaatgaaacttgaaatgtgtaaactttgaagaacataaaaacttcatggtggtttcttattaagacagtggactagacatctaataaaacttctttccaaaa

SEQ ID NO: 144628 - DNA, 1103 bp, Homo sapiens
  Payload ID: 8571
  Gene Symbol: IARS
  Gene Name: isoleucyl-tRNA synthetase
  ENST ID: ENST00000395554
  CDS Start-End: 114-1103
agcgcgttgcatcacctccgtgcgcccggttgcagcgtggacgccggatgagttgcttttaggcttgctggcccgcggggctgtccaggcacgcgaggcccctcagcaacaaaatgcttcaacaagttccagaaaacataaattttcctgctgaagaagagaaaatcttggagttttggactgaatttaattgttttcaggaatgcttaaagcaatcaaaacataaaccaaaatttaccttctatgatggtcctccttttgcaactggactgcctcactatggacatatacttgcgggtacaattaaagatatagttacaagatatgctcaccagagtgggtttcatgttgacagaagatttggatgggattgccatggcttacctgtggaatatgaaattgataagacactgggaatcagaggaccagaggatgtggccaaaatggggattacagagtataacaatcagtgccgagcaattgtgatgagatattctgctgagtggaagtctactgttagcagacttggccgatggattgactttgacaatgactataaaactctgtatccacaattcatggaatcagtctggtgggtcttcaaacaactctatgataaaggccttgtttatagaggtgtgaaagtcatgcccttctctacggcatgtaacactccactttccaacttcgagtcacaccagaattataaggatgttcaagatccttcagtatttgtaactttccctttggaagaagatgaaactgtatctttagttgcttggacaaccactccctggactctacctagtaaccttgctgtgtgtgttaatccagaaatgcaatatgtgaaaattaaagatgttgccagaggacgattactcattttaatggaagccagattgtcagccctctataaattggagagtgactatgagatccttgaaagatttcctggtgcctatcttaaaggcaagaagtacaggcccctgtttgactatttcctgaagtgtaaagagaatggcgctttcactgtgcttgttgacaactatgtgaaggaagaagaaggcacaggggttgtccaccaagctccttacttcggtgct

SEQ ID NO: 144629 - DNA, 414 bp, Homo sapiens
  Payload ID: 8571
  Gene Symbol: IARS
  Gene Name: isoleucyl-tRNA synthetase
  ENST ID: ENST00000430417
  CDS Start-End: 197-414
cggggctgtccaggcacgcgaggcccctcaggtacgccctctcttccctgcaggatccggccctcaaagacgagggtcacgcacgcgttacaaccccgaaacagtagcacaagatttaatttttaaaagagcgtgtttcttcggggcttgccgttcgttcgtttccagcctcaggaatttatggtcgcctttttgaatgagcaacaaaatgcttcaacaagttccagaaaacataaattttcctgctgaagaagagaaaatcttggagttttggactgaatttaattgttttcaggaatgcttaaagcaatcaaaacataaaccaaagaatatgaaattgataagacactgggaatcagaggaccagaggatgtggccaaaatggggattacagagtataacaatcagtgccga

SEQ ID NO: 144630 - DNA, 4341 bp, Homo sapiens
  Payload ID: 8571
  Gene Symbol: IARS
  Gene Name: isoleucyl-tRNA synthetase
  ENST ID: ENST00000443024
  CDS Start-End: 92-3820
cgcccggttgcagcgtggacgccggatgagttgcttttaggcttgctggcccgcggggctgtccaggcacgcgaggcccctcagcaacaaaatgcttcaacaagttccagaaaacataaattttcctgctgaagaagagaaaatcttggagttttggactgaatttaattgttttcaggaatgcttaaagcaatcaaaacataaaccaaaatttaccttctatgatggtcctccttttgcaactggactgcctcactatggacatatacttgcgggtacaattaaagatatagttacaagatatgctcaccagagtgggtttcatgttgacagaagatttggatgggattgccatggcttacctgtggaatatgaaattgataagacactgggaatcagaggaccagaggatgtggccaaaatggggattacagagtataacaatcagtgccgagcaattgtgatgagatattctgctgagtggaagtctactgttagcagacttggccgatggattgactttgacaatgactataaaactctgtatccacaattcatggaatcagtctggtgggtcttcaaacaactctatgataaaggccttgtttatagaggtgtgaaagtcatgcccttctctacggcatgtaacactccactttccaacttcgagtcacaccagaattataaggatgttcaagatccttcagtatttgtaactttccctttggaagaagatgaaactgtatctttagttgcttggacaaccactccctggactctacctagtaaccttgctgtgtgtgttaatccagaaatgcaatatgtgaaaattaaagatgttgccagaggacgattactcattttaatggaagccagattgtcagccctctataaattggagagtgactatgagatccttgaaagatttcctggtgcctatcttaaaggcaagaagtacaggcccctgtttgactatttcctgaagtgtaaagagaatggcgctttcactgtgcttgttgacaactatgtgaaggaagaagaaggcacaggggttgtccaccaagctccttacttcggtgctgaggactatcgggtctgtatggactttaacattattcggaaagactcactccctgtttgccctgtggatgcttcaggctgcttcacaacggaggtgacagatttcgcaggacagtatgtgaaggatgctgacaaaagtatcatcaggactttgaaggaacaaggccgacttctggttgccaccaccttcactcacagctaccctttttgctggagatcagacactcctctaatttacaaagcagtgcccagctggtttgtgcgagtggagaacatggtggaccagctcctaaggaacaatgacctgtgctactgggtcccagagttggtacgagaaaaacgatttggaaattggctgaaagatgcacgtgactggacaatttccagaaacagatactggggcacccccatcccactgtgggtcagcgatgactttgaggaggtggtatgcattgggtcagtggcggaacttgaagaactgtcaggagcaaagatctcagatctccacagagagagtgttgaccacctgaccattccttcacgctgtgggaagggatccttgcaccgcatctctgaagtgtttgactgttggtttgagagtggcagcatgccctatgctcaggttcattacccgtttgaaaacaagagggagtttgaggatgcttttcctgcagatttcattgccgagggcatcgaccaaaccagaggatggttttataccctgctggtgctggccacggccctctttggacaaccgcctttcaagaacgtaattgtgaatgggcttgtcctggcaagtgatggccaaaaaatgagcaaacggaaaaagaattatccagatccagtttccatcatccagaagtatggtgctgatgccctcagattatatctgattaactcccctgtggtgagagcagaaaacctccgctttaaagaagagggtgtgcgggacgtccttaaggatgtactgctcccatggtacaatgcctatcgcttcttaatccagaacgttctgaggctccagaaggaggaagaaatagaatttctctacaatgagaacacggttagagaaagccccaacattacagaccggtggatcctgtccttcatgcagtctctcattggcttctttgagactgaaatggcagcttataggctttatactgtggtgcctcgcctggtcaagtttgtagatattctgaccaattggtatgttagaatgaaccgcagaagattaaagggtgaaaatgggatggaggattgtgtcatggccctagaaaccttgtttagtgttctgctttctctttgcagacttatggctccctacacaccttttctcactgaattgatgtaccagaatctaaaggtgctgattgaccctgtttctgttcaggacaaggacacactcagcattcactacctcatgctgccccgtgttcgagaagaattgattgacaagaaaacagagagtgcagtatctcagatgcagtctgtgattgaacttggaagagtgatcagagaccgaaaaactattcccataaagtatcctttgaaagaaattgtggttatccatcaagatccagaagctcttaaagatatcaagtctttggagaagtatatcattgaggaactcaatgttcgaaaagttacactgtctacagataaaaacaagtatggcattcggctaagggcagaaccagatcacatggtcctggggaagcgtctgaagggagcctttaaggcagtgatgacgtccatcaagcagttgagcagtgaggagctggagcagttccagaagactgggaccattgttgtggaaggccatgaattgcacgatgaagacatccgcctcatgtacacctttgatcaggccacaggtgggactgcgcaatttgaagcacactcagatgctcaggctttggtcctcttagatgtcactcctgaccagtcaatggtagatgaaggaatggctcgggaagtcatcaatcgcatacagaaacttcgcaaaaagtgcaatctggttccaactgatgaaatcacagtgtactataaagcaaagtctgaaggaacatatctgaatagtgttattgaaagccacacagagttcatatttaccaccataaaggctcccttgaaaccatatccagtttctccatcggataaagtccttattcaagaaaaaacacagttgaagggatctgaactggaaattacactcaccagaggatcttcccttcctggtcctgcttgtgcatatgtcaatcttaacatttgtgcaaatggcagtgaacaaggtggagtattgctcctggaaaatccaaaaggtgacaataggttggaccttttaaagctgaagagtgttgtcactagcatttttggtgtgaaaaatacagagctggctgtcttccatgatgaaacagaaatacaaaaccaaactgacttactgagtcttagtggaaaaacactttgtgtgactgcaggatcggctccctctctgatcaacagttctagtactcttctttgtcagtatatcaacctacagctcctgaatgcaaagccacaagagtgtttaatggggacagtgggcactctcctgcttgaaaacccacttgggcagaatggactcacccaccaaggtcttctgtatgaagcagccaaggtgtttggccttcggagcaggaagctaaagctgtttctgaatgagacccaaacgcaggaaattacagaagacatcccgtgaagactttgaatatgaagactgtgtatgtttctgtgttaccaacaacagcagacttctagcatgtacttatcaatgttgttcggtcagcccttccctaattacacctatcccctacacatacatgcacatagacacacacatgaacacactgaagatatttccttcaggtgtgtgtaaaatatgctgcttggattgaaattcaaatgggattgattagtcaagtaacttgagacctcacagtaatcttcacacttaaccttagacacctatgcagtcatgttgggagcaggttacaatgttacttcagcccacagtttatttctatacttgagttcttaagtacagaagatagaagtgatttaaatggcatagtatatatatcattttctggccttttaaaatttatttgagacctcttgatgaaatggacatattatatatttctgccacctggattttcctggataatttgatggaatattttaagtttcagtaaatcagaacaataaacaaactcagat

SEQ ID NO: 144631 - DNA, 4186 bp, Homo sapiens
  Payload ID: 8571
  Gene Symbol: IARS
  Gene Name: isoleucyl-tRNA synthetase
  ENST ID: ENST00000447699
  CDS Start-End: 266-3724
gcgcccggttgcagcgtggacgccggatgagttgcttttaggcttgctggcccgcggggctgtccaggcacgcgaggcccctcagcaacaaaatgcttcaacaagttccagaaaacataaattttcctgctgaagaagagaaaatcttggagttttggactgaatttaattgttttcaggaatgcttaaagcaatcaaaacataaaccaaagaatatgaaattgataagacactgggaatcagaggaccagaggatgtggccaaaatggggattacagagtataacaatcagtgccgagcaattgtgatgagatattctgctgagtggaagtctactgttagcagacttggccgatggattgactttgacaatgactataaaactctgtatccacaattcatggaatcagtctggtgggtcttcaaacaactctatgataaaggccttgtttatagaggtgtgaaagtcatgcccttctctacggcatgtaacactccactttccaacttcgagtcacaccagaattataaggatgttcaagatccttcagtatttgtaactttccctttggaagaagatgaaactgtatctttagttgcttggacaaccactccctggactctacctagtaaccttgctgtgtgtgttaatccagaaatgcaatatgtgaaaattaaagatgttgccagaggacgattactcattttaatggaagccagattgtcagccctctataaattggagagtgactatgagatccttgaaagatttcctggtgcctatcttaaaggcaagaagtacaggcccctgtttgactatttcctgaagtgtaaagagaatggcgctttcactgtgcttgttgacaactatgtgaaggaagaagaaggcacaggggttgtccaccaagctccttacttcggtgctgaggactatcgggtctgtatggactttaacattattcggaaagactcactccctgtttgccctgtggatgcttcaggctgcttcacaacggaggtgacagatttcgcaggacagtatgtgaaggatgctgacaaaagtatcatcaggactttgaaggaacaaggccgacttctggttgccaccaccttcactcacagctaccctttttgctggagatcagacactcctctaatttacaaagcagtgcccagctggtttgtgcgagtggagaacatggtggaccagctcctaaggaacaatgacctgtgctactgggtcccagagttggtacgagaaaaacgatttggaaattggctgaaagatgcacgtgactggacaatttccagaaacagatactggggcacccccatcccactgtgggtcagcgatgactttgaggaggtggtatgcattgggtcagtggcggaacttgaagaactgtcaggagcaaagatctcagatctccacagagagagtgttgaccacctgaccattccttcacgctgtgggaagggatccttgcaccgcatctctgaagtgtttgactgttggtttgagagtggcagcatgccctatgctcaggttcattacccgtttgaaaacaagagggagtttgaggatgcttttcctgcagatttcattgccgagggcatcgaccaaaccagaggatggttttataccctgctggtgctggccacggccctctttggacaaccgcctttcaagaacgtaattgtgaatgggcttgtcctggcaagtgatggccaaaaaatgagcaaacggaaaaagaattatccagatccagtttccatcatccagaagtatggtgctgatgccctcagattatatctgattaactcccctgtggtgagagcagaaaacctccgctttaaagaagagggtgtgcgggacgtccttaaggatgtactgctcccatggtacaatgcctatcgcttcttaatccagaacgttctgaggctccagaaggaggaagaaatagaatttctctacaatgagaacacggttagagaaagccccaacattacagaccggtggatcctgtccttcatgcagtctctcattggcttctttgagactgaaatggcagcttataggctttatactgtggtgcctcgcctggtcaagtttgtagatattctgaccaattggtatgttagaatgaaccgcagaagattaaagggtgaaaatgggatggaggattgtgtcatggccctagaaaccttgtttagtgttctgctttctctttgcagacttatggctccctacacaccttttctcactgaattgatgtaccagaatctaaaggtgctgattgaccctgtttctgttcaggacaaggacacactcagcattcactacctcatgctgccccgtgttcgagaagaattgattgacaagaaaacagagagtgcagtatctcagatgcagtctgtgattgaacttggaagagtgatcagagaccgaaaaactattcccataaagtatcctttgaaagaaattgtggttatccatcaagatccagaagctcttaaagatatcaagtctttggagaagtatatcattgaggaactcaatgttcgaaaagttacactgtctacagataaaaacaagtatggcattcggctaagggcagaaccagatcacatggtcctggggaagcgtctgaagggagcctttaaggcagtgatgacgtccatcaagcagttgagcagtgaggagctggagcagttccagaagactgggaccattgttgtggaaggccatgaattgcacgatgaagacatccgcctcatgtacacctttgatcaggccacaggtgggactgcgcaatttgaagcacactcagatgctcaggctttggtcctcttagatgtcactcctgaccagtcaatggtagatgaaggaatggctcgggaagtcatcaatcgcatacagaaacttcgcaaaaagtgcaatctggttccaactgatgaaatcacagtgtactataaagcaaagtctgaaggaacatatctgaatagtgttattgaaagccacacagagttcatatttaccaccataaaggctcccttgaaaccatatccagtttctccatcggataaagtccttattcaagaaaaaacacagttgaagggatctgaactggaaattacactcaccagaggatcttcccttcctggtcctgcttgtgcatatgtcaatcttaacatttgtgcaaatggcagtgaacaaggtggagtattgctcctggaaaatccaaaaggtgacaataggttggaccttttaaagctgaagagtgttgtcactagcatttttggtgtgaaaaatacagagctggctgtcttccatgatgaaacagaaatacaaaaccaaactgacttactgagtcttagtggaaaaacactttgtgtgactgcaggatcggctccctctctgatcaacagttctagtactcttctttgtcagtatatcaacctacagctcctgaatgcaaagccacaagagtgtttaatggggacagtgggcactctcctgcttgaaaacccacttgggcagaatggactcacccaccaaggtcttctgtatgaagcagccaaggtgtttggccttcggagcaggaagctaaagctgtttctgaatgagacccaaacgcaggaaattacagaagacatccccgtgaagactttgaatatgaagactgtgtatgtttctgtgttaccaacaacagcagacttctagcatgtacttatcaatgttgttcggtcagcccttccctaattacacctatcccctacacatacatgcacatagacacacacatgaacacactgaagatatttccttcaggtgtgtgtaaaatatgctgcttggattgaaattcaaatgggattgattagtcaagtaacttgagacctcacagtaatcttcacacttaaccttagacacctatgcagtcatgttgggagcaggttacaatgttacttcagcccacagtttatttctatacttgagttcttaagtacagaagatagaagtgatttaaatggcatagtatatatatcattttctggccttttaaaatttatttgagacctcttgatgaaatggacatattatatatttctgccacctggattttcctggataatttgatggaatattttaagtttcagtaaatcagaacaataaacaaactcagat

SEQ ID NO: 144632 - DNA, 4587 bp, Homo sapiens
  Payload ID: 8571
  Gene Symbol: IARS
  Gene Name: isoleucyl-tRNA synthetase
  ENST ID: ENST00000627121
  CDS Start-End: 2995-3519
cggtgcggagcctgtctccttcactggatcccgcattttcagcgcgttgcatcacctccgtgcgcccggttgcagcgtggacgccggatgagttgcttttaggcttgctggcccgcggggctgtccaggcacgcgaggcccctcagcaacaaaatgcttcaacaagttccagaaaacataaattttcctgctgaagaagagaaaatcttggagttttggactgaatttaattgttttcaggaatgcttaaagcaatcaaaacataaaccaaaatttaccttctatgatggtcctccttttgcaactggactgcctcactatggacatatacttgcgggtacaattaaagatatagttacaagatatgctcaccagagtgggtttcatgttgacagaagatttggatgggattgccatggcttacctgtggaatatgaaattgataagacactgggaatcagaggaccagaggatgtggccaaaatggggattacagagtataacaatcagtgccgagcaattgtgatgagatattctgctgagtggaagtctactgttagcagacttggccgatggattgactttgacaatgactataaaactctgtatccacaattcatggaatcagtctggtgggtcttcaaacaactctatgataaaggccttgtttatagaggtgtgaaagtcatgcccttctctacggcatgtaacactccactttccaacttcgagtcacaccagaattataaggatgttcaagatccttcagtatttgtaactttccctttggaagaagatgaaactgtatctttagttgcttggacaaccactccctggactctacctagtaaccttgctgtgtgtgttaatccagaaatgcaatatgtgaaaattaaagatgttgccagaggacgattactcattttaatggaagccagattgtcagccctctataaattggagagtgactatgagatccttgaaagatttcctggtgcctatcttaaaggcaagaagtacaggcccctgtttgactatttcctgaagtgtaaagagaatggcgctttcactgtgcttgttgacaactatgtgaaggaagaagaaggcacaggggttgtccaccaagctccttacttcggtgctgaggactatcgggtctgtatggactttaacattattcggaaagactcactccctgtttgccctgtggatgcttcaggctgcttcacaacggaggtgacagatttcgcaggacagtatgtgaaggatgctgacaaaagtatcatcaggactttgaaggaacaaggccgacttctggttgccaccaccttcactcacagctaccctttttgctggagatcagacactcctctaatttacaaagcagtgcccagctggtttgtgcgagtggagaacatggtggaccagctcctaaggaacaatgacctgtgctactgggtcccagagttggtacgagaaaaacgatttggaaattggctgaaagatgcacgtgactggacaatttccagaaacagatactggggcacccccatcccactgtgggtcagcgatgactttgaggaggtggtatgcattgggtcagtggcggaacttgaagaactgtcaggagcaaagatctcagatctccacagagagagtgttgaccacctgaccattccttcacgctgtgggaagggatccttgcaccgcatctctgaagtgtttgactgttggtttgagagtggcagcatgccctatgctcaggttcattacccgtttgaaaacaagagggagtttgaggatgcttttcctgcagatttcattgccgagggcatcgaccaaaccagaggatggttttataccctgctggtgctggccacggccctctttggacaaccgcctttcaagaacgtaattgtgaatgggcttgtcctggcaagtgatggccaaaaaatgagcaaacggaaaaagaattatccagatccagtttccatcatccagaagtatggtgctgatgccctcagattatatctgattaactcccctgtggtgagagcagaaaacctccgctttaaagaagagggtgtgcgggacgtccttaaggatgtactgctcccatggtacaatgcctatcgcttcttaatccagaacgttctgaggctccagaaggaggaagaaatagaatttctctacaatgagaacacggttagagaaagccccaacattacagaccggtggatcctgtccttcatgcagtctctcattggcttctttgagactgaaatggcagcttataggctttatactgtggtgcctcgcctggtcaagtttgtagatattctgaccaattggtatgttagaatgaaccgcagaagattaaagggtgaaaatgggatggaggattgtgtcatggccctagaaaccttgtttagtgttctgctttctctttgcagacttatggctccctacacaccttttctcactgaattgatgtaccagaatctaaaggtgctgattgaccctgtttctgttcaggacaaggacacactcagcattcactacctcatgctgccccgtgttcgagaagaattgattgacaagaaaacagagagtgcagtatctcagatgcagtctgtgattgaacttggaagagtgatcagagaccgaaaaactattcccataaagtatcctttgaaagaaattgtggttatccatcaagatccagaagctcttaaagatatcaagtctttggagaagtatatcattgaggaactcaatgttcgaaaagttacactgtctacagataaaaacaagtatggcattcggctaagggcagaaccagatcacatggtcctggggaagcgtctgaagggagcctttaaggcagtgatgacgtccatcaagcagttgagcagtgaggagctggagcagttccagaagactgggaccattgttgtggaaggccatgaattgcacgatgaagacatccgcctcatgtacacctttgatcaggccacaggtgggactgcgcaatttgaagcacactcagatgctcaggctttggtcctcttagatgtcactcctgaccagtcaatggtagatgaaggaatggctcgggaagtcatcaatcgcatacagaaacttcgcaaaaagtgcaatctggttccaactgatgaaatcacagtgtactataaagcaaagtctgaaggaacatatctgaatagtgttattgaaagccacacagagttcatatttaccaccataaaggctcccttgaaaccatatccagtttctccatcggataaagtccttattcaagaaaaaacacagttgaagggatctgaactggaaattacactcaccagaggatcttcccttcctggtcctgcttgtgcatatgtcaatcttaacatttgtgcaaatggcagtgaacaaggcgagatgcagtggatcattcctgaaatctaccacttttggaagccaaggtggagtattgctcctggaaaatccaaaaggtgacaataggttggaccttttaaagctgaagagtgttgtcactagcatttttggtgtgaaaaatacagagctggctgtcttccatgatgaaacagaaatacaaaaccaaactgacttactgagtcttagtggaaaaacactttgtgtgactgcaggatcggctccctctctgatcaacagttctagtactcttctttgtcagtatatcaacctacagctcctgaatgcaaagccacaagagtgtttaatggggacagtgggcactctcctgcttgaaaacccacttgggcagaatggactcacccaccaaggtcttctgtatgaagcagccaaggtgtttggccttcggagcaggaagctaaagctgtttctgaatgagacccaaacgcaggaaattacagaagacatccccgtgaagactttgaatatgaagactgtgtatgtttctgtgttaccaacaacagcagacttctagcatgtacttatcaatgttgttcggtcagcccttccctaattacacctatcccctacacatacatgcacatagacacacacatgaacacactgaagatatttccttcaggtgtgtgtaaaatatgctgcttggattgaaattcaaatgggattgattagtcaagtaacttgagacctcacagtaatcttcacacttaaccttagacacctatgcagtcatgttgggagcaggttacaatgttacttcagcccacagtttatttctatacttgagttcttaagtacagaagatagaagtgatttaaatggcatagtatatatatcattttctggccttttaaaatttatttgagacctcttgatgaaatggacatattatatatttctgccacctggattttcctggataatttgatggaatattttaagtttcagtaaatcagaacaataaacaaactcagatataaatgtgttgaaagtaattcattctcccatagataaatgaaacttgaaatgtgtaaactttgaagaacataaaaacttcatggtggtttcttattaagacagtggactagacatctaataaaacttctttcc

SEQ ID NO: 144633 - DNA, 3560 bp, Homo sapiens
  Payload ID: 8572
  Gene Symbol: IARS2
  Gene Name: isoleucyl-tRNA synthetase 2, mitochondrial
  Uniprot ID: Q9NSE4
  ENST ID: ENST00000366922
  CDS Start-End: 116-3154
cttccgctcccggagcgcgtgcgccctcttactcggctccccttggtttcctggggtcctgccccttcaagctggggcgggagcggaggaccccgctctcaggggttgccggaccatgcgttgggggctgcgccctcgcgggccgggcgcggccgccctggccactgcccgaagtttgtgggggacgccccgccttccctgcagcccgggatggcaaggggcgacgaagaggcttctggtgcggtcggtctccggggccagtaaccaccagccgaactcgaatagtggcagataccgggacacggtgctgctgccgcagacgagcttccccatgaagctgctgggccgccagcagccggacacggagctggagatccagcagaaatgtggattttcagaactttattcatggcaaagagaaagaaaagtaaagacagaattttgccttcatgatggacctccttatgcaaacggtgaccctcatgttggacatgctttaaataagattttgaaagacatagccaatcgattccatatgatgaatggctccaaaatacattttgtgcccggctgggattgtcatgggttgcccattgaaataaaagtattatcagaacttggtagagaagctcagaatctttcagctatggaaattagaaagaaagctagatcatttgctaaagcagccattgagaaacagaaatcagcatttattcgttggggaataatggcagattggaataattgctactatacatttgatgggaagtatgaagccaaacagttgagaactttttaccaaatgtatgataagggcttggtttatcgatcttacaaacctgtgttttggtctccgtcatctaggactgcattggctgaagcagaacttgaatataatcctgagcatgtcagtcgttcaatatatgtaaaatttcctctcttaaagccttctccaaaattggcatctcttatagatggttcatctcctgttagtattttggtctggaccacacaaccttggacgattccagccaatgaagctgtttgctatatgcctgaatcaaagtatgctgttgtgaaatgttctaagtctggagacctctacgtactggcggcagataaagtagcatctgttgcttctactttggaaacaacatttgagactatttcaacactttcaggtgtagatttggaaaatggtacttgcagtcatccattaattcctgataaagcctctcctcttttacctgcaaatcatgtgaccatggcaaaaggaacgggattggttcacacagccccagctcatggtatggaagactacggtgtagcgtctcagcacaacctgcccatggattgtctagtggacgaagatggagttttcacagatgttgcaggtcctgaacttcaaaacaaggctgtccttgaagagggaactgatgtggttataaagatgcttcagactgcaaagaatttgttgaaagaggagaaattggtgcatagctatccgtatgactggaggaccaagaaacctgtggttattcgtgccagcaagcagtggtttataaacatcacggatattaagactgcagccaaggaattgttaaaaaaggtgaaatttattcctggatcagcactgaatggcatggttgaaatgatggacaggcggccatattggtgtatatcaaggcaaagagtttggggtgttccaattcctgtgtttcatcataagaccaaggatgaatacttgatcaacagccaaaccactgagcatattgttaaactagtggaacaacacggcagtgatatctggtggactcttccccctgaacaacttcttccaaaagaagtcttatctgaggttggtggccctgatgccttggaatatgtgccaggtcaggatattttggacatctggtttgatagcggaacttcatggtcttatgttcttccaggtcctgaccaaagagcagatttgtacttggaaggaaaagaccagctcgggggttggtttcagtcatccttattaacaagtgtggcagcaaggaagagagcaccttataagacagtgattgttcatggatttacccttggagaaaagggagaaaagatgtccaagtctcttgggaatgtcattcatcctgatgttgtcgttaatggaggacaagatcaaagcaaagagcctccgtatggtgctgatgtccttcgctggtgggtagctgattccaatgtcttcaccgaagttgcaattggcccatccgtgctcaatgctgccagagatgatattagcaagcttaggaatacacttcgctttcttttgggaaatgtggctgatttcaacccagaaacagattccatccctgtaaacgatatgtatgtcatagaccagtacatgctacacttactgcaggatttggcaaacaagattaccgaattatacaaacaatatgattttggaaaagttgttcggctgttacggacgttttataccagagagctctctaacttttatttcagtataatcaaagataggctctattgtgaaaaggaaaatgaccccaaacgacgctcttgtcagactgcattagttgaaattttggatgtaatagttcgttcttttgctcccattcttcctcacctggctgaagaggtgttccagcacataccttatattaaagagcccaagagtgttttccgtactgggtggattagtactagttctatctggaaaaagcccgggttggaagaagctgtggagagtgcgtgtgcaatgcgagactcatttcttggaagcatccctggcaaaaatgcagctgagtacaaggttatcactgtgatagaacctggactgctttttgagataatagagatgctgcagtctgaagagacttccagcacctctcagttgaatgaattaatgatggcttctgagtcaactttactggctcaggaaccacgagagatgactgcagatgtaatcgagcttaaagggaaattcctcatcaacttagaaggtggtgatattcgtgaagagtcttcctataaagtaattgtcatgccgactacgaaagaaaaatgcccccgttgttggaagtatacagcggagtcttcagatacactgtgtcctcgatgtgcagaagttgtcagtggaaaatagtattaacagctcactcgagcaagaaccctcctgacagtactggctagaagtttggatggattatttacaatataggaaagaaagccaagatttaggtaatgagtggatgagtaaatggtggaggatgggagtcaaaatcagaattatagaagaagtatttcctgtaactatagaaagaattatgtatatatacatgcagaaatatatatgtgtgtgtgtatctgtggatggatatatgtatatctcttcctatatatatccatagtggacttattcagaacatagatatgtattcagcttgtcttcaaatacggccaagcagaaaatgttttatattttataaatcatcttttgactctgtatttaaattctatgatactgaaaataaaggcattctggaaaaata

SEQ ID NO: 144634 - DNA, 2301 bp, Homo sapiens
  Payload ID: 8573
  Gene Symbol: IDI1
  Gene Name: isopentenyl-diphosphate delta isomerase 1
  Uniprot ID: Q13907
  ENST ID: ENST00000381344
  CDS Start-End: 168-1022
gggtggggcgtgttgacccccttaaaggcgccagagcccgcggtcacggctcaggttcccggtgcttcgcgcgtctgccgttgtcacaggccagggaggtggcaccaccaggcgaagcttggcgagattgtgtcgtcaagcgcgtacgggcgccaattggccgggcgatgtggcgtggactggcgctggcgcgagcgattggctgcgcggcccgggggcggggccagtgggcggtgcgcgccgcagactgtgctcaaagcgggcgccatccgggaccggcggttgtctgtggccggaggctgatcagtgttctagaacagatcagacattttgtaatgatgcctgaaataaacactaaccacctcgacaagcaacaggttcaactcctggcagagatgtgtatccttattgatgaaaatgacaataaaattggagctgagaccaagaagaattgtcacctgaacgagaacattgagaaaggattattgcatcgagcttttagtgtcttcttattcaacaccgaaaataagcttctgctacagcaaagatcagatgctaagattacctttccaggttgttttacgaatacgtgttgtagtcatccattaagcaatccagccgagcttgaggaaagtgacgcccttggagtgaggcgagcagcacagagacggctgaaagctgagctaggaattcccttggaagaggttcctccagaagaaattaattatttaacacgaattcactacaaagctcagtctgatggtatctggggtgaacatgaaattgattacattttgttggtgaggaagaatgtaactttgaatccagatcccaatgagattaaaagctattgttatgtgtcaaaggaagaactaaaagaacttctgaaaaaagcagccagtggtgaaattaagataacgccatggtttaaaattattgcagcgacttttctctttaaatggtgggataacttaaatcatttgaatcagtttgttgaccatgagaaaatatacagaatgtgaatatgtaggtaaatgattacagaaaaatttatctgcttaacaaacttagaatgactttttccttttaaatttagttctatcattaatttatcattaaatttagttctatcatttggtactatcattaatgtattatatacactgatactttaaaacttgtgtggaaaaaactaacttataattttgtatcacacaccctggatatgtgttctgtttctaagcgacatttgtgagagattattgtaaaatgagagcgagcaaataaaacttaatttaatctttgcagatacatacttatgggaaatttgaacaaatgagtgaaactctgtttttagtaggctgtgataaacatttccggagcacttgcagaggacttgctatttgccaggtgctttatgtatcattaaatttttctcatagttcagaaaaatgtgcaaaggaaactattgtctcgctccttcaaaacagtcttaattaactttcatattagcagattaaactagcagagcaggttcaagggaaattaaatgatatggaccctaatttgtatcattctgagttgattgtgtggtttattcattctggaaacatgttgatacttacagtcagccactgcttttgataagtgatattgattaggttgaatcttcttgtaaatagtatttaccagttagcaaagtctgtgttttcagaattacagtgagcacagaggtgttcataaaatgggaattgagtcccactcggtaagagttgcttaaacttgacactgttgacatttgggctggataaaacccctgtggtggggtctgtgctgtgcattgcaggatggtgagcagcgtccctctcatgtgacacccacagttatgccggatgttgccagatgcccctaggggacagagtcaacccccaactgaggaccactgtcctacagagtcaggaaatattgtagggagaaaaaaataacaacaacaaaggcctgtgttaatgttaaatagatgagattatggaatgtgtatattaatgttaaaaattgtaccttgatcaatgtactttttataaacttgccatagatatctcagatttgaaacctcaagacagatttattattcttaaatgctgtatgataatgaagaaaaataaaaatttatttcttgcaaagttaaatgtttgttaaattcaatagaatgactcatttatggttaactttgggcaatttataatttcagacaagactgtttagcaagtattttattgaaaagtaaaaaaaattgcaatttaa

SEQ ID NO: 144635 - DNA, 1017 bp, Homo sapiens
  Payload ID: 8573
  Gene Symbol: IDI1
  Gene Name: isopentenyl-diphosphate delta isomerase 1
  ENST ID: ENST00000429642
  CDS Start-End: 652-1017
tgtggccggaggctgatcaggtactgtggacgggcggcggagttcgggagacaggggcagggcggcatcggggagctgcgggacggggcggggaggaggcccgaggtctgagccacccgtgaggtctcggcgcggaggcctggacagctgggggtggcggcgttggtctcccgaactggagggaggccgggccttcccgggctgtggtgggcgcccgcgccccgtggaaggcggaggcgtgagtcggggcgtcagagacgttgccattctttgtcagcggaaaagatcgtcgtctgcgcacagtcacctgaggtttaggaactcgtggaactggaaaccgagtcgcaggagactaagagttgcgagtctccccttagagaattcagaaacaagcgtagacagcatcgtcagaaacacgagcgtgacgacaccggcctccccgtgccgagtccacgcgtgtgacgcgggtgcatacacctgcgtccgtgcaagagggtgacagcaacacactcaaggcgcttctcctgggaatggagcaggagaagagatggggagcatcgcatagatggaactagacctttttcttgggttggatgatgtgttcccgcgtctactacatgtgttctagaacagatcagacattttgtaatgatgcctgaaataaacactaaccacctcgacaagcaacaggttcaactcctggcagagatgtgtatccttattgatgaaaatgacaataaaattggagctgagaccaagaagaattgtcacctgaacgagaacattgagaaaggattattgcatcgagcttttagtgtcttcttattcaacaccgaaaataagcttctgctacagcaaagatcagatgctaagattacctttccaggttgttttacgaatacgtgttgtagtcatccattaagcaatccagccgagcttgaggaaagtgacgcccttggagtgaggcgagcagcacagagacggctgaaagctgagctaggaattcccttggaagag

SEQ ID NO: 144636 - DNA, 441 bp, Homo sapiens
  Payload ID: 8573
  Gene Symbol: IDI1
  Gene Name: isopentenyl-diphosphate delta isomerase 1
  ENST ID: ENST00000427898
  CDS Start-End: 80-441
tgcaagagggtgacagcaacacactcaaggcgcttctcctgggaatggagcaggagaagagatggggagcatcgcatagatggaactagacctttttcttgggttggatgatgtgttcccgcgtctactacatggattattgcatcgagcttttagtgtcttcttattcaacaccgaaaataagcttctgctacagcaaagatcagatgctaagattacctttccaggttgttttacgaatacgtgttgtagtcatccattaagcaatccagccgagcttgaggaaagtgacgcccttggagtgaggcgagcagcacagagacggctgaaagctgagctaggaattcccttggaagaggtaaccagctctcctacacaaccatacaagctgaaacctaaacatactataaaaaggtttttaataaaatttttaaattcaaa

SEQ ID NO: 144637 - DNA, 1359 bp, Homo sapiens
  Payload ID: 8574
  Gene Symbol: IDI2
  Gene Name: isopentenyl-diphosphate delta isomerase 2
  Uniprot ID: Q9BXS1
  ENST ID: ENST00000277517
  CDS Start-End: 66-749
gagttccacatctgatacccaggagtctccagcttccaagagaggtcgggtcacagccagcagctatgtctgacataaatcttgactgggttgacaggcgtcagttgcagcgcttggaggaaatgctgattgttgtggatgagaatgataaggttattggtgccgacaccaagaggaattgccatctgaacgaaaacattgagaaagggctgctgcaccgagccttcagcgttgtcttgtttaacaccaagaatcgaatcctgatacagcagaggtcggacacgaaagtcacgtttcctgggtattttaccgactcctgtagtagccacccattatacaacccagcagaactggaagaaaaggatgccatcggagtgaggagggcagcccagaggcgtctgcaagcagagctgggaattcctggggagcagatttctccagaggacattgtgttcatgacaatctatcaccacaaggcaaaatcagacagaatttggggagagcatgaaatttgttaccttctgcttgtgaggaaaaacgtcactctgaacccggatcccagtgaaacgaaaagcatcctctacctgtcccaggaggagctgtgggagctgctggagagggaggcgaggggtgaagtcaaagtcaccccctggctaagaaccattgccgagaggtttctgtaccggtggtggcctcacctggatgacgtgaccccgtttgtggagcttcacaaaatacacagagtgtgagaggcagggaggtcgagtcagccatgtgtaatgccctcagtgcaggcagacgcaccattgaggcaatgatacaccctctccaaaaaacagggcaaaaggggcacttgattgcccatcatgtataaatcactatttcaaccttttcatcaactttgtcatatcttcattttcccttttccttatttccatatttctcatctgcctggttgcagggaggaaatttaacatttcctttgtcccaatttccattttataagcacttgtttgattaacagcagctgatcctgaaagtcttggggagatcttgagagtcctgaagcaggcggactagcctggctggaccatgaggctgtctccccacagctttatccaagcctccaaggtcaggatgggatctctgtatcatgtttttctttttaaatcacttatttcagagtgcaacacaaggctgcatttttaaaaaaaagacacattcaatcttgcatcctaatacaagcagtacggaagatgcgtatggtctcagccaagtgactcgacgtttatccacttctgttcatttgatcgtttcagtaatatgcttacaaataaagacatacttgctttaaaacat

SEQ ID NO: 144638 - DNA, 1709 bp, Homo sapiens
  Payload ID: 8575
  Gene Symbol: ISPD
  Gene Name: isoprenoid synthase domain containing
  Uniprot ID: A4D126
  ENST ID: ENST00000399310
  CDS Start-End: 1-1206
atggaggccgggccgccgggcagcgccaggccggcggagccgggtccttgcctgagtggtcagcgcggcgcggaccacacggcttccgcctccctgcagagcgtggccgggaccgagcccgggcgccacccgcaagccgtggcagctgtgttgcctgccggggggtgcggggagaggatgggggtccccaccccgaagcaattctgccccatcctggagaggccgctcatcagctacaccctacaggccctggagagagtatgttggataaaggacattgttgtggcagtaactggagagaacatggaagtaatgaaaagtattattcagaagtatcagcataaacgcatctcactggtcgaagctggagtgacccgccacaggtcaattttcaatggactaaaagcactggcagaagatcagatcaactctaaactctctaagccagaagtagtgattatccatgatgctgtgagaccatttgttgaggaaggtgtccttcttaaagttgtcacagctgctaaggaacacgggtgtagtgactatgacttggaatttggaactgagtgtttgcaattggccctaaaatactgttgcactaaagccaaacttgtagaaggatcacctgacctctggaaggtgacctacaaacgagatctctatgcggctgaatcgattattaaggagagaatttcccaagagatttgtgtagttatggatacagaagaagataacaaacatgtaggtcatcttcttgaagaagtgctgaaaagtgaattaaatcatgtaaaagtcacatctgaggctctgggtcatgctggcagacatcttcagcaaatcatcttagatcaatgctacaattttgtttgtgtgaatgttacaacctctgattttcaagaaacccagaagttactgagcatgcttgaagagagtagtctttgcattttatatcctgttgttgttgtttcagttcattttcttgattttaaattagtacctcccagtcagaaaatggaaaacctaatgcagattagagaatttgcaaaggaagtaaaagaaagaaatattttgttatatgggcttctcatatcttacccacaggatgatcagaagctacaggagagtttaaggcaaggtgctatcattattgcttcattaatcaaggaaagaaattctggactcattggtcagcttctgatagcatgaagaacacaaaaaattacctattttctaaaacatctatttgcgtatcttaattgtgctttgtgcccccgctgctgtgtgtggtagaatgtttcagttgtcttttatatcttctctataatttgtaggatgtgatgcttagattataaagcagattaatgtttatatctgtgaaataaagaatacttttgtgtatgacaaatattaattgcctgaaccagaaaaaaatagtagataagtggaaaataatagccttcaaatgaatctttccacagagacatgaacggtcaaatagaaataatgatggggtgagctattctttcaaggaatgagaatttagaaaacttcagttattatcctaactgttaattaataatttacactattatgaagctaatggataaacttcagaattattctcacttctataattgtcctgtcaccaggtgatattttgtctttttgtcttgtgttaaaaatgtctacactttaataaaaaagggtga

SEQ ID NO: 144639 - DNA, 5524 bp, Homo sapiens
  Payload ID: 8575
  Gene Symbol: ISPD
  Gene Name: isoprenoid synthase domain containing
  Uniprot ID: A4D126
  ENST ID: ENST00000407010
  CDS Start-End: 1-1356
atggaggccgggccgccgggcagcgccaggccggcggagccgggtccttgcctgagtggtcagcgcggcgcggaccacacggcttccgcctccctgcagagcgtggccgggaccgagcccgggcgccacccgcaagccgtggcagctgtgttgcctgccggggggtgcggggagaggatgggggtccccaccccgaagcaattctgccccatcctggagaggccgctcatcagctacaccctacaggccctggagagagtatgttggataaaggacattgttgtggcagtaactggagagaacatggaagtaatgaaaagtattattcagaagtatcagcataaacgcatctcactggtcgaagctggagtgacccgccacaggtcaattttcaatggactaaaagcactggcagaagatcagatcaactctaaactctctaagccagaagtagtgattatccatgatgctgtgagaccatttgttgaggaaggtgtccttcttaaagttgtcacagctgctaaggaacacggggcagcaggagccattcgacctcttgtatctactgtcgtcagtccatctgctgatggttgcttagactactcgctagaacgtgccagacacagagcaagtgaaatgccccaagcttttctatttgatgtgatttatgaagcatatcagcagtgtagtgactatgacttggaatttggaactgagtgtttgcaattggccctaaaatactgttgcactaaagccaaacttgtagaaggatcacctgacctctggaaggtgacctacaaacgagatctctatgcggctgaatcgattattaaggagagaatttcccaagagatttgtgtagttatggatacagaagaagataacaaacatgtaggtcatcttcttgaagaagtgctgaaaagtgaattaaatcatgtaaaagtcacatctgaggctctgggtcatgctggcagacatcttcagcaaatcatcttagatcaatgctacaattttgtttgtgtgaatgttacaacctctgattttcaagaaacccagaagttactgagcatgcttgaagagagtagtctttgcattttatatcctgttgttgttgtttcagttcattttcttgattttaaattagtacctcccagtcagaaaatggaaaacctaatgcagattagagaatttgcaaaggaagtaaaagaaagaaatattttgttatatgggcttctcatatcttacccacaggatgatcagaagctacaggagagtttaaggcaaggtgctatcattattgcttcattaatcaaggaaagaaattctggactcattggtcagcttctgatagcatgaagaacacaaaaaattacctattttctaaaacatctatttgcgtatcttaattgtgctttgtgcccccgctgctgtgtgtggtagaatgtttcagttgtcttttatatcttctctataatttgtaggatgtgatgcttagattataaagcagattaatgtttatatctgtgaaataaagaatacttttgtgtatgacaaatattaattgcctgaaccagaaaaaaatagtagataagtggaaaataatagccttcaaatgaatctttccacagagacatgaacggtcaaatagaaataatgatggggtgagctattctttcaaggaatgagaatttagaaaacttcagttattatcctaactgttaattaataatttacactattatgaagctaatggataaacttcagaattattctcacttctataattgtcctgtcaccaggtgatattttgtctttttgtcttgtgttaaaaatgtctacactttaataaaaaagggtgagtgggataccagggaacggaactgtttgtttctagcattttccccatttgccacatattactcaagatccctaaaacagatgtcatttccttcttttctgtttttaaattgtatgttatttttggtttatgaactataattatgacttacattattttaaagggtctctagtttttctgaatgaacttaaaagtgtctggaaagtttcgtaggtgattctggtcaatccctggttagttatcttctataaggtagagaatctattgtacatcatagagttaaattagttatttcaattcagatactgctaccttttaaaatcaagttcttatttccagttttcattggtatatacatctgaaatattaatattttcccttgcatgttataattatgggtgtcctttaattcattagaggtgacttttaatctatacatacacttactctatttattttattttttattgttttgaaatgcagtcgccctctgtcaggctggagtgcagtggcacaatctcagctgactgcaacctctgcctcctgggtttaagcaattatcctccctcagcctcccgagtagctgggattacaggcacctgccaccacacctggctaattttttttttttttttttttttttgtatttttagtagagaagggttttcgccatgtaggccaggctggtcttgaactcctgacctcaagtgatctgcctgcctcggcctcccaaaatgctgggattataggtgtgagccaccatacccagccaacatacatttattttattgaaacagattagggcttaggctgcacgtggaaactataaaagttgcatgaagtgttttcagttaaagatacactatacaatatctaccttgtggaatttttatttaacatgttgggtgattttccctctagtgttcaagtatatatatagtaggagagtttatattttacattctcctaattgaaatgtgttatttgaatgtaggcttgtatctaaattcctgggcctgccctttttctctctctaggaatattaagaaatttaaaatccattaatttaagtttttgaggatggaaataggtaagcaatgtgtggattgtggttaggaatgtctgtgcctttgttcagatgtcggctgtgtgtgtgacgaaaaccacagctgccaagtccccaacatgcacctgttgaagtcatcaggtgaaaatgtttaagactttgaaagtgctcataaaggaagaaggggaaatgttatcaaggctttaaagagagggtaagtgccttgaagaagaatgcagtaaactgggcatatttgtggcacagcaaaatcaccctgatcgctggagtgctggctgagttaacatagacttcagcttaaggaatcctacagcagacaagaatttatctcagagtacttactatgacattaccctaggcaactggtaacatttagtataatttagttaataaaatattaagttgtgcctggaaaaaatagcatttggtccttcatagcaggcaaagcaattcacagcattgggaaaaaaaaatacatacatacatatacatgtatgtatacccatatatatgtatatacatgcatgtatacccatatatatgtatatacttacatgtatatacatatatatgtatgtacgtacatatatacccatatctatgtatgtacgtacatatatacccgtatatatgtacgtacatatatacacatatatgtatgcacgtacatatatacacatatatgtatgtacgtacatatatacacattatgtacatacatatatacgtatatatgtacatgcatgtatgtatgtatatacgtacgcatacacacatatatttatatacgtacgcatacacacatatatgtatatacgtacgcatacacacatatatgtatatacgtacgcatacacacatatatgtatatacgtacgcatacacacatatatgtatatacgtacgtatatacacacatatatgtatatacgtacgtatatatgtatttttatgttttatgtatatgtattttatatgtatatatatctgcacatccttcactattttcatgaggaaattggagctcagggatcttagttaccttgccaaaatcatgtgactgaatagtaacaaaagtttgggcttaaaataaggaagactgataataagtgttaagcttatattcctgtctaacaatgacccctggcaaagacatctgatatataagccacgtctgatatataagacgtgatatataagccagaggcactgaatgaacattggcgaaatggacaagaagggtgggacacttatgtccagggactaggtgaaagtcctggagcttttggctttccagccaccttcccagcataaagaaattgtagctaaagttaagggaatgaatagaagtattggccaaaagagaaattattttgttgtttaagagatctggccgggcgcgatggctcacgcctgaaatcccagcactttgggaggccgaggcaggcagattacgaggtcaggagatccagaccatcctggctaatgcggtgaaaccccgtctctagtaaaaatacaaaaaaaatagccaggcatcgtggcgggcgcctgtagtcccagctactcaggaggcttaggcaggagaatggcgtcaacctgggaggcggagcttgcagtgagccgacatagcgccactgcactccagcctgggcaacagagcaagactccgtctcaaaaaaaaaaaaaaaaaaaaaaagagagatccagaggtaactttacagttacattttcatcactgcttctgtaaatttactttagtaaaagctgtctattctcactttattttccaaaatctcttaaaaaataatagtgattatgcttcaaggtttctgaaaatgcttccacttgtgggaaattttgttgcaaaatggttttctttctaaacttacgctagttagttaaatgcaaattaaagttagtcgtcttaggagttcatcatagcgtgagtaatggtttgattaatgacattttggtagaggtcctattttttttcataaaagtgctcaatttgagatgacttgttgcaagtatactcatttacaggtaagagtcagctccctatattctctcagagtcattgttatggttattattgtaagtattttacattaatttaacagaaattttttcttccctaacttataactcaactttatgtaaatacagtgatcatcttataaaaatcaaattacagaatgtcttaaaatctgtaaatttgactttgttttaatgttgaaactacaaattcacagaggcataaatctaacatcttaattaaaatgtcaaccatatgcaagaagaaagatagaagttatttagaaagtttaatttgaaaacagaataatgaagcattttaattgatataggatttgttagtatggcttaaaatcagtggactagaagtagctgtgtaggtggtggttggcattatagttgcatttatatatgttcttattaatttcagtttcaaaattgtaagaagcatatgcatatttttaaggtgacattgaaaagtactataaagattctaaatatgttgtttttacaaaacaaaatgtaaataaattattgatttaaaatct

SEQ ID NO: 144640 - DNA, 4771 bp, Homo sapiens
  Payload ID: 8576
  Gene Symbol: ICMT
  Gene Name: isoprenylcysteine carboxyl methyltransferase
  Uniprot ID: O60725
  ENST ID: ENST00000343813
  CDS Start-End: 30-884
cgccgcccgctagtccgccgcccggcgccatggcgggctgcgcggcgcgggctccgccgggctctgaggcgcgtctcagcctcgccaccttcctgctgggcgcctcggtgctcgcgctgccgctgctcacgcgcgccggcctgcagggccgcaccgggctggcgctctacgtggccgggctcaacgcgctgctgctgctgctctatcggccgcctcgctaccagatagccatccgagcttgtttcctggggtttgtgttcggctgcggcacgctgctaagttttagccagtcttcttggagtcactttggctggtacatgtgctccctgtcattgttccactattctgaatacttggtgacagcagtcaataatcccaaaagtctgtccttggattcctttctcctgaatcacagcctggagtatacagtagctgctctttcttcttggttagagttcacacttgaaaatatcttttggccagaactgaagcagattacctggctcagtgtcacagggctgctgatggtggtcttcggagaatgtctgaggaaggcggccatgtttacagctggctccaatttcaaccacgtggtacagaatgaaaaatcagatacacatactctggtgaccagtggagtgtacgcttggtttcggcatccttcttacgtcgggtggttttactggagtattggaactcaggtgatgctgtgtaaccccatctgcggcgtcagctatgccctgacagtgtggcgattcttccgcgatcgaacagaagaagaagaaatctcactaattcacttttttggagaggagtacctggagtataagaagagggtgcccacgggcctgcctttcataaagggggtcaaggtggacctgtgacgggcagtggccccggtgaccttggggcctccgaccctgtgcagcctgggacaaaactgtttccggttggccgctgccacatggattttcttaatcgttttatgtcattagtcactcttctggaatgtcactcaagaccaagcggtcagaaggcctgaggacccaaggccccactggagcagtctgtccttatgccgaatcaaggcggaacatgggtgaaagacgagtaaggggcaaatcacagcaatattccacagcgccctccagagttacctggggaggaccgaggccacacgccactgcccccgaggccagagtgtaagtaaaggataaccaggactcgctgggagagatggactctgtcctcagcaacactccacagcagaaaggggtagcaggtaccccttcttatcagcggtaaaaatgcatttacaacctttcatttaaccgaaaaacacagaccgctttaacctctttatttctgtcccccactgcatgaacatctatacaattttaaaaatacttcctcataggatgctttggcccttcatctatttaatcatagctacatacctattttttataagtagcagtacacattcaaaggggtattcctagctcaatgcttggtgttctagttcaacttttatcctgcagcaagtaagcctagataactctacacgatttggctgagtggctttgtgtgaccgtggccccaggccaaggggatcatggccctggctggctttcccgggggtctcagctcctgttgtcagtgataggcggctcaaaggagcatcagtttcttttgatccaagaagtgcttactgaatgcctgccctgtgcgtggccttaaacattgagaagtgctgctctccgtttatttgggatttgattctcattttaccatagcttatattctcaatttcaatgccagtctcagaactcttgttttctgtgttctgttctcaaaattacattgtccctcatgtcatttcaaactgttttccaaagggatttgagcatatacaactacaaatccaagcagattgactctcaaaaataatcttaaatactgcaaatagtcccaactaagattcagtcagtatgtttgttttgcaagtttgggagagtaagttggctttgagtcacacatcgaagctttaagaggtgagacgctggcttcattctggactagacaggaacttggcctcagcgtgagatcctgccatgcagtgttgcggtggcactgaagaagtgtgaatgtgaaggcggcgtcggcgcggggccagagcaccactctgctgccccaccacgcggcctgtgaggagccactaaacctttccgtgcctagacctccccatctgtggaatggggtcaataccacctacctcacaggggtgttgtgaggactgagaagaacaatgtcaaatgtttttaatactcagatgtgggagcgacatcaatgaaatctgtactgtatgaaagctacacaaaaatgggcagacatttggttaattgtgccagatacctaaaatgtatgttcagaaaagcattttatcaactcagaaatatgacttatttctagatttcatggcttaatgaattttttcattgttatatataccaaagaggcttacgggttcattgattggtttgaaaaccagacagacggccgggcgcggtggctcacgcctgtaatcccagcaatttgggaggccaaggcgggtggatcatgaggtcaggcgttcgagaccagcctggccaacatgataaaaccccgtctctactaaaaatacaaaaaaatagctgggcgtgctggcgggtgcctgtaatcccagctactcaggaggctgagacaggagaatcctttgaacccaggaggcggaggttgcagtgagttgagatcgggcctttgcacttcagtctgggcaacagggcgagactccatctcaaaaaacaacaacaacaacaaaaaaaaccggacggacttgcccatcggccctcacgacacgcgtgcagtgggactctagccaaggcggtggccgagccatcattacaatttttctggagtaaaggatccacggtgggacatcaactggcacttactctgtttaggaacttgagttgaatcatttctaaacttgtcctttagaccacgcctagggcagcaaattccacttcctagaactgcaaaccgggagaggatgtagttagattctggcatcctgccccggctctttgagggaaaagttctttcccctgctctaagtagggcgggcccagcctccattcccattgggagccatgaagttgtcttgttgataggtctagggcagctgttggcagctgctggccttgtggatggtaagctgactgtgttggcatttaatgccatcctccatctgccagaggcccaggaagcccaccttcacaccaggcccaccagctggaaggagcccaggaggcaggtcttagggtttcatggtgaaatgctgtctgacaccagggaaaacttgacgtactctgctttggagaggaattccaggggtagggatggtgggagaacattcccaccctgtttataatcccagagcagaagtcagcaattacttagggataaaagatgaactccattttttttattttcttaagacagtcttgctctgtggcccaggctggaggctggagtgcagtggcaccatttcggctcaccgcaacctctgcctcccgggttcaagcgattctcctgcctcagcctcctgagtagctgggattacaggcttgggccaccatgcccagctaatttttttgtatttttagtagagacggggtttcaccatgatggccaggctggtctcgaactcctgacctcaagtgatccacgcgcctcggcctcccaaagtgctgggattacaggcgtgagccaccacgcccagccaagatgaactccttaaggacaggatttggtaagtgattgacttctttttagttccatgatcttgagattatttttagctttataaatttagcagtggcagggcccgtggagaatcaggttaatgaggtaaaggctttctgggtatttgctgccaaggccacatcaccaattttctcgatttaaaaaactgtcaagagatttatttttccattgcaggttttaaagtggagattctgaagtggaaaataggtactgtcagaacaaagctacctggaaacagcatagagtgaagcctttcgtgagggcttgcaggccgctgctgagtggcagtttacagaagaggtcgcggggtgagcctcttagcaggacagaaaacaaggcagcagcgcacctgccaccccttcacgagctgctccttgagcctaaaaagtaggctttattcatcccttctgttcatttaccaacctgggggattgatacgaccggggaaaatgttcctaaaccaggaagctgcgttagccgatcaggctttgtaagatctcgccaacagctagctgcttaggagtacccccacgatacgcacagcacaccactgtcccttcactgcactttcttcctgccttaggtagttgggcttgcccaccctagtttgcttttgtagtggtttggcaaggttagaaggcctcggcctctctgtcatgctgggaagtgcctactctctgggccactgctgcagaggccgtggcacttgtcatgggtttggaagacccagccatctgcagcagaggcagcctatcccattgcaaggagaggaactgaacggagtaattattctactcttctttttacataaatgtttatttaaatattctaaattggattttctttcacagatactgattattctttccagttcttaaataaaactgcacttgatttcactcaa

SEQ ID NO: 144641 - DNA, 2612 bp, Homo sapiens
  Payload ID: 8576
  Gene Symbol: ICMT
  Gene Name: isoprenylcysteine carboxyl methyltransferase
  ENST ID: ENST00000489498
  CDS Start-End: 62-412
gccggcgcgtttctccgggctacagccggcgccgccgcccgctagtccgccgcccggcgccatggcgggctgcgcggcgcgggctccgccgggctctgaggcgcgtctcagcctcgccaccttcctgctgggcgcctcggtgctcgcgctgccgctgctcacgcgcgccggcctgcagggccgcaccgggctggcgctctacgtggccgggctcaacgcgctgctgctgctgctctatcggccgcctcgctaccagatagccatccgagcttgtttcctggggtttgtgttcggctgcggcacgctgctaagttttagccagtcttcttggagtcactttggctggtcacatctagtgcatccccacagccactgtaggatttttccctacactatgatttcagtcccttgagccttctagtctgacctggatatgaaccagtggcttcaaggtacatgtgctccctgtcattgttccactattctgaatacttggtgacagcagtcaataatcccaaaagtctgtccttggattcctttctcctgaatcacagcctggagtatacagtagctgctctttcttcttggttagagttcacacttgaaaatatcttttggccagaactgaagcagattacctggctcagtgtcacagggctgctgatggtggtcttcggagaatgtctgaggaaggcggccatgtttacagctggctccaatttcaaccacgtggtacagaatgaaaaatcagatacacatactctggtgaccagtggagtgtacgcttggtttcggcatccttcttacgtcgggtggttttactggagtattggaactcaggtgatgctgtgtaaccccatctgcggcgtcagctatgccctgacagtgtggcgattcttccgcgatcgaacagaagaagaagaaatctcactaattcacttttttggagaggagtacctggagtataagaagagggtgcccacgggcctgcctttcataaagggggtcaaggtggacctgtgacgggcagtggccccggtgaccttggggcctccgaccctgtgcagcctgggacaaaactgtttccggttggccgctgccacatggattttcttaatcgttttatgtcattagtcactcttctggaatgtcactcaagaccaagcggtcagaaggcctgaggacccaaggccccactggagcagtctgtccttatgccgaatcaaggcggaacatgggtgaaagacgagtaaggggcaaatcacagcaatattccacagcgccctccagagttacctggggaggaccgaggccacacgccactgcccccgaggccagagtgtaagtaaaggataaccaggactcgctgggagagatggactctgtcctcagcaacactccacagcagaaaggggtagcaggtaccccttcttatcagcggtaaaaatgcatttacaacctttcatttaaccgaaaaacacagaccgctttaacctctttatttctgtcccccactgcatgaacatctatacaattttaaaaatacttcctcataggatgctttggcccttcatctatttaatcatagctacatacctattttttataagtagcagtacacattcaaaggggtattcctagctcaatgcttggtgttctagttcaacttttatcctgcagcaagtaagcctagataactctacacgatttggctgagtggctttgtgtgaccgtggccccaggccaaggggatcatggccctggctggctttcccgggggtctcagctcctgttgtcagtgataggcggctcaaaggagcatcagtttcttttgatccaagaagtgcttactgaatgcctgccctgtgcgtggccttaaacattgagaagtgctgctctccgtttatttgggatttgattctcattttaccatagcttatattctcaatttcaatgccagtctcagaactcttgttttctgtgttctgttctcaaaattacattgtccctcatgtcatttcaaactgttttccaaagggatttgagcatatacaactacaaatccaagcagattgactctcaaaaataatcttaaatactgcaaatagtcccaactaagattcagtcagtatgtttgttttgcaagtttgggagagtaagttggctttgagtcacacatcgaagctttaagaggtgagacgctggcttcattctggactagacaggaacttggcctcagcgtgagatcctgccatgcagtgttgcggtggcactgaagaagtgtgaatgtgaaggcggcgtcggcgcggggccagagcaccactctgctgccccaccacgcggcctgtgaggagccactaaacctttccgtgcctagacctccccatctgtggaatggggtcaataccacctacctcacaggggtgttgtgaggactgagaagaacaatgtcaaatgtttttaatactcagatgtgggagcgacatcaatgaaatctgtactgtatgaaagctacacaaaaatgggcagacatttggttaattgtgccagatacctaaaatgtatgttcagaaaagcattttatcaactcagaaatatgacttatttctaga

SEQ ID NO: 144642 - DNA, 1227 bp, Homo sapiens
  Payload ID: 8576
  Gene Symbol: ICMT
  Gene Name: isoprenylcysteine carboxyl methyltransferase
  ENST ID: ENST00000474756
  CDS Start-End: 62-346
gccggcgcgtttctccgggctacagccggcgccgccgcccgctagtccgccgcccggcgccatggcgggctgcgcggcgcgggctccgccgggctctgaggcgcgtctcagcctcgccaccttcctgctgggcgcctcggtgctcgcgctgccgctgctcacgcgcgccggcctgcagggccgcaccgggctggcgctctacgtggccgggctcaacgcgctgctgctgctgctctatcggccgcctcgctaccagatagccatccgagcttgtttcctggggtttgtgttcggctgcggcacgctgctaagttttagccagtcttcttggagtcactttggctgaactgaagcagattacctggctcagtgtcacagggctgctgatggtggtcttcggagaatgtctgaggaaggcggccatgtttacagctggctccaatttcaaccacgtggtacagaatgaaaaatcagatacacatactctggtgaccagtggagtgtacgcttggtttcggcatccttcttacgtcgggtggttttactggagtattggaactcaggtgatgctgtgtaaccccatctgcggcgtcagctatgccctgacagtgtggcgattcttccgcgatcgaacagaagaagaagaaatctcactaattcacttttttggagaggagtacctggagtataagaagagggtgcccacgggcctgcctttcataaagggggtcaaggtggacctgtgacgggcagtggccccggtgaccttggggcctccgaccctgtgcagcctgggacaaaactgtttccggttggccgctgccacatggattttcttaatcgttttatgtcattagtcactcttctggaatgtcactcaagaccaagcggtcagaaggcctgaggacccaaggccccactggagcagtctgtccttatgccgaatcaaggcggaacatgggtgaaagacgagtaaggggcaaatcacagcaatattccacagcgccctccagagttacctggggaggaccgaggccacacgccactgcccccgaggccagagtgtaagtaaaggataaccaggactcgctgggagagatggactctgtcctcagcaacactccacagcagaaaggggtagcaggtaccccttcttatcagcggtaaaaatgcatttacaacctttcatttaaccgaaaaacacagaccgctttaacctctttattt

SEQ ID NO: 144643 - DNA, 920 bp, Homo sapiens
  Payload ID: 8577
  Gene Symbol: IVD
  Gene Name: isovaleryl-CoA dehydrogenase
  ENST ID: ENST00000473112
  CDS Start-End: 1-920
ggaagcagctggggaacctgggcgtattgggcatcacagcccctgttcagtatggcggctccggcctgggctacctggagcatgtgctggtgatggaggagatatcccgagcttccggagcagtggggctcagttacggtgcccactccaacctctgcatcaaccagcttgtacgcaatgggaatgaggcccagaaagagaagtatctcccgaagctgatcagtggtgagtacatcggagccctggccatgagtgagcccaatgcaggctctgatgttgtctctatgaagctcaaagcggaaaagaaaggaaatcactacatcctgaatggcaacaagttctggatcactaatggccctgatgctgacgtcctgattgtctatgccaagacagatctggctgctgtgccagcttctcggggcatcacagccttcattgtggagaagggtatgcctggctttagcacctctaagaagctggacaagctggggatgaggggctctaacacctgtgagctaatctttgaagactgcaagattcctgctgccaacatcctgggccatgagaataagggtgtctacgtgctgatgagtgggctggacctggagcggctggtgctggccggggggcctcttgggctcatgcaagcggtcctggaccacaccattccctacctgcacgtgagggaagcctttggccagaagatcggccacttccagcctgggtccatggatcttggagtgtgttcagtaaacatctgctcctggggcaataatgaagggcagaccttttccgcccaacacccacctgggagggagggcgagacccgaggtcagacgtccctggagcaggtgagcactgcgagggaactgagatgcaagatcctcctgcctgaactcacaccccgcgtgctgctcccc

SEQ ID NO: 144644 - DNA, 4251 bp, Homo sapiens
  Payload ID: 8577
  Gene Symbol: IVD
  Gene Name: isovaleryl-CoA dehydrogenase
  Uniprot ID: P26440
  ENST ID: ENST00000479013
  CDS Start-End: 25-1215
agtttcagcgctggctcttcgtgcatggcagagatggcgactgcgactcggctgctggggtggcgtgtggcgagctggaggctgcggccgccgcttgccggcttcgtttcccagcgggcccactcgcttttgcccgtggacgatgcaatcaatgggctaagcgaggagcagaggcaggaattttggaagcagctggggaacctgggcgtattgggcatcacagcccctgttcagtatggcggctccggcctgggctacctggagcatgtgctggtgatggaggagatatcccgagcttccggagcagtggggctcagttacggtgcccactccaacctctgcatcaaccagcttgtacgcaatgggaatgaggcccagaaagagaagtatctcccgaagctgatcagtggtgagtacatcggagccctggccatgagtgagcccaatgcaggctctgatgttgtctctatgaagctcaaagcggaaaagaaaggaaatcactacatcctgaatggcaacaagttctggatcactaatggccctgatgctgacgtcctgattgtctatgccaagacagatctggctgctgtgccagcttctcggggcatcacagccttcattgtggagaagggtatgcctggctttagcacctctaagaagctggacaagctggggatgaggggctctaacacctgtgagctaatctttgaagactgcaagattcctgctgccaacatcctgggccatgagaataagggtgtctacgtgctgatgagtgggctggacctggagcggctggtgctggccggggggcctcttgggctcatgcaagcggtcctggaccacaccattccctacctgcacgtgagggaagcctttggccagaagatcggccacttccagttgatgcaggggaagatggctgacatgtacacccgcctcatggcgtgtcggcagtatgtctacaatgtcgccaaggcctgcgatgagggccattgcactgctaaggactgtgcaggtgtgattctttactcagctgagtgtgccacacaggtagccctggacggcattcagtgttttggtggcaatggctacatcaatgactttcccatgggccgctttcttcgagatgccaagctgtatgagataggggctgggaccagcgaggtgaggcggctggtcatcggcagagccttcaatgcagactttcactagtcctgagacccttcgcccccttttcctgcacctagtggcctttcttgggaagtagagatgtggcggctttcccaccctgcccacagcaggccctcctgcccagctgctcttgtcagccctctggcctctggatgaggttgagttctccacaacagctcccaagcatcatgggcctcgcagccgggcctgtgccacggctagtgttgtgtgatttaaaatggactcagcaggaagcatattgtctggggattgttgggacaggttttggtgactctgtgcccttgctctctaacttctgagcccacctcccagggtaggcacctgggggcatgcaggtgcccacctcccagggtaggcacctgggggcatgcaggtacccacctctttctcttgggtgaggctctggcaaggagatctctctgctcaagcacagcagaatcatggcccctctccatgaattggaacttggtacaggttaagtatccctaatcctgaaatctgaaacacttgtggttccaagcattttggataaggcaaattcaactttcagtctcttttctgggggaaaaaaataataaacctagcctagccaggcgtggtggctcatgcttgtaatcccagcacttcaggaggctgagatgggtggatcacctgaggtcaggagttcaagaccagcctggccaacatgtggaaacctcgcctcaactaaaaatagaaaaaaattagttgggcatggtggtgggcacctgtaatcccagctacttcaggaggctgaggcaggagaattacttgaacccaggaggcggacgttgcagtgagccgagcttgtgccattgcactccagcctgggcgacaagagcaaaactcttcaaaaaacaaaacaaaacaaaaaaaccctggcccttgtttcttccagtttctagaggtatcagctcctagcagcttatgaacacatatgcttgcttggccaggcaaggtggtgtgtgcctgtaatcccagcactttgggaggccaaggcaggtggatcacttgcagtcaggagttcaagaccagcctgtccaacgtggtgaaaccccatctctactaaaaatacaaaaattagccaggggtggtggtgcacgtctgtaatcccagctactcaggaggctgaggcaggagaatcacttgaacccgggaggtggaggttgcaatgagccaatatgacaccgctgcagtccagcctgggccatagagtgagactctgtctcaaaaaaggaaagaaaaataggctgggcacagtgactcatgcctgtaatcccaacactttgggaggccgaggcaggtggatcacgaggtcaggagttcaagaccagcctggccaagatggtaaaacctcgtctctactaaaaatacaaaaattagccaggtgtggtggcaggctcctgtaatcccagctactcaggaggctgaggcagagaattgcttgaacccgggaggcagagtttgcagtgagccaagatcacaccactgcactccagcttggacgacagagcgagactctgtctcaaaaaataataggccaggcatggtggctcaacgtctgtaatcccagcactttgggaggccgaggcgggcagatcacaaggtcaggagttcgagaccagcctgacgaccaacatggtgaaacctcgtctctactaaaaatacaaaaattagccaggcctggtggcacgcgcctgtaatcccagttacacagaagactgaggcaggagaatcgcttgaacgcaggaggcagaggttgcaggagctgagatcgcgccattgcactccagcctgggcaacagagtgagactctgtctcaaaaaataataataaaataaatgaacacacatgctgctgagtccgcagggggggcagagcagaggacagcgtgcttttgtgtactgttggaagactggctcctcctgtacagcacctctgagcccttgtgcaccgccctgccacgggcaccatccagtcctggccgtgtgaccacccacagctgactgggcagcaggcacaggccctacccgagcaggccggagttggctcgcatgactccagctgaggctgcctgtgtacatttctccagataccctatggctaattttgttataactgcacagtggctgctgccattttgtattaaatatattgtgaaacaaacctatctggggagaagcaatctacttgccgctgcttcctgtctggatccagcttgtgtccttggagagtggctggcccaggtcctattcctgtcctccagcccgttctttcatgagggacaggaaggtaaaatcagcccttaggagagaggtctcagcctccctttcccagatctcccagtgagttttaaaggaagcagggagcccagagtgctaagttcttacagccagaaggaagcttatagatttctgaaaaccgcccctttgtttttaaaaagatcaacacaatttgactttctcaaggtcaaaacgaactagaatccagatctgctcatggcaaaaatgggggtgttctgagaattccagctttgggccgcactgtacagcagtctggatagagtgtgatctgagaagggaatgggtctgggttgttccaccccttccgagttccaaaaagagggaactggttttcttggttctcagcccagcagcacctatcctggctcttggtcctggcctgcagccaagtgctgttcctagcctgaggcttgagacaggtggggttggctcctcaccaaccccagttccgtcccatcctgagggcaagatcctgggctcataggcagtccctttcacttccttgtcttgctccctgctatgttggagatgaatgtgactaaaagggccatcttgctggcttaatgtgtggctggagagaccagcctggagacaatgtggcaaaatggggcgcttcatccagtctgtctaagccctgtcgacttggggaggtgatttctttcctggttctatatgtgaagcaaaataaatgttttaaaattaaaagcaaaaaaaa

SEQ ID NO: 144645 - DNA, 1809 bp, Homo sapiens
  Payload ID: 8577
  Gene Symbol: IVD
  Gene Name: isovaleryl-CoA dehydrogenase
  ENST ID: ENST00000487418
  CDS Start-End: 25-1305
agtttcagcgctggctcttcgtgcatggcagagatggcgactgcgactcggctgctggggtggcgtgtggcgagctggaggctgcggccgccgcttgccggcttcgtttcccagcgggcccactcgcttttgcccgtggacgatgcaatcaatgggctaagcgaggagcagaggcagcttcgtcagaccatggctaagttccttcaggagcacctggcccccaaggcccaggagatcgatcgcagcaatgagttcaagaacctgcgagaattttggaagcagctggggaacctgggcgtattgggcatcacagcccctgttcagtatggcggctccggcctgggctacctggagcatgtgctggtgatggaggagatatcccgagcttccggagcagtggggctcagttacggtgcccactccaacctctgcatcaaccagcttgtacgcaatgggaatgaggcccagaaagagaagtatctcccgaagctgatcagtggtgagtacatcggagccctggccatgagtgagcccaatgcaggctctgatgttgtctctatgaagctcaaagcggaaaagaaaggaaatcactacatcctgaatggcaacaagttctggatcactaatggccctgatgctgacgtcctgattgtctatgccaagacagatctggctgctgtgccagcttctcggggcatcacagccttcattgtggagaagggtatgcctggctttagcacctctaagaagctggacaagctggggatgaggggctctaacacctgtgagctaatctttgaagactgcaagattcctgctgccaacatcctgggccatgagaataagggtgtctacgtgctgatgagtgggctggacctggagcggctggtgctggccggggggcctcttgggctcatgcaagcggtcctggaccacaccattccctacctgcacgtgagggaagcctttggccagaagatcggccacttccagttgatgcaggggaagatggctgacatgtacacccgcctcatggcgtgtcggcagtatgtctacaatgtcgccaaggcctgcgatgagggccattgcactgctaaggactgtgcaggtgtgattctttactcagctgagtgtgccacacaggtagccctggacggcattcagtgttttggtggcaatggctacatcaatgactttcccatgggccgctttcttcgagatgccaagctgtatgagataggggctgggaccagcgaggtgaggcggctggtcatcggcagagccttcaatgcagactttcactagtcctgagacccttcgcccccttttcctgcacctagtggcctttcttgggaagtagagatgtggcggctttcccaccctgcccacagcaggccctcctgcccagctgctcttgtcagccctctggcctctggatgaggttgagttctccacaacagctcccaagcatcatgggcctcgcagccgggcctgtgccacggctagtgttgtgtgatttaaaatggactcagcaggaagcatattgtctggggattgttgggacaggttttggtgactctgtgcccttgctctctaacttctgagcccacctcccagggtaggcacctgggggcatgcaggtgcccacctcccagggtaggcacctgggggcatgcaggtacccacctctttctcttgggtgaggctctggcaaggagatctctctgctcaagcacagcagaatcatggcccctctccatgaattggaacttggtacaggttaagtatccctaatcctgaaatctgaaa

SEQ ID NO: 144646 - DNA, 999 bp, Homo sapiens
  Payload ID: 8577
  Gene Symbol: IVD
  Gene Name: isovaleryl-CoA dehydrogenase
  ENST ID: ENST00000481262
  CDS Start-End: 1-437
tctgcatcaaccagcttgtacgcaatgggaatgaggcccagaaagagaagtatctcccgaagctgatcagtggtgagtacatcggagccctggccatgagtgagcccaatgcaggctctgatgttgtctctatgaagctcaaagcggaaaagaaaggaaatcactacatcctgaatggcaacaagttctggatcactaatggccctgatgctgacgtcctgattgtctatgccaagacagatctggctgctgtgccagcttctcggggcatcacagccttcattgtggagaagggtatgcctggctttagcacctctaagaagctggacaagctggggatgaggggctctaacacctgtgagctaatctttgaagactgcaagattcctggctcatgcaagcggtcctggaccacaccattccctacctgcacgtgagggaagcctttggccagaagatcggccacttccagttgatgcaggggaagatggctgacatgtacacccgcctcatggcgtgtcggcagtatgtctacaatgtcgccaaggcctgcgatgagggccattgcactgctaaggactgtgcaggtgtgattctttactcagctgagtgtgccacacaggtagccctggacggcattcagtgttttgggcagaccttttccgcccaacacccacctgggagggagggcgagacccgaggtcagacgtccctggagcaggtgagcactgcgagggaactgagatgcaagatcctcctgcctgaactcacaccccgcgtgctgctcccccaactcgcctcttggatctcagaccagaagcttcctttcctcaaaatccttctatgttctccaacgtctttgggacagagctccttggcagggtttacaaagcttaggtggccctacccacttctccagcctcatctgctgcctcacccctataccacagctctgcacctttgctgaaactggtactcggcgcttggggtgtcctcatc

SEQ ID NO: 144647 - DNA, 1148 bp, Homo sapiens
  Payload ID: 8577
  Gene Symbol: IVD
  Gene Name: isovaleryl-CoA dehydrogenase
  ENST ID: ENST00000491554
  CDS Start-End: 1-732
gctgacgtcctgattgtctatgccaagacagatctggctgctgtgccagcttctcggggcatcacagccttcattgtggagaagggtatgcctggctttagcacctctaagaagctggacaagctggggatgaggggctctaacacctgtgagctaatctttgaagactgcaagattcctgctgccaacatcctgggccatgagaataagggtgtctacgtgctgatgagtgggctggacctggagcggctggtgctggccggggggcctcttgggctcatgcaagcggtcctggaccacaccattccctacctgcacgtgagggaagcctttggccagaagatcggccacttccagttgatgcaggggaagatggctgacatgtacacccgcctcatggcgtgtcggcagtatgtctacaatgtcgccaaggcctgcgatgagggccattgcactgctaaggactgtgcaggtgtgattctttactcagctgagtgtgccacacaggtagccctggacggcattcagtgttttggccatgcccctcaacccttcctctacactgaaccagtgaactatcaagctccccgcaaattcttcagtggctcccagcacctggcagaccttttccgcccaacacccacctgggagggagggcgagacccgaggtcagacgtccctggagcaggtgagcactgcgagggaactgagatgcaagatcctcctgcctgaactcacaccccgcgtgctgctcccccaactcgcctcttggatctcagaccagaagcttcctttcctcaaaatccttctatgttctccaacgtctttgggacagagctccttggcagggtttacaaagcttaggtggccctacccacttctccagcctcatctgctgcctcacccctataccacagctctgcacctttgctgaaactggtactcggcgcttggggtgtcctcatctttcccctacctatggcagcctgcccgaagagtgcctgctccttcaggctccgctctcggcttagccccttcttggaacgtccccgcacctcaccccagccccttgccaggggcagaccctggcagccttccctcgtcctcagcagccattacgtgttgctgtcataaagttatcactctgt

SEQ ID NO: 144648 - DNA, 819 bp, Homo sapiens
  Payload ID: 8577
  Gene Symbol: IVD
  Gene Name: isovaleryl-CoA dehydrogenase
  ENST ID: ENST00000558610
  CDS Start-End: 182-819
ttggcttttgcccgtgggccgttgggagcgccagcgcgggggcgggacgcggggcctccgacctcgggtccagtcctctgacctcggcctcacgtctgtggagtgaagatttgagaccgtgggacagtactgctggaagtagagaggaggagtcgaggctgggagagctcctgagagactgatggtgttttggtggaggattggccaggctacctaccgcttgtggcacaagggccctcaatctgtatgtagttcacttacacctgaacaggctgagcttcgtcagaccatggctaagttccttcaggagcacctggcccccaaggcccaggagatcgatcgcagcaatgagttcaagaacctgcgagaattttggaagcagctggggaacctgggcgtattgggcatcacagcccctgttcagtatggcggctccggcctgggctacctggagcatgtgctggtgatggaggagatatcccgagcttccggagcagtggggctcagttacggtgcccactccaacctctgcatcaaccagcttgtacgcaatgggaatgaggcccagaaagagaagtatctcccgaagctgatcagtggtgagtacatcggagccctggccatgagtgagcccaatgcaggctctgatgttgtctctatgaagctcaaagcggaaaagaaaggaaatcactacatcctgaatggcaacaagttctggatcactaatggccctgatgctgacgtcctgattgtctatgccaagacagatctggctgctgtgccagcttctcggggcatcacagccttcattgtggagaa

SEQ ID NO: 144649 - DNA, 295 bp, Homo sapiens
  Payload ID: 8577
  Gene Symbol: IVD
  Gene Name: isovaleryl-CoA dehydrogenase
  ENST ID: ENST00000559575
  CDS Start-End: 1-124
ctgcgatgagggccattgcactgctaaggactgtgcaggtgtgattctttactcagctgagtgtgccacacaggtagccctggacggcattcagtgttttgtttctagaggtatcagctcctagcagcttatgaacacatatgcttgcttggccaggcaaggtggtgtgtgcctgtaatcccagcactttgggaggccaaggcaggtggatcacttgcagtcaggagttcaagaccagcctgtccaacgtggtgaaaccccatctctactaaaaatacaaaaattagccaggggt

SEQ ID NO: 144650 - DNA, 428 bp, Homo sapiens
  Payload ID: 8577
  Gene Symbol: IVD
  Gene Name: isovaleryl-CoA dehydrogenase
  ENST ID: ENST00000466756
  CDS Start-End: 1-175
ccattgcactgctaaggactgtgcaggtgtgattctttactcagctgagtgtgccacacaggtagccctggacggcattcagtgttttggccatgcccctcaacccttcctctacactgaaccagtgaactatcaagctccccgcaaattcttcagtggctcccagcacctgtaagatctaaggcttggcaaggcaaatatgactctgatccccctgggccttccccttctgctgcttccctccttccctgctgaatgttcgtgttcttgttgcaaggagtcctcactgccatgtttctcatccctgtgcctttggtctggggcagctctggaagtccttccagcccttcaaactttctcttgcttcctcatctctaaagcctcaggccagggcctgcctccttcaggaagacctctcttctccaacc

SEQ ID NO: 144651 - DNA, 668 bp, Homo sapiens
  Payload ID: 8577
  Gene Symbol: IVD
  Gene Name: isovaleryl-CoA dehydrogenase
  ENST ID: ENST00000610693
  CDS Start-End: 25-668
agtttcagcgctggctcttcgtgcatggcagagatggcgactgcgactcggctgctggggtggcgtgtggcgagctggaggctgcggccgccgcttgccggcttcgtttcccagcgggcccactcgcttttgcccgtggacgatgcaatcaatgggctaagcgaggagcagaggcagcttcgtcagaccatggctaagttccttcaggagcacctggcccccaaggcccaggagatcgatcgcagcaatgagttcaagaacctgcgagtgagttgggaggtccgggcagtcgggggcagtcagggagtggggctgagctgcactgctgcctggaagagctcacacagttttctggaattttggaagcagctggggaacctgggcgtattgggcatcacagcccctgttcagtatggcggctccggcctgggctacctggagcatgtgctggtgatggaggagatatcccgagcttccggagcagtggggctcagttacggtgcccactccaacctctgcatcaaccagcttgtacgcaatgggaatgaggcccagaaagagaagtatctcccgaagctgatcagtggtgagtacatcggagccctggccatgagtgagcccaatgcaggctctgatgttgtctctatgaagctcaaagcggaaaagaa

SEQ ID NO: 144652 - DNA, 2593 bp, Homo sapiens
  Payload ID: 8578
  Gene Symbol: ISM1
  Gene Name: isthmin 1, angiogenesis inhibitor
  Uniprot ID: B1AKI9
  ENST ID: ENST00000262487
  CDS Start-End: 7-1401
aaaaggatggtgcgcctggcggccgagctgctgctgctgctggggctgctgctgctcacgctgcacatcaccgtgctgcgcggctcgggagccgccgacgggcccgacgcggccgcgggcaacgccagccaagcccagctgcagaataacctcaacgtgggaagtgacaccacatcagaaaccagcttttctctctccaaagaagcaccaagggagcatctggaccaccaggctgcacaccaacccttccccagaccgcgattccgacaagagacggggcacccttcattgcaaagagatttccccagatcctttctccttgatctaccaaactttccagatctttccaaagctgatatcaatgggcagaatccaaatatccaggtcaccatagaggtggtcgacggtcctgactctgaagcagataaagatcagcatccggagaataagcccagctggtcagtcccatcccccgactggcgggcctggtggcagaggtccctgtccttggccagggcaaacagcggggaccaggactacaagtacgacagtacctcagacgacagcaacttcctcaacccccccagggggtgggaccatacagccccaggccaccggacttttgaaaccaaagatcagccagaatatgattccacagatggcgagggtgactggagtctctggtctgtctgcagcgtcacctgcgggaacggcaaccagaaacggacccggtcttgtggctacgcgtgcactgcaacagaatcgaggacctgtgaccgtccaaactgcccaggaattgaagacacttttaggacagctgccaccgaagtgagtctgcttgcgggaagcgaggagtttaatgccaccaaactgtttgaagttgacacagacagctgtgagcgctggatgagctgcaaaagcgagttcttaaagaagtacatgcacaaggtgatgaatgacctgcccagctgcccctgctcctaccccactgaggtggcctacagcacggccgacatcttcgaccgcatcaagcgcaaggacttccgctggaaggacgccagcgggcccaaggagaagctggagatctacaagcccactgcccggtactgcatccgctccatgctgtccctggagagcaccacgctggcggcacagcactgctgctacggcgacaacatgcagctcatcaccaggggcaagggggcgggcacgcccaacctcatcagcaccgagttctccgcggagctccactacaaggtggacgtcctgccctggattatctgcaagggtgactggagcaggtataacgaggcccggcctcccaacaacggacagaagtgcacagagagcccctcggacgaggactacatcaagcagttccaagaggccagggaatattaaagagactgggatgaggtggaggacgctgcctctggttctggagcacacacgtgctgcactgacgtgccgactggcgccgagaccttcatagctgcggtcgtgtatatttgtatataccacatgagtatttctcatacattacgctaggggcgtgtgccacgcccaggggactgccttgtgaagccgccctcgccatctgcagagctccttgaaagtgcccctggggagcgatgtgggcagaaggatggggacaacttggaagccagaagaagaacctggaagccacagtgggtgcgactcaattcacacccggatccagagtttcaaagagaggcaaagggggaaagagactgaggttgtaaacgttataagcagtttttatatataacttatttaatacaaatgtgacttaattaagcgtaaccttttctctggagttgtggtgaaactaatcacgtctgtgagagatcagaaagaaagagacttagggaagtggaagagaaagggaattttggaatttatttctttaaaaataatgcaatggaaatatatcaaaacatgtaaacgcccaccttaaaccaaatgttatttggtcatgaggcaccttgctggagtctcagattccaaaagtctcttcttcagactgggtagggaatatgatattttagggacaaagctgaggactggttttaaataggctttaaaataaaagatcaatattatcataatgctatcattctgctaaacggccccaaaacagtagaatttctgctcatgtcctagcaggttcagaagactgcagccaagttcagatgtaaaaacaagaagtagcacttttccaaaggaaaacaacaaaacaaatgggaaaaagataatggaccgcatttcacctattttaatactattttaacaattttttcatctaccaatatatccccaataaataaatataaaagggggggagggtcaatctggggaatcttagttttttatgttttaagaaaacaaaaaaaactgcattatttttgtaaagtatttattgagtcacggattattgtgcatcaagcaattgttaatatgacctggtcctatggggtagaacttaggaaaaataaagttggttcttattcaatattttactttgcaaaattctagtaaaagagagtatataataaaatcataataaaaggtg

SEQ ID NO: 144653 - DNA, 3045 bp, Homo sapiens
  Payload ID: 8579
  Gene Symbol: ISM2
  Gene Name: isthmin 2
  Uniprot ID: Q6H9L7
  ENST ID: ENST00000216481
  CDS Start-End: 24-254
agagcagcctcggaaccgagacgatgcgtgcgctccgcgaccgagccgggctcctcctctgcgtgctgctgctggcggcgctgctggaggcggcgctagggctccccgtgaagaagccgcggctccgcggaccacggcctgggagcctcacgaggctcgcagagccccctttccaggtgcgcgctagctcggagaggagtcccgccggtgcgaggaatctggcgctttgcggagtggcgggccagggccgctgaggttcaaacggtcaggtctcagcctccccagatcctaggcctctgaaggaagaggaggaggcaccactgctccccagaacccacctgcaggcagagccacaccaacatggatgctggactgtcactgagccagcagccatgaccccaggcaacgccacccctcccaggaccccagaggttactccgttgcggctggagctgcagaagctgccgggattggccaacacaaccttgagtacccctaaccctgatacccaggcttcagcctccccagatcctaggcctctgagggaagaggaggaggcacgactgctccccagaacccacctgcaggcagagctacaccaacatggatgttggactgtcactgagccagcagccctgaccccagggaatgccacgcctcccaggacccaggaggttactcccttgctgctggagctgcagaagctgccagaattggtccacgcaaccttgagtacccctaaccctgataaccaggtgaccatcaaggtggtggaggacccccaggccgaggtgtcgatagacctgttggctgagcccagcaatcccccgccccaggatacccttagctggctgcccgccctctggtccttcctctggggagactacaaaggagaggaaaaagacagggccccaggggagaagggggaggaaaaggaggaagacgaggactatccttcagaggatatcgagggtgaggatcaagaggacaaagaggaagatgaggaagagcaggcgctctggttcaatggaactacagacaactgggaccagggctggctggcccccggggattgggtcttcaaggattctgtcagctacgactatgagcctcagaaggagtggagtccctggtctccctgcagtgggaactgcagcactggcaagcagcagaggactcggccctgtggctatggctgcactgccaccgagacccgtacctgtgacctgccctcctgtcctggcactgaggacaaggacaccttgggcctccccagtgaggagtggaagctcctggcccgcaatgctacggacatgcatgatcaagatgtggacagctgtgagaagtggctgaactgcaagagcgacttcctaatcaagtatctgagccagatgctgcgggacctgcccagctgcccgtgtgcctacccactggaggccatggacagccctgtgagcctacaggacgagcaccagggccgcagcttccggtggagggatgccagtggccctcgcgagcgcctggacatctaccagcccacggcgcgcttctgcctgcgttccatgctgtctggggagagcagcacactggccgcccagcactgctgctatgacgaggacagccggctgctgacccgtggcaagggcgccggcatgcccaacctcatcagcaccgacttctcacctaagctgcacttcaagttcgacacgacgccctggatcctgtgcaagggggactggagccgcctccacgctgtgctccctcccaacaacggccgagcctgcaccgacaaccccctggaggaggagtacctagcacagttgcaggaggccaaggagtactagtgacggggttgctgaacagacactgcagggagagggcaggcggctgctgctgttgcacgggagaactttcctcacccgcccctgcccagacagggtgaggaaagggctcccccagtgaggttggtccgaggctgtgtgccctctgccagcgaccccgaagcagatatctcagtggggttagtgagaaggttgaagggtatgtagggcccagggtgggtgtccctgggagccctggaaatgtgcatatgtgcatgtgtctgccggggcctccctctgctgcctgctgggaccctggccactcatttttctcctccttgggagctgggctcttctgccctggctctgcacataagtgttagccagcagctccagaaaaatcccgattcccgggatctgccacgagtcactcctactccaccctgatggccagcagaggaagggccactcttctcatgggcacagccatcctttgccggggggggcatccagcctgggtggccacccctccttatctctgggtggtgcacatgcccttctttccccactccctgccacgagccactgcacaggaggctatctgtagccccaagctgcctttctgttggacaccaactttagtcttgggctgcaagccagcccagctgaggcgaagtggactccaggcagggaatgggttgcccaattctggtccctttcctttgctcagccccctctgttctgctgattgtagggatgtgcagggctgggagttggcactccccccgagtggggaggtgacagcttgtcacagtagccaggcttgggtgggttcagcactagctcgggacggtgtgtcacacgtctatagtaaaccagttctctgggaggggaaaaaagccctgatttattgcatttgggcagcttctgtggtgtaaattctcccagcagtgtcccatgtcatgctgccagcatcactgaatgcactgaactcagagttgggaagagatgcacataatcgctctcccggcacacctcatgcctcttccctgcctccccattcccctggctgcacttccttgccttctatggggttgaaatattgaagtctcaactgtctctgttcacaagagccaccaaaagttaggggacttcagtcctagcccccagatggccgccctgaagctctctgggctcctcagcaataaagcactttattttcaaa

SEQ ID NO: 144654 - DNA, 2971 bp, Homo sapiens
  Payload ID: 8579
  Gene Symbol: ISM2
  Gene Name: isthmin 2
  Uniprot ID: Q6H9L7
  ENST ID: ENST00000342219
  CDS Start-End: 58-1773
gactgggttcgcggccgcgtgcagaggtgcaggcagagcagcctcggaaccgagacgatgcgtgcgctccgcgaccgagccgggctcctcctctgcgtgctgctgctggcggcgctgctggaggcggcgctagggctccccgtgaagaagccgcggctccgcggaccacggcctgggagcctcacgaggctcgcagaggtctcagcctccccagatcctaggcctctgaaggaagaggaggaggcaccactgctccccagaacccacctgcaggcagagccacaccaacatggatgctggactgtcactgagccagcagccatgaccccaggcaacgccacccctcccaggaccccagaggttactccgttgcggctggagctgcagaagctgccgggattggccaacacaaccttgagtacccctaaccctgatacccaggcttcagcctccccagatcctaggcctctgagggaagaggaggaggcacgactgctccccagaacccacctgcaggcagagctacaccaacatggatgttggactgtcactgagccagcagccctgaccccagggaatgccacgcctcccaggacccaggaggttactcccttgctgctggagctgcagaagctgccagaattggtccacgcaaccttgagtacccctaaccctgataaccaggtgaccatcaaggtggtggaggacccccaggccgaggtgtcgatagacctgttggctgagcccagcaatcccccgccccaggatacccttagctggctgcccgccctctggtccttcctctggggagactacaaaggagaggaaaaagacagggccccaggggagaagggggaggaaaaggaggaagacgaggactatccttcagaggatatcgagggtgaggatcaagaggacaaagaggaagatgaggaagagcaggcgctctggttcaatggaactacagacaactgggaccagggctggctggcccccggggattgggtcttcaaggattctgtcagctacgactatgagcctcagaaggagtggagtccctggtctccctgcagtgggaactgcagcactggcaagcagcagaggactcggccctgtggctatggctgcactgccaccgagacccgtacctgtgacctgccctcctgtcctggcactgaggacaaggacaccttgggcctccccagtgaggagtggaagctcctggcccgcaatgctacggacatgcatgatcaagatgtggacagctgtgagaagtggctgaactgcaagagcgacttcctaatcaagtatctgagccagatgctgcgggacctgcccagctgcccgtgtgcctacccactggaggccatggacagccctgtgagcctacaggacgagcaccagggccgcagcttccggtggagggatgccagtggccctcgcgagcgcctggacatctaccagcccacggcgcgcttctgcctgcgttccatgctgtctggggagagcagcacactggccgcccagcactgctgctatgacgaggacagccggctgctgacccgtggcaagggcgccggcatgcccaacctcatcagcaccgacttctcacctaagctgcacttcaagttcgacacgacgccctggatcctgtgcaagggggactggagccgcctccacgctgtgctccctcccaacaacggccgagcctgcaccgacaaccccctggaggaggagtacctagcacagttgcaggaggccaaggagtactagtgacggggttgctgaacagacactgcagggagagggcaggcggctgctgctgttgcacgggagaactttcctcacccgcccctgcccagacagggtgaggaaagggctcccccagtgaggttggtccgaggctgtgtgccctctgccagcgaccccgaagcagatatctcagtggggttagtgagaaggttgaagggtatgtagggcccagggtgggtgtccctgggagccctggaaatgtgcatatgtgcatgtgtctgccggggcctccctctgctgcctgctgggaccctggccactcatttttctcctccttgggagctgggctcttctgccctggctctgcacataagtgttagccagcagctccagaaaaatcccgattcccgggatctgccacgagtcactcctactccaccctgatggccagcagaggaagggccactcttctcatgggcacagccatcctttgccggggggggcatccagcctgggtggccacccctccttatctctgggtggtgcacatgcccttctttccccactccctgccacgagccactgcacaggaggctatctgtagccccaagctgcctttctgttggacaccaactttagtcttgggctgcaagccagcccagctgaggcgaagtggactccaggcagggaatgggttgcccaattctggtccctttcctttgctcagccccctctgttctgctgattgtagggatgtgcagggctgggagttggcactccccccgagtggggaggtgacagcttgtcacagtagccaggcttgggtgggttcagcactagctcgggacggtgtgtcacacgtctatagtaaaccagttctctgggaggggaaaaaagccctgatttattgcatttgggcagcttctgtggtgtaaattctcccagcagtgtcccatgtcatgctgccagcatcactgaatgcactgaactcagagttgggaagagatgcacataatcgctctcccggcacacctcatgcctcttccctgcctccccattcccctggctgcacttccttgccttctatggggttgaaatattgaagtctcaactgtctctgttcacaagagccaccaaaagttaggggacttcagtcctagcccccagatggccgccctgaagctctctgggctcctcagcaataaagcactttattttc

SEQ ID NO: 144655 - DNA, 913 bp, Homo sapiens
  Payload ID: 8579
  Gene Symbol: ISM2
  Gene Name: isthmin 2
  ENST ID: ENST00000471734
  CDS Start-End: 1-221
cgaggctcgcagaggtgagtggcggcggcaccgggctgcggagcgcgctgtcggtcccacctccccagcccgccggctccagccgtgcggggagcgggaccgggacacacacaggcagcgaccccccgatggagagaggggccggggccggccggaagctcccggacaccgggcgttgcccaggtgcgccggacttcggggcttccactcctcgcgcgtgaccgcgagccgggctgccgcggaccagccgggtgacaagtttgacttctgtgcggagtgaggtggccgacactccacggtggccgggcttcctcgccctgagcggacctcgcctgcagccccctttccaggtctcagcctccccagatcctaggcctctgaaggaagaggaggaggcaccactgctccccagaacccacctgcaggcagagccacaccaacatggatgctggactgtcactgagccagcagccatgaccccaggcaacgccacccctcccaggaccccagaggttactccgttgcggctggagctgcagaagctgccgggattggccaacacaaccttgagtacccctaaccctgatacccaggcttcagcctccccagatcctaggcctctgagggaagaggaggaggcacgactgctccccagaacccacctgcaggcagagctacaccaacatggatgttggactgtcactgagccagcagccctgaccccagggaatgccacgcctcccaggacccaggaggttactcccttgctgctggagctgcagaagctgccagaattggtccacgcaaccttgagtacccctaaccctgataaccaggtgaccatcaaggtggtggaggacccccaggccgaggtgtcgatagacctgttggctgagcccagcaatcccccgcc

SEQ ID NO: 144656 - DNA, 944 bp, Homo sapiens
  Payload ID: 8579
  Gene Symbol: ISM2
  Gene Name: isthmin 2
  ENST ID: ENST00000480979
  CDS Start-End: 1-313
ctgcgtgctgctgctggcggcgctgctggaggcggcgctagggctccccgtgaagaagccgcggctccgcggaccacggcctgggagcctcacgaggctcgcagaggtgagtggcggcggcaccgggctgcggagcgcgctgtcggtcccacctccccagcccgccggctccagccgtgcggggagcgggaccgggacacacacaggcagcgaccccccgatggagagaggggccggggccggccggaagctcccggacaccgggcgttgcccaggtgcgccggacttcggggcttccactcctcgcgcgtgaccgcgagccgggctgccgcggaccagccgggtgacaagtttgacttctgtgcggagtgaggtggccgacactccacggtggccgggcttcctcgccctgagcggacctcgcctgcagccccctttccaggtgcgcgctagctcggagaggagtcccgccggtgcgaggaatctggcgctttgcggagtggcgggccagggccgctgaggttcaaacggtcaggtctcagcctccccagatcctaggcctctgaaggaagaggaggaggcaccactgctccccagaacccacctgcaggcagagccacaccaacatggatgctggactgtcactgagccagcagccatgaccccaggcaacgccacccctcccaggaccccagaggttactccgttgcggctggagctgcagaagctgccgggattggccaacacaaccttgagtacccctaaccctgatacccaggcttcagcctccccagatcctaggcctctgagggaagaggaggaggcacgactgctccccagaacccacctgcaggcagagctacaccaacatggatgttggactgtcactgagccagcagccctgaccccagggaatgccacgcctcccaggacccaggaggtta

SEQ ID NO: 144657 - DNA, 1739 bp, Homo sapiens
  Payload ID: 8579
  Gene Symbol: ISM2
  Gene Name: isthmin 2
  Uniprot ID: Q6H9L7
  ENST ID: ENST00000493585
  CDS Start-End: 24-902
agagcagcctcggaaccgagacgatgcgtgcgctccgcgaccgagccgggctcctcctctgcgtgctgctgctggcggcgctgctggaggcggcgctagggctccccgtgaagaagccgcggctccgcggaccacggcctgggagcctcacgaggctcgcagaggtctcagcctccccagatcctaggcctctgaaggaagaggaggaggcaccactgctccccagaacccacctgcaggcagagccacaccaacatggatgctggactgtcactgagccagcagccatgaccccaggcaacgccacccctcccaggaccccagaggttactccgttgcggctggagctgcagaagctgccgggattggccaacacaaccttgagtacccctaaccctgatacccaggcttcagcctccccagatcctaggcctctgagggaagaggaggaggcacgactgctccccagaacccacctgcaggcagagctacaccaacatggatgttggactgtcactgagccagcagccctgaccccagggaatgccacgcctcccaggacccaggaggttactcccttgctgctggagctgcagaagctgccagaattggtccacgcaaccttgagtacccctaaccctgataaccagactatgagcctcagaaggagtggagtccctggtctccctgcagtgggaactgcagcactggcaagcagcagaggactcggccctgtggctatggctgcactgccaccgagacccgtacctgtgacctgccctcctgtcctggcactgaggacaaggacaccttgggcctccccagtgaggagtggaagctcctggcccgcaatgctacggacatgcatgatcaagatgtggacagctgtgagaagtggctgaactgcaagagcgacttcctaatcaagtatctgagccagatgctgcgggacctgcccagctgcccgtgtgcctacccactggaggccatggacagccctgtgagcctacaggacgagcaccagggccgcagcttccggtggagggatgccagtggccctcgcgagcgcctggacatctaccagcccacggcgcgcttctgcctgcgttccatgctgtctggggagagcagcacactggccgcccagcactgctgctatgacgaggacagccggctgctgacccgtggcaagggcgccggcatgcccaacctcatcagcaccgacttctcacctaagctgcacttcaagttcgacacgacgccctggatcctgtgcaagggggactggagccgcctccacgctgtgctccctcccaacaacggccgagcctgcaccgacaaccccctggaggaggagtacctagcacagttgcaggaggccaaggagtactagtgacggggttgctgaacagacactgcagggagagggcaggcggctgctgctgttgcacgggagaactttcctcacccgcccctgcccagacagggtgaggaaagggctcccccagtgaggttggtccgaggctgtgtgccctctgccagcgaccccgaagcagatatctcagtggggttagtgagaaggttgaagggtatgtagggcccagggtgggtgtccctgggagccctggaaatgtgcatatgtgcatgtgtctgccggggcctccctctgctgcctgctgggaccctggccactcatttttctcctccttgggagctgggctcttctgccctggctctgc

SEQ ID NO: 144658 - DNA, 579 bp, Homo sapiens
  Payload ID: 8579
  Gene Symbol: ISM2
  Gene Name: isthmin 2
  ENST ID: ENST00000554801
  CDS Start-End: 24-579
agagcagcctcggaaccgagacgatgcgtgcgctccgcgaccgagccgggctcctcctctgcgtgctgctgctggcggcgctgctggaggcggcgctagggctccccgtgaagaagccgcggctccgcggaccacggcctgggagcctcacgaggctcgcagaggtctcagcctccccagatcctaggcctctgaaggaagaggaggaggcaccactgctccccagaacccacctgcaggcagagccacaccaacatggatgctggactgtcactgagccagcagccatgaccccaggcaacgccacccctcccaggaccccagaggttactccgttgcggctggagctgcagaagctgccgggattggccaacacaaccttgagtacccctaaccctgatacccaggtgaccatcaaggtggtggaggacccccaggccgaggtgtcgatagacctgttggctgagcccagcaatcccccgccccaggatacccttagctggctgcccgccctctggtccttcctctggggagactacaaaggagaggaaaaagacagggccccaggggagaaggggg

SEQ ID NO: 144659 - DNA, 1704 bp, Homo sapiens
  Payload ID: 8580
  Gene Symbol: ISY1
  Gene Name: ISY1 splicing factor homolog
  Uniprot ID: Q9ULR0
  ENST ID: ENST00000273541
  CDS Start-End: 74-997
cggcgtcttctgggcctgtggagtttcttggacaggggccgcggggctccaggacggcgcccttagcgacaccatggcccgaaatgcagaaaaggccatgacggccttagcaagatttcgccaggctcagctggaagagggaaaagtgaaggaacgaagaccctttctggcctcagaatgtactgaactgcctaaagctgagaagtggagacgacagatcattggagagatctctaaaaaagtggctcagattcagaatgctggtttaggtgaatttcgaattcgtgacctgaatgatgaaattaacaagctgctaagggagaaaggacactgggaggtccggataaaggagctgggaggtcctgattatggaaaagttggccctaaaatgctggatcatgaaggaaaagaagtcccaggaaaccgaggttacaagtactttggagcagcaaaagatttgcctggtgttagagagctgtttgaaaaagaacgccaggtgcggtggctcatgcctgtaatcccagcactttgggaggctgaggcgggcggatcacaagctcttcctcctcccagaaagacacgtgctgagctcatgaaggcaatcgattttgagtactatggttacctagatgaagatgatggtgttattgtgcctttggaacaggaatatgaaaagaaactcagagccgagttagtggaaaagtggaaagcagagagagaggctcggctggcaagaggagaaaaggaagaggaggaggaagaggaggaagagatcaacatctatgcagtcaccgaggaggagtcggacgaggaaggcagccaggagaaaggaggggacgacagccagcagaagttcattgctcacgtccctgttccctcgcagcaagagattgaggaggcactggtgcgaaggaagaaaatggaactcctccagaagtatgcaagcgagaccctgcaggcccaaagtgaagaagccagaaggctcctggggtattaggacccagctggggctctccttggagttcttccatcccccagtggtacctcaggacccagggctgcagacacaggctggtgctgcaagggctcctgccccattctcagccttccttccctctccttgtctcatgttgaccggagggtaggggtctgtccctggtcttcctggtaggttttgtacacatattttgctactgtgtggatccatttatttttattgtggagtgtatacaacaggttgcgaactggctgcctgtgtcttattttgacttgcactgccattttgaggggagaagaatcaattagtggcaaacatttaaaaatgcaattttttgcagaccaaagtataattttaaaaaatgcaaattttctaaaagacacatctcttgaaaaatgagatgatgtggccaggcgcagtggctcacgcctgtaaccccagcactttgggaggccgaggcgggcgggtcacgaggtcaagagatggagaccatcctggccaacatggtgaaaccccatgtctactaaaaatacaaaaaaattagctgggcgtactggcatgcacctgtagtcccagctgcttgggaggctgaggcaggagaatcacttgaacccgagaggtggaggttgaagtgagccaagatcgtgccattgcactccagcctggcgacagagtgagactctgtcccaaaaaaaaaaaaaaaaaaa

SEQ ID NO: 144660 - DNA, 988 bp, Homo sapiens
  Payload ID: 8580
  Gene Symbol: ISY1
  Gene Name: ISY1 splicing factor homolog
  ENST ID: ENST00000393292
  CDS Start-End: 63-821
gggcctgtggagtttcttggacaggggccgcggggctccaggacggcgcccttagcgacaccatggcccgaaatgcagaaaaggccatgacggccttagcaagatttcgccaggctcagctggaagagggaaaagtgaaggaacgaagaccctttctggcctcagaatgtactgaactgcctaaagctgagaagtggagacgacagatcattggagagatctctaaaaaagtggctcagattcagaatgctggtttaggtgaatttcgaattcgtgacctgaatgatgaaattaacaagctgctaagggagaaaggacactgggaggtccggataaaggagctgggaggtcctgattatggaaaagttggccctaaaatgctggatcatgaaggaaaagaagtcccaggaaaccgaggttacaagtactttggagcagcaaaagatttgcctggtgttagagagctgtttgaaaaagaacctcttcctcctcccagaaagacacgtgctgagctcatgaaggcaatcgattttgagtactatggttacctagatgaagatgatggtgttattgtgcctttggaacaggaatatgaaaagaaacgtagtcagagccgagttagtggaaaagtggaaagcagagagagaggctcggctggcaagaggagaaaaggaagaggaggaggaagaggaggaagagatcaacatctatgcagtcaccgaggaggagtcggacgaggaaggcagccaggagaaaggaggggacgacagccagcagaagttcattgctcacgtccctgttccctcgcagcaagagattgaggaggcactggtgcgaaggaagaaaatggaactcctccagaagtatgcaagcgagaccctgcaggcccaaagtgaagaagccagaaggctcctggggtattaggacccagctggggctctccttggagttcttccatcccccagtggtacctcaggacccagggctg

SEQ ID NO: 144661 - DNA, 3842 bp, Homo sapiens
  Payload ID: 8580
  Gene Symbol: ISY1
  Gene Name: ISY1 splicing factor homolog
  Uniprot ID: Q9ULR0
  ENST ID: ENST00000393295
  CDS Start-End: 319-1176
tcctcagttcctgcgagcgtcggcttcgtccgggcacttccagtactctcattcacttcctgtccctttcttttacgtttccgacaaaacagtgtctgtgggcagttagaatcttcagtttctgtgagcgtccgcttcgtctgggcacttccggtactcccattcagttccggtccctgtcttttacgtttccggcaaaacatcagtgtctgtgggtagttggaatcttcagttcctgtgagcgtcggcgtcttctgggcctgtggagtttcttggacaggggccgcggggctccaggacggcgcccttagcgacaccatggcccgaaatgcagaaaaggccatgacggccttagcaagatttcgccaggctcagctggaagagggaaaagtgaaggaacgaagaccctttctggcctcagaatgtactgaactgcctaaagctgagaagtggagacgacagatcattggagagatctctaaaaaagtggctcagattcagaatgctggtttaggtgaatttcgaattcgtgacctgaatgatgaaattaacaagctgctaagggagaaaggacactgggaggtccggataaaggagctgggaggtcctgattatggaaaagttggccctaaaatgctggatcatgaaggaaaagaagtcccaggaaaccgaggttacaagtactttggagcagcaaaagatttgcctggtgttagagagctgtttgaaaaagaacctcttcctcctcccagaaagacacgtgctgagctcatgaaggcaatcgattttgagtactatggttacctagatgaagatgatggtgttattgtgcctttggaacaggaatatgaaaagaaactcagagccgagttagtggaaaagtggaaagcagagagagaggctcggctggcaagaggagaaaaggaagaggaggaggaagaggaggaagagatcaacatctatgcagtcaccgaggaggagtcggacgaggaaggcagccaggagaaaggaggggacgacagccagcagaagttcattgctcacgtccctgttccctcgcagcaagagattgaggaggcactggtgcgaaggaagaaaatggaactcctccagaagtatgcaagcgagaccctgcaggcccaaagtgaagaagccagaaggctcctggggtattaggacccagctggggctctccttggagttcttccatcccccagtggtacctcaggacccagggctgcagacacaggctggtgctgcaagggctcctgccccattctcagccttccttccctctccttgtctcatgttgaccggagggtaggggtctgtccctggtcttcctggtaggttttgtacacatattttgctactgtgtggatccatttatttttattgtggagtgtatacaacaggttgcgaactggctgcctgtgtcttattttgacttgcactgccattttgaggggagaagaatcaattagtggcaaacatttaaaaatgcaattttttgcagaccaaagtataattttaaaaaatgcaaattttctaaaagacacatctcttgaaaaatgagatgatgtggccaggcgcagtggctcacgcctgtaaccccagcactttgggaggccgaggcgggcgggtcacgaggtcaagagatggagaccatcctggccaacatggtgaaaccccatgtctactaaaaatacaaaaaaattagctgggcgtactggcatgcacctgtagtcccagctgcttgggaggctgaggcaggagaatcacttgaacccgagaggtggaggttgaagtgagccaagatcgtgccattgcactccagcctggcgacagagtgagactctgtcccaaaaaaaaaaaaaaaaaaagatgcacgcaacccacaagtcaatgaccaggtccctctgtgttggttgctgctctgggctctccgttagcccccctccacctgctccactcgctcctgcctgggtggcaggaatttgagtttgctattcctgttttataacctgttctgcagaaacctatttttattaaagatttttataagaaagggaaacctccatgtcttcagcttgttccctgggccaacggctctgaggtgacagtggcattaggatgtgaccagtcactaaggggcactgccttcctgcaggggagtccctgaagccccagccccaagtgtggcaaagacaggaccagatcccaggagtctaggtgggagtgagccgacccaccatggcgtccgtggccacagctgtagacagggctccttgcagtgggctgcaccgtggcctgctgaaagcacacagtggacacgagctgagtccagagcttcctctgaactggggcttagctctccagtggggaaccatggtcagcggctgtagcccctgggcaagatggtgcctggcttcctgccctctgcagggtcatgggagtgtctgggaactcagggtcagggccagatggctgttcctggggcctggggctccagctcaggctgtttgggaataggaggaactcttggcttggagaagcccatcacacagcgggaggcctgggatggttggtctgcggggagcagctcagactgggggtggcagagccgtgtgtggctgtgtgtggccaagtcgggagagtggccagtgctgggccctctctaaggagcccgagggccacaaggactgtggaaaaggtctgagtgagggagtcgggagctagtggctaagggacttgcttgaggacgctccgtgcggccacaaggagaggcccaggcaggaccaggtcaggaggaggctggggcagaggccctggcaggaggtgggtgggcttggtggggatgggagtagccagggtgtaggtgaggatggggaaggggcccccctgcctcctggcttccctgagggctgggctggccaatcccagccctcagtcaagcccggaggcaaatgtgtgcagggaggagaggtgtccaggttgaagctttgggagcccttggaggcagcaaggcagactcgcctctgggacccagcacccagcttgggcctgcaggtggggactcaggagtgaatatcgtgggggctttgagcaagaccctctgggcccagcctcaccttccatactttgaagtcaaggagtggacctgtgctgtctcagtttgctctggggtctgggcagtcctgtggtttgggcagaggcctcagagggccctagggacagactgacccaggtctgagcctcttgggagcgtgcggatggccggcctcagacaggcctggttgtgggtttgtcttccaaggggcacacgcgcactctggtgcttcctggcattcagaagagaatggggaatccagacatcaggccttccttctccctgggaaggatggcaggtgcttggagccaggcctgtcttgagagccagggctctgggtcttcctcctccagtgccctgttccacgccttcagtgcacaaagcactcccctcctgggatctcttcagggatccccgggatgcaaactggccagggattagaattccacatttgagcaaacagactgagagtggagaagcacccagctggacatcctctaggtgttcctggcagaggcccttgctacttgtctgtgcccaaaggccctagagggtcctagatgtgggacaaggtctcagcagggctccagtcccaggcctggaaacagctgggggtgggggaagctggctgggtgggtgtggttatcttttcccagcttgtggctccgaggtgacagaaccaatctcaggaggctttgtttggttaataaaatctactgaatggtttatttta

SEQ ID NO: 144662 - DNA, 837 bp, Homo sapiens
  Payload ID: 8580
  Gene Symbol: ISY1
  Gene Name: ISY1 splicing factor homolog
  ENST ID: ENST00000485703
  CDS Start-End: 54-428
gagtttcttggacaggggccgcggggctccaggacggcgcccttagcgacaccatggcccgaaatgcagaaaaggccatgacggccttagcaagatttcgccaggctcagctggaagagggaaaagtgaaggaacgaagaccctttctggcctcagaatgtactgaactgcctaaagctgagaagtggagacgacagatcattggagagatctctaaaaaagtggctcagattcagaatgctggtttaggtgaatttcgaattcgtgacctgaatgatgaaattaacaagctgctaagggagaaaggacactgggaggtccggataaaggagctgggaggtcctgattatggatatatgtcctgccagagtgagcccttgcctgatctcttcagcagttgtgtggtggagattttatttttcctgtgaggcagcttaaaagcagctcattaatccacctagaaaagtggtctcagaaagttggccctaaaatgctggatcatgaaggaaaagaagtcccaggaaaccgaggttacaagtactttggagcagcaaaagatttgcctggtgttagagagctgtttgaaaaagaacctcttcctcctcccagaaagacacgtgctgagctcatgaaggcaatcgattttgagtactatggttacctagatgaagatgatggtgttattgtgcctttggaacaggaatatgaaaagaaactcagagccgagttagtggaaaagtggaaagcagagagagaggctcggctggcaagaggagaaaaggaagaggaggaggaagaggaggaagagatcaacatctatgcagtcaccgaggagga

SEQ ID NO: 144663 - DNA, 752 bp, Homo sapiens
  Payload ID: 8580
  Gene Symbol: ISY1
  Gene Name: ISY1 splicing factor homolog
  ENST ID: ENST00000496163
  CDS Start-End: 1-447
gctggtttaggtgaatttcgaattcgtgacctgaatgatgaaattaacaagctgctaagggagaaaggacactgggaggtccggataaaggagctgggaggtcctgattatggaaaagttggccctaaaatgctggatcatgaaggaaaagaagtcccaggaaaccgaggttacaagtactttggagcagcaaaagatttgcctggtgttagagagctgtttgaaaaagaacctcttcctcctcccagaaagacacgtgctgagctcatgaaggcaatcgattttgagtactatggttacctagatgaagatgatggtgttattgtgcctttggaacaggaatatgaaaagaaactcggacgaggaaggcagccaggagaaaggaggggacgacagccagcagaagttcattgctcacgtccctgttccctcgcagcaagagattgaggaggcactggtgcgaaggaagaaaatggaactcctccagaagtatgcaagcgagaccctgcaggcccaaagtgaagaagccagaaggctcctggggtattaggacccagctggggctctccttggagttcttccatcccccagtggtacctcaggacccagggctgcagacacaggctggtgctgcaagggctcctgccccattctcagccttccttccctctccttgtctcatgttgaccggagggtaggggtctgtccctggtcttcctggtaggttttgtacacatattttgctactgtgt

SEQ ID NO: 144664 - DNA, 4868 bp, Homo sapiens
  Payload ID: 8581
  Gene Symbol: ISY1-RAB43
  Gene Name: ISY1-RAB43 readthrough
  ENST ID: ENST00000418265
  CDS Start-End: 62-1057
ggcctgtggagtttcttggacaggggccgcggggctccaggacggcgcccttagcgacaccatggcccgaaatgcagaaaaggccatgacggccttagcaagatttcgccaggctcagctggaagagggaaaagtgaaggaacgaagaccctttctggcctcagaatgtactgaactgcctaaagctgagaagtggagacgacagatcattggagagatctctaaaaaagtggctcagattcagaatgctggtttaggtgaatttcgaattcgtgacctgaatgatgaaattaacaagctgctaagggagaaaggacactgggaggtccggataaaggagctgggaggtcctgattatggaaaagttggccctaaaatgctggatcatgaaggaaaagaagtcccaggaaaccgaggttacaagtactttggagcagcaaaagatttgcctggtgttagagagctgtttgaaaaagaacctcttcctcctcccagaaagacacgtgctgagctcatgaaggcaatcgattttgagtactatggttacctagatgaagatgatggtgttattgtgcctttggaacaggaatatgaaaagaaactcagagccgagttagtggaaaagtggaaagcagagagagaggctcggctggcaagaggagaaaaggaagaggaggaggaagaggaggaagagatcaacatctatgcagtcaccgaggaggagtcggacgaggaaggcagccaggagaaaggaggggacgacagccagcagaagttcattgctcacgtccctgttccctcgcagcaagagattgaggaggcactggtgcgaaggaagaaaatggaactcctccagaagtatgcaagcgagaccctgcaggcccaaagtgaagaagccagaaggctcctgggctgcagatctgggacacggccggccaggagcggttccgcaccatcacccagagctactaccgcagtgccaatggggccatccttgcctacgacatcaccaagaggagctccttcctgtcggtgcctcactggattgaggatgtgaggaagtatgcgggctccaacattgtgcagctgctgatcgggaacaagtcagacctcagcgagcttcgggaggtctccttggctgaggcacagagcctggctgagcactatgacatcctgtgtgccattgagacgtctgccaaggactcgagcaacgtggaggaggccttcctgagggtggccacggagctcatcatgcggcacgggggccccttgttcagcgagaagagccccgaccacatccagctgaacagcaaggacatcggagaaggctggggctgcgggtgctgaccaggggccgggccggcagactgggggttccccacctccttgctctccccagcctgccaagcccagccctccagagccagccctcctgggtaccggcaactacagcagccgggtgaagctctggagctctgcatcctgtggcctggctgcgggatggaggctctccttgaggaaggggaagcaggataccctggcgggccaccctgccagccagcagctggccctccaccatcttcacattccaagactggcctgaacccgccggtgtgggccacagtaggaggggccagcagtcctccctgtcccatgcctgctggctctgaccgtttcctctcatgggtttgctttacctgtggcagcaggttgctgctttccagggatgtgtccagtgccctgggttcttcccggtcatcctggggctctgcacagagcagcagagctagagccatgagacccacagacttggtgcctgagcgcagctccagggaagccccagccccttccaggcggggaacctgcttcctgccttcactgcccccgcagcactcacagacatctccctggggtctggctcactgccttatcaggacctctgagttttctgactttctgtgtagcttctcattttcatcagcacagcatggggtcacggcccacagctaggtggggtcacggcccacagctaggtggggactgtctgctggctcagggcccagtgttttgccactcaggttgcaaaattagctaatccttcagtgccagcactcagaagtctggcaggtgggggaatgagatgagaaagtggacatttaaggtccaagtagaagcttgcatccttgaggctcagggatgagagggcaccgcaaggcacccagccttaccccacaagcaggaatcctgccagccgagcgtgggtcccagtctatggaatcgagtctcccagacaaaaaaggagaggccctggcggtccttggcctggcccattttattccctggacccttaactgcctcaccctgagctgggcaccaaggttagaaggcaaaagtggggtagggggatgtgggaagcagcattgtcctctgggcatgtggctcagaggtatcacagtgacaaaagagccagggctagggctggaggggccaggtgatcttccttagccaatcccagtccgtctgtgtcagcccagctctgcctcgcagccccctcagcatgggtgcccccagaagtaagcagctcttggacccacgagcagggctgcgtcggtttgtggtctagctcccaggggcaggccaggcatggctcagtgcagtccctgggccagtgagaggcctcccccatgcctccctgccctctgcactaagcactttccaggcaggcctggccatagggcaagagcaggccttacagcagtgccacggtgacccaagaggcagggttggggcctggacagggtttcctctgctgagactgagacaagcagggcttgatgctggtggtggagccagcatctcacctgccaggcttccttttgggcagggaggctacctgtggaatggctgagcctggttctgcaggggaggaaggctgccaggagctgaggggctagcacctgcattgaggggagtctgggtgcatcagattggggggcgccagaggcgaggctgcctggctccctttctcagcagctttgcttgtggcaggggtgagagtggagctgagtggggtctgggctctgcccctgcgcctccactgcagtgcctgggctccccttgcagggcagacagtgcctggcactgaggggtgcccccagaccccgctgggactggatgtgccgtgggcagtgccttcctccagcctcacaacctttctgctggggctgaagtttctggggtcacatggtcagaaggggctgagctggtctttcactgcaggcccactctgaaagagaaatcccatgaagcctgtccttgcagagcccctctgtttttgggggaacagggagcattcacagggtcttgggaacaaaggcctgggcctccccgtttgaatttcagccccagttccagggcaagtcccagccacccaagcatacttaccagtactgcccaccaccacccactgcccacctctaagaagcccggctctcctactctgcttccaggctggggcctcacaggtggggctgttaccttcctcagggcttagggagggagggaggacatggacagggccttccaccctggctccttcacagggatggtagctgaccggtgatgggttcatttgtcaccttggactgtgagccacttccacttctcgccccccaggcaggagcaccctcactccaagggcttggcctggaaaggcaggctcacctgggactcaacgttccttcccccgccgccactgtgccccccgtccctccaccccagaagccctgacctcatttgggcaccttgctgtcctctgggcttctcctctgcccaggtcaccctgtggcaggcctgggccctcaggatgtttcaaaggctccacagctccaccgctccacctggcttcactccagcaccctgtccctggagcacctctgtcctgtctgggccaacctggtctccctgccccatgccctcccctggctcttagcaacctgcccttttattcatgccatttggggtcacagatgcctagctggacacagctcccagaactggctccaccctggggccttgcccctagtaccccctggcaggagcaacccaccccatggtcgaggttcccctacccctggatcctggactgaagccatttcctacagagaagcgttcccaccccctctcaggcacaaaagccggtgtccagggactcaagacctgtacctggggttgcaggggctcctgccctgctgtatcccaccaggagggggccccactgcccttccggcccttaaaactgggctgggagagaagacggggaagtgtgtgagacaaaacaaagccggcttgtttcctccccttggcaggctaagctctcccggcagcccgggctctggggcggaaggagaacagtgtcatctcttcctttgttgataaattgccaaagagtgggaacaggtggggtcaggggccagagtgcaggggagggggcaatggtggaggtggcggggggaagcagagggaggtgggctgaggcctcggtggggccagtgcgacgctggcttaaggagctggaggggttcctaatacacatttaattcagtttctcttccctaagaggctgccggagttggggcctcctccagcagagaccctcggacccctgcagggcctggacttggggtgaacagggcttcagtcagcgcaagtattccatttgcatttggtaatttttcatgccacctatttatgaatatataaatctttataccaaatctattttttaaaacatggaaaagttgcctttatggaaacttggcagagccagagtgtacacattcctaaaccattaaacagatttctataac

SEQ ID NO: 144665 - DNA, 3089 bp, Homo sapiens
  Payload ID: 8582
  Gene Symbol: ITCH
  Gene Name: itchy E3 ubiquitin protein ligase
  Uniprot ID: Q96J02
  ENST ID: ENST00000262650
  CDS Start-End: 137-2848
gtctagggactgaggagtcgccgccgccccgagtcccggtaccatgcatttcacggtggccttgtggagacaacgccttaacccaaggaagtgactcaaactgtgagaacttcaggttttccaacctattggtggtatgtctgacagtggatcacaacttggttcaatgggtagcctcaccatgaaatcacagcttcagatcactgtcatctcagcaaaacttaaggaaaataagaagaattggtttggaccaagtccttacgtagaggtcacagtagatggacagtcaaagaagacagaaaaatgcaacaacacaaacagtcccaagtggaagcaaccccttacagttatcgttacccctgtgagtaaattacattttcgtgtgtggagtcaccagacactgaaatctgatgttttgttgggaactgctgcattagatatttatgaaacattaaagtcaaacaatatgaaacttgaagaagtagttgtgactttgcagcttggaggtgacaaagagccaacagagacaataggagacttgtcaatttgtcttgatgggctacagttagagtctgaagttgttaccaatggtgaaactacatgttcagaaaatggggtttcgctctgtttgcccaggctggagtgcaatagtgcgatctcggctcactgcaacctctgcctcccgggtttaagtgattctcctatctcagcctcccgagtagctgggtttacaggtgcttctcagaatgatgatggctccagatccaaggatgaaacaagagtgagcacaaatggatcagatgaccctgaagatgcaggagctggtgaaaataggagagtcagtgggaataattctccatcactctcaaatggtggttttaaaccttctagacctccaagaccttcacgaccaccaccacccaccccacgtagaccagcatctgtcaatggttcaccatctgccacttctgaaagtgatgggtctagtacaggctctctgccgccgacaaatacaaatacaaatacatctgaaggagcaacatctggattaataattcctcttactatatctggaggctcaggccctaggccattaaatcctgtaactcaagctcccttgccacctggttgggagcagagagtggaccagcacgggcgagtttactatgtagatcatgttgagaaaagaacaacatgggatagaccagaacctctacctcctggctgggaacggcgggttgacaacatgggacgtatttattatgttgaccatttcacaagaacaacaacgtggcagaggccaacactggaatccgtccggaactatgaacaatggcagctacagcgtagtcagcttcaaggagcaatgcagcagtttaaccagagattcatttatgggaatcaagatttatttgctacatcacaaagtaaagaatttgatcctcttggtccattgccacctggatgggagaagagaacagacagcaatggcagagtatatttcgtcaaccacaacacacgaattacacaatgggaagaccccagaagtcaaggtcaattaaatgaaaagcccttacctgaaggttgggaaatgagattcacagtggatggaattccatattttgtggaccacaatagaagaactaccacctatatagatccccgcacaggaaaatctgccctagacaatggacctcagatagcctatgttcgggacttcaaagcaaaggttcagtatttccggttctggtgtcagcaactggccatgccacagcacataaagattacagtgacaagaaaaacattgtttgaggattcctttcaacagataatgagcttcagtccccaagatctgcgaagacgtttgtgggtgatttttccaggagaagaaggtttagattatggaggtgtagcaagagaatggttctttcttttgtcacatgaagtgttgaacccaatgtattgcctgtttgaatatgcagggaaggataactactgcttgcagataaaccccgcttcttacatcaatccagatcacctgaaatattttcgttttattggcagatttattgccatggctctgttccatgggaaattcatagacacgggtttttctttaccattctataagcgtatcttgaacaaaccagttggactcaaggatttagaatctattgatccagaattttacaattctctcatctgggttaaggaaaacaatattgaggaatgtgatttggaaatgtacttctccgttgacaaagaaattctaggtgaaattaagagtcatgatctgaaacctaatggtggcaatattcttgtaacagaagaaaataaagaggaatacatcagaatggtagctgagtggaggttgtctcgaggtgttgaagaacagacacaagctttctttgaaggctttaatgaaattcttccccagcaatatttgcaatactttgatgcaaaggaattagaggtccttttatgtggaatgcaagagattgatttgaatgactggcaaagacatgccatctaccgtcattatgcaaggaccagcaaacaaatcatgtggttttggcagtttgttaaagaaattgataatgagaagagaatgagacttctgcagtttgttactggaacctgccgattgccagtaggaggatttgctgatctcatggggagcaatggaccacagaaattctgcattgaaaaagttgggaaagaaaattggctacccagaagtcatacctgttttaatcgcctggacctgccaccatacaagagctatgagcaactgaaggaaaagctgttgtttgccatagaagaaacagaaggatttggacaagagtaacttctgagaacttgcaccatgaatgggcaagaacttatttgcaatgtttgtccttctctgcctgttgcacatcttgtaaaattggacaatggctctttagagagttatctgagtgtaagtaaattaatgttctcatttagatttatctcccagtgatttctactcagcgtttccagaaatcaggtctgcaaatgactagtcagaaccttgcttaacatgagattttaacacaacaatgaaa

SEQ ID NO: 144666 - DNA, 6401 bp, Homo sapiens
  Payload ID: 8582
  Gene Symbol: ITCH
  Gene Name: itchy E3 ubiquitin protein ligase
  Uniprot ID: Q96J02
  ENST ID: ENST00000374864
  CDS Start-End: 214-2802
gcgctcaggcgcctgcgctttagctgctaactcgctctagtagctgtggtcggggctcgggaccggctgccatcttagtctagggactgaggagtcgccgccgccccgagtcccggtaccatgcatttcacggtggccttgtggagacaacgccttaacccaaggaagtgactcaaactgtgagaacttcaggttttccaacctattggtggtatgtctgacagtggatcacaacttggttcaatgggtagcctcaccatgaaatcacagcttcagatcactgtcatctcagcaaaacttaaggaaaataagaagaattggtttggaccaagtccttacgtagaggtcacagtagatggacagtcaaagaagacagaaaaatgcaacaacacaaacagtcccaagtggaagcaaccccttacagttatcgttacccctgtgagtaaattacattttcgtgtgtggagtcaccagacactgaaatctgatgttttgttgggaactgctgcattagatatttatgaaacattaaagtcaaacaatatgaaacttgaagaagtagttgtgactttgcagcttggaggtgacaaagagccaacagagacaataggagacttgtcaatttgtcttgatgggctacagttagagtctgaagttgttaccaatggtgaaactacatgttcagaaagtgcttctcagaatgatgatggctccagatccaaggatgaaacaagagtgagcacaaatggatcagatgaccctgaagatgcaggagctggtgaaaataggagagtcagtgggaataattctccatcactctcaaatggtggttttaaaccttctagacctccaagaccttcacgaccaccaccacccaccccacgtagaccagcatctgtcaatggttcaccatctgccacttctgaaagtgatgggtctagtacaggctctctgccgccgacaaatacaaatacaaatacatctgaaggagcaacatctggattaataattcctcttactatatctggaggctcaggccctaggccattaaatcctgtaactcaagctcccttgccacctggttgggagcagagagtggaccagcacgggcgagtttactatgtagatcatgttgagaaaagaacaacatgggatagaccagaacctctacctcctggctgggaacggcgggttgacaacatgggacgtatttattatgttgaccatttcacaagaacaacaacgtggcagaggccaacactggaatccgtccggaactatgaacaatggcagctacagcgtagtcagcttcaaggagcaatgcagcagtttaaccagagattcatttatgggaatcaagatttatttgctacatcacaaagtaaagaatttgatcctcttggtccattgccacctggatgggagaagagaacagacagcaatggcagagtatatttcgtcaaccacaacacacgaattacacaatgggaagaccccagaagtcaaggtcaattaaatgaaaagcccttacctgaaggttgggaaatgagattcacagtggatggaattccatattttgtggaccacaatagaagaactaccacctatatagatccccgcacaggaaaatctgccctagacaatggacctcagatagcctatgttcgggacttcaaagcaaaggttcagtatttccggttctggtgtcagcaactggccatgccacagcacataaagattacagtgacaagaaaaacattgtttgaggattcctttcaacagataatgagcttcagtccccaagatctgcgaagacgtttgtgggtgatttttccaggagaagaaggtttagattatggaggtgtagcaagagaatggttctttcttttgtcacatgaagtgttgaacccaatgtattgcctgtttgaatatgcagggaaggataactactgcttgcagataaaccccgcttcttacatcaatccagatcacctgaaatattttcgttttattggcagatttattgccatggctctgttccatgggaaattcatagacacgggtttttctttaccattctataagcgtatcttgaacaaaccagttggactcaaggatttagaatctattgatccagaattttacaattctctcatctgggttaaggaaaacaatattgaggaatgtgatttggaaatgtacttctccgttgacaaagaaattctaggtgaaattaagagtcatgatctgaaacctaatggtggcaatattcttgtaacagaagaaaataaagaggaatacatcagaatggtagctgagtggaggttgtctcgaggtgttgaagaacagacacaagctttctttgaaggctttaatgaaattcttccccagcaatatttgcaatactttgatgcaaaggaattagaggtccttttatgtggaatgcaagagattgatttgaatgactggcaaagacatgccatctaccgtcattatgcaaggaccagcaaacaaatcatgtggttttggcagtttgttaaagaaattgataatgagaagagaatgagacttctgcagtttgttactggaacctgccgattgccagtaggaggatttgctgatctcatggggagcaatggaccacagaaattctgcattgaaaaagttgggaaagaaaattggctacccagaagtcatacctgttttaatcgcctggacctgccaccatacaagagctatgagcaactgaaggaaaagctgttgtttgccatagaagaaacagaaggatttggacaagagtaacttctgagaacttgcaccatgaatgggcaagaacttatttgcaatgtttgtccttctctgcctgttgcacatcttgtaaaattggacaatggctctttagagagttatctgagtgtaagtaaattaatgttctcatttagatttatctcccagtgatttctactcagcgtttccagaaatcaggtctgcaaatgactagtcagaaccttgcttaacatgagattttaacacaacaatgaaatttgccttgtcttattccactagtttattcctttaacaacaatattttatgtgtgtcaaaagtctcacttgggagtagtgtttttttcttttagacattctgcagacatgcagggaagtcctttggtaactgcaatatacaagattttcctattaagcctcttggtaagaggcatttgttaaaagtgcaagcttactcctgcttctggggatgtgagcaaaattcgggcttgtgttctccctctcattttagtctgacttgactattgtttttcctttctggcgcatgaatccatacatcattcctggaagtgaggcaagactcttgcatctctacaaagtagttttgtcaatttgaattcagggaaaagttggtcacagcctgcaaatgacttcatttggaagtctgattgtttcagttgcctgacaaatactacactttacaaacaatgttaacactgtgattccttcattgttttaagaagttaacctagggccgggcatggtggctcatacctgtaatcctagcactctgggaggccgaggcaggaggatccctttagcccaggagttaaagaccagcctgggcaacatagggagaccctgtcttttttttgggcagcgtggtgggggataaataaataaaaggaaaaaaaacttagcctagaattagaattaatttaattgaattcatctaaagatgtctctggtgatttttatatgttccgctatataattgatgctttatagttttatcataatccaacaacttcagttatatttaattattgttaaggagtttaagactagaaagactagagtgctttctagtccaaatagaggtcagtgaaacagcttttgacatcagattttcatttgagagggagagctgtggtactggctaaaaagaaaggaagataacatccagtaaccacaggaatatattctctgtgaattaaaagtcttcaaagttatcatttctctgacatatgttggagtagtcatttccattctttacattgtcatgaactggattgataaccctcatctgcaatattttcacccctaaaatttttaacagggtttcctttttttctcacgactatttaagtttagattgctccattattaactgattaatgcactttgaagttctctggaattaattattttaacttggcctagcttcgactgtcaaggtggctgttataaatttgacttcattggcagtggatgaagcctaagccagctgagtctctatcatagctgaaccctgaggacagcctcatagctcatgtatcagggacttttgccacatttcagaggcatagcatgaacaagtaatattaagccaagaataagcagcagaaccctgttccatatggaaaaaagaaaaacaattttttgtccctaatgttcttccttttacatcctggaacaacaataaaaacatttttttaaacttgtctactgtaagatactgccatcataaagcagagacttacatgagtgaaagggttgcctcatcaagcagctcagtgtaaatggggaggctaggctctccccagccctatggtttttttatttcatgtaccccaggaaatactgtgtggtttctaaaagccctggttgttaaaagtagggactctgcctttttgttggtagggagaaaaaacgctattgctttgtcttacagagcgaatgtctgccaactacccgttcattatataagtctgaacttggtaatatatggctaatgaagattaagccctctataaagacttcctgttgaggtgaattctcatactgaaatgtagttacctacaatatttactagagatttatgaaattaaattaagagataatgtaagaaaatacatttttttggttctatataatgcttcatgattcatttagggacctagaaatattgtgtgaaaatatataaatatcacccaaaaggctttctgccctatatttttaaaatacagaatagttatatttgaagtagccctggccctagttctatagggcttggctatttaatatttttatggaagaagtgtttagttctggaaaaggtaaatgcttgtatatatttttgcagcctgggatctccctactccattttttcctttaatttaagtggccacatgtatatgtcttccctgctgtgttaggaaaatgggggctggatatcccaagaatcagaggttatataaaaatactgcaaatagaccgcagacataaatatctaccaaatgctatcttaaattttggtccaaactgaacatatggaaatagatttattgtaagtatttacttagagctttttcttaaatctgaactaacttgcttttagaagtctttttctttgtaagcattgtaaatgctaataaatcctgttaatttttttttttttttttttttttttttactgcatgttacattgaaataaaaacaaagtaaaatgagcaattgccttattgttctgctcttttgcagggggtgggggttggggaagacagcattccacagcctggtcaggagggaaggacctcacttgtttcatcaaatggagtggtttaaaactgatcaagcagctcataataatgaattcctgctctgtcttttattatcttatgtcagagtgcagcaaaatctcatttcataagacttacaataactctatttaaaattcaggtattgtactcgggaggctgaggtgggaggatcccaggagttcaaatcctgcctgggcaacatagcaagaccctgtctcttaaaaaaacaaaaagacatattcaggtactgatttttcatcaagagattgacataccaatgatcagaaattttagtgaaacttgactcaactatacacaaagttctcatcctaaatgaactatttcagtcaagcccactctaccactttttacttatctggttaataatccgaaatgttaccggggttgactcacggaattaaatttttcctctatttttatatcctttcctgttgtggatgtaacttacctttctaaactcctttagagttaacgacttctatttagtattgttggtatctccagcccccctcctttttttgtttttcttttagttatttactttgtttgtataatttgctttcattaactaaaaatggaattggcagcactggattgtatattactgtattaagagtacctttgttttcttgatctgttacttttaatactcaggtaatgctacaaatattacagggagtcaaatgcttttataaagttccttcagtggttgcctcacttgcgttttcctacaagatgtaagactgtttataattaaacttttttggtccttca

SEQ ID NO: 144667 - DNA, 6089 bp, Homo sapiens
  Payload ID: 8582
  Gene Symbol: ITCH
  Gene Name: itchy E3 ubiquitin protein ligase
  Uniprot ID: Q96J02
  ENST ID: ENST00000535650
  CDS Start-End: 233-2491
agtgtctcctttgccatgttcaggttttccaacctattggtggtatgtctgacagtggatcacaacttggttcaatgggtagcctcaccatgaaatcacagcttcagatcactgtatcgttacccctgtgagtaaattacattttcgtgtgtggagtcaccagacactgaaatctgatgttttgttgggaactgctgcattagatatttatgaaacattaaagtcaaacaatatgaaacttgaagaagtagttgtgactttgcagcttggaggtgacaaagagccaacagagacaataggagacttgtcaatttgtcttgatgggctacagttagagtctgaagttgttaccaatggtgaaactacatgttcagaaagtgcttctcagaatgatgatggctccagatccaaggatgaaacaagagtgagcacaaatggatcagatgaccctgaagatgcaggagctggtgaaaataggagagtcagtgggaataattctccatcactctcaaatggtggttttaaaccttctagacctccaagaccttcacgaccaccaccacccaccccacgtagaccagcatctgtcaatggttcaccatctgccacttctgaaagtgatgggtctagtacaggctctctgccgccgacaaatacaaatacaaatacatctgaaggagcaacatctggattaataattcctcttactatatctggaggctcaggccctaggccattaaatcctgtaactcaagctcccttgccacctggttgggagcagagagtggaccagcacgggcgagtttactatgtagatcatgttgagaaaagaacaacatgggatagaccagaacctctacctcctggctgggaacggcgggttgacaacatgggacgtatttattatgttgaccatttcacaagaacaacaacgtggcagaggccaacactggaatccgtccggaactatgaacaatggcagctacagcgtagtcagcttcaaggagcaatgcagcagtttaaccagagattcatttatgggaatcaagatttatttgctacatcacaaagtaaagaatttgatcctcttggtccattgccacctggatgggagaagagaacagacagcaatggcagagtatatttcgtcaaccacaacacacgaattacacaatgggaagaccccagaagtcaaggtcaattaaatgaaaagcccttacctgaaggttgggaaatgagattcacagtggatggaattccatattttgtggaccacaatagaagaactaccacctatatagatccccgcacaggaaaatctgccctagacaatggacctcagatagcctatgttcgggacttcaaagcaaaggttcagtatttccggttctggtgtcagcaactggccatgccacagcacataaagattacagtgacaagaaaaacattgtttgaggattcctttcaacagataatgagcttcagtccccaagatctgcgaagacgtttgtgggtgatttttccaggagaagaaggtttagattatggaggtgtagcaagagaatggttctttcttttgtcacatgaagtgttgaacccaatgtattgcctgtttgaatatgcagggaaggataactactgcttgcagataaaccccgcttcttacatcaatccagatcacctgaaatattttcgttttattggcagatttattgccatggctctgttccatgggaaattcatagacacgggtttttctttaccattctataagcgtatcttgaacaaaccagttggactcaaggatttagaatctattgatccagaattttacaattctctcatctgggttaaggaaaacaatattgaggaatgtgatttggaaatgtacttctccgttgacaaagaaattctaggtgaaattaagagtcatgatctgaaacctaatggtggcaatattcttgtaacagaagaaaataaagaggaatacatcagaatggtagctgagtggaggttgtctcgaggtgttgaagaacagacacaagctttctttgaaggctttaatgaaattcttccccagcaatatttgcaatactttgatgcaaaggaattagaggtccttttatgtggaatgcaagagattgatttgaatgactggcaaagacatgccatctaccgtcattatgcaaggaccagcaaacaaatcatgtggttttggcagtttgttaaagaaattgataatgagaagagaatgagacttctgcagtttgttactggaacctgccgattgccagtaggaggatttgctgatctcatggggagcaatggaccacagaaattctgcattgaaaaagttgggaaagaaaattggctacccagaagtcatacctgttttaatcgcctggacctgccaccatacaagagctatgagcaactgaaggaaaagctgttgtttgccatagaagaaacagaaggatttggacaagagtaacttctgagaacttgcaccatgaatgggcaagaacttatttgcaatgtttgtccttctctgcctgttgcacatcttgtaaaattggacaatggctctttagagagttatctgagtgtaagtaaattaatgttctcatttagatttatctcccagtgatttctactcagcgtttccagaaatcaggtctgcaaatgactagtcagaaccttgcttaacatgagattttaacacaacaatgaaatttgccttgtcttattccactagtttattcctttaacaacaatattttatgtgtgtcaaaagtctcacttgggagtagtgtttttttcttttagacattctgcagacatgcagggaagtcctttggtaactgcaatatacaagattttcctattaagcctcttggtaagaggcatttgttaaaagtgcaagcttactcctgcttctggggatgtgagcaaaattcgggcttgtgttctccctctcattttagtctgacttgactattgtttttcctttctggcgcatgaatccatacatcattcctggaagtgaggcaagactcttgcatctctacaaagtagttttgtcaatttgaattcagggaaaagttggtcacagcctgcaaatgacttcatttggaagtctgattgtttcagttgcctgacaaatactacactttacaaacaatgttaacactgtgattccttcattgttttaagaagttaacctagggccgggcatggtggctcatacctgtaatcctagcactctgggaggccgaggcaggaggatccctttagcccaggagttaaagaccagcctgggcaacatagggagaccctgtcttttttttgggcagcgtggtgggggataaataaataaaaggaaaaaaaacttagcctagaattagaattaatttaattgaattcatctaaagatgtctctggtgatttttatatgttccgctatataattgatgctttatagttttatcataatccaacaacttcagttatatttaattattgttaaggagtttaagactagaaagactagagtgctttctagtccaaatagaggtcagtgaaacagcttttgacatcagattttcatttgagagggagagctgtggtactggctaaaaagaaaggaagataacatccagtaaccacaggaatatattctctgtgaattaaaagtcttcaaagttatcatttctctgacatatgttggagtagtcatttccattctttacattgtcatgaactggattgataaccctcatctgcaatattttcacccctaaaatttttaacagggtttcctttttttctcacgactatttaagtttagattgctccattattaactgattaatgcactttgaagttctctggaattaattattttaacttggcctagcttcgactgtcaaggtggctgttataaatttgacttcattggcagtggatgaagcctaagccagctgagtctctatcatagctgaaccctgaggacagcctcatagctcatgtatcagggacttttgccacatttcagaggcatagcatgaacaagtaatattaagccaagaataagcagcagaaccctgttccatatggaaaaaagaaaaacaattttttgtccctaatgttcttccttttacatcctggaacaacaataaaaacatttttttaaacttgtctactgtaagatactgccatcataaagcagagacttacatgagtgaaagggttgcctcatcaagcagctcagtgtaaatggggaggctaggctctccccagccctatggtttttttatttcatgtaccccaggaaatactgtgtggtttctaaaagccctggttgttaaaagtagggactctgcctttttgttggtagggagaaaaaacgctattgctttgtcttacagagcgaatgtctgccaactacccgttcattatataagtctgaacttggtaatatatggctaatgaagattaagccctctataaagacttcctgttgaggtgaattctcatactgaaatgtagttacctacaatatttactagagatttatgaaattaaattaagagataatgtaagaaaatacatttttttggttctatataatgcttcatgattcatttagggacctagaaatattgtgtgaaaatatataaatatcacccaaaaggctttctgccctatatttttaaaatacagaatagttatatttgaagtagccctggccctagttctatagggcttggctatttaatatttttatggaagaagtgtttagttctggaaaaggtaaatgcttgtatatatttttgcagcctgggatctccctactccattttttcctttaatttaagtggccacatgtatatgtcttccctgctgtgttaggaaaatgggggctggatatcccaagaatcagaggttatataaaaatactgcaaatagaccgcagacataaatatctaccaaatgctatcttaaattttggtccaaactgaacatatggaaatagatttattgtaagtatttacttagagctttttcttaaatctgaactaacttgcttttagaagtctttttctttgtaagcattgtaaatgctaataaatcctgttaatttttttttttttttttttttttttttactgcatgttacattgaaataaaaacaaagtaaaatgagcaattgccttattgttctgctcttttgcagggggtgggggttggggaagacagcattccacagcctggtcaggagggaaggacctcacttgtttcatcaaatggagtggtttaaaactgatcaagcagctcataataatgaattcctgctctgtcttttattatcttatgtcagagtgcagcaaaatctcatttcataagacttacaataactctatttaaaattcaggtattgtactcgggaggctgaggtgggaggatcccaggagttcaaatcctgcctgggcaacatagcaagaccctgtctcttaaaaaaacaaaaagacatattcaggtactgatttttcatcaagagattgacataccaatgatcagaaattttagtgaaacttgactcaactatacacaaagttctcatcctaaatgaactatttcagtcaagcccactctaccactttttacttatctggttaataatccgaaatgttaccggggttgactcacggaattaaatttttcctctatttttatatcctttcctgttgtggatgtaacttacctttctaaactcctttagagttaacgacttctatttagtattgttggtatctccagcccccctcctttttttgtttttcttttagttatttactttgtttgtataatttgctttcattaactaaaaatggaattggcagcactggattgtatattactgtattaagagtacctttgttttcttgatctgttacttttaatactcaggtaatgctacaaatattacagggagtcaaatgcttttataaagttccttcagtggttgcctcacttgcgttttcctacaagatgtaagactgtttataattaaacttttttggtccttc

SEQ ID NO: 144668 - DNA, 6354 bp, Homo sapiens
  Payload ID: 8582
  Gene Symbol: ITCH
  Gene Name: itchy E3 ubiquitin protein ligase
  Uniprot ID: Q96J02
  ENST ID: ENST00000621101
  CDS Start-End: 45-2756
agtgtctcctttgccatgttcaggttttccaacctattggtggtatgtctgacagtggatcacaacttggttcaatgggtagcctcaccatgaaatcacagcttcagatcactgtcatctcagcaaaacttaaggaaaataagaagaattggtttggaccaagtccttacgtagaggtcacagtagatggacagtcaaagaagacagaaaaatgcaacaacacaaacagtcccaagtggaagcaaccccttacagttatcgttacccctgtgagtaaattacattttcgtgtgtggagtcaccagacactgaaatctgatgttttgttgggaactgctgcattagatatttatgaaacattaaagtcaaacaatatgaaacttgaagaagtagttgtgactttgcagcttggaggtgacaaagagccaacagagacaataggagacttgtcaatttgtcttgatgggctacagttagagtctgaagttgttaccaatggtgaaactacatgttcagaaaatggggtttcgctctgtttgcccaggctggagtgcaatagtgcgatctcggctcactgcaacctctgcctcccgggtttaagtgattctcctatctcagcctcccgagtagctgggtttacaggtgcttctcagaatgatgatggctccagatccaaggatgaaacaagagtgagcacaaatggatcagatgaccctgaagatgcaggagctggtgaaaataggagagtcagtgggaataattctccatcactctcaaatggtggttttaaaccttctagacctccaagaccttcacgaccaccaccacccaccccacgtagaccagcatctgtcaatggttcaccatctgccacttctgaaagtgatgggtctagtacaggctctctgccgccgacaaatacaaatacaaatacatctgaaggagcaacatctggattaataattcctcttactatatctggaggctcaggccctaggccattaaatcctgtaactcaagctcccttgccacctggttgggagcagagagtggaccagcacgggcgagtttactatgtagatcatgttgagaaaagaacaacatgggatagaccagaacctctacctcctggctgggaacggcgggttgacaacatgggacgtatttattatgttgaccatttcacaagaacaacaacgtggcagaggccaacactggaatccgtccggaactatgaacaatggcagctacagcgtagtcagcttcaaggagcaatgcagcagtttaaccagagattcatttatgggaatcaagatttatttgctacatcacaaagtaaagaatttgatcctcttggtccattgccacctggatgggagaagagaacagacagcaatggcagagtatatttcgtcaaccacaacacacgaattacacaatgggaagaccccagaagtcaaggtcaattaaatgaaaagcccttacctgaaggttgggaaatgagattcacagtggatggaattccatattttgtggaccacaatagaagaactaccacctatatagatccccgcacaggaaaatctgccctagacaatggacctcagatagcctatgttcgggacttcaaagcaaaggttcagtatttccggttctggtgtcagcaactggccatgccacagcacataaagattacagtgacaagaaaaacattgtttgaggattcctttcaacagataatgagcttcagtccccaagatctgcgaagacgtttgtgggtgatttttccaggagaagaaggtttagattatggaggtgtagcaagagaatggttctttcttttgtcacatgaagtgttgaacccaatgtattgcctgtttgaatatgcagggaaggataactactgcttgcagataaaccccgcttcttacatcaatccagatcacctgaaatattttcgttttattggcagatttattgccatggctctgttccatgggaaattcatagacacgggtttttctttaccattctataagcgtatcttgaacaaaccagttggactcaaggatttagaatctattgatccagaattttacaattctctcatctgggttaaggaaaacaatattgaggaatgtgatttggaaatgtacttctccgttgacaaagaaattctaggtgaaattaagagtcatgatctgaaacctaatggtggcaatattcttgtaacagaagaaaataaagaggaatacatcagaatggtagctgagtggaggttgtctcgaggtgttgaagaacagacacaagctttctttgaaggctttaatgaaattcttccccagcaatatttgcaatactttgatgcaaaggaattagaggtccttttatgtggaatgcaagagattgatttgaatgactggcaaagacatgccatctaccgtcattatgcaaggaccagcaaacaaatcatgtggttttggcagtttgttaaagaaattgataatgagaagagaatgagacttctgcagtttgttactggaacctgccgattgccagtaggaggatttgctgatctcatggggagcaatggaccacagaaattctgcattgaaaaagttgggaaagaaaattggctacccagaagtcatacctgttttaatcgcctggacctgccaccatacaagagctatgagcaactgaaggaaaagctgttgtttgccatagaagaaacagaaggatttggacaagagtaacttctgagaacttgcaccatgaatgggcaagaacttatttgcaatgtttgtccttctctgcctgttgcacatcttgtaaaattggacaatggctctttagagagttatctgagtgtaagtaaattaatgttctcatttagatttatctcccagtgatttctactcagcgtttccagaaatcaggtctgcaaatgactagtcagaaccttgcttaacatgagattttaacacaacaatgaaatttgccttgtcttattccactagtttattcctttaacaacaatattttatgtgtgtcaaaagtctcacttgggagtagtgtttttttcttttagacattctgcagacatgcagggaagtcctttggtaactgcaatatacaagattttcctattaagcctcttggtaagaggcatttgttaaaagtgcaagcttactcctgcttctggggatgtgagcaaaattcgggcttgtgttctccctctcattttagtctgacttgactattgtttttcctttctggcgcatgaatccatacatcattcctggaagtgaggcaagactcttgcatctctacaaagtagttttgtcaatttgaattcagggaaaagttggtcacagcctgcaaatgacttcatttggaagtctgattgtttcagttgcctgacaaatactacactttacaaacaatgttaacactgtgattccttcattgttttaagaagttaacctagggccgggcatggtggctcatacctgtaatcctagcactctgggaggccgaggcaggaggatccctttagcccaggagttaaagaccagcctgggcaacatagggagaccctgtcttttttttgggcagcgtggtgggggataaataaataaaaggaaaaaaaacttagcctagaattagaattaatttaattgaattcatctaaagatgtctctggtgatttttatatgttccgctatataattgatgctttatagttttatcataatccaacaacttcagttatatttaattattgttaaggagtttaagactagaaagactagagtgctttctagtccaaatagaggtcagtgaaacagcttttgacatcagattttcatttgagagggagagctgtggtactggctaaaaagaaaggaagataacatccagtaaccacaggaatatattctctgtgaattaaaagtcttcaaagttatcatttctctgacatatgttggagtagtcatttccattctttacattgtcatgaactggattgataaccctcatctgcaatattttcacccctaaaatttttaacagggtttcctttttttctcacgactatttaagtttagattgctccattattaactgattaatgcactttgaagttctctggaattaattattttaacttggcctagcttcgactgtcaaggtggctgttataaatttgacttcattggcagtggatgaagcctaagccagctgagtctctatcatagctgaaccctgaggacagcctcatagctcatgtatcagggacttttgccacatttcagaggcatagcatgaacaagtaatattaagccaagaataagcagcagaaccctgttccatatggaaaaaagaaaaacaattttttgtccctaatgttcttccttttacatcctggaacaacaataaaaacatttttttaaacttgtctactgtaagatactgccatcataaagcagagacttacatgagtgaaagggttgcctcatcaagcagctcagtgtaaatggggaggctaggctctccccagccctatggtttttttatttcatgtaccccaggaaatactgtgtggtttctaaaagccctggttgttaaaagtagggactctgcctttttgttggtagggagaaaaaacgctattgctttgtcttacagagcgaatgtctgccaactacccgttcattatataagtctgaacttggtaatatatggctaatgaagattaagccctctataaagacttcctgttgaggtgaattctcatactgaaatgtagttacctacaatatttactagagatttatgaaattaaattaagagataatgtaagaaaatacatttttttggttctatataatgcttcatgattcatttagggacctagaaatattgtgtgaaaatatataaatatcacccaaaaggctttctgccctatatttttaaaatacagaatagttatatttgaagtagccctggccctagttctatagggcttggctatttaatatttttatggaagaagtgtttagttctggaaaaggtaaatgcttgtatatatttttgcagcctgggatctccctactccattttttcctttaatttaagtggccacatgtatatgtcttccctgctgtgttaggaaaatgggggctggatatcccaagaatcagaggttatataaaaatactgcaaatagaccgcagacataaatatctaccaaatgctatcttaaattttggtccaaactgaacatatggaaatagatttattgtaagtatttacttagagctttttcttaaatctgaactaacttgcttttagaagtctttttctttgtaagcattgtaaatgctaataaatcctgttaatttttttttttttttttttttttttttactgcatgttacattgaaataaaaacaaagtaaaatgagcaattgccttattgttctgctcttttgcagggggtgggggttggggaagacagcattccacagcctggtcaggagggaaggacctcacttgtttcatcaaatggagtggtttaaaactgatcaagcagctcataataatgaattcctgctctgtcttttattatcttatgtcagagtgcagcaaaatctcatttcataagacttacaataactctatttaaaattcaggtattgtactcgggaggctgaggtgggaggatcccaggagttcaaatcctgcctgggcaacatagcaagaccctgtctcttaaaaaaacaaaaagacatattcaggtactgatttttcatcaagagattgacataccaatgatcagaaattttagtgaaacttgactcaactatacacaaagttctcatcctaaatgaactatttcagtcaagcccactctaccactttttacttatctggttaataatccgaaatgttaccggggttgactcacggaattaaatttttcctctatttttatatcctttcctgttgtggatgtaacttacctttctaaactcctttagagttaacgacttctatttagtattgttggtatctccagcccccctcctttttttgtttttcttttagttatttactttgtttgtataatttgctttcattaactaaaaatggaattggcagcactggattgtatattactgtattaagagtacctttgttttcttgatctgttacttttaatactcaggtaatgctacaaatattacagggagtcaaatgcttttataaagttccttcagtggttgcctcacttgcgttttcctacaagatgtaagactgtttataattaaacttttttggtccttc

SEQ ID NO: 144669 - DNA, 6231 bp, Homo sapiens
  Payload ID: 8582
  Gene Symbol: ITCH
  Gene Name: itchy E3 ubiquitin protein ligase
  Uniprot ID: Q96J02
  ENST ID: ENST00000610336
  CDS Start-End: 45-2633
agtgtctcctttgccatgttcaggttttccaacctattggtggtatgtctgacagtggatcacaacttggttcaatgggtagcctcaccatgaaatcacagcttcagatcactgtcatctcagcaaaacttaaggaaaataagaagaattggtttggaccaagtccttacgtagaggtcacagtagatggacagtcaaagaagacagaaaaatgcaacaacacaaacagtcccaagtggaagcaaccccttacagttatcgttacccctgtgagtaaattacattttcgtgtgtggagtcaccagacactgaaatctgatgttttgttgggaactgctgcattagatatttatgaaacattaaagtcaaacaatatgaaacttgaagaagtagttgtgactttgcagcttggaggtgacaaagagccaacagagacaataggagacttgtcaatttgtcttgatgggctacagttagagtctgaagttgttaccaatggtgaaactacatgttcagaaagtgcttctcagaatgatgatggctccagatccaaggatgaaacaagagtgagcacaaatggatcagatgaccctgaagatgcaggagctggtgaaaataggagagtcagtgggaataattctccatcactctcaaatggtggttttaaaccttctagacctccaagaccttcacgaccaccaccacccaccccacgtagaccagcatctgtcaatggttcaccatctgccacttctgaaagtgatgggtctagtacaggctctctgccgccgacaaatacaaatacaaatacatctgaaggagcaacatctggattaataattcctcttactatatctggaggctcaggccctaggccattaaatcctgtaactcaagctcccttgccacctggttgggagcagagagtggaccagcacgggcgagtttactatgtagatcatgttgagaaaagaacaacatgggatagaccagaacctctacctcctggctgggaacggcgggttgacaacatgggacgtatttattatgttgaccatttcacaagaacaacaacgtggcagaggccaacactggaatccgtccggaactatgaacaatggcagctacagcgtagtcagcttcaaggagcaatgcagcagtttaaccagagattcatttatgggaatcaagatttatttgctacatcacaaagtaaagaatttgatcctcttggtccattgccacctggatgggagaagagaacagacagcaatggcagagtatatttcgtcaaccacaacacacgaattacacaatgggaagaccccagaagtcaaggtcaattaaatgaaaagcccttacctgaaggttgggaaatgagattcacagtggatggaattccatattttgtggaccacaatagaagaactaccacctatatagatccccgcacaggaaaatctgccctagacaatggacctcagatagcctatgttcgggacttcaaagcaaaggttcagtatttccggttctggtgtcagcaactggccatgccacagcacataaagattacagtgacaagaaaaacattgtttgaggattcctttcaacagataatgagcttcagtccccaagatctgcgaagacgtttgtgggtgatttttccaggagaagaaggtttagattatggaggtgtagcaagagaatggttctttcttttgtcacatgaagtgttgaacccaatgtattgcctgtttgaatatgcagggaaggataactactgcttgcagataaaccccgcttcttacatcaatccagatcacctgaaatattttcgttttattggcagatttattgccatggctctgttccatgggaaattcatagacacgggtttttctttaccattctataagcgtatcttgaacaaaccagttggactcaaggatttagaatctattgatccagaattttacaattctctcatctgggttaaggaaaacaatattgaggaatgtgatttggaaatgtacttctccgttgacaaagaaattctaggtgaaattaagagtcatgatctgaaacctaatggtggcaatattcttgtaacagaagaaaataaagaggaatacatcagaatggtagctgagtggaggttgtctcgaggtgttgaagaacagacacaagctttctttgaaggctttaatgaaattcttccccagcaatatttgcaatactttgatgcaaaggaattagaggtccttttatgtggaatgcaagagattgatttgaatgactggcaaagacatgccatctaccgtcattatgcaaggaccagcaaacaaatcatgtggttttggcagtttgttaaagaaattgataatgagaagagaatgagacttctgcagtttgttactggaacctgccgattgccagtaggaggatttgctgatctcatggggagcaatggaccacagaaattctgcattgaaaaagttgggaaagaaaattggctacccagaagtcatacctgttttaatcgcctggacctgccaccatacaagagctatgagcaactgaaggaaaagctgttgtttgccatagaagaaacagaaggatttggacaagagtaacttctgagaacttgcaccatgaatgggcaagaacttatttgcaatgtttgtccttctctgcctgttgcacatcttgtaaaattggacaatggctctttagagagttatctgagtgtaagtaaattaatgttctcatttagatttatctcccagtgatttctactcagcgtttccagaaatcaggtctgcaaatgactagtcagaaccttgcttaacatgagattttaacacaacaatgaaatttgccttgtcttattccactagtttattcctttaacaacaatattttatgtgtgtcaaaagtctcacttgggagtagtgtttttttcttttagacattctgcagacatgcagggaagtcctttggtaactgcaatatacaagattttcctattaagcctcttggtaagaggcatttgttaaaagtgcaagcttactcctgcttctggggatgtgagcaaaattcgggcttgtgttctccctctcattttagtctgacttgactattgtttttcctttctggcgcatgaatccatacatcattcctggaagtgaggcaagactcttgcatctctacaaagtagttttgtcaatttgaattcagggaaaagttggtcacagcctgcaaatgacttcatttggaagtctgattgtttcagttgcctgacaaatactacactttacaaacaatgttaacactgtgattccttcattgttttaagaagttaacctagggccgggcatggtggctcatacctgtaatcctagcactctgggaggccgaggcaggaggatccctttagcccaggagttaaagaccagcctgggcaacatagggagaccctgtcttttttttgggcagcgtggtgggggataaataaataaaaggaaaaaaaacttagcctagaattagaattaatttaattgaattcatctaaagatgtctctggtgatttttatatgttccgctatataattgatgctttatagttttatcataatccaacaacttcagttatatttaattattgttaaggagtttaagactagaaagactagagtgctttctagtccaaatagaggtcagtgaaacagcttttgacatcagattttcatttgagagggagagctgtggtactggctaaaaagaaaggaagataacatccagtaaccacaggaatatattctctgtgaattaaaagtcttcaaagttatcatttctctgacatatgttggagtagtcatttccattctttacattgtcatgaactggattgataaccctcatctgcaatattttcacccctaaaatttttaacagggtttcctttttttctcacgactatttaagtttagattgctccattattaactgattaatgcactttgaagttctctggaattaattattttaacttggcctagcttcgactgtcaaggtggctgttataaatttgacttcattggcagtggatgaagcctaagccagctgagtctctatcatagctgaaccctgaggacagcctcatagctcatgtatcagggacttttgccacatttcagaggcatagcatgaacaagtaatattaagccaagaataagcagcagaaccctgttccatatggaaaaaagaaaaacaattttttgtccctaatgttcttccttttacatcctggaacaacaataaaaacatttttttaaacttgtctactgtaagatactgccatcataaagcagagacttacatgagtgaaagggttgcctcatcaagcagctcagtgtaaatggggaggctaggctctccccagccctatggtttttttatttcatgtaccccaggaaatactgtgtggtttctaaaagccctggttgttaaaagtagggactctgcctttttgttggtagggagaaaaaacgctattgctttgtcttacagagcgaatgtctgccaactacccgttcattatataagtctgaacttggtaatatatggctaatgaagattaagccctctataaagacttcctgttgaggtgaattctcatactgaaatgtagttacctacaatatttactagagatttatgaaattaaattaagagataatgtaagaaaatacatttttttggttctatataatgcttcatgattcatttagggacctagaaatattgtgtgaaaatatataaatatcacccaaaaggctttctgccctatatttttaaaatacagaatagttatatttgaagtagccctggccctagttctatagggcttggctatttaatatttttatggaagaagtgtttagttctggaaaaggtaaatgcttgtatatatttttgcagcctgggatctccctactccattttttcctttaatttaagtggccacatgtatatgtcttccctgctgtgttaggaaaatgggggctggatatcccaagaatcagaggttatataaaaatactgcaaatagaccgcagacataaatatctaccaaatgctatcttaaattttggtccaaactgaacatatggaaatagatttattgtaagtatttacttagagctttttcttaaatctgaactaacttgcttttagaagtctttttctttgtaagcattgtaaatgctaataaatcctgttaatttttttttttttttttttttttttttactgcatgttacattgaaataaaaacaaagtaaaatgagcaattgccttattgttctgctcttttgcagggggtgggggttggggaagacagcattccacagcctggtcaggagggaaggacctcacttgtttcatcaaatggagtggtttaaaactgatcaagcagctcataataatgaattcctgctctgtcttttattatcttatgtcagagtgcagcaaaatctcatttcataagacttacaataactctatttaaaattcaggtattgtactcgggaggctgaggtgggaggatcccaggagttcaaatcctgcctgggcaacatagcaagaccctgtctcttaaaaaaacaaaaagacatattcaggtactgatttttcatcaagagattgacataccaatgatcagaaattttagtgaaacttgactcaactatacacaaagttctcatcctaaatgaactatttcagtcaagcccactctaccactttttacttatctggttaataatccgaaatgttaccggggttgactcacggaattaaatttttcctctatttttatatcctttcctgttgtggatgtaacttacctttctaaactcctttagagttaacgacttctatttagtattgttggtatctccagcccccctcctttttttgtttttcttttagttatttactttgtttgtataatttgctttcattaactaaaaatggaattggcagcactggattgtatattactgtattaagagtacctttgttttcttgatctgttacttttaatactcaggtaatgctacaaatattacagggagtcaaatgcttttataaagttccttcagtggttgcctcacttgcgttttcctacaagatgtaagactgtttataattaaacttttttggtccttc

SEQ ID NO: 144670 - DNA, 2958 bp, Homo sapiens
  Payload ID: 8583
  Gene Symbol: IWS1
  Gene Name: IWS1 homolog (S. cerevisiae)
  Uniprot ID: Q96ST2
  ENST ID: ENST00000295321
  CDS Start-End: 261-2720
ggtgcttctaggaagtagaacgccggctcgcatgcctgcccgcccgccagcctgccgggtacggccttttccgccggggcttccaggtcaaagaattcgcctttgccgctaccgctttcttaccctccgcacccgttaagttctccggtcgggcggcagtctctgaacacttagccgcgccatccggggtcacaccgcctggaaggaggtgacgggggcggcgcggggcgcggacactccccgctgagagtccgcctgccatggactcggaatattacagcggcgaccagtcagatgatggtggtgctaccccagtacaggatgaacgggattcagggtcagacggtgaggatgatgtaaatgagcaacactccggatcagacactggaagtgtagaacgtcattcagagaatgaaactagtgatcgagaagatggcctccccaaaggacatcatgtgacagactctgagaacgatgagcccttaaatcttaatgctagtgactctgaaagtgaggagcttcacaggcaaaaggacagcgactctgaatctgaggaacgtgcagagcctcctgcaagcgattctgaaaatgaggatgtcaatcagcatgggagcgactctgagagtgaagagaccaggaaattacctggtagtgactctgaaaatgaggaacttcttaatgggcatgcaagtgactcagaaaacgaagatgttgggaagcatcccgccagtgattctgagattgaggagctccagaagagtcctgctagtgactctgaaacagaagatgctctaaaacctcaaatcagtgactctgagagtgaggaacccccaaggcaccaagccagtgactccgaaaatgaggagcctcccaaacctcgaatgagtgattctgaaagtgaggagcttcctaaacctcaggtcagtgattcagaaagtgaggaacccccaaggcaccaggccagtgactctgaaaatgaggagcttcccaaacctcgtatcagtgactcagaaagtgaggaccctccgaggcaccaggccagtgactcagaaaatgaagagcttcccaaaccccgaatcagtgattcggaaagtgaggatcccccaaggaaccaggccagtgattcggaaaatgaggagctacccaaaccccgagtcagtgactctgagagtgaggggcctcagaaggggcctgccagtgactcagaaactgaggatgcgtccagacacaaacagaagccagagtcagatgatgacagcgacagggagaataagggagaggatacagaaatgcagaatgactccttccattcagacagccatatggacagaaaaaagtttcacagttctgatagtgaggaggaagaacacaaaaagcaaaaaatggacagtgatgaagatgaaaaagagggtgaggaggagaaagtagcgaagagaaaagctgctgtgctttctgatagtgaagatgaagagaaagcatcagcaaagaagagtcgtgttgtctctgatgcagatgactctgacagtgatgctgtatcagacaagtcaggcaaaagagagaagaccatagcatctgacagtgaggaagaagctgggaaagaattgtctgataagaaaaatgaagagaaggatctgtttgggagtgacagtgagtcaggcaatgaagaagaaaatcttattgcagacatatttggagaatctggtgatgaagaggaagaagaatttacaggttttaaccaagaagatctggaagaagaaaaaggtgaaacacaggtaaaagaagcagaagattcagattctgatgataacataaagagaggaaaacatatggactttctgtcagattttgagatgatgttgcagcgaaaaaagagcatgagtggcaagcgcagacggaaccgcgatggtggcacctttattagtgatgcagacgacgtcgtgagtgccatgatcgtcaagatgaatgaagctgctgaggaagacagacagttgaacaatcaaaaaaagccagcactgaaaaaattaactttactgcctgctgtagttatgcaccttaagaagcaggaccttaaagaaacattcattgacagtggtgtgatgtctgccatcaaagaatggctctcacctctaccagataggagtttgcctgcactcaagatccgggaggagctgctgaagatcctgcaagagctgcctagtgtgagccaggagaccctgaagcatagtgggattggacgagcagtgatgtatctctataaacaccccaaggagtcaaggtctaacaaggacatggcagggaaattaatcaatgagtggtctaggcctatatttggtcttacctcaaactacaaaggaatgacaagagaagaaagggagcagagagatctagaacagatgcctcaacgacgaagaatgaacagcactggtggtcagacacccagaagagacctggaaaaggtgctgacaggagaggagaaggctcttagacctggagatcctggattctgtgcccgtgcaagggtcccaatgccttcaaacaaggactatgttgtcaggcccaaatggaatgtggaaatggagtcatccaggtttcaggcgacctccaagaagggtatcagtcgactggataaacagatgagaaagttcacagatataaggaaaaaaagcagatctgcacacgcagtgaaaatcagcattgagggcaacaaaatgccattgtgaccttgcctggaatgtgtccccatctctactctaagaaatgcgcaatggactctttggagaaagaagatattttaaaacatttttagtgtgtctgtaaatggttcagcgtgtatcagatgttgtcataggactcacatttctctcagttatatttaaaaccgttgtgtactttgtacaaaggaatactagtcatacttctataaactttacacaataaaatttcattctggtttttggg

SEQ ID NO: 144671 - DNA, 1080 bp, Homo sapiens
  Payload ID: 8583
  Gene Symbol: IWS1
  Gene Name: IWS1 homolog (S. cerevisiae)
  ENST ID: ENST00000409725
  CDS Start-End: 203-1080
atactacaagtcccagtgagcaacgcccgctttcttgcctactgcgggcgggaaccaggcgcctctgggcctgacgggaaagacagtggtttggctgaatgacggaaaagtcatttgagcaggtcttcatttttcggaagagtatctcaaaagctcttcaaacaaggcacggacacagaatctaggaaatgataaagaatcaatgataacgttattaccacgggggtcagaccaggatccacccgaggaagatgatggtggtgctaccccagtacaggatgaacgggattcagggtcagacggtgaggatgatgtaaatgagcaacactccggatcagacactggaagtgtagaacgtcattcagagaatgaaactagtgatcgagaagatggcctccccaaaggacatcatgtgacagactctgagaacgatgagcccttaaatcttaatgctagtgactctgaaagtgaggagcttcacaggcaaaaggacagcgactctgaatctgaggaacgtgcagagcctcctgcaagcgattctgaaaatgaggatgtcaatcagcatgggagcgactctgagagtgaagagaccaggaaattacctggtagtgactctgaaaatgaggaacttcttaatgggcatgcaagtgactcagaaaacgaagatgttgggaagcatcccgccagtgattctgagattgaggagctccagaagagtcctgctagtgactctgaaacagaagatgctctaaaacctcaaatcagtgactctgagagtgaggaacccccaaggcaccaagccagtgactccgaaaatgaggagcctcccaaacctcgaatgagtgattctgaaagtgaggagcttcctaaacctcaggtcagtgattcagaaagtgaggaacccccaaggcaccaggccagtgactctgaaaatgaggagcttcccaaacctcgtatcagtgactcagaaagtgaggaccctccgaggcaccaggccagtgactcagaaaatgaagagcttcccaaaccccgaatcagtgattcggaaagtgaggatcccccaaggaaccaggccagtga

SEQ ID NO: 144672 - DNA, 441 bp, Homo sapiens
  Payload ID: 8583
  Gene Symbol: IWS1
  Gene Name: IWS1 homolog (S. cerevisiae)
  ENST ID: ENST00000412979
  CDS Start-End: 1-102
ccaatgccttcaaacaaggactatgttgtcaggcccaaatggaatgtggaaatggagtcatccagggttttgctgttactgctcagtgtagtcacaccttgaataagaaatggaaaaccttgggatgttgataaagctaatatcctgaggaagaacttcagtgggtcccagctgagtaggagatgggattcaacagtactggtctaatgtgctggagtggcccaggcggaggcccacttgcagagactaatgggagcctcaagagaaaatctaccataagaaaaggaccagtctgatagcaagcccagcttcccaagaagatagaaggttggaggcaagctgctgtccagaactcgcacacaaagcagcatgagacagaagcttttgaaggggagtggaatggcttttaccggcagtgcagttttcttcttgcaccagtgt

SEQ ID NO: 144673 - DNA, 728 bp, Homo sapiens
  Payload ID: 8584
  Gene Symbol: IZUMO2
  Gene Name: IZUMO family member 2
  Uniprot ID: Q6UXV1
  ENST ID: ENST00000293405
  CDS Start-End: 2-667
catgcctctggctttgacccttctgctgctctcgggcttgggcgcccccggaggctggggctgcctgcagtgcgaccccttggtgctggaggccctgggtcacctgcgctccgccctcatccccagtcgcttccagttggagcagctgcaggcgcgcgccggggccgtgctgatgggcatggaggggcctttcttccgggactacgcgctgaacgtgtttgtggggaaagtggagacaaatcaactggaccttgtggcgtcctttgtcaagaaccaaacgcagcacttaatgggtaactctctgaaagatgagcctctgctggaagagctggtgaccctcagggcgaatgtgatcaaggaattcaagaaagttttaatttcatatgaattaaaagcctgcaaccccaaactttgccgcttgctaaaagaagaggtgttggactgtttacattgccagaggatcactcccaagtgtatccacaaaaagtactgctttgtcgaccggcaaccccgcgtggccctgcagtaccagatggacagcaaatacccgaggaaccaggcgctgttgggcatcctcatttctgtgtctctggctgtctttgtcttcgtggtcatcgtggtctcggcttgtacatacagacaaaaccgaaaactcctgctgcagtaggacggtggtttgggggtaaggagaaaggaaaataaatttaataaaattggtgacaaatcca

SEQ ID NO: 144674 - DNA, 893 bp, Homo sapiens
  Payload ID: 8584
  Gene Symbol: IZUMO2
  Gene Name: IZUMO family member 2
  ENST ID: ENST00000594854
  CDS Start-End: 1-269
agtgcgaccccttggtgctggaggccctgggtcacctgcgctccgccctcatccccagtcgcttccagttggagcagctgcaggcgcgcgccggggccgtgctgatgggcatggaggggcctttcttccgggactacgcgctgaacgtgtttgtggggaaagtggagacaaatcaactggaccttgtggcgtcctttgtcaagaaccaaacgcagcacttaatgggtaactctctgaaagcagccgggcacggtggctcatgcctgtaatcccagcactttgggatgccgagacaggtggatcgcctgaggtcaggaattcaagactagcctggccaacatggtaaaaccccgtctctactaaaaatacaaaaattagccaggtgtggtggcgggcacctgtaatcccagctactcaggctgaggcaggagaatcacttgaacctaggaggcagaggttgcagtgagcaaagatcacgccattgcactccagcctgggcgacaagagcaaaactccgtttgaaaaaaaaaaaaaaaattctagtagtcacatttttaaaaagcacatctcaattcagactagcctatttcaagtgttcagtagccatgtgtggctagtggctaccacactggacagtgcacgtctaggtaatatataaagccatatggattgaaatcatgaaggagtgagtgtagacacaaaaaagaagaggtcgggtgcggtggctcacgtctgtaatcccagcactttgggaggccgaggtgggaggatcacctgaggtcaggagtttgaaaccagcctggccaacatggcgaaaccctgtctctactaaaaatacaaaaaattagccaggtgtgatggcacgtgcccgtaatcccagctatttgggaggc

SEQ ID NO: 144675 - DNA, 668 bp, Homo sapiens
  Payload ID: 8584
  Gene Symbol: IZUMO2
  Gene Name: IZUMO family member 2
  ENST ID: ENST00000486050
  CDS Start-End: 1-280
gacccttctgctgctctcgggcttgggcgcccccggaggctggggctgcctgcagtgcgaccccttggtgctggaggccctgggtcacctgcgctccgccctcatccccagtcgcttccagttggagcagctgcaggcgcgcgccggggccgtgctgatgggcatggaggggcctttcttccgggactacgcgctgaacgtgtttgtggggaaagtggacaaatcaactggaccttgtggcgtcctttgtcaagaaccaaacgcagcacttaatgggtaactctctgaaagatgagcctctgctggaagagctggtgaccctcagggcgaatgtgatcaaggaattcaagaaagttttaatttcatatgaattaaaagcctgcaaccccaaactttgccgcttgctaaaagaagaggtgttggactgtttacattgccagaggatcactcccaagtgtatccacaaaaagtactgctttgtcgaccggcaaccccgcgtggccctgcagtaccagatggacagcaaatacccgaggaaccaggcgctgttgggcatcctcatttctgtgtctctggctgtctttgtcttcgtggtcatcgtggtctcggcttgtacatacagacaaaaccgaaaactcctgctgcagtaggacggtggtttgggggta

SEQ ID NO: 144676 - DNA, 818 bp, Homo sapiens
  Payload ID: 8584
  Gene Symbol: IZUMO2
  Gene Name: IZUMO family member 2
  ENST ID: ENST00000600293
  CDS Start-End: 1-703
gggcgcccccggaggctggggctgcctgcagtgcgaccccttggtgctggaggccctgggtcacctgcgctccgccctcatccccagtcgcttccagttggagcagctgcaggcgcgcgccggggccgtgctgatgggcatggaggggcctttcttccgggactacgcgctgaacgtgtttgtggggaaagtggagacaaatcaactggaccttgtggcgtcctttgtcaagaaccaaacgcagcacttaatgggtaactctctgaaagatgagcctctgctggaagagctggtgaccctcagggcgaatgtgatcaaggaattcaagaaagttttaatttcatatgaattaaaagcctgcaaccccaaactttgccgcttgctaaaagaagaggtgttggactgtttacattgccagaggatcactcccaagtgtatccacaaaaagtactgctttgtcgaccggcaaccccgcgtggccctgcagtaccagatggacagcaaatacccgaggaaccaggcgctgttgggcatcctcatttctgtgtctctggctgtctttgtcttcgtggtcatcgtggtctcatggagtctcgctctgtggcccaagctggagtgcaatggcgcgatcttgcgaccttggctcactgcaaccgctgcctctcaggttcaagcgattcttctgcctcagcctcctgagtagctgggactacagggcttgtacatacagacaaaaccgaaaactcctgctgcagtaggacggtggtttgggggtaaggagaaaggaaaataaatttaataaaattggtgacaaatcc

SEQ ID NO: 144677 - DNA, 381 bp, Homo sapiens
  Payload ID: 8585
  Gene Symbol: IZUMO3
  Gene Name: IZUMO family member 3
  ENST ID: ENST00000418122
  CDS Start-End: 1-381
tctgcttgtgtgagctcaaggcttctctatctcttggtgttctacactcagaactcaggtgtctttatctatcaaggcaagcttctcgatgtctgccaaaacctggaatccaaactgaaagaattactaaagaacttctctgaaattgttgtggttgaaggtcccattcttgattgttggacgtgtcttcgcatgactaacaggtgcttcaaaggagaatattgtggagacgaggatccaagaaaggctgagaatcgagagattgctctatttctcatattgctggcaacagctgtaatactgggaagtgctgtgttactattccatttttgcatctttcatcggaggaaaatgaaggcaatacgaaggtcgctaaaggaa

SEQ ID NO: 144678 - DNA, 1229 bp, Homo sapiens
  Payload ID: 8585
  Gene Symbol: IZUMO3
  Gene Name: IZUMO family member 3
  Uniprot ID: Q5VZ72
  ENST ID: ENST00000543880
  CDS Start-End: 233-952
ctccccagctggcagttccctctcctagaatgaaggataatagtcagtaaacaactaaagatcattaaactaaacaactaaagattgcccgatagtgggatggaaacagcgggaaaagtggagtcagactatccagaaccaggctctcattcccggatttttgaaggaaaaggaactaagtgaactagttgccaggacaacctgctgtcggggagcgggggtgaagaaagaaatgggtgacctgtggttattcctgctcctgcccctctcagccttccatggagtcaaaggctgtttagaatgtgaccccaaatttatagaggatgttggctccttgctgggaaatctgataccttcagaagtccccggccgaactcagctgcttgaacggcagattaaggagatgattcatttaagcttcaaggtctcccacagtgacaagaggcttcgggtgttggctgttcagcaggttgttaagttgagaacatggttgaagaatgaattttataaactgggcaatgaaacatggaaaggtgtctttatctatcaaggcaagcttctcgatgtctgccaaaacctggaatccaaactgaaagaattactaaagaacttctctgaaattgcttgttctgaagattgcattgtggttgaaggtcccattcttgattgttggacgtgtcttcgcatgactaacaggtgcttcaaaggagaatattgtggagacgaggatccaagaaaggctgagaatcgagagattgctctatttctcatattgctggcaacagctgtaatactgggaagtgctgtgttactattccatttttgcatctttcatcggaggaaaatgaaggcaatacgaaggtcgctaaaggaatatgtggagaagaaacttgaagaattaatggggaagatagatgagaaggaggagaaagactttagactcagaaaataaacacatcaacatggacaagaagtctttcatgattctcttaagtgttgactctaagtacaaaactgggaggtaaaccctttcttggtcataaagtcatagtattttaaaactgaaatagaacttagagtttctctaatgaaaatgcttattgatatcctgagacaacggaagtaatgggagagcaaataatttggccagagttgtacagaaagtaatgctggtatgttgcaatgcacaggaaagataatatgctggatagtaataaataatgcatcgt

SEQ ID NO: 144679 - DNA, 743 bp, Homo sapiens
  Payload ID: 8585
  Gene Symbol: IZUMO3
  Gene Name: IZUMO family member 3
  ENST ID: ENST00000604921
  CDS Start-End: 28-729
tgtcggggagcgggggtgaagaaagaaatgggtgacctgtggttattcctgctcctgcccctctcagccttccatggagtcaaaggctgtttagaatgtgaccccaaatttatagaggatgttggctccttgctgggaaatctgataccttcagaagtccccggccgaactcagctgcttgaacggcagattaaggagatgattcatttaagcttcaaggtctcccacagtgacaagaggcttcgggtgttggctgttcagcaggttgttaagttgagaacatggttgaagaatgaattttataaactgggcaatgaaacatggaaaggtgtctttatctatcaaggcaagcttctcgatgtctgccaaaacctggaatccaaactgaaagaattactaaagaacttctctgaaattgttgtggttgaaggtcccattcttgattgttggacgtgtcttcgcatgactaacaggtgcttcaaaggagaatattgtggagacgaggatccaagaaaggctgagaatcgagagattgctctatttctcatattgctggcaacagctgtaatactgggaagtgctgtgttactattccatttttgcatctttcatcggaggaaaatgaaggcaatacgaaggtcgctaaaggaatatgtggagaagaaacttgaagaattaatggggaagatagatgagaaggaggagaaagactttagactcagaaaataaacacatcaacatgg

SEQ ID NO: 144680 - DNA, 869 bp, Homo sapiens
  Payload ID: 8586
  Gene Symbol: IZUMO4
  Gene Name: IZUMO family member 4
  ENST ID: ENST00000395296
  CDS Start-End: 4-630
ggcatggccctgctgctgtgcctggtgtgcctgacggcggcgctggcccacggctgtctgcactgccacagcaacttctccaagaagttctccttctaccgccaccatgtgaacttcaagtcctggtgggtgggcgacatccccgtgtcaggggcgctgctcaccgactggagcgacgacacgatgaaggagctgcacctggccatccccgccaagatcacccgggagaagctggaccaagtggcgacagcagtgtaccagatgatggatcagctgtaccaggggaagatgtacttccccgggtatttccccaacgagctgcgaaacatcttccgggagcaggtgcacctcatccagaacgccatcatcgaaagccgcatcgactgtcagcaccgctgtggcatcttccagtacgagaccatctcctgcaacaactgcacagactcgcacgtcgcctgctttggctataactgcgagtcctcggcgcagtggaagtcagctgtccagggcctcctgaactacataaataactggcacaacctggtatcgccagccttaaggtgtctggagcccccacacttggccaacctgaccttggaagatgctgctgagtgtctcaagcagcactgacagcagctgggcctgccccagggcaacgtgggggcggagactcagctggacagcccctgcctgtcactctggagctgggctgctgctgcctcaggaccccctctccgaccccggacagagctgagctggccagggccaggagggcgggagggagggaatgggggtgggctgtgcgcagcatcagcgcctgggcaggtccgcagagctgcgggatgtgattaaagtccctgatgtttctc

SEQ ID NO: 144681 - DNA, 1021 bp, Homo sapiens
  Payload ID: 8586
  Gene Symbol: IZUMO4
  Gene Name: IZUMO family member 4
  Uniprot ID: Q1ZYL8
  ENST ID: ENST00000395301
  CDS Start-End: 78-776
ggccgttggttggtgcgcggctgaagggtgtggcgcgagcagcgtcgttggttggccggcggcgggccgggacgggcatggccctgctgctgtgcctggtgtgcctgacggcggcgctggcccacggctgtctgcactgccacagcaacttctccaagaagttctccttctaccgccaccatgtgaacttcaagtcctggtgggtgggcgacatccccgtgtcaggggcgctgctcaccgactggagcgacgacacgatgaaggagctgcacctggccatccccgccaagatcacccgggagaagctggaccaagtggcgacagcagtgtaccagatgatggatcagctgtaccaggggaagatgtacttccccgggtatttccccaacgagctgcgaaacatcttccgggagcaggtgcacctcatccagaacgccatcatcgaaagccgcatcgactgtcagcaccgctgtggcatcttccagtacgagaccatctcctgcaacaactgcacagactcgcacgtcgcctgctttggctataactgcgagtcctcggcgcagtggaagtcagctgtccagggcctcctgaactacataaataactggcacaaacaggacacgagcatgagaccacgctcctctgccttctcctggcctgggacacacagagccaccccggccttcctggtatcgccagccttaaggtgtctggagcccccacacttggccaacctgaccttggaagatgctgctgagtgtctcaagcagcactgacagcagctgggcctgccccagggcaacgtgggggcggagactcagctggacagcccctgcctgtcactctggagctgggctgctgctgcctcaggaccccctctccgaccccggacagagctgagctggccagggccaggagggcgggagggagggaatgggggtgggctgtgcgcagcatcagcgcctgggcaggtccgcagagctgcgggatgtgattaaagtccctgatgtttctctttgca

SEQ ID NO: 144682 - DNA, 944 bp, Homo sapiens
  Payload ID: 8586
  Gene Symbol: IZUMO4
  Gene Name: IZUMO family member 4
  Uniprot ID: Q1ZYL8
  ENST ID: ENST00000395307
  CDS Start-End: 65-709
tgcgcggctgaagggtgtggcgcgagcagcgtcgttggttggccggcggcgggccgggacgggcatggccctgctgctgtgcctggtgtgcctgacggcggcgctggcccacggctgtctgcactgccacagcaacttctccaagaagttctccttctaccgccaccatgtgaacttcaagtcctggtgggtgggcgacatccccgtgtcaggggcgctgctcaccgactggagcgacgacacgatgaaggagctgcacctggccatccccgccaagatcacccgggagaagctggaccaagtggcgacagcagtgtaccagatgatggatcagctgtaccaggggaagatgtacttccccgggtatttccccaacgagctgcgaaacatcttccgggagcaggtgcacctcatccagaacgccatcatcgaaagccgcatcgactgtcagcaccgctgtggcatcttccagtacgagaccatctcctgcaacaactgcacagactcgcacgtcgcctgctttggctataactgcgagtcctcggcgcagtggaagtcagctgtccagggcctcctgaactacataaataactggcacaaacaggacacgagcatgagcctggtatcgccagccttaaggtgtctggagcccccacacttggccaacctgaccttggaagatgctgctgagtgtctcaagcagcactgacagcagctgggcctgccccagggcaacgtgggggcggagactcagctggacagcccctgcctgtcactctggagctgggctgctgctgcctcaggaccccctctccgaccccggacagagctgagctggccagggccaggagggcgggagggagggaatgggggtgggctgtgcgcagcatcagcgcctgggcaggtccgcagagctgcgggatgtgattaaagtccctgatgtt

SEQ ID NO: 144683 - DNA, 864 bp, Homo sapiens
  Payload ID: 8586
  Gene Symbol: IZUMO4
  Gene Name: IZUMO family member 4
  ENST ID: ENST00000591894
  CDS Start-End: 1-415
gtctgcactgccacagcaacttctccaagaagttctccttctaccgccaccatgtgaacttcaagtcctggtgggtgggcgacatccccgtgtcaggggcgctgctcaccgactggagcgacgacacgatgaaggagctgcacctggccatccccgccaagatcacccgggagaagctggaccaagtggcgacagcagtgtaccagatgatggatcagctgtaccaggggaagatgtacttccccgggtatttccccaacgagctgcgaaacatcttccgggagcaggtgcacctcatccagaacgccatcatcgaaagccgcatcgactgtcagcaccgctgtggcatcttccagtacgagaccatctcctgcaacaactgcacagactcgcacgtcgcctgctttggctataactgcgagtcctcggcgcagtggaagtcagctgtccagggcctcctgaactacataaataactggcacaagtaagtcccctcctcaaaccaacacaggcagtgtgtgtatgtgagcacctcgtgggtgagtatgtgtggggcacaggctggctccctcagctcccacgtcctagaggggctcccgaggaggtggaacctcaacccagctctgcgcaggaggcggctgcagtccttttctccctcaaaggtctccgaccctcagctggaggcgggcatctttcctaaagggtccccatagggtctggttccaccccatcccaggtctgtggtcagagcctgggagggttccctacgatggttaggggtgccccatggaggggctgactgccccacattgcctttcagacaggacacgagcatgaggtaaggccgccctgacctggacttca

SEQ ID NO: 144684 - DNA, 707 bp, Homo sapiens
  Payload ID: 8586
  Gene Symbol: IZUMO4
  Gene Name: IZUMO family member 4
  ENST ID: ENST00000610800
  CDS Start-End: 1-459
gtgtcaggggcgctgctcaccgactggagcgacgacacgatgaaggagctgcacctggccatccccgccaagatcacccgggagaagctggaccaagtggcgacagcagtgtaccagatgatggatcagctgtaccaggggaagatgtacttccccgggtatttccccaacgagctgcgaaacatcttccgggagcaggtgcacctcatccagaacgccatcatcgaaagcatcttccagtacgagaccatctcctgcaacaactgcacagactcgcacgtcgcctgctttggctataactgcgagtcctcggcgcagtggaagtcagctgtccagggcctcctgaactacataaataactggcacaacctggtatcgccagccttaaggtgtctggagcccccacacttggccaacctgaccttggaagatgctgctgagtgtctcaagcagcactgacagcagctgggcctgccccagggcaacgtgggggcggagactcagctggacagcccctgcctgtcactctggagctgggctgctgctgcctcaggaccccctctccgaccccggacagagctgagctggccagggccaggagggcgggagggagggaatgggggtgggctgtgcgcagcatcagcgcctgggcaggtccgcagagctgcgggatgtgattaaagtccctgatgtttctctttgcagaa

SEQ ID NO: 144685 - DNA, 947 bp, Homo sapiens
  Payload ID: 8586
  Gene Symbol: IZUMO4
  Gene Name: IZUMO family member 4
  ENST ID: ENST00000620263
  CDS Start-End: 16-570
cgggccgggacgggcatggccctgctgctgtgcctggtgtgcctgacggcggcgctggcccacggctgtctgcactgccacagcaacttctccaagaagttctccttctaccgccaccatgtgaacttcaagtcctggtgggtgggcgacatccccgtgtcaggggcgctgctcaccgactggagcgacgacacgatgaaggagctgcacctggccatccccgccaagatcacccgggagaagctggaccaagtggcgacagcagtgtaccagatgatggatcagctgtaccaggggaagatgtacttccccggtaaggggcgcgaaaccgaggcggggcccccccaccccgggacaccccgcccaccgcctgagcctgaccttctcctgcctcgacgactcagggtatttccccaacgagctgcgaaacatcttccgggagcaggtgcacctcatccagaacgccatcatcgaaagccgcatcgactgtcagcaccgctgtggtcctcggcgcagtggaagtcagctgtccagggcctcctgaactacataaataactggcacaagtaagtcccctcctcaaaccaacacaggcagtgtgtgtatgtgagcacctcgtgggtgagtatgtgtggggcacaggctggctccctcagctcccacgtcctagaggggctcccgaggaggtggaacctcaacccagctctgcgcaggaggcggctgcagtccttttctccctcaaaggtctccgaccctcagctggaggcgggcatctttcctaaagggtccccatagggtctggttccaccccatcccaggtctgtggtcagagcctgggagggttccctacgatggttaggggtgccccatggaggggctgactgccccacattgcctttcagacaggacacgagcatgaggtaaggccgccctgacctggacttcag

SEQ ID NO: 144686 - DNA, 510 bp, Homo sapiens
  Payload ID: 8586
  Gene Symbol: IZUMO4
  Gene Name: IZUMO family member 4
  ENST ID: ENST00000588003
  CDS Start-End: 1-457
gccacagcaacttctccaagaagttctccttctaccgccaccatgtgaacttcaagtcctggtgggtgggcgacatccccgtgtcaggggcgctgctcaccgactggagcgacgacacgatgaaggagctgcacctggccatccccgccaagatcacccgggagaagctggaccaagtggcgacagcagtgtaccagatgatggatcagctgtaccaggggaagatgtacttccccgggtatttccccaacgagctgcgaaacatcttccgggagcaggtgcacctcatccagaacgccatcatcgaaagccgcatcgactgtcagcaccgctgtggtcctcggcgcagtggaagtcagctgtccagggcctcctgaactacataaataactggcacaaaccacgctcctctgccttctcctggcctgggacacacagagccaccccggccttgtgagtgacccagagaagggaggcctcgggagaaggggtgctcgtaagccaacacca

SEQ ID NO: 144687 - DNA, 1621 bp, Homo sapiens
  Payload ID: 8587
  Gene Symbol: IZUMO1
  Gene Name: izumo sperm-egg fusion 1
  Uniprot ID: Q8IYV9
  ENST ID: ENST00000332955
  CDS Start-End: 549-1601
ggaatatctataaaggaattcgggcccctacgtgagaagctcggagggggtggtttcaggagttccttgtggagaggggatcgtccgtgactcagaccccgtcgaaaagctctcgatttcacgcaaccaaccttaccctcgtccccaacacaatccttgattttacccctgggaaaattagcgtaggtggtcatgaccccggcttcctctttaaaagccctcagaacctggaccgggctcctcaatgaaccctagtgttagaggccacaaatcgggaaccaaggtcggggagcggctgtttagggtgcatcactgttcaggatgcatcggggctcctttttctaagcggaagggtgcgccctgcaaattgggagcccgttagttttggggaagggtgaacaagggccccctaggtctagaggaccgcatggagtctcgcttaagtgttagtggggtcctcagttctaggaatctgcgttctcctgctctcggtttggggtgagagcacccttcctaacggtcttcgggaactgtgcgcgccggctgcaatggggccgcattttaccctcctgtgtgcggcgctggccggttgcttgcttcctgccgaggggtgtgttatatgtgacccgtctgtcgtgctggcgctaaagtccctggagaaagattacctgcctggccacctggatgcgaagcatcacaaagccatgatggaaagggtagagaatgccgtgaaggatttccaggaactgtcgcttaatgaggatgcctatatgggggtcgttgatgaggccacactgcaaaaggggtcctggagtttgctgaaggatctgaaacgcatcacagacagtgatgtaaaaggcgatctcttcgtgaaggagctattttggatgttgcacttgcaaaaggaaacctttgccacctatgttgctcgattccaaaaagaggcttattgtcccaacaaatgtggtgtgatgttgcaaactctgatctggtgcaagaactgcaaaaaggaggttcacgcttgtcgaaagtcctacgattgcggggagcggaatgtggaagttcctcaaatggaagacatgatcctggactgtgagttaaactggcatcaggcttcggaaggcctcactgattacagcttttacagggtttgggggaacaatacggagaccttggtgtccaaggggaaagaggccaccctgaccaagcccatggtgggtccagaggatgcaggcagctaccgctgcgagctgggctctgtgaattccagcccagccacgatcatcaattttcacgtcacagtgttgcccaaaatgatcaaggaggaaaaaccttctccaaatatcgtaaccccgggggaggcgaccacggagtcgtccataagcctccagcctctgcagcccgagaaaatgctggcaagccgccttctggggctgctgatctgcggctccctagcactgataaccggccttacctttgcgatatttcgtcgaaggaaggtgatcgatttcatcaaatcctcactgtttggccttggcagtggagcggccgagcaaacccaggtcccaaaagaaaaggccacagattcgaggcaacaataaagatttatcttgttgtctaa

SEQ ID NO: 144688 - DNA, 1090 bp, Homo sapiens
  Payload ID: 8587
  Gene Symbol: IZUMO1
  Gene Name: izumo sperm-egg fusion 1
  Uniprot ID: Q8IYV9
  ENST ID: ENST00000595937
  CDS Start-End: 1-585
atggggccgcattttaccctcctgtgtgcggcgctggccggttgcttgcttcctgccgaggggtgtgttatatgtgacccgtctgtcgtgctggcgctaaagtccctggagaaagattacctgcctggccacctggatgcgaagcatcacaaagccatgatggaaagggtagagaatgccgtgaaggatttccaggaactgtcgcttaatgaggatgcctatatgggggtcgttgatgaggccacactgcaaaaggggtcctggagtttgctgaaggatctgaaacgcatcacagacagtgatgtaaaaggcgatctcttcgtgaaggagctattttggatgttgcacttgcaaaaggaaacctttgccacctatgttgctcgattccaaaaagaggcttattgtcccaacaaatgtggtgtgatgttgcaaactctgatctggtgcaagaactgcaaaaaggaggttcacgcttgtcgaaagtcctacgattgcgggggtgagagaactggacccagcaggaggaattggtgcagagcggaatgtggaagttcctcaaatggaagacatgatcctggactgtgagttaaactggcatcaggcttcggaaggcctcactgattacagcttttacagggtttgggggaacaatacggagaccttggtgtccaaggggaaagaggccaccctgaccaagcccatggtgggtccagaggatgcaggcagctaccgctgcgagctgggctctgtgaattccagcccagccacgatcatcaattttcacgtcacagtgttgcccaaaatgatcaaggaggaaaaaccttctccaaatatcgtaaccccgggggaggcgaccacggagtcgtccataagcctccagcctctgcagcccgagaaaatgctggcaagccgccttctggggctgctgatctgcggctccctagcactgataaccggccttacctttgcgatatttcgtcgaaggaaggtgatcgatttcatcaaatcctcactgtttggccttggcagtggagcggccgagcaaacccaggtcccaaaagaaaaggccacagattcgaggcaacaataa

SEQ ID NO: 144689 - DNA, 221 bp, Homo sapiens
  Payload ID: 8587
  Gene Symbol: IZUMO1
  Gene Name: izumo sperm-egg fusion 1
  ENST ID: ENST00000602105
  CDS Start-End: 175-221
tcgatttcacgcaaccaaccttaccctcgtccccaacacaatccttgattttacccctgggaaaattagcatgaggccacactgcaaaaggggtcctggagtttgctgaaggatctgaaacgcatcacagacagtgatgtaaaaggcgatctcttcgtgaaggagctattttggatgttgcacttgcaaaaggaaacctttgccacctatgttgctcgatt

SEQ ID NO: 144690 - DNA, 1016 bp, Homo sapiens
  Payload ID: 8587
  Gene Symbol: IZUMO1
  Gene Name: izumo sperm-egg fusion 1
  Uniprot ID: Q8IYV9
  ENST ID: ENST00000595517
  CDS Start-End: 1-207
atggggccgcattttaccctcctgtgtgcggcgctggccggttgcttgcttcctgccgaggggtgtgttatatgtgacccgtctgtcgtgctggcgctaaagtccctggagaaagattacctgcctggccacctggatgcgaagcatcacaaagccatgatggaaaggatgaggccacactgcaaaaggggtcctggagtttgctgaaggatctgaaacgcatcacagacagtgatgtaaaaggcgatctcttcgtgaaggagctattttggatgttgcacttgcaaaaggaaacctttgccacctatgttgctcgattccaaaaagaggcttattgtcccaacaaatgtggtgtgatgttgcaaactctgatctggtgcaagaactgcaaaaaggaggttcacgcttgtcgaaagtcctacgattgcggggagcggaatgtggaagttcctcaaatggaagacatgatcctggactgtgagttaaactggcatcaggcttcggaaggcctcactgattacagcttttacagggcctcagtgaccccttgagcttgggtctaggtttgggggaacaatacggagaccttggtgtccaaggggaaagaggccaccctgaccaagcccatggtgggtccagaggatgcaggcagctaccgctgcgagctgggctctgtgaattccagcccagccacgatcatcaattttcacgtcacagtgttgcccaaaatgatcaaggaggaaaaaccttctccaaatatcgtaaccccgggggaggcgaccacggagtcgtccataagcctccagcctctgcagcccgagaaaatgctggcaagccgccttctggggctgctgatctgcggctccctagcactgataaccggccttacctttgcgatatttcgtcgaaggaaggtgatcgatttcatcaaatcctcactgtttggccttggcagtggagcggccgagcaaacccaggtcccaaaagaaaaggccacagattcgaggcaacaataa

SEQ ID NO: 144691 - DNA, 583 bp, Homo sapiens
  Payload ID: 8588
  Gene Symbol: IZUMO1R
  Gene Name: IZUMO1 receptor, JUNO
  ENST ID: ENST00000328458
  CDS Start-End: 1-583
tcctgctagagctgtggacagtcatgcccacctgggctggggacgagctgctcaacatctgcatgaatgccaaacaccacaagagagtgcccagcccagaagacaagctctatgaggagtgcatcccctggaaggacaatgcctgctgcaccctcacgacaagctgggaagcccatctggatgtatccccactctacaacttcagcctgtttcactgtggactgctgatgcctggctgtcggaagcacttcatccaggctatctgcttctatgagtgctccccaaacctggggccctggatccagccagtgggaagcctggggtgggaggtggccccgagtgggcagggagagcgagttgtgaatgtgccgctgtgccaggaggactgtgaggagtggtgggaagactgtcgcatgtcttacacatgcaaatccaactggcgtggtggctgggactggagtcaggggaagaaccgctgccccaaaggggcccagtgcctccctttctcccattacttccccaccccagctgacctgtgtgagaagacttggagcaattccttcaaagccagccctgagcgacg

SEQ ID NO: 144692 - DNA, 805 bp, Homo sapiens
  Payload ID: 8588
  Gene Symbol: IZUMO1R
  Gene Name: IZUMO1 receptor, JUNO
  Uniprot ID: A6ND01
  ENST ID: ENST00000440961
  CDS Start-End: 45-776
tcatttccatcaagtgtgcagcatgggtctctctgtagcaggccatggcatgctggtggccgctcctgctagagctgtggacagtcatgcccacctgggctggggacgagctgctcaacatctgcatgaatgccaaacaccacaagagagtgcccagcccagaagacaagctctatgaggagtgcatcccctggaaggacaatgcctgctgcaccctcacgacaagctgggaagcccatctggatgtatccccactctacaacttcagcctgtttcactgtggactgctgatgcctggctgtcggaagcacttcatccaggctatctgcttctatgagtgctccccaaacctggggccctggatccagccagtggccccgagtgggcagggagagcgagttgtgaatgtgccgctgtgccaggaggactgtgaggagtggtgggaagactgtcgcatgtcttacacatgcaaatccaactggcgtggtggctgggactggagtcaggggaagaaccgctgccccaaaggggcccagtgcctccctttctcccattacttccccaccccagctgacctgtgtgagaagacttggagcaattccttcaaagccagccctgagcgacggaacagtgggcggtgtctccagaagtggtttgagcctgctcagggcaaccccaatgtggccgtggcccgcctcttcgccagctctgccccatcctgggaactgtcctacaccatcatggtctgctccctgttcctgccgttcctttcctgagagcccttcttctcccactcacattcctg

SEQ ID NO: 144693 - DNA, 5772 bp, Homo sapiens
  Payload ID: 8589
  Gene Symbol: JADE1
  Gene Name: jade family PHD finger 1
  Uniprot ID: Q6IE81
  ENST ID: ENST00000226319
  CDS Start-End: 282-2810
cgttttggcaagggattaaagtgctcccccctgtggcagcagtgacccagaaatgagtttgattcacatagtccttcctccataacaagccaaacgccagaccgagagtgcctccgtgcgcgagtgcccggtgtgtgcgcgccggcgagagcaggggcccgcccggctccccgcccgccgcggcccgaactcatgcagctccgagcgagcgagcggcgcccagcccagcgcctcggccgaacccctccgcagcaggctgcctgctgtttcccggggagatcatgaaacgaggtcgccttcccagcagcagtgaggattctgacgacaatggcagcctgtcaactacttggtcccagaattcccgatcccagcataggagaagctcctgctccagacatgaagatcgaaagccttcagaggtgtttaggacagacctgatcactgccatgaagttgcatgactcctaccagctgaatccggatgagtactatgtgttggcagatccctggagacaggaatgggagaaaggggtccaggtgcctgtgagcccggggaccatccctcagcctgtggccagggttgtgtctgaagagaaatccctcatgttcatcaggcccaagaagtacatcgtgtcatcaggctctgagcctcccgagttgggctatgtggacatccggacgctggctgacagcgtgtgtcgctatgacctcaatgacatggatgctgcatggctggaactgaccaatgaagaatttaaggagatgggaatgcctgaactagatgaatacaccatggagagggtcctagaggaatttgagcagcgatgctacgacaatatgaatcatgccatagagactgaggaaggcctggggatcgaatatgatgaagatgttgtctgtgatgtctgccagtctcctgatggtgaggacggcaatgagatggtgttctgtgacaaatgcaacatctgtgtgcaccaggcctgttatggaatcctcaaggtaccagagggcagctggctgtgccggacatgtgccctgggggttcagccaaaatgtctgctgtgtccgaagaagggtggagctatgaagcccacccgtagcggaaccaagtgggtccacgttagctgtgctctgtggatccctgaggtgagcattggcagcccagagaagatggagcccatcaccaaggtgtcacacattcccagcagccggtgggcgctagtgtgcagcctctgcaatgagaagtttggggcctctatacagtgctctgtgaagaactgccgcacagccttccatgtgacctgtgcttttgaccggggcctggagatgaagaccatcttagcagagaatgatgaagtcaagttcaagtcctattgcccaaagcacagctcacataggaaacccgaggagagtcttggcaagggggctgcacaggagaatggggcccctgagtgttccccccggaatccgctggagccctttgccagccttgagcagaaccgggaggaggcccaccgggtgagtgtccgtaagcagaagctgcagcagttggaggatgagttctacaccttcgtcaacctgctggatgttgccagggctctgcggctgcctgaggaagtagtggatttcctgtaccagtactggaagttgaagaggaaggtcaacttcaacaagcccctgatcaccccaaagaaagatgaagaggacaatctagccaagcgggagcaggatgtcttatttaggaggctgcagctgttcacgcacctgcggcaggacctggagagggttcggaacctcacttacatggtgacccgcagggaaaagattaaacggtctgtgtgcaaagtccaggaacagatattcaatctttacactaagcttttggagcaagaaagagtttcaggtgtgccttcttcctgctcctcctcctcactggaaaacatgcttttgtttaacagtccttctgttggccctgatgctcccaagatagaggacttgaagtggcattctgcattcttcagaaaacaaatgggtacttccttggttcattcgctgaaaaagccccataagcgagatcctttgcagaatagccctggaagtgaaggcaaaaccctgctgaagcagccagacctgtgtggtagaagggaggggatggtggtcccagagagctttttgggtttagaaaagacctttgcagaagcacgtctcatatcagcacaacagaaaaatggtgtggtgatgccagaccatgggaaaagaagagacaatcgttttcattgtgatctcattaaaggagacttaaaggacaaatcttttaaacagagtcacaagcctctcaggtccacagatgtgtcccagaggcatctggacaacacaagagctgccacctcccctggagtggggcagtcagcacctggcacaaggaaggagatagtgcccaagtgcaatggctccctaatcaaagtaaactataatcagactgcagtcaaagtgcctacaacacctgccagcccagtgaaaaactggggaggattccggattccaaagaagggggaacggcagcagcagggagaggcccacgatggggcctgccaccagcactcagactacccatatttgggcttaggccgagttccagccaaggaaagggcaaaaagcaaattaaaatccgacaatgagaatgacgggtatgtccccgatgtggaaatgagtgactcagagagtgaggcatcagaaaagaaatgtatacacaccagcagcactatcagcagaaggacagacattatcaggagaagcatcttggcttcttgatgcaacagagatgatgcggaagccctttgggctcgtcattgggtttgctagaggagagctctgatgtgggggagaagcagaaacccattaatcctgagctacacaaacacatttacttgcaattcagattaatttttttccagagtcatttttaaatcatttttgtgagaagtttgtgttatttgcaacttgttgaggaaacagaagagtagattgtaaccataagacactgctaagactagaacccgaactgaacactaaaataaaaatgaaatgttttaaagaaggcaaggcttaaataagcctcatgaatttttatagccctctgcattcttcccaaagcacaaactcatggttacctgaatatagggaaccagatatggttcttgagaaaccctcatggtaccattcacagcccataaagtttattttctaggactgtggtagatcttgaaatcatatttatatttggccctcaaggctatttttgttgcattatagcatataggcagcagctctgaagcttcagtaacactaagaaatttatgtgtaaatatagcagtcagggaagagaattttaaaaaaggtcattattgaagaagctgaggggacagggtagagctgctgcaatatggagatttagggtaatatggcaaggtcctgctgcttgaagcctgtgagtgggttgtggatatgggactggtggagagtgagactgttaggaaagttgtatctatgaataagggcagttgaagtagaatttttaccagtccacttgaccttcttcttccctaaccactggctcttgagccagcttgggatttccctggccattgccaatacctggccatctggcttccaatagtacagtggctactcaagttcaagcgaagaacttccagactctggtgactgttacttcccagagccaaccactagtgcatatgttagggaatctgggcttccaacatgaatggattccttaagaaaaaggaaaaaaaaaaaaaaaagaaaaaaagaaaaaaaaaagaaaaaagaaaaaaagagaaaaaagcgaaataggttatattttaaaaacaatagaaaggcaataagttgcgataagctcttactattgaccaaggttatacaggaaagagactgaagtgtacccttgaataggttttctgtagtcagagttctaaactctaatttgtaacttggactttctaattgcaaatggcaataactattaagttatcagcaataataaatttagcattaaatttgagtacaatgttttgtttttgcactccccatagtgcgtatgtattaagacagtggatagtgtttaggtcctgttaattttctttggaattcaatgtggttgtgaatcaaacttaaggaaggaacgtttaaatagcaatgagatacagaattatgggcctttggaacaagcccgacttcccctaaattctccttagtttgttaataccagtattcagattcctgattcatttatacatctgtttccatatggcagggacattatgatacttaatgaataatgctttgaggagttctgcagttaactttcaagtcttccagatgattgtcaacaacaaaaaaggcttattgaatcccatcttgctatgcaagttttatcagatgatcaaatagtagatctgatacatccccattgtatgtacgacattttcaaaccaagtcttaacttttcaaggacattttagtagctaattcaggggagggggaagaatgatgcaggtttttagattgactgactatttttgagttatggggctcattttgaaagactgctgtccagatcagcttgttgctgcagataatagaaggttcttatgaatccaagttgtatattcacttgtaggataatttaaaaattagattttttttgcatatgagcaaaaaccttttgctggatacaggagaaggttggactttatctacagttatcttttgattacagcaacagctctgggtgagagtagaatttatagagggataatttgtcaagccatagaaagaaaatctaaattaatctagtaagtgtatgacctctcaccattttaagaggtatcagattcatttgcactattaggaatgctagttttgtgcaaaaataatgccttacctgttttttccccacatttaggttgaaaagctttcaaatgttccaagttatgctgaaccaaaaaaaacaaaacaaaaacaaaacaaaaaatattaaaaaaaacccacacaaaaacaaaacacacaaaaataaaaagcccacactttttattcctgcttcgaaatgcaaatggatagagcacggtttctctgacagtataatgatagctttgtgagttagtttcatgtcatgctgggaactctctatgaggtggccataagcagcaaccagcccaaacacccacttgcgttctattagtatggaaccatttgcatttgttttttttaagctttatctttccttgtgcatcctgaccaagaaatatctttgattatgattaatgtattatgtcaaaatgtaggctagttaaacttttgtaaagttgcctggaatgtcatttgttaggttataaacacaagatctaaatgaagggttttatgtgttgtgtacaaatcttattttgaaatggacaaacttgtcattacatttgtaaccttgtacagaggatttttcactatgtgcctagcttggtgtccattcagctaaaattgaaaaaaaaaaaaaggtgcatgaagagttaaaaatcaaattaaagtatatgtagagatgactattttatattacatgacccaatcctgtatttatttctaccccctttttgaaagtatttataaaactagttgaggacagctgtatttttttgttgaactatttagtagaattgtgcctttttgtctgtatgtgaataaatgctgtacattttgcaataca

SEQ ID NO: 144694 - DNA, 5544 bp, Homo sapiens
  Payload ID: 8589
  Gene Symbol: JADE1
  Gene Name: jade family PHD finger 1
  Uniprot ID: Q6IE81
  ENST ID: ENST00000452328
  CDS Start-End: 90-2582
atgcagctccgagcgagcgagcggcgcccagcccagcgcctcggccgaacccctccgcagcaggctgcctgctgtttcccggggagatcatgaaacgaggtcgccttcccagcagcagtgaggattctgacgacaatggcagcctgtcaactacttggtcccagaattcccgatcccagcataggagaagctcctgctccagacatgaagatcgaaagccttcagaggtgtttaggacagacctgatcactgccatgaagttgcatgactcctaccagctgaatccggatgagtactatgtgttggcagatccctggagacaggaatgggagaaaggggtccaggtgcctgtgagcccggggaccatccctcagcctgtggccaggcccaagaagtacatcgtgtcatcaggctctgagcctcccgagttgggctatgtggacatccggacgctggctgacagcgtgtgtcgctatgacctcaatgacatggatgctgcatggctggaactgaccaatgaagaatttaaggagatgggaatgcctgaactagatgaatacaccatggagagggtcctagaggaatttgagcagcgatgctacgacaatatgaatcatgccatagagactgaggaaggcctggggatcgaatatgatgaagatgttgtctgtgatgtctgccagtctcctgatggtgaggacggcaatgagatggtgttctgtgacaaatgcaacatctgtgtgcaccaggcctgttatggaatcctcaaggtaccagagggcagctggctgtgccggacatgtgccctgggggttcagccaaaatgtctgctgtgtccgaagaagggtggagctatgaagcccacccgtagcggaaccaagtgggtccacgttagctgtgctctgtggatccctgaggtgagcattggcagcccagagaagatggagcccatcaccaaggtgtcacacattcccagcagccggtgggcgctagtgtgcagcctctgcaatgagaagtttggggcctctatacagtgctctgtgaagaactgccgcacagccttccatgtgacctgtgcttttgaccggggcctggagatgaagaccatcttagcagagaatgatgaagtcaagttcaagtcctattgcccaaagcacagctcacataggaaacccgaggagagtcttggcaagggggctgcacaggagaatggggcccctgagtgttccccccggaatccgctggagccctttgccagccttgagcagaaccgggaggaggcccaccgggtgagtgtccgtaagcagaagctgcagcagttggaggatgagttctacaccttcgtcaacctgctggatgttgccagggctctgcggctgcctgaggaagtagtggatttcctgtaccagtactggaagttgaagaggaaggtcaacttcaacaagcccctgatcaccccaaagaaagatgaagaggacaatctagccaagcgggagcaggatgtcttatttaggaggctgcagctgttcacgcacctgcggcaggacctggagagggttcggaacctcacttacatggtgacccgcagggaaaagattaaacggtctgtgtgcaaagtccaggaacagatattcaatctttacactaagcttttggagcaagaaagagtttcaggtgtgccttcttcctgctcctcctcctcactggaaaacatgcttttgtttaacagtccttctgttggccctgatgctcccaagatagaggacttgaagtggcattctgcattcttcagaaaacaaatgggtacttccttggttcattcgctgaaaaagccccataagcgagatcctttgcagaatagccctggaagtgaaggcaaaaccctgctgaagcagccagacctgtgtggtagaagggaggggatggtggtcccagagagctttttgggtttagaaaagacctttgcagaagcacgtctcatatcagcacaacagaaaaatggtgtggtgatgccagaccatgggaaaagaagagacaatcgttttcattgtgatctcattaaaggagacttaaaggacaaatcttttaaacagagtcacaagcctctcaggtccacagatgtgtcccagaggcatctggacaacacaagagctgccacctcccctggagtggggcagtcagcacctggcacaaggaaggagatagtgcccaagtgcaatggctccctaatcaaagtaaactataatcagactgcagtcaaagtgcctacaacacctgccagcccagtgaaaaactggggaggattccggattccaaagaagggggaacggcagcagcagggagaggcccacgatggggcctgccaccagcactcagactacccatatttgggcttaggccgagttccagccaaggaaagggcaaaaagcaaattaaaatccgacaatgagaatgacgggtatgtccccgatgtggaaatgagtgactcagagagtgaggcatcagaaaagaaatgtatacacaccagcagcactatcagcagaaggacagacattatcaggagaagcatcttggcttcttgatgcaacagagatgatgcggaagccctttgggctcgtcattgggtttgctagaggagagctctgatgtgggggagaagcagaaacccattaatcctgagctacacaaacacatttacttgcaattcagattaatttttttccagagtcatttttaaatcatttttgtgagaagtttgtgttatttgcaacttgttgaggaaacagaagagtagattgtaaccataagacactgctaagactagaacccgaactgaacactaaaataaaaatgaaatgttttaaagaaggcaaggcttaaataagcctcatgaatttttatagccctctgcattcttcccaaagcacaaactcatggttacctgaatatagggaaccagatatggttcttgagaaaccctcatggtaccattcacagcccataaagtttattttctaggactgtggtagatcttgaaatcatatttatatttggccctcaaggctatttttgttgcattatagcatataggcagcagctctgaagcttcagtaacactaagaaatttatgtgtaaatatagcagtcagggaagagaattttaaaaaaggtcattattgaagaagctgaggggacagggtagagctgctgcaatatggagatttagggtaatatggcaaggtcctgctgcttgaagcctgtgagtgggttgtggatatgggactggtggagagtgagactgttaggaaagttgtatctatgaataagggcagttgaagtagaatttttaccagtccacttgaccttcttcttccctaaccactggctcttgagccagcttgggatttccctggccattgccaatacctggccatctggcttccaatagtacagtggctactcaagttcaagcgaagaacttccagactctggtgactgttacttcccagagccaaccactagtgcatatgttagggaatctgggcttccaacatgaatggattccttaagaaaaaggaaaaaaaaaaaaaaaagaaaaaaagaaaaaaaaaagaaaaaagaaaaaaagagaaaaaagcgaaataggttatattttaaaaacaatagaaaggcaataagttgcgataagctcttactattgaccaaggttatacaggaaagagactgaagtgtacccttgaataggttttctgtagtcagagttctaaactctaatttgtaacttggactttctaattgcaaatggcaataactattaagttatcagcaataataaatttagcattaaatttgagtacaatgttttgtttttgcactccccatagtgcgtatgtattaagacagtggatagtgtttaggtcctgttaattttctttggaattcaatgtggttgtgaatcaaacttaaggaaggaacgtttaaatagcaatgagatacagaattatgggcctttggaacaagcccgacttcccctaaattctccttagtttgttaataccagtattcagattcctgattcatttatacatctgtttccatatggcagggacattatgatacttaatgaataatgctttgaggagttctgcagttaactttcaagtcttccagatgattgtcaacaacaaaaaaggcttattgaatcccatcttgctatgcaagttttatcagatgatcaaatagtagatctgatacatccccattgtatgtacgacattttcaaaccaagtcttaacttttcaaggacattttagtagctaattcaggggagggggaagaatgatgcaggtttttagattgactgactatttttgagttatggggctcattttgaaagactgctgtccagatcagcttgttgctgcagataatagaaggttcttatgaatccaagttgtatattcacttgtaggataatttaaaaattagattttttttgcatatgagcaaaaaccttttgctggatacaggagaaggttggactttatctacagttatcttttgattacagcaacagctctgggtgagagtagaatttatagagggataatttgtcaagccatagaaagaaaatctaaattaatctagtaagtgtatgacctctcaccattttaagaggtatcagattcatttgcactattaggaatgctagttttgtgcaaaaataatgccttacctgttttttccccacatttaggttgaaaagctttcaaatgttccaagttatgctgaaccaaaaaaaacaaaacaaaaacaaaacaaaaaatattaaaaaaaacccacacaaaaacaaaacacacaaaaataaaaagcccacactttttattcctgcttcgaaatgcaaatggatagagcacggtttctctgacagtataatgatagctttgtgagttagtttcatgtcatgctgggaactctctatgaggtggccataagcagcaaccagcccaaacacccacttgcgttctattagtatggaaccatttgcatttgttttttttaagctttatctttccttgtgcatcctgaccaagaaatatctttgattatgattaatgtattatgtcaaaatgtaggctagttaaacttttgtaaagttgcctggaatgtcatttgttaggttataaacacaagatctaaatgaagggttttatgtgttgtgtacaaatcttattttgaaatggacaaacttgtcattacatttgtaaccttgtacagaggatttttcactatgtgcctagcttggtgtccattcagctaaaattgaaaaaaaaaaaaaggtgcatgaagagttaaaaatcaaattaaagtatatgtagagatgactattttatattacatgacccaatcctgtatttatttctaccccctttttgaaagtatttataaaactagttgaggacagctgtatttttttgttgaactatttagtagaattgtgcctttttgtctgtatgtgaataaatgctgtacattttgcaataca

SEQ ID NO: 144695 - DNA, 4012 bp, Homo sapiens
  Payload ID: 8589
  Gene Symbol: JADE1
  Gene Name: jade family PHD finger 1
  Uniprot ID: Q6IE81
  ENST ID: ENST00000413543
  CDS Start-End: 105-1634
acggcacccgccagtgggggtgcctcaacttccgcgggcgtttaaatagcagcctctctcccctcccaccggtaataggctgcctgctgtttcccggggagatcatgaaacgaggtcgccttcccagcagcagtgaggattctgacgacaatggcagcctgtcaactacttggtcccagaattcccgatcccagcataggagaagctcctgctccagacatgaagatcgaaagccttcagaggtgtttaggacagacctgatcactgccatgaagttgcatgactcctaccagctgaatccggatgagtactatgtgttggcagatccctggagacaggaatgggagaaaggggtccaggtgcctgtgagcccggggaccatccctcagcctgtggccagggttgtgtctgaagagaaatccctcatgttcatcaggcccaagaagtacatcgtgtcatcaggctctgagcctcccgagttgggctatgtggacatccggacgctggctgacagcgtgtgtcgctatgacctcaatgacatggatgctgcatggctggaactgaccaatgaagaatttaaggagatgggaatgcctgaactagatgaatacaccatggagagggtcctagaggaatttgagcagcgatgctacgacaatatgaatcatgccatagagactgaggaaggcctggggatcgaatatgatgaagatgttgtctgtgatgtctgccagtctcctgatggtgaggacggcaatgagatggtgttctgtgacaaatgcaacatctgtgtgcaccaggcctgttatggaatcctcaaggtaccagagggcagctggctgtgccggacatgtgccctgggggttcagccaaaatgtctgctgtgtccgaagaagggtggagctatgaagcccacccgtagcggaaccaagtgggtccacgttagctgtgctctgtggatccctgaggtgagcattggcagcccagagaagatggagcccatcaccaaggtgtcacacattcccagcagccggtgggcgctagtgtgcagcctctgcaatgagaagtttggggcctctatacagtgctctgtgaagaactgccgcacagccttccatgtgacctgtgcttttgaccggggcctggagatgaagaccatcttagcagagaatgatgaagtcaagttcaagtcctattgcccaaagcacagctcacataggaaacccgaggagagtcttggcaagggggctgcacaggagaatggggcccctgagtgttccccccggaatccgctggagccctttgccagccttgagcagaaccgggaggaggcccaccgggtgagtgtccgtaagcagaagctgcagcagttggaggatgagttctacaccttcgtcaacctgctggatgttgccagggctctgcggctgcctgaggaagtagtggatttcctgtaccagtactggaagttgaagaggaaggtcaacttcaacaagcccctgatcaccccaaagaaagatgaagaggacaatctagccaagcgggagcaggatgtcttatttaggaggctgcagctgttcacgcacctgcggcaggacctggagagggtaatgattgacactgacaccttatagtgacttagagaagaagatgcaaagaggcgaacgctcgcccagagcaagaaatgatagccagtcatatactctcagacccttgtacacaccacagcatgaggttgtgttggttaaaaatatttatgggctggtaaactcattgtacatatgtgcaaaactgctactgagtggggagcttctttgtggtttttttttttttaaaaacactttcccattaatctttactgttttgtaagatcaaatggggtgtgtcttccccacccccattccttcattctagagctagagtgaatgagccccaagaaaatgacccaaggagttgactcaggatggtttacagactgatttagaaaaccagaacggatttcatttctaatggagggggccagagatgggaaaatttcttgttcagtccggggaaacacacctaggtgctggtgatgggcttatgaaggaagctaagcacggctgctcactggcccccactttgtttcttgggtaattcacaggggaattcccagtactgtcatggagcagagcaggcagtgggtgctgatgtgtgtgcatgagctgtatgtacacatgcatatatctgttacagaagatactcctggcagtgaggtgctaagtcatcactgaggctgtgtgtgtgtgtgtgtgtgcgcgtgcccgtgtccatccatgtctctgttgtgtgtctgtgtgcgggtatgggtgggattcctggtggacaggggtgtcagatctgtctgaggagccccagtcatgctcagcacgctacagatgtgttgtttgtcacactgagattgctgaatgtcgtggctgttggctgccgagcctcagctgctggcatttccttctgctgtttgctgcttttgtgcctcccccactttccatcacctctggagtcccgtctggacgtcccttcctgctacaggaataatgaggcgtgggctgcctcccgctagggcctcctgctccctgtaggtagtttctggctgaggcttgctaattggggatgcttcttagagcatcttccacatcaactcccctggctgctggctaccgattaaattcattagtgtgaaagaggtgggagtgaggttttctggcctgaagcagtctgcactgaaaggtacccaagtggcctgaaacagtgtagggaaagacctgggaaacactggaccaaaaaagcctgatctcatggagacctgcatggccctgttagagatggcgtagaagtgaaagtcttaaagggagcattagagatccttttaatacacgactgagtgccagcttatttgtgatgccccttcccagaccaggttaggattcctgggaaggccgcggattccggccctggaagaggcaggatcctggagcagttttgtgaggcttttgtgctcccatacgccccctggtggtgagtgtaaagaagactttgcctctcacaactacatgtatgtgtggcatttttgttagagatgagaaaaggattgagaaggataaactggaatcctggtaagaagcctttatgccagcccgacacctgctgtaattggggtgcatgagctatggagtcagatagttgttgggagggggaggacaagaagtctattgtttggactgtgtttgtctcacaatcaccacaaaataaaagtgtagaaaatgcttgtggtgtactaactcttttctgtacttaagttactcagattaacatgcacttctaattctaaacattttttttggagtcatcactgtcgctgtttaagtagaacaatgccaacgatgtatgagaaacagggaataaatcaggatttgtgtgtgtatgtgtgtggcattacttacatttactttattaaaaagcctaaggaactttaaagaatttgtattcagtttatttttattttttcaagacagagtctcactttgttgcccaggctggagtgcagtggcgtgatctcggctcactgcagcctccgcctcccgggttcaagtgattctcctgcctcggtctcatgagtagctgggattacaggcgtgcgccaccatgcctggctaatttttgtatttttagtagagacggtttcaccatgttggtcaggttggtcttgaactcctgacctcaagtgatctacctgtcttggcctcccagagtgttgggattacgccactgtacccagccttagactcagtttaaaatgggcttattgtaatgaaaaaaaatacgctacccaaaatttgccatgatgcctgtgatggtgaaggcattaaacaattgaaatctttgccttgcccagagagttgcagttatttgtaattataaacagtaagtgtatcagggcaggggtgacaataaaaaaccaatcattactacc

SEQ ID NO: 144696 - DNA, 564 bp, Homo sapiens
  Payload ID: 8589
  Gene Symbol: JADE1
  Gene Name: jade family PHD finger 1
  ENST ID: ENST00000510308
  CDS Start-End: 136-564
gctcaaagtggcggagcgcggcggcgggaggcaggtgcacggcacccgccagtgggggtgcctcaacttccgcgggcgtttaaatagcagcctctctcccctcccaccggctgcctgctgtttcccggggagatcatgaaacgaggtcgccttcccagcagcagtgaggattctgacgacaatggcagcctgtcaactacttggtcccagaattcccgatcccagcataggagaagctcctgctccagacatgaagatcgaaagccttcagaggtgtttaggacagacctgatcactgccatgaagttgcatgactcctaccagctgaatccggatgagtactatgtgttggcagatccctggagacaggaatgggagaaaggggtccaggtgcctgtgagcccggggaccatccctcagcctgtggccagggttgtgtctgaagagaaatccctcatgttcatcaggcccaagaagtacatcgtgtcatcaggctctgagcctcccgagttgggctatgtggacatccggacgctggctgacagcgtgtgtcgctatgacctc

SEQ ID NO: 144697 - DNA, 529 bp, Homo sapiens
  Payload ID: 8589
  Gene Symbol: JADE1
  Gene Name: jade family PHD finger 1
  ENST ID: ENST00000511925
  CDS Start-End: 132-281
aaagtggcggagcgcggcggcgggaggcaggtgcacggcacccgccagtgggggtgcctcaacttccgcgggcgtttaaatagcagcctctctcccctcccaccggctgcctgctgtttcccggggagatcatgaaacgaggtcgccttcccagcagcagtgaggattctgacgacaatggcagcctgtcaactacttggtcccagaattcccgatcccagcataggagaagctcctgctccagacatgaagatcgaaagccttcagagggttgtgtctgaagagaaatccctcatgttcatcaggcccaagaagtacatcgtgtcatcaggctctgagcctcccgagttgggctatgtggacatccggacgctggctgacagcgtgtgtcgctatgacctcaatgacatggatgctgcatggctggaactgaccaatgaagaatttaaggagatgggaatgcctgaactagatgaatacaccatggagagggtcctagaggaatttgagcagcgatgctacgacaata

SEQ ID NO: 144698 - DNA, 584 bp, Homo sapiens
  Payload ID: 8589
  Gene Symbol: JADE1
  Gene Name: jade family PHD finger 1
  ENST ID: ENST00000503785
  CDS Start-End: 196-584
gcgcgtgtgtccgcgcgtgtccgcgtgtgggtccgtgtgcgcgtcccggtcccgcggcggcgacggcggcggcggcggcggcggctgcaggacgagccgagaggctcagccatatttgatggttttgttgctttgctcgggagttctcgggagtaatttaatgccgaaggctgcctgctgtttcccggggagatcatgaaacgaggtcgccttcccagcagcagtgaggattctgacgacaatggcagcctgtcaactacttggtcccagaattcccgatcccagcataggagaagctcctgctccagacatgaagatcgaaagccttcagaggtgtttaggacagacctgatcactgccatgaagttgcatgactcctaccagctgaatccggatgagtactatgtgttggcagatccctggagacaggaatgggagaaaggggtccaggtgcctgtgagcccggggaccatccctcagcctgtggccagggttgtgtctgaagagaaatccctcatgttcatcaggcccaagaagtacatcgtgtcatcaggctctgagcctcccgagttgggctatgtgga

SEQ ID NO: 144699 - DNA, 3560 bp, Homo sapiens
  Payload ID: 8589
  Gene Symbol: JADE1
  Gene Name: jade family PHD finger 1
  Uniprot ID: Q6IE81
  ENST ID: ENST00000511647
  CDS Start-End: 202-1731
cataacaagccaaacgccagaccgagagtgcctccgtgcgcgagtgcccggtgtgtgcgcgccggcgagagcaggggcccgcccggctccccgcccgccgcggcccgaactcatgcagctccgagcgagcgagcggcgcccagcccagcgcctcggccgaacccctccgcagcaggctgcctgctgtttcccggggagatcatgaaacgaggtcgccttcccagcagcagtgaggattctgacgacaatggcagcctgtcaactacttggtcccagaattcccgatcccagcataggagaagctcctgctccagacatgaagatcgaaagccttcagaggtgtttaggacagacctgatcactgccatgaagttgcatgactcctaccagctgaatccggatgagtactatgtgttggcagatccctggagacaggaatgggagaaaggggtccaggtgcctgtgagcccggggaccatccctcagcctgtggccagggttgtgtctgaagagaaatccctcatgttcatcaggcccaagaagtacatcgtgtcatcaggctctgagcctcccgagttgggctatgtggacatccggacgctggctgacagcgtgtgtcgctatgacctcaatgacatggatgctgcatggctggaactgaccaatgaagaatttaaggagatgggaatgcctgaactagatgaatacaccatggagagggtcctagaggaatttgagcagcgatgctacgacaatatgaatcatgccatagagactgaggaaggcctggggatcgaatatgatgaagatgttgtctgtgatgtctgccagtctcctgatggtgaggacggcaatgagatggtgttctgtgacaaatgcaacatctgtgtgcaccaggcctgttatggaatcctcaaggtaccagagggcagctggctgtgccggacatgtgccctgggggttcagccaaaatgtctgctgtgtccgaagaagggtggagctatgaagcccacccgtagcggaaccaagtgggtccacgttagctgtgctctgtggatccctgaggtgagcattggcagcccagagaagatggagcccatcaccaaggtgtcacacattcccagcagccggtgggcgctagtgtgcagcctctgcaatgagaagtttggggcctctatacagtgctctgtgaagaactgccgcacagccttccatgtgacctgtgcttttgaccggggcctggagatgaagaccatcttagcagagaatgatgaagtcaagttcaagtcctattgcccaaagcacagctcacataggaaacccgaggagagtcttggcaagggggctgcacaggagaatggggcccctgagtgttccccccggaatccgctggagccctttgccagccttgagcagaaccgggaggaggcccaccgggtgagtgtccgtaagcagaagctgcagcagttggaggatgagttctacaccttcgtcaacctgctggatgttgccagggctctgcggctgcctgaggaagtagtggatttcctgtaccagtactggaagttgaagaggaaggtcaacttcaacaagcccctgatcaccccaaagaaagatgaagaggacaatctagccaagcgggagcaggatgtcttatttaggaggctgcagctgttcacgcacctgcggcaggacctggagagggtaatgattgacactgacaccttatagtgacttagagaagaagatgcaaagaggcgaacgctcgcccagagcaagaaatgatagccagtcatatactctcagacccttgtacacaccacagcatgaggttgtgttggttaaaaatatttatgggctggtaaactcattgtacatatgtgcaaaactgctactgagtggggagcttctttgtggtttttttttttttaaaaacactttcccattaatctttactgttttgtaagatcaaatggggtgtgtcttccccacccccattccttcattctagagctagagtgaatgagccccaagaaaatgacccaaggagttgactcaggatggtttacagactgatttagaaaaccagaacggatttcatttctaatggagggggccagagatgggaaaatttcttgttcagtccggggaaacacacctaggtgctggtgatgggcttatgaaggaagctaagcacggctgctcactggcccccactttgtttcttgggtaattcacaggggaattcccagtactgtcatggagcagagcaggcagtgggtgctgatgtgtgtgcatgagctgtatgtacacatgcatatatctgttacagaagatactcctggcagtgaggtgctaagtcatcactgaggctgtgtgtgtgtgtgtgtgtgcgcgtgcccgtgtccatccatgtctctgttgtgtgtctgtgtgcgggtatgggtgggattcctggtggacaggggtgtcagatctgtctgaggagccccagtcatgctcagcacgctacagatgtgttgtttgtcacactgagattgctgaatgtcgtggctgttggctgccgagcctcagctgctggcatttccttctgctgtttgctgcttttgtgcctcccccactttccatcacctctggagtcccgtctggacgtcccttcctgctacaggaataatgaggcgtgggctgcctcccgctagggcctcctgctccctgtaggtagtttctggctgaggcttgctaattggggatgcttcttagagcatcttccacatcaactcccctggctgctggctaccgattaaattcattagtgtgaaagaggtgggagtgaggttttctggcctgaagcagtctgcactgaaaggtacccaagtggcctgaaacagtgtagggaaagacctgggaaacactggaccaaaaaagcctgatctcatggagacctgcatggccctgttagagatggcgtagaagtgaaagtcttaaagggagcattagagatccttttaatacacgactgagtgccagcttatttgtgatgccccttcccagaccaggttaggattcctgggaaggccgcggattccggccctggaagaggcaggatcctggagcagttttgtgaggcttttgtgctcccatacgccccctggtggtgagtgtaaagaagactttgcctctcacaactacatgtatgtgtggcatttttgttagagatgagaaaaggattgagaaggataaactggaatcctggtaagaagcctttatgccagcccgacacctgctgtaattggggtgcatgagctatggagtcagatagttgttgggagggggaggacaagaagtctattgtttggactgtgtttgtctcacaatcaccacaaaataaaagtgtagaaaatgcttgtggtgtactaactcttttctgtacttaagttactcagattaacatgcacttctaattctaaacattttttttggagtcatcactgtcgctgtttaagtagaacaatgccaacgatgtatgagaaacagggaataaatcaggatttgtgtgtgta

SEQ ID NO: 144700 - DNA, 552 bp, Homo sapiens
  Payload ID: 8589
  Gene Symbol: JADE1
  Gene Name: jade family PHD finger 1
  ENST ID: ENST00000507833
  CDS Start-End: 158-552
gatacacagtttccagaactgtctgggggcgggagcgggagcgggagccgagcccgctcggagctcctcgccgccgctgccgctcccatcttaaaaccgtttctcgccggcgcgcccgccccagcccgaaggctgcctgctgtttcccggggagatcatgaaacgaggtcgccttcccagcagcagtgaggattctgacgacaatggcagcctgtcaactacttggtcccagaattcccgatcccagcataggagaagctcctgctccagacatgaagatcgaaagccttcagaggtgtttaggacagacctgatcactgccatgaagttgcatgactcctaccagctgaatccggatgagtactatgtgttggcagatccctggagacaggaatgggagaaaggggtccaggtgcctgtgagcccggggaccatccctcagcctgtggccagggttgtgtctgaagagaaatccctcatgttcatcaggcccaagaagtacatcgtgtcatcaggctctgagcctcccgagttgggctatgtggacatccg

SEQ ID NO: 144701 - DNA, 504 bp, Homo sapiens
  Payload ID: 8589
  Gene Symbol: JADE1
  Gene Name: jade family PHD finger 1
  ENST ID: ENST00000508997
  CDS Start-End: 148-504
gctaaagattcctggagtagttatagtaataatgtcacaggaatatagaaagaaacctggcatctttgggagacctactgatatgtgacttctccacccctccccctccttttttaacctggctgcctgctgtttcccggggagatcatgaaacgaggtcgccttcccagcagcagtgaggattctgacgacaatggcagcctgtcaactacttggtcccagaattcccgatcccagcataggagaagctcctgctccagacatgaagatcgaaagccttcagaggtgtttaggacagacctgatcactgccatgaagttgcatgactcctaccagctgaatccggatgagtactatgtgttggcagatccctggagacaggaatgggagaaaggggtccaggtgcctgtgagcccggggaccatccctcagcctgtggccagggttgtgtctgaagagaaatccctcatgttcatcaggcccaagaagtacatcgtgtcatca

SEQ ID NO: 144702 - DNA, 3000 bp, Homo sapiens
  Payload ID: 8589
  Gene Symbol: JADE1
  Gene Name: jade family PHD finger 1
  Uniprot ID: Q6IE81
  ENST ID: ENST00000512960
  CDS Start-End: 400-2928
cgcgcgtgtgtccgcgcgtgtccgcgtgtgggtccgtgtgcgcgtcccggtcccgcggcggcgacggcggcggcggcggcggcggctgcaggacgagccgagaggctcagccatatttgatggttttgttgctttgctcgggagttctcgggagtaatttaatgccgaaggtcgctgcctagtggaaataatataatacgtcattaatatggcgccaaaagattgggttctcgatctgtagcgaggagggagggaggcagccgctgagcgcagcgttactatcccaccagtaacttgggcattgccggggcgggggccggaggaggaggagaggatgatttttggatcctgagaattgatctatgttggatcagctgcctgctgtttcccggggagatcatgaaacgaggtcgccttcccagcagcagtgaggattctgacgacaatggcagcctgtcaactacttggtcccagaattcccgatcccagcataggagaagctcctgctccagacatgaagatcgaaagccttcagaggtgtttaggacagacctgatcactgccatgaagttgcatgactcctaccagctgaatccggatgagtactatgtgttggcagatccctggagacaggaatgggagaaaggggtccaggtgcctgtgagcccggggaccatccctcagcctgtggccagggttgtgtctgaagagaaatccctcatgttcatcaggcccaagaagtacatcgtgtcatcaggctctgagcctcccgagttgggctatgtggacatccggacgctggctgacagcgtgtgtcgctatgacctcaatgacatggatgctgcatggctggaactgaccaatgaagaatttaaggagatgggaatgcctgaactagatgaatacaccatggagagggtcctagaggaatttgagcagcgatgctacgacaatatgaatcatgccatagagactgaggaaggcctggggatcgaatatgatgaagatgttgtctgtgatgtctgccagtctcctgatggtgaggacggcaatgagatggtgttctgtgacaaatgcaacatctgtgtgcaccaggcctgttatggaatcctcaaggtaccagagggcagctggctgtgccggacatgtgccctgggggttcagccaaaatgtctgctgtgtccgaagaagggtggagctatgaagcccacccgtagcggaaccaagtgggtccacgttagctgtgctctgtggatccctgaggtgagcattggcagcccagagaagatggagcccatcaccaaggtgtcacacattcccagcagccggtgggcgctagtgtgcagcctctgcaatgagaagtttggggcctctatacagtgctctgtgaagaactgccgcacagccttccatgtgacctgtgcttttgaccggggcctggagatgaagaccatcttagcagagaatgatgaagtcaagttcaagtcctattgcccaaagcacagctcacataggaaacccgaggagagtcttggcaagggggctgcacaggagaatggggcccctgagtgttccccccggaatccgctggagccctttgccagccttgagcagaaccgggaggaggcccaccgggtgagtgtccgtaagcagaagctgcagcagttggaggatgagttctacaccttcgtcaacctgctggatgttgccagggctctgcggctgcctgaggaagtagtggatttcctgtaccagtactggaagttgaagaggaaggtcaacttcaacaagcccctgatcaccccaaagaaagatgaagaggacaatctagccaagcgggagcaggatgtcttatttaggaggctgcagctgttcacgcacctgcggcaggacctggagagggttcggaacctcacttacatggtgacccgcagggaaaagattaaacggtctgtgtgcaaagtccaggaacagatattcaatctttacactaagcttttggagcaagaaagagtttcaggtgtgccttcttcctgctcctcctcctcactggaaaacatgcttttgtttaacagtccttctgttggccctgatgctcccaagatagaggacttgaagtggcattctgcattcttcagaaaacaaatgggtacttccttggttcattcgctgaaaaagccccataagcgagatcctttgcagaatagccctggaagtgaaggcaaaaccctgctgaagcagccagacctgtgtggtagaagggaggggatggtggtcccagagagctttttgggtttagaaaagacctttgcagaagcacgtctcatatcagcacaacagaaaaatggtgtggtgatgccagaccatgggaaaagaagagacaatcgttttcattgtgatctcattaaaggagacttaaaggacaaatcttttaaacagagtcacaagcctctcaggtccacagatgtgtcccagaggcatctggacaacacaagagctgccacctcccctggagtggggcagtcagcacctggcacaaggaaggagatagtgcccaagtgcaatggctccctaatcaaagtaaactataatcagactgcagtcaaagtgcctacaacacctgccagcccagtgaaaaactggggaggattccggattccaaagaagggggaacggcagcagcagggagaggcccacgatggggcctgccaccagcactcagactacccatatttgggcttaggccgagttccagccaaggaaagggcaaaaagcaaattaaaatccgacaatgagaatgacgggtatgtccccgatgtggaaatgagtgactcagagagtgaggcatcagaaaagaaatgtatacacaccagcagcactatcagcagaaggacagacattatcaggagaagcatcttggcttcttgatgcaacagagatgatgcggaagccctttgggctcgtcattgggtttgctagaggagagctctgatgtggggg

SEQ ID NO: 144703 - DNA, 567 bp, Homo sapiens
  Payload ID: 8589
  Gene Symbol: JADE1
  Gene Name: jade family PHD finger 1
  ENST ID: ENST00000504089
  CDS Start-End: 158-567
agcccagcgcctcggccgaacccctccgcagcagttcatagccctgatgaagcaagttactctgctctcctaataaatgcaagaaaatgaccttggagggcctttttaattacacatagaagtgacaatttgctgcctgctgtttcccggggagatcatgaaacgaggtcgccttcccagcagcagtgaggattctgacgacaatggcagcctgtcaactacttggtcccagaattcccgatcccagcataggagaagctcctgctccagacatgaagatcgaaagccttcagaggtgtttaggacagacctgatcactgccatgaagttgcatgactcctaccagctgaatccggatgagtactatgtgttggcagatccctggagacaggaatgggagaaaggggtccaggtgcctgtgagcccggggaccatccctcagcctgtggccagggttgtgtctgaagagaaatccctcatgttcatcaggcccaagaagtacatcgtgtcatcaggctctgagcctcccgagttgggctatgtggacatccggacgctggctgacag

SEQ ID NO: 144704 - DNA, 532 bp, Homo sapiens
  Payload ID: 8589
  Gene Symbol: JADE1
  Gene Name: jade family PHD finger 1
  ENST ID: ENST00000514740
  CDS Start-End: 480-532
atatttgatggttttgttgctttgctcgggagttctcgggagtaatttaatgccgaaggtcgctgcctagtggaaataatataatacgtcattaatatggcgccaaaagattgggttctcgatctgtagcgaggagggagggaggcagccgctgagcgcagcgttactatcccaccagtaacttgggcattgccggggcgggggccggaggaggaggagaggatgatttttggatcctgagaattgatctatgttggatcagtaagttttattatgattttttttttcaaatttggggggctgaagacttagagctatttcttcttttggatttgcgaagaacatgcggttttcagttcatagccctgatgaagcaagttactctgctctcctaataaatgcaagaaaatgaccttggagggcctttttaattacacatagaagtgacaatttgctgcctgctgtttcccggggagatcatgaaacgaggtcgccttcccagcagcagtgaggattctgacgacaatggcag

SEQ ID NO: 144705 - DNA, 5648 bp, Homo sapiens
  Payload ID: 8589
  Gene Symbol: JADE1
  Gene Name: jade family PHD finger 1
  Uniprot ID: Q6IE81
  ENST ID: ENST00000611140
  CDS Start-End: 158-2686
gatacacagtttccagaactgtctgggggcgggagcgggagcgggagccgagcccgctcggagctcctcgccgccgctgccgctcccatcttaaaaccgtttctcgccggcgcgcccgccccagcccgaaggctgcctgctgtttcccggggagatcatgaaacgaggtcgccttcccagcagcagtgaggattctgacgacaatggcagcctgtcaactacttggtcccagaattcccgatcccagcataggagaagctcctgctccagacatgaagatcgaaagccttcagaggtgtttaggacagacctgatcactgccatgaagttgcatgactcctaccagctgaatccggatgagtactatgtgttggcagatccctggagacaggaatgggagaaaggggtccaggtgcctgtgagcccggggaccatccctcagcctgtggccagggttgtgtctgaagagaaatccctcatgttcatcaggcccaagaagtacatcgtgtcatcaggctctgagcctcccgagttgggctatgtggacatccggacgctggctgacagcgtgtgtcgctatgacctcaatgacatggatgctgcatggctggaactgaccaatgaagaatttaaggagatgggaatgcctgaactagatgaatacaccatggagagggtcctagaggaatttgagcagcgatgctacgacaatatgaatcatgccatagagactgaggaaggcctggggatcgaatatgatgaagatgttgtctgtgatgtctgccagtctcctgatggtgaggacggcaatgagatggtgttctgtgacaaatgcaacatctgtgtgcaccaggcctgttatggaatcctcaaggtaccagagggcagctggctgtgccggacatgtgccctgggggttcagccaaaatgtctgctgtgtccgaagaagggtggagctatgaagcccacccgtagcggaaccaagtgggtccacgttagctgtgctctgtggatccctgaggtgagcattggcagcccagagaagatggagcccatcaccaaggtgtcacacattcccagcagccggtgggcgctagtgtgcagcctctgcaatgagaagtttggggcctctatacagtgctctgtgaagaactgccgcacagccttccatgtgacctgtgcttttgaccggggcctggagatgaagaccatcttagcagagaatgatgaagtcaagttcaagtcctattgcccaaagcacagctcacataggaaacccgaggagagtcttggcaagggggctgcacaggagaatggggcccctgagtgttccccccggaatccgctggagccctttgccagccttgagcagaaccgggaggaggcccaccgggtgagtgtccgtaagcagaagctgcagcagttggaggatgagttctacaccttcgtcaacctgctggatgttgccagggctctgcggctgcctgaggaagtagtggatttcctgtaccagtactggaagttgaagaggaaggtcaacttcaacaagcccctgatcaccccaaagaaagatgaagaggacaatctagccaagcgggagcaggatgtcttatttaggaggctgcagctgttcacgcacctgcggcaggacctggagagggttcggaacctcacttacatggtgacccgcagggaaaagattaaacggtctgtgtgcaaagtccaggaacagatattcaatctttacactaagcttttggagcaagaaagagtttcaggtgtgccttcttcctgctcctcctcctcactggaaaacatgcttttgtttaacagtccttctgttggccctgatgctcccaagatagaggacttgaagtggcattctgcattcttcagaaaacaaatgggtacttccttggttcattcgctgaaaaagccccataagcgagatcctttgcagaatagccctggaagtgaaggcaaaaccctgctgaagcagccagacctgtgtggtagaagggaggggatggtggtcccagagagctttttgggtttagaaaagacctttgcagaagcacgtctcatatcagcacaacagaaaaatggtgtggtgatgccagaccatgggaaaagaagagacaatcgttttcattgtgatctcattaaaggagacttaaaggacaaatcttttaaacagagtcacaagcctctcaggtccacagatgtgtcccagaggcatctggacaacacaagagctgccacctcccctggagtggggcagtcagcacctggcacaaggaaggagatagtgcccaagtgcaatggctccctaatcaaagtaaactataatcagactgcagtcaaagtgcctacaacacctgccagcccagtgaaaaactggggaggattccggattccaaagaagggggaacggcagcagcagggagaggcccacgatggggcctgccaccagcactcagactacccatatttgggcttaggccgagttccagccaaggaaagggcaaaaagcaaattaaaatccgacaatgagaatgacgggtatgtccccgatgtggaaatgagtgactcagagagtgaggcatcagaaaagaaatgtatacacaccagcagcactatcagcagaaggacagacattatcaggagaagcatcttggcttcttgatgcaacagagatgatgcggaagccctttgggctcgtcattgggtttgctagaggagagctctgatgtgggggagaagcagaaacccattaatcctgagctacacaaacacatttacttgcaattcagattaatttttttccagagtcatttttaaatcatttttgtgagaagtttgtgttatttgcaacttgttgaggaaacagaagagtagattgtaaccataagacactgctaagactagaacccgaactgaacactaaaataaaaatgaaatgttttaaagaaggcaaggcttaaataagcctcatgaatttttatagccctctgcattcttcccaaagcacaaactcatggttacctgaatatagggaaccagatatggttcttgagaaaccctcatggtaccattcacagcccataaagtttattttctaggactgtggtagatcttgaaatcatatttatatttggccctcaaggctatttttgttgcattatagcatataggcagcagctctgaagcttcagtaacactaagaaatttatgtgtaaatatagcagtcagggaagagaattttaaaaaaggtcattattgaagaagctgaggggacagggtagagctgctgcaatatggagatttagggtaatatggcaaggtcctgctgcttgaagcctgtgagtgggttgtggatatgggactggtggagagtgagactgttaggaaagttgtatctatgaataagggcagttgaagtagaatttttaccagtccacttgaccttcttcttccctaaccactggctcttgagccagcttgggatttccctggccattgccaatacctggccatctggcttccaatagtacagtggctactcaagttcaagcgaagaacttccagactctggtgactgttacttcccagagccaaccactagtgcatatgttagggaatctgggcttccaacatgaatggattccttaagaaaaaggaaaaaaaaaaaaaaaagaaaaaaagaaaaaaaaaagaaaaaagaaaaaaagagaaaaaagcgaaataggttatattttaaaaacaatagaaaggcaataagttgcgataagctcttactattgaccaaggttatacaggaaagagactgaagtgtacccttgaataggttttctgtagtcagagttctaaactctaatttgtaacttggactttctaattgcaaatggcaataactattaagttatcagcaataataaatttagcattaaatttgagtacaatgttttgtttttgcactccccatagtgcgtatgtattaagacagtggatagtgtttaggtcctgttaattttctttggaattcaatgtggttgtgaatcaaacttaaggaaggaacgtttaaatagcaatgagatacagaattatgggcctttggaacaagcccgacttcccctaaattctccttagtttgttaataccagtattcagattcctgattcatttatacatctgtttccatatggcagggacattatgatacttaatgaataatgctttgaggagttctgcagttaactttcaagtcttccagatgattgtcaacaacaaaaaaggcttattgaatcccatcttgctatgcaagttttatcagatgatcaaatagtagatctgatacatccccattgtatgtacgacattttcaaaccaagtcttaacttttcaaggacattttagtagctaattcaggggagggggaagaatgatgcaggtttttagattgactgactatttttgagttatggggctcattttgaaagactgctgtccagatcagcttgttgctgcagataatagaaggttcttatgaatccaagttgtatattcacttgtaggataatttaaaaattagattttttttgcatatgagcaaaaaccttttgctggatacaggagaaggttggactttatctacagttatcttttgattacagcaacagctctgggtgagagtagaatttatagagggataatttgtcaagccatagaaagaaaatctaaattaatctagtaagtgtatgacctctcaccattttaagaggtatcagattcatttgcactattaggaatgctagttttgtgcaaaaataatgccttacctgttttttccccacatttaggttgaaaagctttcaaatgttccaagttatgctgaaccaaaaaaaacaaaacaaaaacaaaacaaaaaatattaaaaaaaacccacacaaaaacaaaacacacaaaaataaaaagcccacactttttattcctgcttcgaaatgcaaatggatagagcacggtttctctgacagtataatgatagctttgtgagttagtttcatgtcatgctgggaactctctatgaggtggccataagcagcaaccagcccaaacacccacttgcgttctattagtatggaaccatttgcatttgttttttttaagctttatctttccttgtgcatcctgaccaagaaatatctttgattatgattaatgtattatgtcaaaatgtaggctagttaaacttttgtaaagttgcctggaatgtcatttgttaggttataaacacaagatctaaatgaagggttttatgtgttgtgtacaaatcttattttgaaatggacaaacttgtcattacatttgtaaccttgtacagaggatttttcactatgtgcctagcttggtgtccattcagctaaaattgaaaaaaaaaaaaaggtgcatgaagagttaaaaatcaaattaaagtatatgtagagatgactattttatattacatgacccaatcctgtatttatttctaccccctttttgaaagtatttataaaactagttgaggacagctgtatttttttgttgaactatttagtagaattgtgcctttttgtctgtatgtgaataaatgctgtacattttgcaataca

SEQ ID NO: 144706 - DNA, 5644 bp, Homo sapiens
  Payload ID: 8589
  Gene Symbol: JADE1
  Gene Name: jade family PHD finger 1
  Uniprot ID: Q6IE81
  ENST ID: ENST00000610919
  CDS Start-End: 154-2682
gctgaggacgcggctgctgctcaaagtggcggagcgcggcggcgggaggcaggtgcacggcacccgccagtgggggtgcctcaacttccgcgggcgtttaaatagcagcctctctcccctcccaccggctgcctgctgtttcccggggagatcatgaaacgaggtcgccttcccagcagcagtgaggattctgacgacaatggcagcctgtcaactacttggtcccagaattcccgatcccagcataggagaagctcctgctccagacatgaagatcgaaagccttcagaggtgtttaggacagacctgatcactgccatgaagttgcatgactcctaccagctgaatccggatgagtactatgtgttggcagatccctggagacaggaatgggagaaaggggtccaggtgcctgtgagcccggggaccatccctcagcctgtggccagggttgtgtctgaagagaaatccctcatgttcatcaggcccaagaagtacatcgtgtcatcaggctctgagcctcccgagttgggctatgtggacatccggacgctggctgacagcgtgtgtcgctatgacctcaatgacatggatgctgcatggctggaactgaccaatgaagaatttaaggagatgggaatgcctgaactagatgaatacaccatggagagggtcctagaggaatttgagcagcgatgctacgacaatatgaatcatgccatagagactgaggaaggcctggggatcgaatatgatgaagatgttgtctgtgatgtctgccagtctcctgatggtgaggacggcaatgagatggtgttctgtgacaaatgcaacatctgtgtgcaccaggcctgttatggaatcctcaaggtaccagagggcagctggctgtgccggacatgtgccctgggggttcagccaaaatgtctgctgtgtccgaagaagggtggagctatgaagcccacccgtagcggaaccaagtgggtccacgttagctgtgctctgtggatccctgaggtgagcattggcagcccagagaagatggagcccatcaccaaggtgtcacacattcccagcagccggtgggcgctagtgtgcagcctctgcaatgagaagtttggggcctctatacagtgctctgtgaagaactgccgcacagccttccatgtgacctgtgcttttgaccggggcctggagatgaagaccatcttagcagagaatgatgaagtcaagttcaagtcctattgcccaaagcacagctcacataggaaacccgaggagagtcttggcaagggggctgcacaggagaatggggcccctgagtgttccccccggaatccgctggagccctttgccagccttgagcagaaccgggaggaggcccaccgggtgagtgtccgtaagcagaagctgcagcagttggaggatgagttctacaccttcgtcaacctgctggatgttgccagggctctgcggctgcctgaggaagtagtggatttcctgtaccagtactggaagttgaagaggaaggtcaacttcaacaagcccctgatcaccccaaagaaagatgaagaggacaatctagccaagcgggagcaggatgtcttatttaggaggctgcagctgttcacgcacctgcggcaggacctggagagggttcggaacctcacttacatggtgacccgcagggaaaagattaaacggtctgtgtgcaaagtccaggaacagatattcaatctttacactaagcttttggagcaagaaagagtttcaggtgtgccttcttcctgctcctcctcctcactggaaaacatgcttttgtttaacagtccttctgttggccctgatgctcccaagatagaggacttgaagtggcattctgcattcttcagaaaacaaatgggtacttccttggttcattcgctgaaaaagccccataagcgagatcctttgcagaatagccctggaagtgaaggcaaaaccctgctgaagcagccagacctgtgtggtagaagggaggggatggtggtcccagagagctttttgggtttagaaaagacctttgcagaagcacgtctcatatcagcacaacagaaaaatggtgtggtgatgccagaccatgggaaaagaagagacaatcgttttcattgtgatctcattaaaggagacttaaaggacaaatcttttaaacagagtcacaagcctctcaggtccacagatgtgtcccagaggcatctggacaacacaagagctgccacctcccctggagtggggcagtcagcacctggcacaaggaaggagatagtgcccaagtgcaatggctccctaatcaaagtaaactataatcagactgcagtcaaagtgcctacaacacctgccagcccagtgaaaaactggggaggattccggattccaaagaagggggaacggcagcagcagggagaggcccacgatggggcctgccaccagcactcagactacccatatttgggcttaggccgagttccagccaaggaaagggcaaaaagcaaattaaaatccgacaatgagaatgacgggtatgtccccgatgtggaaatgagtgactcagagagtgaggcatcagaaaagaaatgtatacacaccagcagcactatcagcagaaggacagacattatcaggagaagcatcttggcttcttgatgcaacagagatgatgcggaagccctttgggctcgtcattgggtttgctagaggagagctctgatgtgggggagaagcagaaacccattaatcctgagctacacaaacacatttacttgcaattcagattaatttttttccagagtcatttttaaatcatttttgtgagaagtttgtgttatttgcaacttgttgaggaaacagaagagtagattgtaaccataagacactgctaagactagaacccgaactgaacactaaaataaaaatgaaatgttttaaagaaggcaaggcttaaataagcctcatgaatttttatagccctctgcattcttcccaaagcacaaactcatggttacctgaatatagggaaccagatatggttcttgagaaaccctcatggtaccattcacagcccataaagtttattttctaggactgtggtagatcttgaaatcatatttatatttggccctcaaggctatttttgttgcattatagcatataggcagcagctctgaagcttcagtaacactaagaaatttatgtgtaaatatagcagtcagggaagagaattttaaaaaaggtcattattgaagaagctgaggggacagggtagagctgctgcaatatggagatttagggtaatatggcaaggtcctgctgcttgaagcctgtgagtgggttgtggatatgggactggtggagagtgagactgttaggaaagttgtatctatgaataagggcagttgaagtagaatttttaccagtccacttgaccttcttcttccctaaccactggctcttgagccagcttgggatttccctggccattgccaatacctggccatctggcttccaatagtacagtggctactcaagttcaagcgaagaacttccagactctggtgactgttacttcccagagccaaccactagtgcatatgttagggaatctgggcttccaacatgaatggattccttaagaaaaaggaaaaaaaaaaaaaaaagaaaaaaagaaaaaaaaaagaaaaaagaaaaaaagagaaaaaagcgaaataggttatattttaaaaacaatagaaaggcaataagttgcgataagctcttactattgaccaaggttatacaggaaagagactgaagtgtacccttgaataggttttctgtagtcagagttctaaactctaatttgtaacttggactttctaattgcaaatggcaataactattaagttatcagcaataataaatttagcattaaatttgagtacaatgttttgtttttgcactccccatagtgcgtatgtattaagacagtggatagtgtttaggtcctgttaattttctttggaattcaatgtggttgtgaatcaaacttaaggaaggaacgtttaaatagcaatgagatacagaattatgggcctttggaacaagcccgacttcccctaaattctccttagtttgttaataccagtattcagattcctgattcatttatacatctgtttccatatggcagggacattatgatacttaatgaataatgctttgaggagttctgcagttaactttcaagtcttccagatgattgtcaacaacaaaaaaggcttattgaatcccatcttgctatgcaagttttatcagatgatcaaatagtagatctgatacatccccattgtatgtacgacattttcaaaccaagtcttaacttttcaaggacattttagtagctaattcaggggagggggaagaatgatgcaggtttttagattgactgactatttttgagttatggggctcattttgaaagactgctgtccagatcagcttgttgctgcagataatagaaggttcttatgaatccaagttgtatattcacttgtaggataatttaaaaattagattttttttgcatatgagcaaaaaccttttgctggatacaggagaaggttggactttatctacagttatcttttgattacagcaacagctctgggtgagagtagaatttatagagggataatttgtcaagccatagaaagaaaatctaaattaatctagtaagtgtatgacctctcaccattttaagaggtatcagattcatttgcactattaggaatgctagttttgtgcaaaaataatgccttacctgttttttccccacatttaggttgaaaagctttcaaatgttccaagttatgctgaaccaaaaaaaacaaaacaaaaacaaaacaaaaaatattaaaaaaaacccacacaaaaacaaaacacacaaaaataaaaagcccacactttttattcctgcttcgaaatgcaaatggatagagcacggtttctctgacagtataatgatagctttgtgagttagtttcatgtcatgctgggaactctctatgaggtggccataagcagcaaccagcccaaacacccacttgcgttctattagtatggaaccatttgcatttgttttttttaagctttatctttccttgtgcatcctgaccaagaaatatctttgattatgattaatgtattatgtcaaaatgtaggctagttaaacttttgtaaagttgcctggaatgtcatttgttaggttataaacacaagatctaaatgaagggttttatgtgttgtgtacaaatcttattttgaaatggacaaacttgtcattacatttgtaaccttgtacagaggatttttcactatgtgcctagcttggtgtccattcagctaaaattgaaaaaaaaaaaaaggtgcatgaagagttaaaaatcaaattaaagtatatgtagagatgactattttatattacatgacccaatcctgtatttatttctaccccctttttgaaagtatttataaaactagttgaggacagctgtatttttttgttgaactatttagtagaattgtgcctttttgtctgtatgtgaataaatgctgtacattttgcaataca

SEQ ID NO: 144707 - DNA, 2748 bp, Homo sapiens
  Payload ID: 8590
  Gene Symbol: JADE2
  Gene Name: jade family PHD finger 2
  ENST ID: ENST00000282605
  CDS Start-End: 87-2591
tttaaaaagaaacagaaacatacacagggggttggtgaatggtgccgaccgcggccatcgcagttggaggctattttttgggggggatggaagagaagaggcgaaaatactccatcagcagtgacaactctgacaccactgacagtcatgcgacatctacatccgcatcaagatgctccaaactgcccagcagcaccaagtcgggctggccccgacagaacgaaaagaagccctccgaggttttccggacagacttgatcacagccatgaagatcccggactcataccagctcagcccggatgactactacatcctggcagacccatggcgacaggaatgggagaaaggtgtgcaggtgcctgccggggcagaggccatcccagagcccgtggtgaggatcctcccaccactggaaggcccccctgcccaggcatccccgagcagcaccatgcttggtgagggctcccagcctgattggccagggggcagccgctatgacttggacgagattgatgcctactggctggagctcatcaactcggagcttaaggagatggagaggccggagctggacgagctgacattagagcgtgtgctggaggagctggagaccctgtgccaccagaatatggccagggccattgagacgcaggaggggctgggcatcgagtacgacgaggatgttgtctgcgacgtgtgtcgctctcctgagggcgaggatggcaacgagatggtcttctgtgacaagtgcaacgtctgtgtgcatcaggcatgctacgggatcctcaaggtgcccacgggcagctggctgtgccggacgtgtgccctgggtgtccagccaaagtgcctgctctgccccaagcgaggaggagccttgaagcccactagaagtgggaccaagtgggtgcatgtcagctgtgccctatggattcctgaggtcagcatcggctgcccagagaagatggagcccatcaccaagatctcgcatatcccagccagccgctgggctctgtcctgcagcctctgcaaggaatgcacaggcacctgcatccagtgttccatgccttcctgcgtcacagcgttccatgtcacatgcgcctttgaccacggcctggaaatgcggactatattagcagacaacgatgaggtcaagttcaagtcattctgccaggagcacagtgacgggggcccacgtaatgagcccacatctgagcccacggaacccagccaggctggcgaggacctggaaaaggtgaccctgcgcaagcagcggctgcagcagctagaggaggacttctacgagctggtggagccggctgaggtggctgagcggctggacctggctgaggcactggtcgacttcatctaccagtactggaagctgaagaggaaagccaatgccaaccagccgctgctgacccccaagaccgacgaggtggacaacctggcccagcaggagcaggacgtcctctaccgccgcctgaagctcttcacccatctgcggcaggacctagagagggttagaaatctgtgctacatggtgacaaggcgcgagagaacgaaacacgccatctgcaaactccaggagcagatattccacctgcagatgaaacttattgaacaggatctgtgtcgagagcggtctgggaggagagcaaagggcaagaagagtgactcgaagaggaagggctgcgagggctccaagggcagcactgagaagaaagagaaagtgaaggcggggcctgactcagtcctggggcagctggcaggcctgtccacctcattccccatcgatggcaccttcttcaacagctggctggcacagtcggtgcagatcacagcagagaacatggccatgagcgagtggccactgaacaatgggcaccgcgaggaccctgctccagggctgctgtcagaggaactgctgcaggacgaggagacactgctcagcttcatgcgggacccctcgctgcgacctggtgaccctgctaggaaggcccgaggccgcacccgcctgcctgccaagaagaaaccaccaccaccaccaccgcaggacgggcctggttcacggacgactccagacaaagcccccaagaagacctggggccaggatgcaggcagtggcaaggggggtcaagggccacctaccaggaagccaccacgtcggacatcttctcacttgccgtccagccctgcagccggggactgtcccatcctagccacccctgaaagccccccgccactggcccctgagaccccggacgaggcagcctcagtagctgctgactcagatgtccaagtgcctggccctgcagcaagccctaagcctttgggccggctccggccaccccgcgagagcaaggtaacccggagattgccgggtgccaggcctgatgctgggatgggaccaccttcagctgtggctgagaggcccaaggtcagcctgcattttgacactgagactgatggctacttctctgatggggagatgagcgactcagatgtagaggccgaggacggtggggtgcagcggggtccccgggaggcaggggcagaggaggtggtccgcatgggcgtactggcctcctaactcacccccttccctgtcccaggccctgccctggtccccccacaaggcctcagcccagtcacaactgccatttccagtctctgctgagtgtcccagaccctcgaggctgccactccgtcgtggttttatttttaatatagagagagttttgaattct

SEQ ID NO: 144708 - DNA, 3212 bp, Homo sapiens
  Payload ID: 8590
  Gene Symbol: JADE2
  Gene Name: jade family PHD finger 2
  ENST ID: ENST00000361895
  CDS Start-End: 340-2715
aacatacacagggggttggtgaatggtgccgaccgcggccatcgcagttggaggctattttttggggggggtgagtagcgtccatggagttactttgcgcccactcctagcggcaccggcttaggtcctgcgggccgaccgtccccggcggggggcgtggggcctgggacgccgcgggcccggccgcctccctcgccgcgaccccggatggatgcgcgccccccgccctcccgcgccggccccaggagctcccggcttcgggagcatccttcccgcgccggtccctgcagcggcgcgtagccgagggcagcgcccgtcaggggggcaccgcggagcaagatggaagagaagaggcgaaaatactccatcagcagtgacaactctgacaccactgacagtcatgcgacatctacatccgcatcaagatgctccaaactgcccagcagcaccaagtcgggctggccccgacagaacgaaaagaagccctccgaggttttccggacagacttgatcacagccatgaagatcccggactcataccagctcagcccggatgactactacatcctggcagacccatggcgacaggaatgggagaaaggtgtgcaggtgcctgccggggcagaggccatcccagagcccgtggtgaggatcctcccaccactggaaggcccccctgcccaggcatccccgagcagcaccatgcttggtgagggctcccagcctgattggccagggggcagccgctatgacttggacgagattgatgcctactggctggagctcatcaactcggagcttaaggagatggagaggccggagctggacgagctgacattagagcgtgtgctggaggagctggagaccctgtgccaccagaatatggccagggccattgagacgcaggaggggctgggcatcgagtacgacgaggatgttgtctgcgacgtgtgtcgctctcctgagggcgaggatggcaacgagatggtcttctgtgacaagtgcaacgtctgtgtgcatcaggcatgctacgggatcctcaaggtgcccacgggcagctggctgtgccggacgtgtgccctgggtgtccagccaaagtgcctgctctgccccaagcgaggaggagccttgaagcccactagaagtgggaccaagtgggtgcatgtcagctgtgccctatggattcctgaggtcagcatcggctgcccagagaagatggagcccatcaccaagatctcgcatatcccagccagccgctgggctctgtcctgcagcctctgcaaggaatgcacaggcacctgcatccagtgttccatgccttcctgcgtcacagcgttccatgtcacatgcgcctttgaccacggcctggaaatgcggactatattagcagacaacgatgaggtcaagttcaagtcattctgccaggagcacagtgacgggggcccacgtaatgagcccacatctgagcccacggaacccagccaggctggcgaggacctggaaaaggtgaccctgcgcaagcagcggctgcagcagctagaggaggacttctacgagctggtggagccggctgaggtggctgagcggctggacctggctgaggcactggtcgacttcatctaccagtactggaagctgaagaggaaagccaatgccaaccagccgctgctgacccccaagaccgacgaggtggacaacctggcccagcaggagcaggacgtcctctaccgccgcctgaagctcttcacccatctgcggcaggacctagagagggttagaaatctgtgctacatggtgacaaggcgcgagagaacgaaacacgccatctgcaaactccaggagcagatattccacctgcagatgaaacttattgaacaggatctgtgtcgagcaggcctgtccacctcattccccatcgatggcaccttcttcaacagctggctggcacagtcggtgcagatcacagcagagaacatggccatgagcgagtggccactgaacaatgggcaccgcgaggaccctgctccagggctgctgtcagaggaactgctgcaggacgaggagacactgctcagcttcatgcgggacccctcgctgcgacctggtgaccctgctaggaaggcccgaggccgcacccgcctgcctgccaagaagaaaccaccaccaccaccaccgcaggacgggcctggttcacggacgactccagacaaagcccccaagaagacctggggccaggatgcaggcagtggcaaggggggtcaagggccacctaccaggaagccaccacgtcggacatcttctcacttgccgtccagccctgcagccggggactgtcccatcctagccacccctgaaagccccccgccactggcccctgagaccccggacgaggcagcctcagtagctgctgactcagatgtccaagtgcctggccctgcagcaagccctaagcctttgggccggctccggccaccccgcgagagcaaggtaacccggagattgccgggtgccaggcctgatgctgggatgggaccaccttcagctgtggctgagaggcccaaggtcagcctgcattttgacactgagactgatggctacttctctgatggggagatgagcgactcagatgtagaggccgaggacggtggggtgcagcggggtccccgggaggcaggggcagaggaggtggtccgcatgggcgtactggcctcctaactcacccccttccctgtcccaggccctgccctggtccccccacaaggcctcagcccagtcacaactgccatttccagtctctgctgagtgtcccagaccctcgaggctgccactccgtcgtggttttatttttaatatagagagagttttgaattctacactgttgtctttcctctgtgctggcctaggacattaggattccttccacggctccggccgctaggaccctgccaggtcccgcgcaccatccctgccctgcccacgtggtattgctgggctcctggctagatgcaagcaaggtggacaagagctcaggactccagcccactgccactgggtgacacagactgtcgtttgggcattatttcatggcagatgggccagtccagggcctaccccgccttgcccccagatcccactggggtccatttggggggtcctgctacactccaccgatccccaaggaagtataataaacgatacccagccagagtcta

SEQ ID NO: 144709 - DNA, 6465 bp, Homo sapiens
  Payload ID: 8590
  Gene Symbol: JADE2
  Gene Name: jade family PHD finger 2
  Uniprot ID: Q9NQC1
  ENST ID: ENST00000395003
  CDS Start-End: 180-2552
ctctcttgctcgctcgctccctctctctcctgctggctgcctgttctaggaagccagcgcggagaggggggggatgcacagcacaggggagagagattgcgcatgttggtcagtcgtgttttaaagagtacagtgcggggaggctgagaggggcgcatgcaacaacaacttttggaaggatggaagagaagaggcgaaaatactccatcagcagtgacaactctgacaccactgacagtcatgcgacatctacatccgcatcaagatgctccaaactgcccagcagcaccaagtcgggctggccccgacagaacgaaaagaagccctccgaggttttccggacagacttgatcacagccatgaagatcccggactcataccagctcagcccggatgactactacatcctggcagacccatggcgacaggaatgggagaaaggtgtgcaggtgcctgccggggcagaggccatcccagagcccgtggtgaggatcctcccaccactggaaggcccccctgcccaggcatccccgagcagcaccatgcttggtgagggctcccagcctgattggccagggggcagccgctatgacttggacgagattgatgcctactggctggagctcatcaactcggagcttaaggagatggagaggccggagctggacgagctgacattagagcgtgtgctggaggagctggagaccctgtgccaccagaatatggccagggccattgagacgcaggaggggctgggcatcgagtacgacgaggatgttgtctgcgacgtgtgtcgctctcctgagggcgaggatggcaacgagatggtcttctgtgacaagtgcaacgtctgtgtgcatcaggcatgctacgggatcctcaaggtgcccacgggcagctggctgtgccggacgtgtgccctgggtgtccagccaaagtgcctgctctgccccaagcgaggaggagccttgaagcccactagaagtgggaccaagtgggtgcatgtcagctgtgccctatggattcctgaggtcagcatcggctgcccagagaagatggagcccatcaccaagatctcgcatatcccagccagccgctgggctctgtcctgcagcctctgcaaggaatgcacaggcacctgcatccagtgttccatgccttcctgcgtcacagcgttccatgtcacatgcgcctttgaccacggcctggaaatgcggactatattagcagacaacgatgaggtcaagttcaagtcattctgccaggagcacagtgacgggggcccacgtaatgagcccacatctgagcccacggaacccagccaggctggcgaggacctggaaaaggtgaccctgcgcaagcagcggctgcagcagctagaggaggacttctacgagctggtggagccggctgaggtggctgagcggctggacctggctgaggcactggtcgacttcatctaccagtactggaagctgaagaggaaagccaatgccaaccagccgctgctgacccccaagaccgacgaggtggacaacctggcccagcaggagcaggacgtcctctaccgccgcctgaagctcttcacccatctgcggcaggacctagagagggttagaaatctgtgctacatggtgacaaggcgcgagagaacgaaacacgccatctgcaaactccaggagcagatattccacctgcagatgaaacttattgaacaggatctgtgtcgaggcctgtccacctcattccccatcgatggcaccttcttcaacagctggctggcacagtcggtgcagatcacagcagagaacatggccatgagcgagtggccactgaacaatgggcaccgcgaggaccctgctccagggctgctgtcagaggaactgctgcaggacgaggagacactgctcagcttcatgcgggacccctcgctgcgacctggtgaccctgctaggaaggcccgaggccgcacccgcctgcctgccaagaagaaaccaccaccaccaccaccgcaggacgggcctggttcacggacgactccagacaaagcccccaagaagacctggggccaggatgcaggcagtggcaaggggggtcaagggccacctaccaggaagccaccacgtcggacatcttctcacttgccgtccagccctgcagccggggactgtcccatcctagccacccctgaaagccccccgccactggcccctgagaccccggacgaggcagcctcagtagctgctgactcagatgtccaagtgcctggccctgcagcaagccctaagcctttgggccggctccggccaccccgcgagagcaaggtaacccggagattgccgggtgccaggcctgatgctgggatgggaccaccttcagctgtggctgagaggcccaaggtcagcctgcattttgacactgagactgatggctacttctctgatggggagatgagcgactcagatgtagaggccgaggacggtggggtgcagcggggtccccgggaggcaggggcagaggaggtggtccgcatgggcgtactggcctcctaactcacccccttccctgtcccaggccctgccctggtccccccacaaggcctcagcccagtcacaactgccatttccagtctctgctgagtgtcccagaccctcgaggctgccactccgtcgtggttttatttttaatatagagagagttttgaattctacactgttgtctttcctctgtgctggcctaggacattaggattccttccacggctccggccgctaggaccctgccaggtcccgcgcaccatccctgccctgcccacgtggtattgctgggctcctggctagatgcaagcaaggtggacaagagctcaggactccagcccactgccactgggtgacacagactgtcgtttgggcattatttcatggcagatgggccagtccagggcctaccccgccttgcccccagatcccactggggtccatttggggggtcctgctacactccaccgatccccaaggaagtataataaacgatacccagccagagtctactcactgtcacaagcacaacgagtttatatgagaaagcactgagggggtgcagagggcccgctagttccaggggaactgaaagctgttcctgatcagcccgtatcatctgaggcctgcctgcccaccctgccaccctcccctcccttgctgctctgcccctgccagtgcccagcccagcggctctgggaaggggttcccagaatccctcctgagctgtgccatttactcaggggactcccaaacagccagctgccagtgcaggtggagggctgtaggggagggccagtgcccagacagggtcatggggctcagaccagcccactgtagagaatcactctgaggctccaacttccttccttccttcggggccagtctcggccgaagtctggtcacgctcagacagagctgaccagaccagaccgtttgccttttcaagtttcctagtcctgctacaagatgagcttcttccgtggtttccttttggaaactcctccttccaacaagcagtgggatcccggggcccagggcgggccggtgttggccgctggggctgttgtaagtcttgctggatgttcccctgttcctgagccttaacccctcgcacagccatccccccccccgtcctgccatccccccccgccgtcctgccttccccaccccacccttaggtcccaggtagttgctctgaagagtttcagtagagtggccccagggtgatagctcagggaacaacaaaaaaggaattccgtgaaaacatttttttttctttgatgaattactcctgggtcacttccaccactggtaaagccagaacttctccaaaaagaaccttgcaaaaagtccagtgaatcagtcgaatcattctgtggatgccaaagaatattttgaccataatacagcacagcctggacctgacaacttgtcatttggacttttttttaaatggagttctttagcaacaaagtatagaaacatgttcattgcacacacccaaggagaagagctcaagcgcttggaagaggatgctttgctgctgctgaagtgtacctgggtgttagatttcagatcctgggctgagcccactgtgagctttcctaaactgtgagactcacagaggggaaagatactgacggtgaaaccagcatggaaaacgtctttaccatgtggttccctcctccccaaatacataaagcaaataagcaggatggggaacagcttgaccttcatccacccctaactccaaaactatcaaggtacgacagtggcattgtcatcgacactcaatttcatgtgaattttagcaaaacaggaaacaaagataatgactcagttcagaggatcggacaaatgtgtctagtccgggtggactcggagggagtggggtgggcttcaaggattctgggcgttgggatggcatgagctaccctgtagagtttagtctgcctgcccgccttggtagtagtgaccagtcagtgtcagcatcagtgtcccaaccccagtctctgtttactgcctttgaacagaacttcttccttccccatgctttgggtcacctcgggctgcaaccctgtctgtgccagattgcccggtctgaccctgcaggaagcaaagaggtgagcttaaagaacaaccaaactctgccaggggtcccagaaagcccagggtccagcagtctcagcacttggccccttgccccttcacaccatcctggggcaggggctgggcctccctggtggcaggggtgggtggagaattagggagagggtgcaacgagtctggccccttgcctcgggctggctggtgttcttccaagagcctctgctcacattgttggcctctggattctggcccttcttcattggctgttgctttggactggactgttgctgagcctgtgtcctgcagaacccagatgtctgttaggctggctggctgctgcgaggggaggggggtggcctttcatttggggtgccctttcactcccaggccaagccctggagcaatcttcttcaggcagctgtctccacctccaggatgtccagcaggctgcaaggagaaggatgccagccacccatcctcccccagttcccagcctttcccctgttggtcacagccgcttctgtctttttccggtctactgtccccagtgtagagggctttgctgtccctgagactgaggcaggttccttttccaggtcagaggtggaggtagatctttctctcaaccacatctgcctccacacacagctcctccgcagggaaggagaagctgctctgtaactcattctggctatcgtcccccttctcactgacctgaccgcccaccacctccttccccctcatcacatgacaaaggataatgtgcaagaaaagtatttttatgtatcataaatgtattttgaaacaaatgagaagaagaaaggtagaagggtttattttattaaatgagcctgacttagtgacagtgtgtgagcatttgcaatgtaagggcctcagcttccttggagaagccaccccaggtttccagacatagatgttgaattgtttgtggggggtgtgccaggccacgtctcgtgtgtccgtatgcaggcatgcctgtgtatactgtgtatgggcacactgggactagctgggacaattcctagagattcaactgcccaattctaaccaacattggcagcggctgaacttggcatttccttgctaactgccagatgtggccaacctttgtccatatgcaaaccactgaaaaatgatctggatttctatagcaaggcccttggggagggcactctcccatgcccttggcctcgctggccacattggccaatgagccagggctggagtctgagacctttggttgttctttaaggcacctcctgccactttctccctcagaggcacaaacactttgtgttccacgtcagtttgaggggacggtggggggatgatatgaatgtcacaggaggagacaccttctgtctttgtttcaaagaaagtgatgtgccatttgttaatatacaagagaaatattgaaaatatattgaaaagagcaattttaaattatttttggcttatgttgcaatatttattttcttgtattagaaaagattcctttgtagagaaaaaatgtatttttcattaacgcaaagacctatttctcctttttgtacattgtccatgtgcgcaacccttaacgagcaatagaatgtatggtcacctgggtgtggccagtgcccgctgtgccctgcatgattctgtgttgccgctgctgcatagttcccagccccatcctgtcctgctcactcatgggggcttccagaccccggccccaccagggcttgtgtcatagggagccctttgcactcctcgtgtgttggcaaacgcagttaataaagcagtgttttctgtgctg

SEQ ID NO: 144710 - DNA, 2797 bp, Homo sapiens
  Payload ID: 8590
  Gene Symbol: JADE2
  Gene Name: jade family PHD finger 2
  ENST ID: ENST00000402835
  CDS Start-End: 256-1785
ggtgagtagcgtccatggagttactttgcgcccactcctagcggcaccggcttaggtcctgcgggccgaccgtccccggcggggggcgtggggcctgggacgccgcgggcccggccgcctccctcgccgcgaccccggatggatgcgcgccccccgccctcccgcgccggccccaggagctcccggcttcgggagcatccttcccgcgccggtccctgcagcggcgcgtagccgagggcagcgcccgtcagggggatggaagagaagaggcgaaaatactccatcagcagtgacaactctgacaccactgacagtcatgcgacatctacatccgcatcaagatgctccaaactgcccagcagcaccaagtcgggctggccccgacagaacgaaaagaagccctccgaggttttccggacagacttgatcacagccatgaagatcccggactcataccagctcagcccggatgactactacatcctggcagacccatggcgacaggaatgggagaaaggtgtgcaggtgcctgccggggcagaggccatcccagagcccgtggtgaggatcctcccaccactggaaggcccccctgcccaggcatccccgagcagcaccatgcttggtgagggctcccagcctgattggccagggggcagccgctatgacttggacgagattgatgcctactggctggagctcatcaactcggagcttaaggagatggagaggccggagctggacgagctgacattagagcgtgtgctggaggagctggagaccctgtgccaccagaatatggccagggccattgagacgcaggaggggctgggcatcgagtacgacgaggatgttgtctgcgacgtgtgtcgctctcctgagggcgaggatggcaacgagatggtcttctgtgacaagtgcaacgtctgtgtgcatcaggcatgctacgggatcctcaaggtgcccacgggcagctggctgtgccggacgtgtgccctgggtgtccagccaaagtgcctgctctgccccaagcgaggaggagccttgaagcccactagaagtgggaccaagtgggtgcatgtcagctgtgccctatggattcctgaggtcagcatcggctgcccagagaagatggagcccatcaccaagatctcgcatatcccagccagccgctgggctctgtcctgcagcctctgcaaggaatgcacaggcacctgcatccagtgttccatgccttcctgcgtcacagcgttccatgtcacatgcgcctttgaccacggcctggaaatgcggactatattagcagacaacgatgaggtcaagttcaagtcattctgccaggagcacagtgacgggggcccacgtaatgagcccacatctgagcccacggaacccagccaggctggcgaggacctggaaaaggtgaccctgcgcaagcagcggctgcagcagctagaggaggacttctacgagctggtggagccggctgaggtggctgagcggctggacctggctgaggcactggtcgacttcatctaccagtactggaagctgaagaggaaagccaatgccaaccagccgctgctgacccccaagaccgacgaggtggacaacctggcccagcaggagcaggacgtcctctaccgccgcctgaagctcttcacccatctgcggcaggacctagagaggagcggtctgggaggagagcaaagggcaagaagagtgactcgaagaggaagggctgcgagggctccaagggcagcactgagaagaaagagaaagtgaaggcggggcctgactcagtcctggggcagctgggcctgtccacctcattccccatcgatggcaccttcttcaacagctggctggcacagtcggtgcagatcacagcagagaacatggccatgagcgagtggccactgaacaatgggcaccgcgaggaccctgctccagggctgctgtcagaggaactgctgcaggacgaggagacactgctcagcttcatgcgggacccctcgctgcgacctggtgaccctgctaggaaggcccgaggccgcacccgcctgcctgccaagaagaaaccaccaccaccaccaccgcaggacgggcctggttcacggacgactccagacaaagcccccaagaagacctggggccaggatgcaggcagtggcaaggggggtcaagggccacctaccaggaagccaccacgtcggacatcttctcacttgccgtccagccctgcagccggggactgtcccatcctagccacccctgaaagccccccgccactggcccctgagaccccggacgaggcagcctcagtagctgctgactcagatgtccaagtgcctggccctgcagcaagccctaagcctttgggccggctccggccaccccgcgagagcaaggtaacccggagattgccgggtgccaggcctgatgctgggatgggaccaccttcagctgtggctgagaggcccaaggtcagcctgcattttgacactgagactgatggctacttctctgatggggagatgagcgactcagatgtagaggccgaggacggtggggtgcagcggggtccccgggaggcaggggcagaggaggtggtccgcatgggcgtactggcctcctaactcacccccttccctgtcccaggccctgccctggtccccccacaaggcctcagcccagtcacaactgccatttccagtctctgctgagtgtcccagaccctcgaggctgccactccgtcgtggttttatttttaatatagagagagttttgaattcta

SEQ ID NO: 144711 - DNA, 1256 bp, Homo sapiens
  Payload ID: 8590
  Gene Symbol: JADE2
  Gene Name: jade family PHD finger 2
  ENST ID: ENST00000430087
  CDS Start-End: 1-143
gtcgagagcggtctgggaggagagcaaagggcaagaagagtgactcgaagaggaagggctgcgagggctccaagggcagcactgagaagaaagagaaagtgaaggcggggcctgactcagtcctggggcagctgggtgagtgagggccatgctggcctgcagacacggcaggcttgaccatcaccacgcttgcagctctgtctgccctgcggaaggccagctgcacagagtaggagactgaggctcaagagcggtaaccaggcccttgcttgcccaggcctgtccacctcattccccatcgatggcaccttcttcaacagctggctggcacagtcggtgcagatcacagcagagaacatggccatgagcgagtggccactgaacaatgggcaccgcgaggaccctgctccagggctgctgtcagaggaactgctgcaggacgaggagacactgctcagcttcatgcgggacccctcgctgcgacctggtgaccctgctaggaaggcccgaggccgcacccgcctgcctgccaagaagaaaccaccaccaccaccaccgcaggacgggcctggttcacggacgactccagacaaagcccccaagaagacctggggccaggatgcaggcagtggcaaggggggtcaagggccacctaccaggaagccaccacgtcggacatcttctcacttgccgtccagccctgcagccggggactgtcccatcctagccacccctgaaagccccccgccactggcccctgagaccccggacgaggcagcctcagtagctgctgactcagatgtccaagtgcctggccctgcagcaagccctaagcctttgggccggctccggccaccccgcgagagcaaggtaacccggagattgccgggtgccaggcctgatgctgggatgggaccaccttcagctgtggctgagaggcccaaggtcagcctgcattttgacactgagactgatggctacttctctgatggggagatgagcgactcagatgtagaggccgaggacggtggggtgcagcggggtccccgggaggcaggggcagaggaggtggtccgcatgggcgtactggcctcctaactcacccccttccctgtcccaggccctgccctggtccccccacaaggcctcagcccagtcacaactgccatttccagtctctgctgagtgtcccagaccctcgaggctgccactccgtcgtggttttatttttaatatagagagagttttgaattcta

SEQ ID NO: 144712 - DNA, 887 bp, Homo sapiens
  Payload ID: 8590
  Gene Symbol: JADE2
  Gene Name: jade family PHD finger 2
  ENST ID: ENST00000431355
  CDS Start-End: 123-887
cccctctcccggcccggtgcacgcgggcgctgcacgcgggggcagcatgctcggctcctggggttggaggctctgcacaaattagacagtttttttggaggggcgggggacaccctttccagatggaagagaagaggcgaaaatactccatcagcagtgacaactctgacaccactgacagtcatgcgacatctacatccgcatcaagatgctccaaactgcccagcagcaccaagtcgggctggccccgacagaacgaaaagaagccctccgaggttttccggacagacttgatcacagccatgaagatcccggactcataccagctcagcccggatgactactacatcctggcagacccatggcgacaggaatgggagaaaggtgtgcaggtgcctgccggggcagaggccatcccagagcccgtggtgaggatcctcccaccactggaaggcccccctgcccaggcatccccgagcagcaccatgcttggtgagggctcccagcctgattggccagggggcagccgctatgacttggacgagattgatgcctactggctggagctcatcaactcggagcttaaggagatggagaggccggagctggacgagctgacattagagcgtgtgctggaggagctggagaccctgtgccaccagaatatggccagggccattgagacgcaggaggggctgggcatcgagtacgacgaggatgttgtctgcgacgtgtgtcgctctcctgagggcgaggatggcaacgagatggtcttctgtgacaagtgcaacgtctgtgtgcatcaggcatgctacgggatcctcaaggtgcccacgggcagctggctgtgccggacgtgtgccctgggtgtccagccaaagtgcctg

SEQ ID NO: 144713 - DNA, 567 bp, Homo sapiens
  Payload ID: 8590
  Gene Symbol: JADE2
  Gene Name: jade family PHD finger 2
  ENST ID: ENST00000512386
  CDS Start-End: 119-567
aacagacccaaggccccgccaccgccggctagcagcccgacagcccgcccgcctggcgagcgcaggctcttcttccagaaactgcgaggatccgagcgtactgtttgtgcaccacaagatggaagagaagaggcgaaaatactccatcagcagtgacaactctgacaccactgacagtcatgcgacatctacatccgcatcaagatgctccaaactgcccagcagcaccaagtcgggctggccccgacagaacgaaaagaagccctccgaggttttccggacagacttgatcacagccatgaagatcccggactcataccagctcagcccggatgactactacatcctggcagacccatggcgacaggaatgggagaaaggtgtgcaggtgcctgccggggcagaggccatcccagagcccgtggtgaggatcctcccaccactggaaggcccccctgcccaggcatccccgagcagcaccatgcttggtgagggctcccagcctgattggccagggggcagccgctatgacttggacgagattgatgcctactggctggagctcat

SEQ ID NO: 144714 - DNA, 1251 bp, Homo sapiens
  Payload ID: 8590
  Gene Symbol: JADE2
  Gene Name: jade family PHD finger 2
  ENST ID: ENST00000612830
  CDS Start-End: 354-1094
agagcggtctgggaggagagcaaagggcaagaagagtgactcgaagaggaagggctgcgagggctccaagggcagcactgagaagaaagagaaagtgaaggcggggcctgactcagtcctggggcagctgggtgagtgagggccatgctggcctgcagacacggcaggcttgaccatcaccacgcttgcagctctgtctgccctgcggaaggccagctgcacagagtaggagactgaggctcaagagcggtaaccaggcccttgcttgcccaggcctgtccacctcattccccatcgatggcaccttcttcaacagctggctggcacagtcggtgcagatcacagcagagaacatggccatgagcgagtggccactgaacaatgggcaccgcgaggaccctgctccagggctgctgtcagaggaactgctgcaggacgaggagacactgctcagcttcatgcgggacccctcgctgcgacctggtgaccctgctaggaaggcccgaggccgcacccgcctgcctgccaagaagaaaccaccaccaccaccaccgcaggacgggcctggttcacggacgactccagacaaagcccccaagaagacctggggccaggatgcaggcagtggcaaggggggtcaagggccacctaccaggaagccaccacgtcggacatcttctcacttgccgtccagccctgcagccggggactgtcccatcctagccacccctgaaagccccccgccactggcccctgagaccccggacgaggcagcctcagtagctgctgactcagatgtccaagtgcctggccctgcagcaagccctaagcctttgggccggctccggccaccccgcgagagcaaggtaacccggagattgccgggtgccaggcctgatgctgggatgggaccaccttcagctgtggctgagaggcccaaggtcagcctgcattttgacactgagactgatggctacttctctgatggggagatgagcgactcagatgtagaggccgaggacggtggggtgcagcggggtccccgggaggcaggggcagaggaggtggtccgcatgggcgtactggcctcctaactcacccccttccctgtcccaggccctgccctggtccccccacaaggcctcagcccagtcacaactgccatttccagtctctgctgagtgtcccagaccctcgaggctgccactccgtcgtggttttatttttaatatagagagagttttgaattct

SEQ ID NO: 144715 - DNA, 636 bp, Homo sapiens
  Payload ID: 8591
  Gene Symbol: JADE3
  Gene Name: jade family PHD finger 3
  ENST ID: ENST00000424392
  CDS Start-End: 77-636
gggtggcgacggcgcccagcccgccagaagaacgcgcggcgggcagacggctgggagccgctccggatgctccaggatgaaacgccataggcctgtcagcagcagtgacagttcagacgaaagtccttccacttcctttacttctggctcaatgtataggatcaagtcaaaaattccaaatgaacacaagaaacctgctgaggtattccggaaggacctcatcagtgccatgaaacttccagattctcaccacattaatcctgatagctattacctctttgctgatacatggaaggaagaatgggaaaagggagtccaggtaccagccagtccagacaccgttccacagccttctctcaggattatagctgagaaggtaaaggacgttctgtttatccgaccccggaagtatattcactgctccagcccagacaccacagagcctggctacatcaacatcatggagttggcagcatctgtttgccgctatgacctagatgacatggacatcttctggcttcaggaactcaatgaagaccttgcagaaatgggttgtgggccagttgatgagaatcttatggaaaagacagtagaagtcctggaacgccattgccatgaaaatatgaaccatgctat

SEQ ID NO: 144716 - DNA, 492 bp, Homo sapiens
  Payload ID: 8591
  Gene Symbol: JADE3
  Gene Name: jade family PHD finger 3
  ENST ID: ENST00000455411
  CDS Start-End: 149-492
ctccgggagtggaagcgggcggcgcggagcgcacagtcccggcccggcctcgccgcgctccgggtcgctccggttccacatcgtggtcgcctccggcgtccccggcgccttggggccgagagcgtgtgtgggctgaggatgctccaggatgaaacgccataggcctgtcagcagcagtgacagttcagacgaaagtccttccacttcctttacttctggctcaatgtataggatcaagtcaaaaattccaaatgaacacaagaaacctgctgaggtattccggaaggacctcatcagtgccatgaaacttccagattctcaccacattaatcctgatagctattacctctttgctgatacatggaaggaagaatgggaaaagggagtccaggtaccagccagtccagacaccgttccacagccttctctcaggattatagctgagaaggtaaaggacgttctgtttatccgaccccggaagtatattcactg

SEQ ID NO: 144717 - DNA, 4713 bp, Homo sapiens
  Payload ID: 8591
  Gene Symbol: JADE3
  Gene Name: jade family PHD finger 3
  Uniprot ID: Q92613
  ENST ID: ENST00000611250
  CDS Start-End: 77-2548
gggtggcgacggcgcccagcccgccagaagaacgcgcggcgggcagacggctgggagccgctccggatgctccaggatgaaacgccataggcctgtcagcagcagtgacagttcagacgaaagtccttccacttcctttacttctggctcaatgtataggatcaagtcaaaaattccaaatgaacacaagaaacctgctgaggtattccggaaggacctcatcagtgccatgaaacttccagattctcaccacattaatcctgatagctattacctctttgctgatacatggaaggaagaatgggaaaagggagtccaggtaccagccagtccagacaccgttccacagccttctctcaggattatagctgagaaggtaaaggacgttctgtttatccgaccccggaagtatattcactgctccagcccagacaccacagagcctggctacatcaacatcatggagttggcagcatctgtttgccgctatgacctagatgacatggacatcttctggcttcaggaactcaatgaagaccttgcagaaatgggttgtgggccagttgatgagaatcttatggaaaagacagtagaagtcctggaacgccattgccatgaaaatatgaaccatgctattgagacagaggaagggctaggcatagagtatgatgaagatgtgatctgtgatgtgtgccggtctccagacagtgaagaagggaatgatatggtgttctgtgataagtgtaacgtctgtgtgcatcaggcctgctatggcatcctcaaggtcccagaaggcagctggctgtgtcgctcctgtgtcctgggcatttatccgcaatgtgtgttatgtccaaagaaaggtggagccctgaagaccaccaagacagggactaaatgggctcatgtcagctgtgccctgtggatcccagaggtcagcattgcttgtcctgagaggatggaaccgatcacgaagatctcccacatcccacccagtcggtgggccttagtctgcaacttgtgcaagttgaagacgggggcttgtattcagtgctctataaaaagctgcatcactgccttccacgtcacctgtgcctttgagcacggcctagagatgaagaccatcctagatgagggagacgaagtgaagttcaagtcatattgcctcaagcatagccaaaacaggcagaaacttggagaagctgagtacccccaccacagggctaaagagcagagccaggccaaaagtgagaaaaccagcctgcgggcacagaagcttcgggagctggaggaggagttctattccttggtacgagtggaagatgtggccgcagagctgggtatgcccacgctagctgtggactttatctataactactggaaactgaagcggaaaagtaacttcaataagccattatttcctccaaaggaggatgaagaaaatgggctggtgcagccaaaagaggaaagcattcacactcgaatgagaatgtttatgcatctacgccaggacctggagagggtccgaaatctgtgctatatgataagcagacgagagaagctgaagctgtcacacaacaaaatacaggaacagatcttcggtttgcaagtccagcttcttaaccaagaaattgatgcagggcttcctttgacaaatgcacttgaaaactcactgttttacccaccaccaagaattaccttgaagttaaaaatgcccaaatcaaccccagaagaccacagaaacagctccacagaaaccgatcagcagccccactctcctgacagcagctcatctgttcacagtataaggaacatgcaggtgcctcaggagtcactagaaatgagaacaaaatcgtatccgagatacccactagagagcaagaataaccgtttgctggccagtctcagccattctaggagtgaagcaaaggagtccagtcctgcttggagaaccccgtcctcggagtgctatcatgggcagtcactgggaaagcctctggtccttcaggctgccctccatggacagtcttccattgggaatgggaaaagtcagcctaactccaagtttgccaaatccaatggcctggagggcagctggtctgggaatgtcacccaaaaagacagctcgagtgagatgttctgtgaccaggagcctgtgttcagcccccacttggtcagtcagggcagctttagaaaatccactgtagaacactttagtaggtcctttaaagagaccaccaataggtgggtgaagaacacagaggacctccagtgctatgtgaagccaaccaagaatatgagccccaaggagcagttctggggtagacaggttctcaggcggtctgcagggagagctccatatcaggaaaatgatggctattgcccagatttggagctgagtgattcagaggcagaaagtgatgggaataaagaaaaagtcagggtaaggaaagatagctcagacagggaaaatcctccccatgactctagacgggattgccatggtaaaagcaagacacatcccctttcccacagttcaatgcaaaggtgattagaaacttccaaggatgacccaacctttgcctttgccccatatattggggaaaacccatacaccaaaaggattttagcatatgttaagaggaattgcagtgaaaaggataacatttttccatagtaaattgtcttgcagtttttgaaaatgtttcaagtctagtttttacaagcacattacagtaattgcaggttgtccagaggttggtttgtcagaggctattgggaacagctgggcccagggtatttgctcagtaaatattttggggcagctttccggttatataacacattgacaagtatatgtattaagagtccttgcattgttaactgatttgcaagagaccatgattatcagacactaaaactacttatcttttgaagctacagcatgtgactccccagagctcctgtctgtaggaagtttctaattccactggtatctataaacccttttcaggggagagaccaggagaccaccatcttagatactgtcaaactcactactgtcttcctttgttctgcacaaggttgagtttctttcacagtatcttaacttactgagtcaatactcctcatgcttatcagtgtccagtgcctgttcctaaacttgcttgttggggacacactcataactatttcacctgactgacaagcataaaaggctaacttgtggatagtgtttacaaaagtacaaaagtactacttccaaggaaaatgctctgattctctgtttaggcatttgtgaaggattccagagcctttcccaaagtgagaccatttctggggtatttgtaccaggtcagggtttttgtgttgttttcaaataagtttgactaaaataagtttggctgacagtttttgtatacctgctttaatgtttataaaatttttattgaggtataattaaaatatagtaaaatgcacagaggttaagtattcttacctgctttaattttgaaacagatttttattgtcaaacagaatttgaaagcatgtgtttaacacatggatataatttagctttgtgtcacctttgaatctgaggcagtttcccaaacaaaaaggctggagccatttttcagaagttgcttataccctgttcccaaactatcagccttgattaatttctagtaggaagagaataattacatttgcgggggggggggtggataaaaacatgtctgcttctcatttaaataagagagaaatgatgccgttttttaaatgtgaagcagactataattctcagctctcttttcttcttagccttaaattaatattctctttcttctagttttggaaagtgtagtgggaatattcagacaaaagaggccattttccatttttaaagcttcttactggtgaaacagcccagttgtagtaggtgccagtcagtcaaggcaggggccctctctccgtcaatatggaaaactcagcagttttcctctcccccagttgtgttcttgtaacgttgttaatgggttcctttgctttttgctttctccttttctgaaaatgtatgtgttttgcctctcttttggctacatcttcaaaatatttcttttgtgcctatgtacatgtgtaaacatgccatagcatgtgtggtaggtgtcctgtattttgtttgggaaaaaaactatcaaaatgaggaagagaatttcccctatttatgcactaggtttctgtgctttttctttgagttctctggagtagatattaatttgataccttcatggtaatgaaattatgatggagctgtgttataaattccttatgtcagaggccagtgcggtagcctttgtcccttcatgcctttcaattctgagtgggaggaaaagcaaacatcaaaacagtgcttcagccaaattccatatgtaatgccattgggagagtattgactaaaatatcattcgtcagggaaatatagttgtaatatttttacaggatattcctaggtaaatgaaggagccttcagttgtaaatttcaattaccccaaaatgtatttgctacattttgttgtttgaagtattacctcttaaccttctttgttaatttttttcattttgtcttatatagtccagttttccaagataagctcagtcctttttcaaatgtcccctttttaccaatactttttcattaaattatgaaaactgcta

SEQ ID NO: 144718 - DNA, 4934 bp, Homo sapiens
  Payload ID: 8591
  Gene Symbol: JADE3
  Gene Name: jade family PHD finger 3
  Uniprot ID: Q92613
  ENST ID: ENST00000614628
  CDS Start-End: 299-2770
atacaatagtgctccgcgccgcctcagccgccgccgccgcccaaccgcctgcccagcgctgaggcctgacgggccgggcggacgagggccgagggcgggagctgaggcgcggggggcggccccggcggggggcgggggcgaggaggggattaaggggcaggtgcgagggagggaagagaagaaagcgagcggttaggggggcggttaccactccgaccggactcacccggcacattgccgggccgcggcgtggagccgggcaggagccgcgagccagctgcgcgaaggatgctccaggatgaaacgccataggcctgtcagcagcagtgacagttcagacgaaagtccttccacttcctttacttctggctcaatgtataggatcaagtcaaaaattccaaatgaacacaagaaacctgctgaggtattccggaaggacctcatcagtgccatgaaacttccagattctcaccacattaatcctgatagctattacctctttgctgatacatggaaggaagaatgggaaaagggagtccaggtaccagccagtccagacaccgttccacagccttctctcaggattatagctgagaaggtaaaggacgttctgtttatccgaccccggaagtatattcactgctccagcccagacaccacagagcctggctacatcaacatcatggagttggcagcatctgtttgccgctatgacctagatgacatggacatcttctggcttcaggaactcaatgaagaccttgcagaaatgggttgtgggccagttgatgagaatcttatggaaaagacagtagaagtcctggaacgccattgccatgaaaatatgaaccatgctattgagacagaggaagggctaggcatagagtatgatgaagatgtgatctgtgatgtgtgccggtctccagacagtgaagaagggaatgatatggtgttctgtgataagtgtaacgtctgtgtgcatcaggcctgctatggcatcctcaaggtcccagaaggcagctggctgtgtcgctcctgtgtcctgggcatttatccgcaatgtgtgttatgtccaaagaaaggtggagccctgaagaccaccaagacagggactaaatgggctcatgtcagctgtgccctgtggatcccagaggtcagcattgcttgtcctgagaggatggaaccgatcacgaagatctcccacatcccacccagtcggtgggccttagtctgcaacttgtgcaagttgaagacgggggcttgtattcagtgctctataaaaagctgcatcactgccttccacgtcacctgtgcctttgagcacggcctagagatgaagaccatcctagatgagggagacgaagtgaagttcaagtcatattgcctcaagcatagccaaaacaggcagaaacttggagaagctgagtacccccaccacagggctaaagagcagagccaggccaaaagtgagaaaaccagcctgcgggcacagaagcttcgggagctggaggaggagttctattccttggtacgagtggaagatgtggccgcagagctgggtatgcccacgctagctgtggactttatctataactactggaaactgaagcggaaaagtaacttcaataagccattatttcctccaaaggaggatgaagaaaatgggctggtgcagccaaaagaggaaagcattcacactcgaatgagaatgtttatgcatctacgccaggacctggagagggtccgaaatctgtgctatatgataagcagacgagagaagctgaagctgtcacacaacaaaatacaggaacagatcttcggtttgcaagtccagcttcttaaccaagaaattgatgcagggcttcctttgacaaatgcacttgaaaactcactgttttacccaccaccaagaattaccttgaagttaaaaatgcccaaatcaaccccagaagaccacagaaacagctccacagaaaccgatcagcagccccactctcctgacagcagctcatctgttcacagtataaggaacatgcaggtgcctcaggagtcactagaaatgagaacaaaatcgtatccgagatacccactagagagcaagaataaccgtttgctggccagtctcagccattctaggagtgaagcaaaggagtccagtcctgcttggagaaccccgtcctcggagtgctatcatgggcagtcactgggaaagcctctggtccttcaggctgccctccatggacagtcttccattgggaatgggaaaagtcagcctaactccaagtttgccaaatccaatggcctggagggcagctggtctgggaatgtcacccaaaaagacagctcgagtgagatgttctgtgaccaggagcctgtgttcagcccccacttggtcagtcagggcagctttagaaaatccactgtagaacactttagtaggtcctttaaagagaccaccaataggtgggtgaagaacacagaggacctccagtgctatgtgaagccaaccaagaatatgagccccaaggagcagttctggggtagacaggttctcaggcggtctgcagggagagctccatatcaggaaaatgatggctattgcccagatttggagctgagtgattcagaggcagaaagtgatgggaataaagaaaaagtcagggtaaggaaagatagctcagacagggaaaatcctccccatgactctagacgggattgccatggtaaaagcaagacacatcccctttcccacagttcaatgcaaaggtgattagaaacttccaaggatgacccaacctttgcctttgccccatatattggggaaaacccatacaccaaaaggattttagcatatgttaagaggaattgcagtgaaaaggataacatttttccatagtaaattgtcttgcagtttttgaaaatgtttcaagtctagtttttacaagcacattacagtaattgcaggttgtccagaggttggtttgtcagaggctattgggaacagctgggcccagggtatttgctcagtaaatattttggggcagctttccggttatataacacattgacaagtatatgtattaagagtccttgcattgttaactgatttgcaagagaccatgattatcagacactaaaactacttatcttttgaagctacagcatgtgactccccagagctcctgtctgtaggaagtttctaattccactggtatctataaacccttttcaggggagagaccaggagaccaccatcttagatactgtcaaactcactactgtcttcctttgttctgcacaaggttgagtttctttcacagtatcttaacttactgagtcaatactcctcatgcttatcagtgtccagtgcctgttcctaaacttgcttgttggggacacactcataactatttcacctgactgacaagcataaaaggctaacttgtggatagtgtttacaaaagtacaaaagtactacttccaaggaaaatgctctgattctctgtttaggcatttgtgaaggattccagagcctttcccaaagtgagaccatttctggggtatttgtaccaggtcagggtttttgtgttgttttcaaataagtttgactaaaataagtttggctgacagtttttgtatacctgctttaatgtttataaaatttttattgaggtataattaaaatatagtaaaatgcacagaggttaagtattcttacctgctttaattttgaaacagatttttattgtcaaacagaatttgaaagcatgtgtttaacacatggatataatttagctttgtgtcacctttgaatctgaggcagtttcccaaacaaaaaggctggagccatttttcagaagttgcttataccctgttcccaaactatcagccttgattaatttctagtaggaagagaataattacatttgcgggggggggggtggataaaaacatgtctgcttctcatttaaataagagagaaatgatgccgttttttaaatgtgaagcagactataattctcagctctcttttcttcttagccttaaattaatattctctttcttctagttttggaaagtgtagtgggaatattcagacaaaagaggccattttccatttttaaagcttcttactggtgaaacagcccagttgtagtaggtgccagtcagtcaaggcaggggccctctctccgtcaatatggaaaactcagcagttttcctctcccccagttgtgttcttgtaacgttgttaatgggttcctttgctttttgctttctccttttctgaaaatgtatgtgttttgcctctcttttggctacatcttcaaaatatttcttttgtgcctatgtacatgtgtaaacatgccatagcatgtgtggtaggtgtcctgtattttgtttgggaaaaaaactatcaaaatgaggaagagaatttcccctatttatgcactaggtttctgtgctttttctttgagttctctggagtagatattaatttgataccttcatggtaatgaaattatgatggagctgtgttataaattccttatgtcagaggccagtgcggtagcctttgtcccttcatgcctttcaattctgagtgggaggaaaagcaaacatcaaaacagtgcttcagccaaattccatatgtaatgccattgggagagtattgactaaaatatcattcgtcagggaaatatagttgtaatatttttacaggatattcctaggtaaatgaaggagccttcagttgtaaatttcaattaccccaaaatgtatttgctacattttgttgtttgaagtattacctcttaaccttctttgttaatttttttcattttgtcttatatagtccagttttccaagataagctcagtcctttttcaaatgtcccctttttaccaatactttttcattaaattatgaaaactgct

SEQ ID NO: 144719 - DNA, 6048 bp, Homo sapiens
  Payload ID: 8592
  Gene Symbol: JAG1
  Gene Name: jagged 1
  Uniprot ID: P78504
  ENST ID: ENST00000254958
  CDS Start-End: 578-4234
gggaggggcgtgcccagggtgagcacgccctctcatgaatattaataagcgcgcatgcgccctgcccggcgtgctgggtagaggtggccagccccggccgctgctgccagacgggctctccgggtccttctccgagagccgggcgggcacgcgtcattgtgttacctgcggccggcccgcgagctaggctggtttttttttttctcccctccctcccccctttttccatgcagctgatctaaaagggaataaaaggctgcgcataatcataataataaaagaaggggagcgcgagagaaggaaagaaagccgggaggtggaagaggagggggagcgtctcaaagaagcgatcagaataataaaaggaggccgggctctttgccttctggaacgggccgctcttgaaagggcttttgaaaagtggtgttgttttccagtcgtgcatgctccaatcggcggagtatattagagccgggacgcggcggccgcaggggcagcggcgacggcagcaccggcggcagcaccagcgcgaacagcagcggcggcgtcccgagtgcccgcggcgcgcggcgcagcgatgcgttccccacggacgcgcggccggtccgggcgccccctaagcctcctgctcgccctgctctgtgccctgcgagccaaggtgtgtggggcctcgggtcagttcgagttggagatcctgtccatgcagaacgtgaacggggagctgcagaacgggaactgctgcggcggcgcccggaacccgggagaccgcaagtgcacccgcgacgagtgtgacacatacttcaaagtgtgcctcaaggagtatcagtcccgcgtcacggccggggggccctgcagcttcggctcagggtccacgcctgtcatcgggggcaacaccttcaacctcaaggccagccgcggcaacgaccgcaaccgcatcgtgctgcctttcagtttcgcctggccgaggtcctatacgttgcttgtggaggcgtgggattccagtaatgacaccgttcaacctgacagtattattgaaaaggcttctcactcgggcatgatcaaccccagccggcagtggcagacgctgaagcagaacacgggcgttgcccactttgagtatcagatccgcgtgacctgtgatgactactactatggctttggctgcaataagttctgccgccccagagatgacttctttggacactatgcctgtgaccagaatggcaacaaaacttgcatggaaggctggatgggccccgaatgtaacagagctatttgccgacaaggctgcagtcctaagcatgggtcttgcaaactcccaggtgactgcaggtgccagtacggctggcaaggcctgtactgtgataagtgcatcccacacccgggatgcgtccacggcatctgtaatgagccctggcagtgcctctgtgagaccaactggggcggccagctctgtgacaaagatctcaattactgtgggactcatcagccgtgtctcaacgggggaacttgtagcaacacaggccctgacaaatatcagtgttcctgccctgaggggtattcaggacccaactgtgaaattgctgagcacgcctgcctctctgatccctgtcacaacagaggcagctgtaaggagacctccctgggctttgagtgtgagtgttccccaggctggaccggccccacatgctctacaaacattgatgactgttctcctaataactgttcccacgggggcacctgccaggacctggttaacggatttaagtgtgtgtgccccccacagtggactgggaaaacgtgccagttagatgcaaatgaatgtgaggccaaaccttgtgtaaacgccaaatcctgtaagaatctcattgccagctactactgcgactgtcttcccggctggatgggtcagaattgtgacataaatattaatgactgccttggccagtgtcagaatgacgcctcctgtcgggatttggttaatggttatcgctgtatctgtccacctggctatgcaggcgatcactgtgagagagacatcgatgaatgtgccagcaacccctgtttgaatgggggtcactgtcagaatgaaatcaacagattccagtgtctgtgtcccactggtttctctggaaacctctgtcagctggacatcgattattgtgagcctaatccctgccagaacggtgcccagtgctacaaccgtgccagtgactatttctgcaagtgccccgaggactatgagggcaagaactgctcacacctgaaagaccactgccgcacgaccccctgtgaagtgattgacagctgcacagtggccatggcttccaacgacacacctgaaggggtgcggtatatttcctccaacgtctgtggtcctcacgggaagtgcaagagtcagtcgggaggcaaattcacctgtgactgtaacaaaggcttcacgggaacatactgccatgaaaatattaatgactgtgagagcaacccttgtagaaacggtggcacttgcatcgatggtgtcaactcctacaagtgcatctgtagtgacggctgggagggggcctactgtgaaaccaatattaatgactgcagccagaacccctgccacaatgggggcacgtgtcgcgacctggtcaatgacttctactgtgactgtaaaaatgggtggaaaggaaagacctgccactcacgtgacagtcagtgtgatgaggccacgtgcaacaacggtggcacctgctatgatgagggggatgcttttaagtgcatgtgtcctggcggctgggaaggaacaacctgtaacatagcccgaaacagtagctgcctgcccaacccctgccataatgggggcacatgtgtggtcaacggcgagtcctttacgtgcgtctgcaaggaaggctgggaggggcccatctgtgctcagaataccaatgactgcagccctcatccctgttacaacagcggcacctgtgtggatggagacaactggtaccggtgcgaatgtgccccgggttttgctgggcccgactgcagaataaacatcaatgaatgccagtcttcaccttgtgcctttggagcgacctgtgtggatgagatcaatggctaccggtgtgtctgccctccagggcacagtggtgccaagtgccaggaagtttcagggagaccttgcatcaccatggggagtgtgataccagatggggccaaatgggatgatgactgtaatacctgccagtgcctgaatggacggatcgcctgctcaaaggtctggtgtggccctcgaccttgcctgctccacaaagggcacagcgagtgccccagcgggcagagctgcatccccatcctggacgaccagtgcttcgtccacccctgcactggtgtgggcgagtgtcggtcttccagtctccagccggtgaagacaaagtgcacctctgactcctattaccaggataactgtgcgaacatcacatttacctttaacaaggagatgatgtcaccaggtcttactacggagcacatttgcagtgaattgaggaatttgaatattttgaagaatgtttccgctgaatattcaatctacatcgcttgcgagccttccccttcagcgaacaatgaaatacatgtggccatttctgctgaagatatacgggatgatgggaacccgatcaaggaaatcactgacaaaataatcgatcttgttagtaaacgtgatggaaacagctcgctgattgctgccgttgcagaagtaagagttcagaggcggcctctgaagaacagaacagatttccttgttcccttgctgagctctgtcttaactgtggcttggatctgttgcttggtgacggccttctactggtgcctgcggaagcggcggaagccgggcagccacacacactcagcctctgaggacaacaccaccaacaacgtgcgggagcagctgaaccagatcaaaaaccccattgagaaacatggggccaacacggtccccatcaaggattatgagaacaagaactccaaaatgtctaaaataaggacacacaattctgaagtagaagaggacgacatggacaaacaccagcagaaagcccggtttgccaagcagccggcgtacacgctggtagacagagaagagaagccccccaacggcacgccgacaaaacacccaaactggacaaacaaacaggacaacagagacttggaaagtgcccagagcttaaaccgaatggagtacatcgtatagcagaccgcgggcactgccgccgctaggtagagtctgagggcttgtagttctttaaactgtcgtgtcatactcgagtctgaggccgttgctgacttagaatccctgtgttaatttaagttttgacaagctggcttacactggcaatggtagtttctgtggttggctgggaaatcgagtgccgcatctcacagctatgcaaaaagctagtcaacagtaccctggttgtgtgtccccttgcagccgacacggtctcggatcaggctcccaggagcctgcccagccccctggtctttgagctcccacttctgccagatgtcctaatggtgatgcagtcttagatcatagttttatttatatttattgactcttgagttgtttttgtatattggttttatgatgacgtacaagtagttctgtatttgaaagtgcctttgcagctcagaaccacagcaacgatcacaaatgactttattatttattttttttaattgtatttttgttgttgggggaggggagactttgatgtcagcagttgctggtaaaatgaagaatttaaagaaaaaaatgtcaaaagtagaactttgtatagttatgtaaataattcttttttattaatcactgtgtatatttgatttattaacttaataatcaagagccttaaaacatcattcctttttatttatatgtatgtgtttagaattgaaggtttttgatagcattgtaagcgtatggctttatttttttgaactcttctcattacttgttgcctataagccaaaattaaggtgtttgaaaatagtttattttaaaacaataggatgggcttctgtgcccagaatactgatggaatttttttgtacgacgtcagatgtttaaaacaccttctatagcatcacttaaaacacgttttaaggactgactgaggcagtttgaggattagtttagaacaggtttttttgtttgtttgttttttgtttttctgctttagacttgaaaagagacaggcaggtgatctgctgcagagcagtaagggaacaagttgagctatgacttaacatagccaaaatgtgagtggttgaatatgattaaaaatatcaaattaattgtgtgaacttggaagcacaccaatcttactttgtaaattctgatttcttttcaccattcgtacataatactgaaccacttgtagatttgatttttttttttaatctactgcatttagggagtattctaataagctagttgaatacttgaaccataaaatgtccagtaagatcactgtttagatttgccatagagtacactgcctgccttaagtgaggaaatcaaagtgctattacgaagttcaagatcaaaaaggcttataaaacagagtaatcttgttggttcaccattgagaccgtgaagatactttgtattgtcctattagtgttatatgaacatacaaatgcatctttgatgtgttgttcttggcaataaattttgaaaagtaatatttattaaatttttttgtatgaaaacatggaacagtgtggcctcttctgagcttacgtagttctaccggctttgccatgtgcttctgccaccctgctgagtctgttctggtaatcggggtataataggctctgcctgacagagggatggaggaagaactgaaaggcttttcaaccacaaaactcatctggagttctcaaagacctggggctgctgtgaagctggaactgcgggagccccatctaggggagccttgattcccttgttattcaacagcaagtgtgaatactgcttgaataaacaccactggattaatggcc

SEQ ID NO: 144720 - DNA, 597 bp, Homo sapiens
  Payload ID: 8592
  Gene Symbol: JAG1
  Gene Name: jagged 1
  ENST ID: ENST00000613518
  CDS Start-End: 1-518
gccccgaggactatgagggcaagaactgctcacacctgaaagaccactgccgcacgaccccctgtgaagtgattgacagctgcacagtggccatggcttccaacgacacacctgaaggggtgcggtatatttcctccaacgtctgtggtcctcacgggaagtgcaagagtcagtcgggaggcaaattcacctgtgactgtaacaaaggcttcacgggaacatactgccatgaaaatattaatgactgtgagagcaacccttgtagaaacggtggcacttgcatcgatggtgtcaactcctacaagtgcatctgtagtgacggctgggagggggcctactgtgaaaccagtgagtctgccactctttggggagctctgggatgtatgggtcatgttggagggatcccacttcaacgtgggaaaactttctttgtactggaaatctctggaagcaagaccgcagtgatttctgcactgggacagtatcacttgtgtctcatttgcatttatgagtcctgatgatagcttatggggaggagcttctgctgaggacctatagaattagactgtgtaataaatattcctgcttgcaaggaaa

SEQ ID NO: 144721 - DNA, 507 bp, Homo sapiens
  Payload ID: 8592
  Gene Symbol: JAG1
  Gene Name: jagged 1
  ENST ID: ENST00000622545
  CDS Start-End: 1-223
gtgccagttagatgcaaatgaatgtgaggccaaaccttgtgtaaacgccaaatcctgtaagaatctcattgccagctactactgcgactgtcttcccggctggatgggtcagaattgtgacataaatattaatgactgccttggccagtgtcagaatgacgcctcctgtcgggcgatcactgtgagagagacatcgatgaatgtgccagcaacccctgtttgaatgggggtcactgtcagaatgaaatcaacagattccagtgtctgtgtcccactggtttctctggaaacctctgtcagctggacatcgattattgtgagcctaatccctgccagaacggtgcccagtgctacaaccgtgccagtgactatttctgcaagtgccccgaggactatgagggcaagaactgctcacacctgaaagaccactgccgcacgaccccctgtgaagtgattgacagctgcacagtggccatggcttccaacgacacacctgaaggggtgcgg

SEQ ID NO: 144722 - DNA, 5835 bp, Homo sapiens
  Payload ID: 8593
  Gene Symbol: JAG2
  Gene Name: jagged 2
  Uniprot ID: Q9Y219
  ENST ID: ENST00000331782
  CDS Start-End: 405-4121
ctcatgcatatgcaggtgcgcgggtgacgaatgggcgagcgagctgtcagtctcgttccgaacttgttggctgcggtgccgggagcgcgggcgcgcagagccgaggccgggacccgctgccttcaccgccgccgccgtcgccgccgggtgggagccgggccgggcagccggagcgcggccgccagcgagccggagctgccgccgcccctgcacgcccgccgcccaggcccgcgcgccgcggcgctgcgctcgaccccgcccgcgccgccgccgccgccgcctctgccgctgccgctgcctctgcgggcgctcggagggcgggcgggcgctgggaggccggcgcggcggctgggagccgggcgcgggcggcggcggcggggccgggcgggcgggtcgcgggggcaatgcgggcgcagggccgggggcgccttccccggcggctgctgctgctgctggcgctctgggtgcaggcggcgcggcccatgggctatttcgagctgcagctgagcgcgctgcggaacgtgaacggggagctgctgagcggcgcctgctgtgacggcgacggccggacaacgcgcgcggggggctgcggccacgacgagtgcgacacgtacgtgcgcgtgtgccttaaggagtaccaggccaaggtgacgcccacggggccctgcagctacggccacggcgccacgcccgtgctgggcggcaactccttctacctgccgccggcgggcgctgcgggggaccgagcgcgggcgcgggcccgggccggcggcgaccaggacccgggcctcgtcgtcatccccttccagttcgcctggccgcgctcctttaccctcatcgtggaggcctgggactgggacaacgataccaccccgaatgaggagctgctgatcgagcgagtgtcgcatgccggcatgatcaacccggaggaccgctggaagagcctgcacttcagcggccacgtggcgcacctggagctgcagatccgcgtgcgctgcgacgagaactactacagcgccacttgcaacaagttctgccggccccgcaacgactttttcggccactacacctgcgaccagtacggcaacaaggcctgcatggacggctggatgggcaaggagtgcaaggaagctgtgtgtaaacaagggtgtaatttgctccacgggggatgcaccgtgcctggggagtgcaggtgcagctacggctggcaagggaggttctgcgatgagtgtgtcccctaccccggctgcgtgcatggcagttgtgtggagccctggcagtgcaactgtgagaccaactggggcggcctgctctgtgacaaagacctgaactactgtggcagccaccacccctgcaccaacggaggcacgtgcatcaacgccgagcctgaccagtaccgctgcacctgccctgacggctactcgggcaggaactgtgagaaggctgagcacgcctgcacctccaacccgtgtgccaacgggggctcttgccatgaggtgccgtccggcttcgaatgccactgcccatcgggctggagcgggcccacctgtgcccttgacatcgatgagtgtgcttcgaacccgtgtgcggccggtggcacctgtgtggaccaggtggacggctttgagtgcatctgccccgagcagtgggtgggggccacctgccagctggacgccaatgagtgtgaagggaagccatgccttaacgctttttcttgcaaaaacctgattggcggctattactgtgattgcatcccgggctggaagggcatcaactgccatatcaacgtcaacgactgtcgcgggcagtgtcagcatgggggcacctgcaaggacctggtgaacgggtaccagtgtgtgtgcccacggggcttcggaggccggcattgcgagctggaacgagacgagtgtgccagcagcccctgccacagcggcggcctctgcgaggacctggccgacggcttccactgccactgcccccagggcttctccgggcctctctgtgaggtggatgtcgacctttgtgagccaagcccctgccggaacggcgctcgctgctataacctggagggtgactattactgcgcctgccctgatgactttggtggcaagaactgctccgtgccccgcgagccgtgccctggcggggcctgcagagtgatcgatggctgcgggtcagacgcggggcctgggatgcctggcacagcagcctccggcgtgtgtggcccccatggacgctgcgtcagccagccagggggcaacttttcctgcatctgtgacagtggctttactggcacctactgccatgagaacattgacgactgcctgggccagccctgccgcaatgggggcacatgcatcgatgaggtggacgccttccgctgcttctgccccagcggctgggagggcgagctctgcgacaccaatcccaacgactgccttcccgatccctgccacagccgcggccgctgctacgacctggtcaatgacttctactgtgcgtgcgacgacggctggaagggcaagacctgccactcacgcgagttccagtgcgatgcctacacctgcagcaacggtggcacctgctacgacagcggcgacaccttccgctgcgcctgcccccccggctggaagggcagcacctgcgccgtcgccaagaacagcagctgcctgcccaacccctgtgtgaatggtggcacctgcgtgggcagcggggcctccttctcctgcatctgccgggacggctgggagggtcgtacttgcactcacaataccaacgactgcaaccctctgccttgctacaatggtggcatctgtgttgacggcgtcaactggttccgctgcgagtgtgcacctggcttcgcggggcctgactgccgcatcaacatcgacgagtgccagtcctcgccctgtgcctacggggccacgtgtgtggatgagatcaacgggtatcgctgtagctgcccacccggccgagccggcccccggtgccaggaagtgatcgggttcgggagatcctgctggtcccggggcactccgttcccacacggaagctcctgggtggaagactgcaacagctgccgctgcctggatggccgccgtgactgcagcaaggtgtggtgcggatggaagccttgtctgctggccggccagcccgaggccctgagcgcccagtgcccactggggcaaaggtgcctggagaaggccccaggccagtgtctgcgaccaccctgtgaggcctggggggagtgcggcgcagaagagccaccgagcaccccctgcctgccacgctccggccacctggacaataactgtgcccgcctcaccttgcatttcaaccgtgaccacgtgccccagggcaccacggtgggcgccatttgctccgggatccgctccctgccagccacaagggctgtggcacgggaccgcctgctggtgttgctttgcgaccgggcgtcctcgggggccagtgctgtggaggtggccgtgtccttcagccctgccagggacctgcctgacagcagcctgatccagggcgcggcccacgccatcgtggccgccatcacccagcgggggaacagctcactgctcctggctgtcaccgaggtcaaggtggagacggttgttacgggcggctcttccacaggtctgctggtgcctgtgctgtgtggtgccttcagcgtgctgtggctggcgtgcgtggtcctgtgcgtgtggtggacacgcaagcgcaggaaagagcgggagaggagccggctgccgcgggaggagagcgccaacaaccagtgggccccgctcaaccccatccgcaaccccattgagcggccggggggccacaaggacgtgctctaccagtgcaagaacttcacgccgccgccgcgcagggcggacgaggcgctgcccgggccggccggccacgcggccgtcagggaggatgaggaggacgaggatctgggccgcggtgaggaggactccctggaggcggagaagttcctctcacacaaattcaccaaagatcctggccgctcgccggggaggccggcccactgggcctcaggccccaaagtggacaaccgcgcggtcaggagcatcaatgaggcccgctacgccggcaaggagtaggggcggctgccagctgggccgggacccagggccctcggtgggagccatgccgtctgccggacccggaggccgaggccatgtgcatagtttctttattttgtgtaaaaaaaccaccaaaaacaaaaaccaaatgtttattttctacgtttctttaaccttgtataaattattcagtaactgtcaggctgaaaacaatggagtattctcggatagttgctatttttgtaaagtttccgtgcgtggcactcgctgtatgaaaggagagagcaaagggtgtctgcgtcgtcaccaaatcgtagcgtttgttaccagaggttgtgcactgtttacagaatcttccttttattcctcactcgggtttctctgtggctccaggccaaagtgccggtgagacccatggctgtgttggtgtggcccatggctgttggtgggacccgtggctgatggtgtggcctgtggctgtcggtgggactcgtggctgtcaatgggacctgtggctgtcggtgggacctacggtggtcggtgggaccctggttattgatgtggccctggctgccggcacggcccgtggctgttgacgcacctgtggttgttagtggggcctgaggtcatcggcgtggcccaaggctggcaggtcaacctcgcgcttgctggccagtccaccctgcctgccgtctgtgcttcctcctgcccagaacgcccgctccagcgatctctccactgtgctttcagaagtgcccttcctgctgcgcagttctcccatcctgggacggcggcagtattgaagctcgtgacaagtgccttcacacagacccctcgcaactgtccacgcgtgccgtggcaccaggcgctgcccacctgccggccccggccgcccctcctcgtgaaagtgcatttttgtaaatgtgtacatattaaaggaagcactctgtatatttgattgaataatgccaccattccggcctcccttgttctttcggtgctgtcccttttgtattgagagtgaggttgggggagagccacgccggcagagaggcttggggcagtggggcgcgtgctgggtattggcccacgtggctgtggtggctgtagagggcgagacggttctgttgagtcggggcctgccagggcctcgaatgcgttggcatgccaaggtggtggatgcaggtttggccaaaaccttcctgggaatggggaggggggtgtctaggtgcctggcacccgaccctgactaaaacagctgaaaacagttttataaaatagtataaaattgcttacccacgaatacgtatcaaggtcttaaggaattaacaggtcaaaatttttattcattcatttattcctttgttttgcttggtcattcagaggcaaggtcagcatttgatggaggcaggagagaagcagcccttccacctggccctggagctggttttgcccctcactgcttgagccaactggaacgtggcatggtggcctcagggctgggcatggaaggccgactccaaggctgactccgagccgcctgtcagtgatgtgcaagtctttaccctgctgtgaggggtaggaggtcaactgagtcaaggagcaaagccaagaaccagatctgtacaaaagagaaaaaaaaagtcctgctgacagcctgggagtgaggctgccttgcacaggcagaacaaatgaataaatgaatgaacgaataaaaattttgacctggtaa

SEQ ID NO: 144723 - DNA, 5720 bp, Homo sapiens
  Payload ID: 8593
  Gene Symbol: JAG2
  Gene Name: jagged 2
  Uniprot ID: Q9Y219
  ENST ID: ENST00000347004
  CDS Start-End: 405-4007
ctcatgcatatgcaggtgcgcgggtgacgaatgggcgagcgagctgtcagtctcgttccgaacttgttggctgcggtgccgggagcgcgggcgcgcagagccgaggccgggacccgctgccttcaccgccgccgccgtcgccgccgggtgggagccgggccgggcagccggagcgcggccgccagcgagccggagctgccgccgcccctgcacgcccgccgcccaggcccgcgcgccgcggcgctgcgctcgaccccgcccgcgccgccgccgccgccgcctctgccgctgccgctgcctctgcgggcgctcggagggcgggcgggcgctgggaggccggcgcggcggctgggagccgggcgcgggcggcggcggcggggccgggcgggcgggtcgcgggggcaatgcgggcgcagggccgggggcgccttccccggcggctgctgctgctgctggcgctctgggtgcaggcggcgcggcccatgggctatttcgagctgcagctgagcgcgctgcggaacgtgaacggggagctgctgagcggcgcctgctgtgacggcgacggccggacaacgcgcgcggggggctgcggccacgacgagtgcgacacgtacgtgcgcgtgtgccttaaggagtaccaggccaaggtgacgcccacggggccctgcagctacggccacggcgccacgcccgtgctgggcggcaactccttctacctgccgccggcgggcgctgcgggggaccgagcgcgggcgcgggcccgggccggcggcgaccaggacccgggcctcgtcgtcatccccttccagttcgcctggccgcgctcctttaccctcatcgtggaggcctgggactgggacaacgataccaccccgaatgaggagctgctgatcgagcgagtgtcgcatgccggcatgatcaacccggaggaccgctggaagagcctgcacttcagcggccacgtggcgcacctggagctgcagatccgcgtgcgctgcgacgagaactactacagcgccacttgcaacaagttctgccggccccgcaacgactttttcggccactacacctgcgaccagtacggcaacaaggcctgcatggacggctggatgggcaaggagtgcaaggaagctgtgtgtaaacaagggtgtaatttgctccacgggggatgcaccgtgcctggggagtgcaggtgcagctacggctggcaagggaggttctgcgatgagtgtgtcccctaccccggctgcgtgcatggcagttgtgtggagccctggcagtgcaactgtgagaccaactggggcggcctgctctgtgacaaagacctgaactactgtggcagccaccacccctgcaccaacggaggcacgtgcatcaacgccgagcctgaccagtaccgctgcacctgccctgacggctactcgggcaggaactgtgagaaggctgagcacgcctgcacctccaacccgtgtgccaacgggggctcttgccatgaggtgccgtccggcttcgaatgccactgcccatcgggctggagcgggcccacctgtgcccttgacatcgatgagtgtgcttcgaacccgtgtgcggccggtggcacctgtgtggaccaggtggacggctttgagtgcatctgccccgagcagtgggtgggggccacctgccagctggacgtcaacgactgtcgcgggcagtgtcagcatgggggcacctgcaaggacctggtgaacgggtaccagtgtgtgtgcccacggggcttcggaggccggcattgcgagctggaacgagacgagtgtgccagcagcccctgccacagcggcggcctctgcgaggacctggccgacggcttccactgccactgcccccagggcttctccgggcctctctgtgaggtggatgtcgacctttgtgagccaagcccctgccggaacggcgctcgctgctataacctggagggtgactattactgcgcctgccctgatgactttggtggcaagaactgctccgtgccccgcgagccgtgccctggcggggcctgcagagtgatcgatggctgcgggtcagacgcggggcctgggatgcctggcacagcagcctccggcgtgtgtggcccccatggacgctgcgtcagccagccagggggcaacttttcctgcatctgtgacagtggctttactggcacctactgccatgagaacattgacgactgcctgggccagccctgccgcaatgggggcacatgcatcgatgaggtggacgccttccgctgcttctgccccagcggctgggagggcgagctctgcgacaccaatcccaacgactgccttcccgatccctgccacagccgcggccgctgctacgacctggtcaatgacttctactgtgcgtgcgacgacggctggaagggcaagacctgccactcacgcgagttccagtgcgatgcctacacctgcagcaacggtggcacctgctacgacagcggcgacaccttccgctgcgcctgcccccccggctggaagggcagcacctgcgccgtcgccaagaacagcagctgcctgcccaacccctgtgtgaatggtggcacctgcgtgggcagcggggcctccttctcctgcatctgccgggacggctgggagggtcgtacttgcactcacaataccaacgactgcaaccctctgccttgctacaatggtggcatctgtgttgacggcgtcaactggttccgctgcgagtgtgcacctggcttcgcggggcctgactgccgcatcaacatcgacgagtgccagtcctcgccctgtgcctacggggccacgtgtgtggatgagatcaacgggtatcgctgtagctgcccacccggccgagccggcccccggtgccaggaagtgatcgggttcgggagatcctgctggtcccggggcactccgttcccacacggaagctcctgggtggaagactgcaacagctgccgctgcctggatggccgccgtgactgcagcaaggtgtggtgcggatggaagccttgtctgctggccggccagcccgaggccctgagcgcccagtgcccactggggcaaaggtgcctggagaaggccccaggccagtgtctgcgaccaccctgtgaggcctggggggagtgcggcgcagaagagccaccgagcaccccctgcctgccacgctccggccacctggacaataactgtgcccgcctcaccttgcatttcaaccgtgaccacgtgccccagggcaccacggtgggcgccatttgctccgggatccgctccctgccagccacaagggctgtggcacgggaccgcctgctggtgttgctttgcgaccgggcgtcctcgggggccagtgctgtggaggtggccgtgtccttcagccctgccagggacctgcctgacagcagcctgatccagggcgcggcccacgccatcgtggccgccatcacccagcgggggaacagctcactgctcctggctgtcaccgaggtcaaggtggagacggttgttacgggcggctcttccacaggtctgctggtgcctgtgctgtgtggtgccttcagcgtgctgtggctggcgtgcgtggtcctgtgcgtgtggtggacacgcaagcgcaggaaagagcgggagaggagccggctgccgcgggaggagagcgccaacaaccagtgggccccgctcaaccccatccgcaaccccattgagcggccggggggccacaaggacgtgctctaccagtgcaagaacttcacgccgccgccgcgcagggcggacgaggcgctgcccgggccggccggccacgcggccgtcagggaggatgaggaggacgaggatctgggccgcggtgaggaggactccctggaggcggagaagttcctctcacacaaattcaccaaagatcctggccgctcgccggggaggccggcccactgggcctcaggccccaaagtggacaaccgcgcggtcaggagcatcaatgaggcccgctacgccggcaaggagtaggggcggctgccagctgggccgggacccagggccctcggtgggagccatgccgtctgccggacccggaggccgaggccatgtgcatagtttctttattttgtgtaaaaaaaccaccaaaaacaaaaaccaaatgtttattttctacgtttctttaaccttgtataaattattcagtaactgtcaggctgaaaacaatggagtattctcggatagttgctatttttgtaaagtttccgtgcgtggcactcgctgtatgaaaggagagagcaaagggtgtctgcgtcgtcaccaaatcgtagcgtttgttaccagaggttgtgcactgtttacagaatcttccttttattcctcactcgggtttctctgtggctccaggccaaagtgccggtgagacccatggctgtgttggtgtggcccatggctgttggtgggacccgtggctgatggtgtggcctgtggctgtcggtgggactcgtggctgtcaatgggacctgtggctgtcggtgggacctacggtggtcggtgggaccctggttattgatgtggccctggctgccggcacggcccgtggctgttgacgcacctgtggttgttagtggggcctgaggtcatcggcgtggcccaaggctggcaggtcaacctcgcgcttgctggccagtccaccctgcctgccgtctgtgcttcctcctgcccagaacgcccgctccagcgatctctccactgtgctttcagaagtgcccttcctgctgcgcagttctcccatcctgggacggcggcagtattgaagctcgtgacaagtgccttcacacagacccctcgcaactgtccacgcgtgccgtggcaccaggcgctgcccacctgccggccccggccgcccctcctcgtgaaagtgcatttttgtaaatgtgtacatattaaaggaagcactctgtatatttgattgaataatgccaccattccggcctcccttgttctttcggtgctgtcccttttgtattgagagtgaggttgggggagagccacgccggcagagaggcttggggcagtggggcgcgtgctgggtattggcccacgtggctgtggtggctgtagagggcgagacggttctgttgagtcggggcctgccagggcctcgaatgcgttggcatgccaaggtggtggatgcaggtttggccaaaaccttcctgggaatggggaggggggtgtctaggtgcctggcacccgaccctgactaaaacagctgaaaacagttttataaaatagtataaaattgcttacccacgaatacgtatcaaggtcttaaggaattaacaggtcaaaatttttattcattcatttattcctttgttttgcttggtcattcagaggcaaggtcagcatttgatggaggcaggagagaagcagcccttccacctggccctggagctggttttgcccctcactgcttgagccaactggaacgtggcatggtggcctcagggctgggcatggaaggccgactccaaggctgactccgagccgcctgtcagtgatgtgcaagtctttaccctgctgtgaggggtaggaggtcaactgagtcaaggagcaaagccaagaaccagatctgtacaaaagagaaaaaaaaagtcctgctgacagcctgggagtgaggctgccttgcacaggcagaacaaatgaataaatgaatgaacgaataaaaattttgacctggta

SEQ ID NO: 144724 - DNA, 1693 bp, Homo sapiens
  Payload ID: 8594
  Gene Symbol: JAGN1
  Gene Name: jagunal homolog 1
  Uniprot ID: Q8N5M9
  ENST ID: ENST00000307768
  CDS Start-End: 170-721
gcgcggagaggagtgaccatagagtcggtcctccagagacagaggggccggaagttctcttcacggagccgcgcggctgcgggggcgcaaatagggtcagtgggccgcttggcggtgtcgttgcggtaccaggtccgcgtgaggggttcgggggttctgggcaggcacaatggcgtctcgagcaggcccgcgagcggccggcaccgacggcagcgactttcagcaccgggagcgcgtcgccatgcactaccagatgagtgtgactctcaagtatgaaatcaagaagctgatctacgtacatctggtcatatggctgctgctggttgctaagatgagcgtgggacacctgaggctcttgtcacatgatcaggtggccatgccctatcagtgggaatacccgtatttgctgagcattttgccctctctcttgggccttctctcctttccccgcaacaacattagctacctggtgctctccatgatcagcatgggactcttttccatcgctccactcatttatggcagcatggagatgttccctgctgcacagcagctctaccgccatggcaaggcctaccgtttcctctttggtttttctgccgtttccatcatgtacctggtgttggtgttggcagtgcaagtgcatgcctggcagttgtactacagcaagaagctcctagactcttggttcaccagcacacaggagaagaagcataaatgaagcctctttggggtgaagcctggacatcccatcgaatgaaaggacactagtacagcggttccaaaatcccttctggtgattttagcagctgtgatgttggtacctggtgcagaccaggccaaagttctggaaagctccttttgccatctgctgaggtggcaaaactataatttattcctggttggctagaactgggtgaccaacagctatgaaacaaatttcagctgtttgaagttgaactttgaggtttttctttaagaatgagcttcgtccttgcctctactcggtcattctccccatttccatccattaccccttagccattgagactaaaggaaatagggaataaatcaaattacttcatctctaggtcacgggtcaggaaacatttgggcagctgctcccttggcaggctgtggtctcctctgcaaagcattttaattaaaaacctcaataaagatggccctgcccacactgtgccttgtgtttggggcttgatagagtgtgaaaggtgtgttgcttgaaaggtgtggccttagacactaggagatgatgggtagaagctccttgagaaacctagcagtggccatagagaagtagactgggtatggggaacctaagtcatagttgtaacctacagctgattggtaagaactatgggccagacatttaatctctccatctatgaaatagtccattctcatttatctaccttaggttatgggctcttcttttagttggatattcacatttatctttcagtgttaactgggtatcagttatgagtctactactgtataatggcatccaaaagaattttaaagtacctcggtttatagggatttacaattcagtagaaacttgttattcatgtgaaacagtgaacataatatctaatgatgtggagcaagtacattaaaaacaggaaggaagagatctgtgattaaactaaaggccctttcacacctaaaa

SEQ ID NO: 144725 - DNA, 682 bp, Homo sapiens
  Payload ID: 8594
  Gene Symbol: JAGN1
  Gene Name: jagunal homolog 1
  ENST ID: ENST00000616966
  CDS Start-End: 137-682
cagagacagaggggccggaagttctcttcacggagccgcgcggctgcgggggcgcaaatagggtcagtgggccgcttggcggtgtcgttgcggtaccaggtccgcgtgaggggttcgggggttctgggcaggcacaatggcgtctcgagcaggcccgcgagcggccggcaccgacggcagcgactttcagcaccgggagcgcgtcgccatgcactaccagatgagtgtgactctcaagtatgaaatcaagaagctgatctacgtacatctggtcatatggctgctgctggttgctaagatgagcgtgggacacctgaggctcttgtcacatgatcaggtggccatgccctatcagtgggaatacccgtatttgctgagcattttgccctctctcttgggccttctctcctttccccgcaacaacattagctacctggtgctctccatgatcagcatgggactctttcatcgctccactcatttatggcagcatggagatgttccctgctgcacagcagctaccgccatggcaaggcctaccgtttcctctttggtttttctgccgtttccaatgtacctggtgttggtgttggcagtgcaagtgcatgcctggcagttgtactacagcaagaagctcctagactcttggttcaccagcacacaggagaagaagcataaatga

SEQ ID NO: 144726 - DNA, 5047 bp, Homo sapiens
  Payload ID: 8595
  Gene Symbol: JAK1
  Gene Name: Janus kinase 1
  Uniprot ID: P23458
  ENST ID: ENST00000342505
  CDS Start-End: 250-3714
tgcagacagtgcgggcctgcgcccagtcccggctgtcctcgccgcgacccctcctcagccctgggcgcgcgcacgctggggccccgcggggctggccgcctagcgagcctgccggtcgaccccagccagcgcagcgacggggcgctgcctggcccaggcgcacacggaagtgcgcttctctgaagtagctttggaaagtagagaagaaaatccagtttgcttcttggagaacactggacagctgaataaatgcagtatctaaatataaaagaggactgcaatgccatggctttctgtgctaaaatgaggagctccaagaagactgaggtgaacctggaggcccctgagccaggggtggaagtgatcttctatctgtcggacagggagcccctccggctgggcagtggagagtacacagcagaggaactgtgcatcagggctgcacaggcatgccgtatctctcctctttgtcacaacctctttgccctgtatgacgagaacaccaagctctggtatgctccaaatcgcaccatcaccgttgatgacaagatgtccctccggctccactaccggatgaggttctatttcaccaattggcatggaaccaacgacaatgagcagtcagtgtggcgtcattctccaaagaagcagaaaaatggctacgagaaaaaaaagattccagatgcaacccctctccttgatgccagctcactggagtatctgtttgctcagggacagtatgatttggtgaaatgcctggctcctattcgagaccccaagaccgagcaggatggacatgatattgagaacgagtgtctagggatggctgtcctggccatctcacactatgccatgatgaagaagatgcagttgccagaactgcccaaggacatcagctacaagcgatatattccagaaacattgaataagtccatcagacagaggaaccttctcaccaggatgcggataaataatgttttcaaggatttcctaaaggaatttaacaacaagaccatttgtgacagcagcgtgtccacgcatgacctgaaggtgaaatacttggctaccttggaaactttgacaaaacattacggtgctgaaatatttgagacttccatgttactgatttcatcagaaaatgagatgaattggtttcattcgaatgacggtggaaacgttctctactacgaagtgatggtgactgggaatcttggaatccagtggaggcataaaccaaatgttgtttctgttgaaaaggaaaaaaataaactgaagcggaaaaaactggaaaataaacacaagaaggatgaggagaaaaacaagatccgggaagagtggaacaatttttcttacttccctgaaatcactcacattgtaataaaggagtctgtggtcagcattaacaagcaggacaacaagaaaatggaactgaagctctcttcccacgaggaggccttgtcctttgtgtccctggtagatggctacttccggctcacagcagatgcccatcattacctctgcaccgacgtggcccccccgttgatcgtccacaacatacagaatggctgtcatggtccaatctgtacagaatacgccatcaataaattgcggcaagaaggaagcgaggaggggatgtacgtgctgaggtggagctgcaccgactttgacaacatcctcatgaccgtcacctgctttgagaagtctgagcaggtgcagggtgcccagaagcagttcaagaactttcagatcgaggtgcagaagggccgctacagtctgcacggttcggaccgcagcttccccagcttgggagacctcatgagccacctcaagaagcagatcctgcgcacggataacatcagcttcatgctaaaacgctgctgccagcccaagccccgagaaatctccaacctgctggtggctactaagaaagcccaggagtggcagcccgtctaccccatgagccagctgagtttcgatcggatcctcaagaaggatctggtgcagggcgagcaccttgggagaggcacgagaacacacatctattctgggaccctgatggattacaaggatgacgaaggaacttctgaagagaagaagataaaagtgatcctcaaagtcttagaccccagccacagggatatttccctggccttcttcgaggcagccagcatgatgagacaggtctcccacaaacacatcgtgtacctctatggcgtctgtgtccgcgacgtggagaatatcatggtggaagagtttgtggaagggggtcctctggatctcttcatgcaccggaaaagcgatgtccttaccacaccatggaaattcaaagttgccaaacagctggccagtgccctgagctacttggaggataaagacctggtccatggaaatgtgtgtactaaaaacctcctcctggcccgtgagggcatcgacagtgagtgtggcccattcatcaagctcagtgaccccggcatccccattacggtgctgtctaggcaagaatgcattgaacgaatcccatggattgctcctgagtgtgttgaggactccaagaacctgagtgtggctgctgacaagtggagctttggaaccacgctctgggaaatctgctacaatggcgagatccccttgaaagacaagacgctgattgagaaagagagattctatgaaagccggtgcaggccagtgacaccatcatgtaaggagctggctgacctcatgacccgctgcatgaactatgaccccaatcagaggcctttcttccgagccatcatgagagacattaataagcttgaagagcagaatccagatattgtttcagaaaaaaaaccagcaactgaagtggaccccacacattttgaaaagcgcttcctaaagaggatccgtgacttgggagagggccactttgggaaggttgagctctgcaggtatgaccccgaaggggacaatacaggggagcaggtggctgttaaatctctgaagcctgagagtggaggtaaccacatagctgatctgaaaaaggaaatcgagatcttaaggaacctctatcatgagaacattgtgaagtacaaaggaatctgcacagaagacggaggaaatggtattaagctcatcatggaatttctgccttcgggaagccttaaggaatatcttccaaagaataagaacaaaataaacctcaaacagcagctaaaatatgccgttcagatttgtaaggggatggactatttgggttctcggcaatacgttcaccgggacttggcagcaagaaatgtccttgttgagagtgaacaccaagtgaaaattggagacttcggtttaaccaaagcaattgaaaccgataaggagtattacaccgtcaaggatgaccgggacagccctgtgttttggtatgctccagaatgtttaatgcaatctaaattttatattgcctctgacgtctggtcttttggagtcactctgcatgagctgctgacttactgtgattcagattctagtcccatggctttgttcctgaaaatgataggcccaacccatggccagatgacagtcacaagacttgtgaatacgttaaaagaaggaaaacgcctgccgtgcccacctaactgtccagatgaggtttatcaacttatgaggaaatgctgggaattccaaccatccaatcggacaagctttcagaaccttattgaaggatttgaagcacttttaaaataagaagcatgaataacatttaaattccacagattatcaagtccttctcctgcaacaaatgcccaagtcattttttaaaaatttctaatgaaagaagtttgtgttctgtccaaaaagtcactgaactcatacttcagtacatatacatgtataaggcacactgtagtgcttaatatgtgtaaggacttcctctttaaatttggtaccagtaacttagtgacacataatgacaaccaaaatatttgaaagcacttaagcactcctccttgtggaaagaatataccaccatttcatctggctagttcaccatcacaactgcattaccaaaaggggatttttgaaaacgaggagttgaccaaaataatatctgaagatgattgcttttccctgctgccagctgatctgaaatgttttgctggcacattaatcatagataaagaaagattgatggacttagccctcaaatttcagtatctatacagtactagaccatgcattcttaaaatattagataccaggtagtatatattgtttctgtacaaaaatgactgtattctctcaccagtaggacttaaactttgtttctccagtggcttagctcctgttcctttgggtgatcactagcacccatttttgagaaagctggttctacatggggggatagctgtggaatagataatttgctgcatgttaattctcaagaactaagcctgtgccagtgctttcctaagcagtatacctttaatcagaactcattcccagaacctggatgctattacacatgcttttaagaaacgtcaatgtatatccttttataactctaccactttggggcaagctattccagcactggttttgaatgctgtatgcaaccagtctgaataccacatacgctgcactgttcttagagggtttccatacttaccaccgatctacaagggttgatccctgtttttaccatcaatcatcaccctgtggtgcaacacttgaaagacccggctagaggcactatggacttcaggatccactagacagttttcagtttgcttggaggtagctgggtaatcaaaaatgtttagtcattgattcaatgtgaacgattacggtctttatgaccaagagtctgaaaatctttttgttatgctgtttagtattcgtttgatattgttacttttcacctgttgagcccaaattcaggattggttcagtggcagcaatgaagttgccatttaaatttgttcatagcctacatcaccaaggtctctgtgtcaaacctgtggccactctatatgcactttgtttactctttatacaaataaatatactaaagacttta

SEQ ID NO: 144727 - DNA, 5285 bp, Homo sapiens
  Payload ID: 8596
  Gene Symbol: JAK2
  Gene Name: Janus kinase 2
  Uniprot ID: O60674
  ENST ID: ENST00000381652
  CDS Start-End: 495-3893
ctgcaggaaggagagaggaagaggagcagaagggggcagcagcggacgccgctaacggcctccctcggcgctgacaggctgggccggcgcccggctcgcttgggtgttcgcgtcgccacttcggcttctcggccggtcgggcccctcggcccgggcttgcggcgcgcgtcggggctgagggctgctgcggcgcagggagaggcctggtcctcgctgccgagggatgtgagtgggagctgagcccacactggagggcccccgagggcccagcctggaggtcgttcagagccgtgcccgtcccggggcttcgcagaccttgacccgccgggtaggagccgcccctgcgggctcgagggcgcgctctggtcgcccgatctgtgtagccggtttcagaagcaggcaacaggaacaagatgtgaactgtttctcttctgcagaaaaagaggctcttcctcctcctcccgcgacggcaaatgttctgaaaaagactctgcatgggaatggcctgccttacgatgacagaaatggagggaacatccacctcttctatatatcagaatggtgatatttctggaaatgccaattctatgaagcaaatagatccagttcttcaggtgtatctttaccattcccttgggaaatctgaggcagattatctgacctttccatctggggagtatgttgcagaagaaatctgtattgctgcttctaaagcttgtggtatcacacctgtgtatcataatatgtttgctttaatgagtgaaacagaaaggatctggtatccacccaaccatgtcttccatatagatgagtcaaccaggcataatgtactctacagaataagattttactttcctcgttggtattgcagtggcagcaacagagcctatcggcatggaatatctcgaggtgctgaagctcctcttcttgatgactttgtcatgtcttacctctttgctcagtggcggcatgattttgtgcacggatggataaaagtacctgtgactcatgaaacacaggaagaatgtcttgggatggcagtgttagatatgatgagaatagccaaagaaaacgatcaaaccccactggccatctataactctatcagctacaagacattcttaccaaaatgtattcgagcaaagatccaagactatcatattttgacaaggaagcgaataaggtacagatttcgcagatttattcagcaattcagccaatgcaaagccactgccagaaacttgaaacttaagtatcttataaatctggaaactctgcagtctgccttctacacagagaaatttgaagtaaaagaacctggaagtggtccttcaggtgaggagatttttgcaaccattataataactggaaacggtggaattcagtggtcaagagggaaacataaagaaagtgagacactgacagaacaggatttacagttatattgcgattttcctaatattattgatgtcagtattaagcaagcaaaccaagagggttcaaatgaaagccgagttgtaactatccataagcaagatggtaaaaatctggaaattgaacttagctcattaagggaagctttgtctttcgtgtcattaattgatggatattatagattaactgcagatgcacatcattacctctgtaaagaagtagcacctccagccgtgcttgaaaatatacaaagcaactgtcatggcccaatttcgatggattttgccattagtaaactgaagaaagcaggtaatcagactggactgtatgtacttcgatgcagtcctaaggactttaataaatattttttgacttttgctgtcgagcgagaaaatgtcattgaatataaacactgtttgattacaaaaaatgagaatgaagagtacaacctcagtgggacaaagaagaacttcagcagtcttaaagatcttttgaattgttaccagatggaaactgttcgctcagacaatataattttccagtttactaaatgctgtcccccaaagccaaaagataaatcaaaccttctagtcttcagaacgaatggtgtttctgatgtaccaacctcaccaacattacagaggcctactcatatgaaccaaatggtgtttcacaaaatcagaaatgaagatttgatatttaatgaaagccttggccaaggcacttttacaaagatttttaaaggcgtacgaagagaagtaggagactacggtcaactgcatgaaacagaagttcttttaaaagttctggataaagcacacagaaactattcagagtctttctttgaagcagcaagtatgatgagcaagctttctcacaagcatttggttttaaattatggagtatgtgtctgtggagacgagaatattctggttcaggagtttgtaaaatttggatcactagatacatatctgaaaaagaataaaaattgtataaatatattatggaaacttgaagttgctaaacagttggcatgggccatgcattttctagaagaaaacacccttattcatgggaatgtatgtgccaaaaatattctgcttatcagagaagaagacaggaagacaggaaatcctcctttcatcaaacttagtgatcctggcattagtattacagttttgccaaaggacattcttcaggagagaataccatgggtaccacctgaatgcattgaaaatcctaaaaatttaaatttggcaacagacaaatggagttttggtaccactttgtgggaaatctgcagtggaggagataaacctctaagtgctctggattctcaaagaaagctacaattttatgaagataggcatcagcttcctgcaccaaagtgggcagaattagcaaaccttataaataattgtatggattatgaaccagatttcaggccttctttcagagccatcatacgagatcttaacagtttgtttactccagattatgaactattaacagaaaatgacatgttaccaaatatgaggataggtgccctggggttttctggtgcctttgaagaccgggatcctacacagtttgaagagagacatttgaaatttctacagcaacttggcaagggtaattttgggagtgtggagatgtgccggtatgaccctctacaggacaacactggggaggtggtcgctgtaaaaaagcttcagcatagtactgaagagcacctaagagactttgaaagggaaattgaaatcctgaaatccctacagcatgacaacattgtaaagtacaagggagtgtgctacagtgctggtcggcgtaatctaaaattaattatggaatatttaccatatggaagtttacgagactatcttcaaaaacataaagaacggatagatcacataaaacttctgcagtacacatctcagatatgcaagggtatggagtatcttggtacaaaaaggtatatccacagggatctggcaacgagaaatatattggtggagaacgagaacagagttaaaattggagattttgggttaaccaaagtcttgccacaagacaaagaatactataaagtaaaagaacctggtgaaagtcccatattctggtatgctccagaatcactgacagagagcaagttttctgtggcctcagatgtttggagctttggagtggttctgtatgaacttttcacatacattgagaagagtaaaagtccaccagcggaatttatgcgtatgattggcaatgacaaacaaggacagatgatcgtgttccatttgatagaacttttgaagaataatggaagattaccaagaccagatggatgcccagatgagatctatatgatcatgacagaatgctggaacaataatgtaaatcaacgcccctcctttagggatctagctcttcgagtggatcaaataagggataacatggctggatgaaagaaatgaccttcattctgagaccaaagtagatttacagaacaaagttttatatttcacattgctgtggactattattacatatatcattattatataaatcatgatgctagccagcaaagatgtgaaaatatctgctcaaaactttcaaagtttagtaagtttttcttcatgaggccaccagtaaaagacattaatgagaattccttagcaaggattttgtaagaagtttcttaaacattgtcagttaacatcactcttgtctggcaaaagaaaaaaaatagactttttcaactcagctttttgagacctgaaaaaattattatgtaaattttgcaatgttaaagatgcacagaatatgtatgtatagtttttaccacagtggatgtataataccttggcatcttgtgtgatgttttacacacatgagggctggtgttcattaatactgttttctaatttttccatagttaatctataattaattacttcactatacaaacaaattaagatgttcagataattgaataagtacctttgtgtccttgttcatttatatcgctggccagcattataagcaggtgtatacttttagcttgtagttccatgtactgtaaatatttttcacataaagggaacaaatgtctagttttatttgtataggaaatttccctgaccctaaataatacattttgaaatgaaacaagcttacaaagatataatctattttattatggtttcccttgtatctatttgtggtgaatgtgttttttaaatggaactatctccaaatttttctaagactactatgaacagttttcttttaaaattttgagattaagaatgccaggaatattgtcatcctttgagctgctgactgccaataacattcttcgatctctgggatttatgctcatgaactaaatttaagcttaagccataaaatagattagattgttttttaaaaatggatagctcattaagaagtgcagcaggttaagaattttttcctaaagactgtatatttgaggggtttcagaattttgcattgcagtcatagaagagatttatttcctttttagaggggaaatgaggtaaataagtaaaaaagtatgcttgttaattttattcaagaatgccagtagaaaattcataacgtgtatctttaagaaaaatgagcatacatcttaaatcttttcaattaagtataaggggttgttcgttgttgtcatttgttatagtgctactccactttagacaccatagctaaaataaaatatggtgggttttgtgtgtgtgtgtgtgtgtgtgtgtgtgtgtgtgtgtgtgttatttatacaaaacttaaaatacttgctgttttgattaaaaagaaaatagtttcttacttta

SEQ ID NO: 144728 - DNA, 5432 bp, Homo sapiens
  Payload ID: 8597
  Gene Symbol: JAK3
  Gene Name: Janus kinase 3
  Uniprot ID: P52333
  ENST ID: ENST00000458235
  CDS Start-End: 101-3475
cacacaggaaggagccgagtgggactttcctctcgctgcctcccggctctgcccgcccttcgaaagtccagggtccctgcccgctaggcaagttgcactcatggcacctccaagtgaagagacgcccctgatccctcagcgttcatgcagcctcttgtccacggaggctggtgccctgcatgtgctgctgcccgctcggggccccgggcccccccagcgcctatctttctcctttggggaccacttggctgaggacctgtgcgtgcaggctgccaaggccagcggcatcctgcctgtgtaccactccctctttgctctggccacggaggacctgtcctgctggttccccccgagccacatcttctccgtggaggatgccagcacccaagtcctgctgtacaggattcgcttttacttccccaattggtttgggctggagaagtgccaccgcttcgggctacgcaaggatttggccagtgctatccttgacctgccagtcctggagcacctctttgcccagcaccgcagtgacctggtgagtgggcgcctccccgtgggcctcagtctcaaggagcagggtgagtgtctcagcctggccgtgttggacctggcccggatggcgcgagagcaggcccagcggccgggagagctgctgaagactgtcagctacaaggcctgcctacccccaagcctgcgcgacctgatccagggcctgagcttcgtgacgcggaggcgtattcggaggacggtgcgcagagccctgcgccgcgtggccgcctgccaggcagaccggcactcgctcatggccaagtacatcatggacctggagcggctggatccagccggggccgccgagaccttccacgtgggcctccctggggcccttggtggccacgacgggctggggctgctccgcgtggctggtgacggcggcatcgcctggacccagggagaacaggaggtcctccagcccttctgcgactttccagaaatcgtagacattagcatcaagcaggccccgcgcgttggcccggccggagagcaccgcctggtcactgttaccaggacagacaaccagattttagaggccgagttcccagggctgcccgaggctctgtcgttcgtggcgctcgtggacggctacttccggctgaccacggactcccagcacttcttctgcaaggaggtggcaccgccgaggctgctggaggaagtggccgagcagtgccacggccccatcactctggactttgccatcaacaagctcaagactgggggctcacgtcctggctcctatgttctccgccgcagcccccaggactttgacagcttcctcctcactgtctgtgtccagaacccccttggtcctgattataagggctgcctcatccggcgcagccccacaggaaccttccttctggttggcctcagccgaccccacagcagtcttcgagagctcctggcaacctgctgggatggggggctgcacgtagatggggtggcagtgaccctcacttcctgctgtatccccagacccaaagaaaagtccaacctgatcgtggtccagagaggtcacagcccacccacatcatccttggttcagccccaatcccaataccagctgagtcagatgacatttcacaagatccctgctgacagcctggagtggcatgagaacctgggccatgggtccttcaccaagatttaccggggctgtcgccatgaggtggtggatggggaggcccgaaagacagaggtgctgctgaaggtcatggatgccaagcacaagaactgcatggagtcattcctggaagcagcgagcttgatgagccaagtgtcgtaccggcatctcgtgctgctccacggcgtgtgcatggctggagacagcaccatggtgcaggaatttgtacacctgggggccatagacatgtatctgcgaaaacgtggccacctggtgccagccagctggaagctgcaggtggtcaaacagctggcctacgccctcaactatctggaggacaaaggcctgccccatggcaatgtctctgcccggaaggtgctcctggctcgggagggggctgatgggagcccgcccttcatcaagctgagtgaccctggggtcagccccgctgtgttaagcctggagatgctcaccgacaggatcccctgggtggcccccgagtgtctccgggaggcgcagacacttagcttggaagctgacaagtggggcttcggcgccacggtctgggaagtgtttagtggcgtcaccatgcccatcagtgccctggatcctgctaagaaactccaattttatgaggaccggcagcagctgccggcccccaagtggacagagctggccctgctgattcaacagtgcatggcctatgagccggtccagaggccctccttccgagccgtcattcgtgacctcaatagcctcatctcttcagactatgagctcctctcagaccccacacctggtgccctggcacctcgtgatgggctgtggaatggtgcccagctctatgcctgccaagaccccacgatcttcgaggagagacacctcaagtacatctcacagctgggcaagggcaactttggcagcgtggagctgtgccgctatgacccgctaggcgacaatacaggtgccctggtggccgtgaaacagctgcagcacagcgggccagaccagcagagggactttcagcgggagattcagatcctcaaagcactgcacagtgatttcattgtcaagtatcgtggtgtcagctatggcccgggccgccagagcctgcggctggtcatggagtacctgcccagcggctgcttgcgcgacttcctgcagcggcaccgcgcgcgcctcgatgccagccgcctccttctctattcctcgcagatctgcaagggcatggagtacctgggctcccgccgctgcgtgcaccgcgacctggccgcccgaaacatcctcgtggagagcgaggcacacgtcaagatcgctgacttcggcctagctaagctgctgccgcttgacaaagactactacgtggtccgcgagccaggccagagccccattttctggtatgcccccgaatccctctcggacaacatcttctctcgccagtcagacgtctggagcttcggggtcgtcctgtacgagctcttcacctactgcgacaaaagctgcagcccctcggccgagttcctgcggatgatgggatgtgagcgggatgtccccgccctctgccgcctcttggaactgctggaggagggccagaggctgccggcgcctcctgcctgccctgctgaggttcacgagctcatgaagctgtgctgggcccctagcccacaggaccggccatcattcagcgccctgggcccccagctggacatgctgtggagcggaagccgggggtgtgagactcatgccttcactgctcacccagagggcaaacaccactccctgtccttttcatagctcctgcccgcagacctctggattaggtctctgttgactggctgtgtgaccttaggcccggagctgcccctctctgggcctcagaggccttatgagggtcctctacttcaggaacacccccatgacattgcatttgggggggctcccgtggcctgtagaatagcctgtggcctttgcaatttgttaaggttcaagacagatgggcatatgtgtcagtggggctctctgagtcctggcccaaagaagcaaggaaccaaatttaagactctcgcatcttcccaaccccttaagccctggccccctgagtttccttttctgtctctctctttttattttttttatttttatttttatttttgagacagagcctcgctctgttacccagggtggagtgcagtggtgcgatctcggctcagtgcaacctctgcttcccaggttcaagcgattctcctgcctcagcctcccgagtagctgggattacaggtgtgcaccaccacacccggctaattttttttatttttaatagagatgaggtttcaccatgatggccaggctgatctcgaactcctaacctcaagtgatcctcccacctcagcctcccaaagtgttggaataataggcatgagccactgcacccaggcttttttttttttaaatttattattattatttttaagagacaggatcttgctacgttgcccaggctggtcttgaactcctgggctacagtgatcctcctgccttatcctcctaaatagctgggactacagcacctagttttgagtttcctgtcttatttccaatggggacattcatgtagctttttttttttttttttttttgagacggagtctcgctctgtcgcccaggctggagtacagtggcgcaatctaggctcactgcaagctccgcctcctgggttcacaccattctctcgcctcagcctcccaagtagctgggactacaggcgcccgccaccacacccggctaattttttgtatttttagtagagacggggtttcaccttgttagccaggatggtttccatctcctgacctcgtgatctgcccgtctcggcctcccaaagtgctgggattacaggcatgagccactgcgcccggccctcatgtagctttaaatgtatgatctgacttctgctccccgatctctgtttctctggaggaagccaaggacaagagcagttgctgtggctgggactctgccttttaggggagcccgtgtatctctttgggatcctgaaagggggcaggaaaggctggggtcccagtccaccctaatggtatctgagtgtcctagggcttcagttttcccacctgtccaatgggaccctttctgtcctcaccctacaaggggcacaaagggatgacaccaaacctggcaggaacttttcacgcaatcaagggaaggaaaggcattcctggcagagggaacagcatgccaagcgtgagaaggctcagagtaaggaggttaagagcccaagtattggagcctacagttttgccccttccatgcagtgtgacagtgggcaagttcctttccctctctgggtctcagttctgtcccctgcaaaatggtcagagcttaccccttggctgtgcagggtcaactttctgactggtgagagggattctcatgcaggttaagcttctgctgctcctcctcacctgcaaagcttttctgccacttttgcctccttggaaaactcttatccatctctcaaaactccagctaccacatccttgcagccttccctcatatacccccactactactgtagccctgtccttccctccagccccactctggccctggggctggggaagtgtctgtgtccagctgtctcccctgacctcagggttccttgggggctgggctgaggcctcagtacagagggggctctggaaatgtttgttgactgaataaaggaattcagtgg

SEQ ID NO: 144729 - DNA, 3996 bp, Homo sapiens
  Payload ID: 8597
  Gene Symbol: JAK3
  Gene Name: Janus kinase 3
  Uniprot ID: P52333
  ENST ID: ENST00000527670
  CDS Start-End: 31-3405
ttctctctgtgccccaggcaagttgcactcatggcacctccaagtgaagagacgcccctgatccctcagcgttcatgcagcctcttgtccacggaggctggtgccctgcatgtgctgctgcccgctcggggccccgggcccccccagcgcctatctttctcctttggggaccacttggctgaggacctgtgcgtgcaggctgccaaggccagcggcatcctgcctgtgtaccactccctctttgctctggccacggaggacctgtcctgctggttccccccgagccacatcttctccgtggaggatgccagcacccaagtcctgctgtacaggattcgcttttacttccccaattggtttgggctggagaagtgccaccgcttcgggctacgcaaggatttggccagtgctatccttgacctgccagtcctggagcacctctttgcccagcaccgcagtgacctggtgagtgggcgcctccccgtgggcctcagtctcaaggagcagggtgagtgtctcagcctggccgtgttggacctggcccggatggcgcgagagcaggcccagcggccgggagagctgctgaagactgtcagctacaaggcctgcctacccccaagcctgcgcgacctgatccagggcctgagcttcgtgacgcggaggcgtattcggaggacggtgcgcagagccctgcgccgcgtggccgcctgccaggcagaccggcactcgctcatggccaagtacatcatggacctggagcggctggatccagccggggccgccgagaccttccacgtgggcctccctggggcccttggtggccacgacgggctggggctgctccgcgtggctggtgacggcggcatcgcctggacccagggagaacaggaggtcctccagcccttctgcgactttccagaaatcgtagacattagcatcaagcaggccccgcgcgttggcccggccggagagcaccgcctggtcactgttaccaggacagacaaccagattttagaggccgagttcccagggctgcccgaggctctgtcgttcgtggcgctcgtggacggctacttccggctgaccacggactcccagcacttcttctgcaaggaggtggcaccgccgaggctgctggaggaagtggccgagcagtgccacggccccatcactctggactttgccatcaacaagctcaagactgggggctcacgtcctggctcctatgttctccgccgcagcccccaggactttgacagcttcctcctcactgtctgtgtccagaacccccttggtcctgattataagggctgcctcatccggcgcagccccacaggaaccttccttctggttggcctcagccgaccccacagcagtcttcgagagctcctggcaacctgctgggatggggggctgcacgtagatggggtggcagtgaccctcacttcctgctgtatccccagacccaaagaaaagtccaacctgatcgtggtccagagaggtcacagcccacccacatcatccttggttcagccccaatcccaataccagctgagtcagatgacatttcacaagatccctgctgacagcctggagtggcatgagaacctgggccatgggtccttcaccaagatttaccggggctgtcgccatgaggtggtggatggggaggcccgaaagacagaggtgctgctgaaggtcatggatgccaagcacaagaactgcatggagtcattcctggaagcagcgagcttgatgagccaagtgtcgtaccggcatctcgtgctgctccacggcgtgtgcatggctggagacagcaccatggtgcaggaatttgtacacctgggggccatagacatgtatctgcgaaaacgtggccacctggtgccagccagctggaagctgcaggtggtcaaacagctggcctacgccctcaactatctggaggacaaaggcctgccccatggcaatgtctctgcccggaaggtgctcctggctcgggagggggctgatgggagcccgcccttcatcaagctgagtgaccctggggtcagccccgctgtgttaagcctggagatgctcaccgacaggatcccctgggtggcccccgagtgtctccgggaggcgcagacacttagcttggaagctgacaagtggggcttcggcgccacggtctgggaagtgtttagtggcgtcaccatgcccatcagtgccctggatcctgctaagaaactccaattttatgaggaccggcagcagctgccggcccccaagtggacagagctggccctgctgattcaacagtgcatggcctatgagccggtccagaggccctccttccgagccgtcattcgtgacctcaatagcctcatctcttcagactatgagctcctctcagaccccacacctggtgccctggcacctcgtgatgggctgtggaatggtgcccagctctatgcctgccaagaccccacgatcttcgaggagagacacctcaagtacatctcacagctgggcaagggcaactttggcagcgtggagctgtgccgctatgacccgctaggcgacaatacaggtgccctggtggccgtgaaacagctgcagcacagcgggccagaccagcagagggactttcagcgggagattcagatcctcaaagcactgcacagtgatttcattgtcaagtatcgtggtgtcagctatggcccgggccgccagagcctgcggctggtcatggagtacctgcccagcggctgcttgcgcgacttcctgcagcggcaccgcgcgcgcctcgatgccagccgcctccttctctattcctcgcagatctgcaagggcatggagtacctgggctcccgccgctgcgtgcaccgcgacctggccgcccgaaacatcctcgtggagagcgaggcacacgtcaagatcgctgacttcggcctagctaagctgctgccgcttgacaaagactactacgtggtccgcgagccaggccagagccccattttctggtatgcccccgaatccctctcggacaacatcttctctcgccagtcagacgtctggagcttcggggtcgtcctgtacgagctcttcacctactgcgacaaaagctgcagcccctcggccgagttcctgcggatgatgggatgtgagcgggatgtccccgccctctgccgcctcttggaactgctggaggagggccagaggctgccggcgcctcctgcctgccctgctgaggttcacgagctcatgaagctgtgctgggcccctagcccacaggaccggccatcattcagcgccctgggcccccagctggacatgctgtggagcggaagccgggggtgtgagactcatgccttcactgctcacccagagggcaaacaccactccctgtccttttcatagctcctgcccgcagacctctggattaggtctctgttgactggctgtgtgaccttaggcccggagctgcccctctctgggcctcagaggccttatgagggtcctctacttcaggaacacccccatgacattgcatttgggggggctcccgtggcctgtagaatagcctgtggcctttgcaatttgttaaggttcaagacagatgggcatatgtgtcagtggggctctctgagtcctggcccaaagaagcaaggaaccaaatttaagactctcgcatcttcccaaccccttaagccctggccccctgagtttccttttctgtctctctctttttattttttttatttttatttttatttttgagacagagcctcgctctgttacccagggtggagtgcagtggtgcgatctcggctcagtgcaacctctgcttcccaggttcaagcgattctcctgcctcagcctcccgagtagctgggattacaggtgtgcaccaccacacccggctaattttttttatttttaatagagatgaggtttcaccatgatggccaggctgatctcgaactcctaacctcaagtgatcctcccacc

SEQ ID NO: 144730 - DNA, 3612 bp, Homo sapiens
  Payload ID: 8597
  Gene Symbol: JAK3
  Gene Name: Janus kinase 3
  Uniprot ID: P52333
  ENST ID: ENST00000534444
  CDS Start-End: 86-3370
cgagtgggactttcctctcgctgcctcccggctctgcccgcccttcgaaagtccagggtccctgcccgctaggcaagttgcactcatggcacctccaagtgaagagacgcccctgatccctcagcgttcatgcagcctcttgtccacggaggctggtgccctgcatgtgctgctgcccgctcggggccccgggcccccccagcgcctatctttctcctttggggaccacttggctgaggacctgtgcgtgcaggctgccaaggccagcggcatcctgcctgtgtaccactccctctttgctctggccacggaggacctgtcctgctggttccccccgagccacatcttctccgtggaggatgccagcacccaagtcctgctgtacaggattcgcttttacttccccaattggtttgggctggagaagtgccaccgcttcgggctacgcaaggatttggccagtgctatccttgacctgccagtcctggagcacctctttgcccagcaccgcagtgacctggtgagtgggcgcctccccgtgggcctcagtctcaaggagcagggtgagtgtctcagcctggccgtgttggacctggcccggatggcgcgagagcaggcccagcggccgggagagctgctgaagactgtcagctacaaggcctgcctacccccaagcctgcgcgacctgatccagggcctgagcttcgtgacgcggaggcgtattcggaggacggtgcgcagagccctgcgccgcgtggccgcctgccaggcagaccggcactcgctcatggccaagtacatcatggacctggagcggctggatccagccggggccgccgagaccttccacgtgggcctccctggggcccttggtggccacgacgggctggggctgctccgcgtggctggtgacggcggcatcgcctggacccagggagaacaggaggtcctccagcccttctgcgactttccagaaatcgtagacattagcatcaagcaggccccgcgcgttggcccggccggagagcaccgcctggtcactgttaccaggacagacaaccagattttagaggccgagttcccagggctgcccgaggctctgtcgttcgtggcgctcgtggacggctacttccggctgaccacggactcccagcacttcttctgcaaggaggtggcaccgccgaggctgctggaggaagtggccgagcagtgccacggccccatcactctggactttgccatcaacaagctcaagactgggggctcacgtcctggctcctatgttctccgccgcagcccccaggactttgacagcttcctcctcactgtctgtgtccagaacccccttggtcctgattataagggctgcctcatccggcgcagccccacaggaaccttccttctggttggcctcagccgaccccacagcagtcttcgagagctcctggcaacctgctgggatggggggctgcacgtagatggggtggcagtgaccctcacttcctgctgtatccccagacccaaagaaaagtccaacctgatcgtggtccagagaggtcacagcccacccacatcatccttggttcagccccaatcccaataccagctgagtcagatgacatttcacaagatccctgctgacagcctggagtggcatgagaacctgggccatgggtccttcaccaagatttaccggggctgtcgccatgaggtggtggatggggaggcccgaaagacagaggtgctgctgaaggtcatggatgccaagcacaagaactgcatggagtcattcctggaagcagcgagcttgatgagccaagtgtcgtaccggcatctcgtgctgctccacggcgtgtgcatggctggagacagcaccatggtgcaggaatttgtacacctgggggccatagacatgtatctgcgaaaacgtggccacctggtgccagccagctggaagctgcaggtggtcaaacagctggcctacgccctcaactatctggaggacaaaggcctgccccatggcaatgtctctgcccggaaggtgctcctggctcgggagggggctgatgggagcccgcccttcatcaagctgagtgaccctggggtcagccccgctgtgttaagcctggagatgctcaccgacaggatcccctgggtggcccccgagtgtctccgggaggcgcagacacttagcttggaagctgacaagtggggcttcggcgccacggtctgggaagtgtttagtggcgtcaccatgcccatcagtgccctggatcctgctaagaaactccaattttatgaggaccggcagcagctgccggcccccaagtggacagagctggccctgctgattcaacagtgcatggcctatgagccggtccagaggccctccttccgagccgtcattcgtgacctcaatagcctcatctcttcagactatgagctcctctcagaccccacacctggtgccctggcacctcgtgatgggctgtggaatggtgcccagctctatgcctgccaagaccccacgatcttcgaggagagacacctcaagtacatctcacagctgggcaagggcaactttggcagcgtggagctgtgccgctatgacccgctaggcgacaatacaggtgccctggtggccgtgaaacagctgcagcacagcgggccagaccagcagagggactttcagcgggagattcagatcctcaaagcactgcacagtgatttcattgtcaagtatcgtggtgtcagctatggcccgggccgccagagcctgcggctggtcatggagtacctgcccagcggctgcttgcgcgacttcctgcagcggcaccgcgcgcgcctcgatgccagccgcctccttctctattcctcgcagatctgcaagggcatggagtacctgggctcccgccgctgcgtgcaccgcgacctggccgcccgaaacatcctcgtggagagcgaggcacacgtcaagatcgctgacttcggcctagctaagctgctgccgcttgacaaagactactacgtggtccgcgagccaggccagagccccattttctggtatgcccccgaatccctctcggacaacatcttctctcgccagtcagacgtctggagcttcggggtcgtcctgtacgagctcttcacctactgcgacaaaagctgcagcccctcggccgagttcctgcggatgatgggatgtgagcgggatgtccccgccctctgccgcctcttggaactgctggaggagggccagaggctgccggcgcctcctgcctgccctgctgaggtgagcgccgcagggctagcctcagtttcccagtctgtagattgggccggggtctcgggcaagccagctggcgcctgagtctctgtactgagaagaaaggctagagtgtgaggccgatgaggatcctggcccccacttggctactctctcactgtgtggcaagtcagagcactttcagagcctcagtttacccttttccaaaatgagaatagtaatgccttatagggtgagggaagattagactcctgaacacctgtgcctatgagggctcagctcaaagccgagcacacagtcgatgctccataaatggtggtgacgtt

SEQ ID NO: 144731 - DNA, 2585 bp, Homo sapiens
  Payload ID: 8598
  Gene Symbol: JAKMIP1
  Gene Name: janus kinase and microtubule interacting protein 1
  Uniprot ID: Q96N16
  ENST ID: ENST00000282924
  CDS Start-End: 487-2367
ggtgccgtgcctgagccgggcgcgggcgaccgagggagctgcagccacccgcgtgcggcacgcgccggccgcctgcccggatcgcggccaccagtgccgcggcctctcgactcccgccccgccgagccgcgcgcgcgactgccatcctcctcaattgctttttacgattttttttgtgcatgcattcattttctgttccgttttgtcctttttaaggcggtggcggcggcgacagcggcgtaagctcgcagcggggagggggcggccggaggatgcggcgcggggctgcgctcgctacgtccgctgctgctgcccggctcgggcctgagcgccgagcaggatcccaagtgatggtggtttcctcggagggcgagctgagtcctgcgcgactggttagcacggtggagctggtagccacgcctgctggctggcgtgcgtgaacaggtgtggaccgcaggatctcagcactctgacccaaggggaagcatgtcgaagaaaggccggagcaagggcgagaagcccgagatggagacggacgcggtgcagatggccaacgaggagctgcgggccaagctgaccagcattcagatcgagttccagcaggaaaaaagcaaggtgggcaaactgcgcgagcggctgcaggaggcgaagctggagcgcgagcaggagcagcgacggcacacggcctacatttcggagctcaaggccaagctgcatgaggagaagaccaaggagctgcaggcgctgcgcgaggggctcatccggcagcacgagcaggaggcggcgcgcaccgccaagatcaaggagggcgagctgcagcggctgcaggccacgctgaacgtgctgcgcgacggcgcggccgacaaggtcaagacggcgctgctgaccgaggcgcgcgaggaggcgcgcagggccttcgatggagagcgcctgcggctgcagcaggagatcctggagctcaaggcagcgcgcaagcaggcagaggaggcgctcagtaactgcatgcaggctgacaagaccaaggcagccgacctgcgtgccgcctaccaggcgcaccaagacgaggtgcaccgcatcaagcgcgagtgcgagcgcgacatccgcaggctgatggatgagatcaaagggaaagaccgtgtgattctggccttggagaaggaacttggcgtgcaggctgggcagacccagaagctgcttctgcagaaagaggctttggatgagcagctggttcaggtcaaggaggccgagcggcaccacagtagtccaaagagagagctcccgcccgggatcggggacatggtggagctcatgggcgtccaggatcaacatatggacgagcgagatgtgaggcgatttcaactaaaaattgctgaactgaattcagtgatacggaagctggaagacagaaatacgctgttggcagatgagaggaatgaactgctgaaacgctcacgagagaccgaggttcagctgaagcccctggtggagaagaacaagcggatgaacaagaagaatgaggatctgttgcagagtatccagaggatggaggagaaaatcaagaacctcacgcgggaaaacgtggaaatgaaagaaaagctgtcagcgcaggcgtctctgaagcggcatacctccttgaatgacctcagcctgacgagggatgagcaggagatcgagttcctgaggctgcaggtgctggagcagcagcacgtcattgacgacctctcactggagagagaacggctgttgcgctccaaaaggcatcgagggaaaagtctgaaaccgcccaagaagcatgttgtggagacattttttggatttgatgaggagtctgtggactcagaaacgttgtccgaaacatcctacaacacagacaggacagacaggaccccagccacgcccgaagaagacttggacgatgccacagcccgagaggaggctgacctgcgcttctgccagctgacccgggagtaccaggccctgcaacgcgcctacgccctgctccaggagcaggtgggaggcacgctggacgctgagagggaggcccggactcgggagcagctacaagctgatctgctgaggtgtcaggccaaaatcgaagatttggagaagttactggttgagaagggacaggattccaagtgggttgaagagaagcagctgctcatcagaacaaaccaagacttgctggaaaagatttacagactggaaatggaagagaaccagctgaagaatgaaatgcaagacgccaaggatcagaacgagctgttagaattcagagtgctagaactcgaagtaagagactctatctgttgtaaactctcaaacggagcagacattctctttgaacccaaactgaaattcatgtaaagctctcagatgttttcaagcatgtgtaaaggggacatgttatagtttctttctttctttctttctttttttttttaaatctgtatgttcagaataatttcactgccttaatgtgttctggagagcgtgctcacccaagtctatggacatgtaccagagctaatatatttattgcctatggcttgttttgcacttaataaaataatttgtttttgcaa

SEQ ID NO: 144732 - DNA, 2975 bp, Homo sapiens
  Payload ID: 8598
  Gene Symbol: JAKMIP1
  Gene Name: janus kinase and microtubule interacting protein 1
  Uniprot ID: Q96N16
  ENST ID: ENST00000409021
  CDS Start-End: 451-2946
agctgcagccacccgcgtgcggcacgcgccggccgcctgcccggatcgcggccaccagtgccgcggcctctcgactcccgccccgccgagccgcgcgcgcgactgccatcctcctcaattgctttttacgattttttttgtgcatgcattcattttctgttccgttttgtcctttttaaggcggtggcggcggcgacagcggcgtaagctcgcagcggggagggggcggccggaggatgcggcgcggggctgcgctcgctacgtccgctgctgctgcccggctcgggcctgagcgccgagcaggatcccaagtgatggtggtttcctcggagggcgagctgagtcctgcgcgactggttagcacggtggagctggtagccacgcctgctggctggcgtgcgtgaacaggtgtggaccgcaggatctcagcactctgacccaaggggaagcatgtcgaagaaaggccggagcaagggcgagaagcccgagatggagacggacgcggtgcagatggccaacgaggagctgcgggccaagctgaccagcattcagatcgagttccagcaggaaaaaagcaaggtgggcaaactgcgcgagcggctgcaggaggcgaagctggagcgcgagcaggagcagcgacggcacacggcctacatttcggagctcaaggccaagctgcatgaggagaagaccaaggagctgcaggcgctgcgcgaggggctcatccggcagcacgagcaggaggcggcgcgcaccgccaagatcaaggagggcgagctgcagcggctgcaggccacgctgaacgtgctgcgcgacggcgcggccgacaaggtcaagacggcgctgctgaccgaggcgcgcgaggaggcgcgcagggccttcgatggagagcgcctgcggctgcagcaggagatcctggagctcaaggcagcgcgcaagcaggcagaggaggcgctcagtaactgcatgcaggctgacaagaccaaggcagccgacctgcgtgccgcctaccaggcgcaccaagacgaggtgcaccgcatcaagcgcgagtgcgagcgcgacatccgcaggctgatggatgagatcaaagggaaagaccgtgtgattctggccttggagaaggaacttggcgtgcaggctgggcagacccagaagctgcttctgcagaaagaggctttggatgagcagctggttcaggtcaaggaggccgagcggcaccacagtagtccaaagagagagctcccgcccgggatcggggacatggtggagctcatgggcgtccaggatcaacatatggacgagcgagatgtgaggcgatttcaactaaaaattgctgaactgaattcagtgatacggaagctggaagacagaaatacgctgttggcagatgagaggaatgaactgctgaaacgctcacgagagaccgaggttcagctgaagcccctggtggagaagaacaagcggatgaacaagaagaatgaggatctgttgcagagtatccagaggatggaggagaaaatcaagaacctcacgcgggaaaacgtggaaatgaaagaaaagctgtcagcgcaggcgtctctgaagcggcatacctccttgaatgacctcagcctgacgagggatgagcaggagatcgagttcctgaggctgcaggtgctggagcagcagcacgtcattgacgacctctcactggagagagaacggctgttgcgctccaaaaggcatcgagggaaaagtctgaaaccgcccaagaagcatgttgtggagacattttttggatttgatgaggagtctgtggactcagaaacgttgtccgaaacatcctacaacacagacaggacagacaggaccccagccacgcccgaagaagacttggacgatgccacagcccgagaggaggctgacctgcgcttctgccagctgacccgggagtaccaggccctgcaacgcgcctacgccctgctccaggagcaggtgggaggcacgctggacgctgagagggaggcccggactcgggagcagctacaagctgatctgctgaggtgtcaggccaaaatcgaagatttggagaagttactggttgagaagggacaggattccaagtgggttgaagagaagcagctgctcatcagaacaaaccaagacttgctggaaaagatttacagactggaaatggaagagaaccagctgaagaatgaaatgcaagacgccaaggatcagaacgagctgttagaattcagagtgctagaactcgaagagagagagaggaggtcgccagcatttaacctccaaatcaccaccttccccgagaaccacagcagcgctctccagctgttctgtcaccaggaaggagttaaggatgtgaatgtttctgaacttatgaagaaattagatatccttggcgataacgggaatttgagaaatgaagaacaggttgcaataatccaagctggaactgtgcttgccctgtgtgaaaagtggctgaagcaaatagaggggaccgaggccgccctgacccagaagatgctggacctggagaaggagaaggacctgttcagcaggcagaagggctacctggaagaggagctcgactaccggaagcaagcccttgaccaggcttacctgaaaatccaagacctggaggccacactgtacacagcgctgcagcaggagccggggcggagggccggtgaggcgctgagcgagggccagcgggaggacctgcaggctgctgtggaaaaggtgcgcaggcagatcctcaggcagagccgcgagttcgacagccagatcctgcgggagcgcatggagctgctgcagcaggcccagcagagaatccgagaactggaggacaaactggagtttcagaagcggcacctgaaagaactggaggaaaagtttttgttcctttttttgtttttctcactagcattcattctgtggccttgatgacttcagtgagccaagaactcgggttg

SEQ ID NO: 144733 - DNA, 1835 bp, Homo sapiens
  Payload ID: 8598
  Gene Symbol: JAKMIP1
  Gene Name: janus kinase and microtubule interacting protein 1
  Uniprot ID: Q96N16
  ENST ID: ENST00000410077
  CDS Start-End: 277-1662
gcattttgagtcaggagcctggactgacccgggtccctccacagcactggagggggtgggacacatcactacagggtttccttccatgaggactctgaggagttgacagtggaggcaaggagtgagctggatcccaagtgatggtggtttcctcggagggcgagctgagtcctgcgcgactggttagcacggtggagctggtagccacgcctgctggctggcgtgcgtgaacaggtgtggaccgcaggatctcagcactctgacccaaggggaagcatgtcgaagaaaggccggagcaagggcgagaagcccgagatggagacggacgcggtgcagatggccaacgaggagctgcgggccaagctgaccagcattcagatcgagttccagcaggaaaaaagcaagatggatgagatcaaagggaaagaccgtgtgattctggccttggagaaggaacttggcgtgcaggctgggcagacccagaagctgcttctgcagaaagaggctttggatgagcagctggttcaggtcaaggaggccgagcggcaccacagtagtccaaagagagagctcccgcccgggatcggggacatggtggagctcatgggcgtccaggatcaacatatggacgagcgagatgtgaggcgatttcaactaaaaattgctgaactgaattcagtgatacggaagctggaagacagaaatacgctgttggcagatgagaggaatgaactgctgaaacgctcacgagagaccgaggttcagctgaagcccctggtggagaagaacaagcggatgaacaagaagaatgaggatctgttgcagagtatccagaggatggaggagaaaatcaagaacctcacgcgggaaaacgtggaaatgaaagaaaagctgtcagcgcaggcgtctctgaagcggcatacctccttgaatgacctcagcctgacgagggatgagcaggagatcgagttcctgaggctgcaggtgctggagcagcagcacgtcattgacgacctctcactggagagagaacggctgttgcgctccaaaaggcatcgagggaaaagtctgaaaccgcccaagaagcatgttgtggagacattttttggatttgatgaggagtctgtggactcagaaacgttgtccgaaacatcctacaacacagacaggacagacaggaccccagccacgcccgaagaagacttggacgatgccacagcccgagaggaggctgacctgcgcttctgccagctgacccgggagtaccaggccctgcaacgcgcctacgccctgctccaggagcaggtgggaggcacgctggacgctgagagggaggcccggactcgggagcagctacaagctgatctgctgaggtgtcaggccaaaatcgaagatttggagaagttactggttgagaagggacaggattccaagtgggttgaagagaagcagctgctcatcagaacaaaccaagacttgctggaaaagatttacagactggaaatggaagagaaccagctgaagaatgaaatgcaagacgccaaggatcagaacgagctgttagaattcagagtgctagaactcgaagtaagagactctatctgttgtaaactctcaaacggagcagacattctctttgaacccaaactgaaattcatgtaaagctctcagatgttttcaagcatgtgtaaaggggacatgttatagtttctttctttctttctttctttttttttttaaatctgtatgttcagaataatttcactgccttaatgtgttctggagagcgtgctcacccaagtctatggacatgtaccagagctaatatatttatt

SEQ ID NO: 144734 - DNA, 2371 bp, Homo sapiens
  Payload ID: 8598
  Gene Symbol: JAKMIP1
  Gene Name: janus kinase and microtubule interacting protein 1
  Uniprot ID: Q96N16
  ENST ID: ENST00000409831
  CDS Start-End: 275-2155
attttgagtcaggagcctggactgacccgggtccctccacagcactggagggggtgggacacatcactacagggtttccttccatgaggactctgaggagttgacagtggaggcaaggagtgagctggatcccaagtgatggtggtttcctcggagggcgagctgagtcctgcgcgactggttagcacggtggagctggtagccacgcctgctggctggcgtgcgtgaacaggtgtggaccgcaggatctcagcactctgacccaaggggaagcatgtcgaagaaaggccggagcaagggcgagaagcccgagatggagacggacgcggtgcagatggccaacgaggagctgcgggccaagctgaccagcattcagatcgagttccagcaggaaaaaagcaaggtgggcaaactgcgcgagcggctgcaggaggcgaagctggagcgcgagcaggagcagcgacggcacacggcctacatttcggagctcaaggccaagctgcatgaggagaagaccaaggagctgcaggcgctgcgcgaggggctcatccggcagcacgagcaggaggcggcgcgcaccgccaagatcaaggagggcgagctgcagcggctgcaggccacgctgaacgtgctgcgcgacggcgcggccgacaaggtcaagacggcgctgctgaccgaggcgcgcgaggaggcgcgcagggccttcgatggagagcgcctgcggctgcagcaggagatcctggagctcaaggcagcgcgcaagcaggcagaggaggcgctcagtaactgcatgcaggctgacaagaccaaggcagccgacctgcgtgccgcctaccaggcgcaccaagacgaggtgcaccgcatcaagcgcgagtgcgagcgcgacatccgcaggctgatggatgagatcaaagggaaagaccgtgtgattctggccttggagaaggaacttggcgtgcaggctgggcagacccagaagctgcttctgcagaaagaggctttggatgagcagctggttcaggtcaaggaggccgagcggcaccacagtagtccaaagagagagctcccgcccgggatcggggacatggtggagctcatgggcgtccaggatcaacatatggacgagcgagatgtgaggcgatttcaactaaaaattgctgaactgaattcagtgatacggaagctggaagacagaaatacgctgttggcagatgagaggaatgaactgctgaaacgctcacgagagaccgaggttcagctgaagcccctggtggagaagaacaagcggatgaacaagaagaatgaggatctgttgcagagtatccagaggatggaggagaaaatcaagaacctcacgcgggaaaacgtggaaatgaaagaaaagctgtcagcgcaggcgtctctgaagcggcatacctccttgaatgacctcagcctgacgagggatgagcaggagatcgagttcctgaggctgcaggtgctggagcagcagcacgtcattgacgacctctcactggagagagaacggctgttgcgctccaaaaggcatcgagggaaaagtctgaaaccgcccaagaagcatgttgtggagacattttttggatttgatgaggagtctgtggactcagaaacgttgtccgaaacatcctacaacacagacaggacagacaggaccccagccacgcccgaagaagacttggacgatgccacagcccgagaggaggctgacctgcgcttctgccagctgacccgggagtaccaggccctgcaacgcgcctacgccctgctccaggagcaggtgggaggcacgctggacgctgagagggaggcccggactcgggagcagctacaagctgatctgctgaggtgtcaggccaaaatcgaagatttggagaagttactggttgagaagggacaggattccaagtgggttgaagagaagcagctgctcatcagaacaaaccaagacttgctggaaaagatttacagactggaaatggaagagaaccagctgaagaatgaaatgcaagacgccaaggatcagaacgagctgttagaattcagagtgctagaactcgaagtaagagactctatctgttgtaaactctcaaacggagcagacattctctttgaacccaaactgaaattcatgtaaagctctcagatgttttcaagcatgtgtaaaggggacatgttatagtttctttctttctttctttctttttttttttaaatctgtatgttcagaataatttcactgccttaatgtgttctggagagcgtgctcacccaagtctatggacatgtaccagagctaatatatttattgcctatggcttgttttgcacttaataaaataatttgtttttgc

SEQ ID NO: 144735 - DNA, 2420 bp, Homo sapiens
  Payload ID: 8598
  Gene Symbol: JAKMIP1
  Gene Name: janus kinase and microtubule interacting protein 1
  Uniprot ID: Q96N16
  ENST ID: ENST00000409371
  CDS Start-End: 451-2391
agctgcagccacccgcgtgcggcacgcgccggccgcctgcccggatcgcggccaccagtgccgcggcctctcgactcccgccccgccgagccgcgcgcgcgactgccatcctcctcaattgctttttacgattttttttgtgcatgcattcattttctgttccgttttgtcctttttaaggcggtggcggcggcgacagcggcgtaagctcgcagcggggagggggcggccggaggatgcggcgcggggctgcgctcgctacgtccgctgctgctgcccggctcgggcctgagcgccgagcaggatcccaagtgatggtggtttcctcggagggcgagctgagtcctgcgcgactggttagcacggtggagctggtagccacgcctgctggctggcgtgcgtgaacaggtgtggaccgcaggatctcagcactctgacccaaggggaagcatgtcgaagaaaggccggagcaagggcgagaagcccgagatggagacggacgcggtgcagatggccaacgaggagctgcgggccaagctgaccagcattcagatcgagttccagcaggaaaaaagcaagatggatgagatcaaagggaaagaccgtgtgattctggccttggagaaggaacttggcgtgcaggctgggcagacccagaagctgcttctgcagaaagaggctttggatgagcagctggttcaggtcaaggaggccgagcggcaccacagtagtccaaagagagagctcccgcccgggatcggggacatggtggagctcatgggcgtccaggatcaacatatggacgagcgagatgtgaggcgatttcaactaaaaattgctgaactgaattcagtgatacggaagctggaagacagaaatacgctgttggcagatgagaggaatgaactgctgaaacgctcacgagagaccgaggttcagctgaagcccctggtggagaagaacaagcggatgaacaagaagaatgaggatctgttgcagagtatccagaggatggaggagaaaatcaagaacctcacgcgggaaaacgtggaaatgaaagaaaagctgtcagcgcaggcgtctctgaagcggcatacctccttgaatgacctcagcctgacgagggatgagcaggagatcgagttcctgaggctgcaggtgctggagcagcagcacgtcattgacgacctctcactgaagcatgttgtggagacattttttggatttgatgaggagtctgtggactcagaaacgttgtccgaaacatcctacaacacagacaggacagacaggaccccagccacgcccgaagaagacttggacgatgccacagcccgagaggaggctgacctgcgcttctgccagctgacccgggagtaccaggccctgcaacgcgcctacgccctgctccaggagcaggtgggaggcacgctggacgctgagagggaggcccggactcgggagcagctacaagctgatctgctgaggtgtcaggccaaaatcgaagatttggagaagttactggttgagaagggacaggattccaagtgggttgaagagaagcagctgctcatcagaacaaaccaagacttgctggaaaagatttacagactggaaatggaagagaaccagctgaagaatgaaatgcaagacgccaaggatcagaacgagctgttagaattcagagtgctagaactcgaagagagagagaggaggtcgccagcatttaacctccaaatcaccaccttccccgagaaccacagcagcgctctccagctgttctgtcaccaggaaggagttaaggatgtgaatgtttctgaacttatgaagaaattagatatccttggcgataacgggaatttgagaaatgaagaacaggttgcaataatccaagctggaactgtgcttgccctgtgtgaaaagtggctgaagcaaatagaggggaccgaggccgccctgacccagaagatgctggacctggagaaggagaaggacctgttcagcaggcagaagggctacctggaagaggagctcgactaccggaagcaagcccttgaccaggcttacctgaaaatccaagacctggaggccacactgtacacagcgctgcagcaggagccggggcggagggccggtgaggcgctgagcgagggccagcgggaggacctgcaggctgctgtggaaaaggtgcgcaggcagatcctcaggcagagccgcgagttcgacagccagatcctgcgggagcgcatggagctgctgcagcaggcccagcagagaatccgagaactggaggacaaactggagtttcagaagcggcacctgaaagaactggaggaaaagtttttgttcctttttttgtttttctcactagcattcattctgtggccttgatgacttcagtgagccaagaactcgggttg

SEQ ID NO: 144736 - DNA, 2605 bp, Homo sapiens
  Payload ID: 8598
  Gene Symbol: JAKMIP1
  Gene Name: janus kinase and microtubule interacting protein 1
  ENST ID: ENST00000473053
  CDS Start-End: 451-2160
agctgcagccacccgcgtgcggcacgcgccggccgcctgcccggatcgcggccaccagtgccgcggcctctcgactcccgccccgccgagccgcgcgcgcgactgccatcctcctcaattgctttttacgattttttttgtgcatgcattcattttctgttccgttttgtcctttttaaggcggtggcggcggcgacagcggcgtaagctcgcagcggggagggggcggccggaggatgcggcgcggggctgcgctcgctacgtccgctgctgctgcccggctcgggcctgagcgccgagcaggatcccaagtgatggtggtttcctcggagggcgagctgagtcctgcgcgactggttagcacggtggagctggtagccacgcctgctggctggcgtgcgtgaacaggtgtggaccgcaggatctcagcactctgacccaaggggaagcatgtcgaagaaaggccggagcaagggcgagaagcccgagatggagacggacgcggtgcagatggccaacgaggagctgcgggccaagctgaccagcattcagatcgagttccagcaggaaaaaagcaaggtgggcaaactgcgcgagcggctgcaggaggcgaagctggagcgcgagcaggagcagcgacggcacacggcctacatttcggagctcaaggccaagctgcatgaggagaagaccaaggagctgcaggcgctgcgcgaggggctcatccggcagcacgagcaggaggcggcgcgcaccgccaagatcaaggagggcgagctgcagcggctgcaggccacgctgaacgtgctgcgcgacggcgcggccgacaaggtcaagacggcgctgctgaccgaggcgcgcgaggaggcgcgcagggccttcgatggagagcgcctgcggctgcagcaggagatcctggagctcaaggcagcgcgcaagcaggcagaggaggcgctcagtaactgcatgcaggctgacaagaccaaggcagccgacctgcgtgccgcctaccaggcgcaccaagacgaggtgcaccgcatcaagcgcgagtgcgagcgcgacatccgcaggctgatggatgagatcaaagggaaagaccgtgtgattctggccttggagaaggaacttggcgtgcaggctgggcagacccagaagctgcttctgcagaaagaggctttggatgagcagctggttcaggtcaaggaggccgagcggcaccacagtagtccaaagagagagctcccgcccgggatcggggacatggtggagctcatgggcgtccaggatcaacatatggacgagcgagatgtgaggcgatttcaactaaaaattgctgaactgaattcagtgatacggaagctggaagacagaaatacgctgttggcagatgagaggaatgaactgctgaaacgctcacgagagaccgaggttcagctgaagcccctggtggagaagaacaagcggatgaacaagaagaatgaggatctgttgcagagtatccagaggatggaggagaaaatcaagaacctcacgcgggaaaacgtggaaatgaaagaaaagctgtcagcgcaggcgtctctgaagcggcatacctccttgaatgacctcagcctgacgagggatgagcaggagatcgagttcctgaggctgcaggtgctggagcagcagcacgtcattgacgacctctcactggagagagaacggctgttgcgctccaaaaggcatcgagggaaaagtctgaaaccgcccaagaagcatgttgtggagacattttttggatttgatgaggagtctgtggactcagaaacgttgtccgaaacatcctacaacacagacaggacagacaggaccccagccacgcccgaagaagacttggacgatgccacagcccgagaggaggctgacctgcgcttctgccagctgacccgggagtaccaggccctgcaacgcgcctacgccctgctccaggagcaggtgggaggcacgctggacgctgagagggaggcccggactcgggagcagctacaagctgatctgctgaggtgtcaggccaaaatcgaagatttggagaagttactggttgagaagggacaggattccaagtgggttgaagagaagcagctgctcatcagaacaaaccaagacttgctggaaaagtgacttctcgctgctgccaggcgatgggtgctgctgtttcccttcttggacagaagatttacagactggaaatggaagagaaccagctgaagaatgaaatgcaagacgccaaggatcagaacgagctgttagaattcagagtgctagaactcgaagtaagagactctatctgttgtaaactctcaaacggagcagacattctctttgaacccaaactgaaattcatgtaaagctctcagatgttttcaagcatgtgtaaaggggacatgttatagtttctttctttctttctttctttttttttttaaatctgtatgttcagaataatttcactgccttaatgtgttctggagagcgtgctcacccaagtctatggacatgtaccagagctaatatatttattgcctatggcttgttttgcacttaataaaataatttgtttttgcaa

SEQ ID NO: 144737 - DNA, 6001 bp, Homo sapiens
  Payload ID: 8599
  Gene Symbol: JAKMIP2
  Gene Name: janus kinase and microtubule interacting protein 2
  Uniprot ID: Q96AA8
  ENST ID: ENST00000265272
  CDS Start-End: 469-2901
gaggaggagccagaggaggtgtctgctgcaagttcctggctgcttccgagctcaccccatcctccgagagggaggaggcccaactggtgatgctgctgctgctgctgctgccgccgccgccgcctctattgctgatactctagtggggctggaagggtggttcctattcgcaccatcgccaaccagagacagagggaaaaaaaaaaccggcagccactgctgatgttgggttcggaggctgcatccgactcggtcacaaggaaaatggattcagtttgcatctctccctcctttaaacagcttctccgggtctcagcatgggcttccagggcagcgattgaggagaccttaccaaggagcaccacacagtagatgctgagacatcgtactccaggataagaaacagtaacatggcagcacctgcttgaaagaaattaaaaaccaacagactccatttagaaaggaacaatgtccaagaaagggcgaaataagggcgagaagcccgaggcactcattgttgcccttcaagctgccaatgaagacctcaggaccaagctcacagacattcagatagagctgcatcaagagaagtccaaggtatcaaagcttgaaagagagaagactcaagaagcgaagaggattcgtgagctggagcagcgcaagcacacggtgctggtgacagaactcaaagccaagctccatgaggagaagatgaaggagctgcaggctgtgagggagaaccttatcaagcagcacgagcaggaaatgtcaaggacggtgaaggtacgtgatggagagatccagaggctcaagtctgctctctgtgctctccgcgacggcagcagtgacaaagtaaggacagcgctcaccattgaggcccgggaggaggcccggaaactgtttgacacagagcgccttaagctcttacaggaaattgcggacctgaaaacggccaagaagcaggtggacgaggctctgagcaatatgatccaagcagataaaatcaaggctggggaccttcggagtgagcatcagtcccaccaagaagccatctcgaagatcaagtgggagtcggagcgggatattcggaggctgatggatgaaatcaaagccaaggacaggatcatcttttccctggaaaaggaactggagacccagacaggctatgtacagaaactccaacttcagaaggaggctttggacgaacaactctttctggtcaaggaggctgagtgcaacatgagcagcccaaaacgagaaattccaggaagggcaggtgatggttccgaacactgcagcagtcctgatttgcgaagaaatcaaaagagaatagctgaattgaatgccactataagaaaattagaagacaggaataccttgcttggagatgaacgaaatgaactgttaaaacgtgtgcgggaaaccgaaaagcaatgtaaacctctcctggaaaggaacaagtgcctcgccaagagaaacgatgaactgatggtgtccttgcagcgcatggaagaaaaactaaaagccgttaccaaggaaaattcagaaatgagagaaaaaataacatcccatccacccctgaagaaattaaaatctctgaatgacctcgaccaagctaatgaagaacaagaaacagagtttctaaaacttcaggtcattgagcaacagaacattattgatgagctcacaagggaccgagaaaagctcatccgtagaagaaagcatagaagaagttccaagccaattaagaggcctgttttggacccgtttattggctatgatgaggactctatggattcagagacatcatccatggcctcatttagaacagacagaacaccagctactcctgatgatgacttggatgaaagtttagcagctgaagaatctgaactaagatttcgacaattaacaaaagaatatcaggccctccaaagagcatatgccctcctacaggagcagacgggaggcatcatcgacgctgaacgagaagccaaggctcaagaacagctccaagcagaggtgctaaggtataaagccaaaattgaagacctggaagcgactctggctcagaaagggcaggattcacactgggtagaagataaacaacttttcattaagagaaaccaggagcttttagaaaagatagaaaaacaggaggcagaaaatcaccggttacaacaagaactacaggacgccagagaccagaatgagctgctggagtttcgaaacctagagctagaagagagagagagacgatcccctccatttaatctccaaattcacccattctcagatggtgtgagtgctctacagatctactgtatgaaagaaggtgttaaggatgtgaacatccctgatctcataaagcagcttgatatcttgggtgataatgggaatttaagaaatgaagaacaagtggccataattcaggccagcactgtgctgtccctggcagagaagtggatccagcagattgaaggagctgaggctgccctacaccagaaaatgatggaattggaaagtgacatggaacagttctgcaaaataaaaggctatctggaggaagaactagactacagaaaacaagctcttgaccaagcatatatgagaatccaggaactagaagctactttgtacaatgctctacagcaagaaactgttatcaagtttggtgaattattaagtgaaaaacagcaagaggagctgaggacggcagtagaaaagttacggcggcaaatgctgaggaagagcagagagtatgactgtcagattcttcaggagagaatggagctcttacagcaagcccatcagagaattcgtgacttagaagataaaacagacatccagaaaagacaaataaaagacttagaagaaaagagtaaccgaaaacatggataagatcccaggaagacaagtgcttctaaaccttcaaagatggcaaaattgtttacaccagtgagagggagatcaaaagctaagaactaccctgtagccaggactacaactgtgtattttaaagccattattcaaggtttcttacttgacagttcctacacaaccctgttgaaaatctacaatatatgctgcatttaatgaaacatgtatatgtcaaatcagaagagaagaactataaacatatattgtgtaaagaaaaagttcagcaatggaactagtttctgcagatcaagcaaagatgtgtcttgggcatggaaccaaagttacaatgaaatattcaacccctgctgtgcaggggggtcattttaatgtaacaccacaccccatggaaacactagtcctgataataaacatcattttaaaagatcaaaacaaacaaacaaaaaaaacaagggtgggtggggagtgaagcacgaggaatacctatgaagagctatttacaataaaatgtttcatttgaaaagtctggtttcttactacagggatttgcttttctgtctttatgattgttttaaactcaggaacagagacatccgcatcgtaaatgggaagaaaaacactctctgttttgtttttctgcaaaaggtggagcttgtggaattcattccacagacgacagatgagaagtggatcacagtgaccacaacaaaactggtaacgaagtcaaaggacccgagcgaatgtgacatgtgaaataaaagcagattcgatgcttccttgtcctactctcacatctgcattcctctatcaacaatggactgatctcattcatattgaaaactaagaagatgatactgtaaatcacatgctccctgacttagttctgtttagaacgccaacatctatagggaacatgggccagagagcatctctgaatctttcatttccaaaatactgtttttcaaatggctgcttaaaattgcctgcaaatgaatatgctatatgatttgggcaaaaacacagcagaatcaatgagtaaatttctaccaagagtcgggtttgccacagagatgtgaatattaaactaaactattattttttaaagaatcctcacatgcctagagcattctgacctcttcttgtttagagtgataacattttttcccagacagatgacagcaacaagatagctctacttttttatatggaaataacattatgttactgacaaggtcattttctaccagagacaattagaggactggtacttttcctaagttgtgtattactgagtcttggagtcatctctgagagcaaatgtatgttcctgaaaagctaattttacacctcatttactgtagataacagaacaacctcaatttttcaaatttttgaagttttatttatggggctagaattcccatgcatagagaatatgtgtagggagccagaaactctttctatgaaatgctatacaaatctttccatatgtgggttcactatcatccttcagttttagcactggcatttgcaaagccagaacaataactgaagaatgtacaataaaaactagaatgctggggtcccactttttgttcttacatttactgctgacccaggtatctttggcccagtcacttaacctctctgtgcctcagtttcctcatctgcaaaatggggttaaaatgctttttcataaagttttatttgcaattttagaacaagaggtgcttaaagtagcacaatgtgctttgtaattattacaagtgctgtattatttgactttcttgtgttgttgacaaaaagattccctcatgtaataaaatagtgcttcagtttggttaaatttaagcactatagcactgaagcttgcttatcaagctacttgggacattattagcaataaaaattgagagattcaaaaccaggatctttaataatctataggaaatagatcatctcatgctattgaacaagatagaagagtgtgtcatttctatgataagcatctcccagctctcttgattgcatatgcatgccatcatacagaaccccacttttaccacaggagagccagtcattaaacaaaggcttggagcaaactgacagtatcacataattagcttgattatcttttattctggaggaaagccaggtggtatgccctactgggaagatacaaaacagactatcctgctgtattcttttttttttttttttttgagatggagtcttgctctgttgcccatgctggagtgcattggcacaatctcggctcatggcaagctccacctcctggattcaagtgattctcctgcctcaacctccctagtagctgggattacaggtgcacaccaccacacctggctaatttttgtatttttagtagagacagggtttcactatgctggtcaggctggtctcgaactcctgacctcaagtgatctgcctgcctcagcctcccaaagtgctaggattacaggtgtaagccactgtgcccggcctcctgctggattctttattcaactaggtaggttccagattaaatatgagccatatgctcattaggcaagaaatgtgaaagagggtgcctctacagtgttggtgacccaacactagccaacttgagtcagaaaatatggaagaggataaattactctcacatatctaagacttttccatttttcttcactttctgttgcagggcccatatgagtaaatctatattccgtctgctccaacacacaccttccttctcttaattttgctttcccacccaccaagaaatttgtaagtcaaaatttatttccatgagtaactatttctaaatgattgaaaatttttgaaaaagtggtatggtttatatacctaatctgcttatctgctataagtcatatgagaacaacagctaggatgattgtccaagcagctttagatgtgtttagggccaggcaaaaggtttgcttgttttttctttttgcttaagatctgggagattagcaaatttctcaagactatagactgaactgtaatttttaccaactcttgctcatgagcctcaaaatgaatatatccttgaataaagtataaatatttcaataga

SEQ ID NO: 144738 - DNA, 2992 bp, Homo sapiens
  Payload ID: 8599
  Gene Symbol: JAKMIP2
  Gene Name: janus kinase and microtubule interacting protein 2
  Uniprot ID: Q96AA8
  ENST ID: ENST00000333010
  CDS Start-End: 311-2647
agccagaggaggtgtctgctgcaagttcctggctgcttccgagctcaccccatcctccgagagggaggaggcccaactggtgatgctgctgctgctgctgctgccgccgccgccgcctctattgctgatactctagtggggctggaagggtggttcctattcgcaccatcgccaaccagagacagagggaaaaaaaaaaccggcagccactgctgatgttgggttcggaggctgcatccgactcggtcacaaggaaaatggattcagtttgcatctctccctcctttaaacagcttctccgggtctcagcatggtatcaaagcttgaaagagagaagactcaagaagcgaagaggattcgtgagctggagcagcgcaagcacacggtgctggtgacagaactcaaagccaagctccatgaggagaagatgaaggagctgcaggctgtgagggagaaccttatcaagcagcacgagcaggaaatgtcaaggacggtgaaggtacgtgatggagagatccagaggctcaagtctgctctctgtgctctccgcgacggcagcagtgacaaagtaaggacagcgctcaccattgaggcccgggaggaggcccggaaactgtttgacacagagcgccttaagctcttacaggaaattgcggacctgaaaacggccaagaagcaggtggacgaggctctgagcaatatgatccaagcagataaaatcaaggctggggaccttcggagtgagcatcagtcccaccaagaagccatctcgaagatcaagtgggagtcggagcgggatattcggaggctgatggatgaaatcaaagccaaggacaggatcatcttttccctggaaaaggaactggagacccagacaggctatgtacagaaactccaacttcagaaggaggctttggacgaacaactctttctggtcaaggaggctgagtgcaacatgagcagcccaaaacgagaaattccaggaagggcaggtgatggttccgaacactgcagcagtcctgatttgcgaagaaatcaaaagagaatagctgaattgaatgccactataagaaaattagaagacaggaataccttgcttggagatgaacgaaatgaactgttaaaacgtgtgcgggaaaccgaaaagcaatgtaaacctctcctggaaaggaacaagtgcctcgccaagagaaacgatgaactgatggtgtccttgcagcgcatggaagaaaaactaaaagccgttaccaaggaaaattcagaaatgagagaaaaaataacatcccatccacccctgaagaaattaaaatctctgaatgacctcgaccaagctaatgaagaacaagaaacagagtttctaaaacttcaggtcattgagcaacagaacattattgatgagctcacaagggaccgagaaaagctcatccgtagaagaaagcatagaagaagttccaagccaattaagaggcctgttttggacccgtttattggctatgatgaggactctatggattcagagacatcatccatggcctcatttagaacagacagaacaccagctactcctgatgatgacttggatgaaagtttagcagctgaagaatctgaactaagatttcgacaattaacaaaagaatatcaggccctccaaagagcatatgccctcctacaggagcagacgggaggcatcatcgacgctgaacgagaagccaaggctcaagaacagctccaagcagaggtgctaaggtataaagccaaaattgaagacctggaagcgactctggctcagaaagggcaggattcacactgggtagaagataaacaacttttcattaagagaaaccaggagcttttagaaaagatagaaaaacaggaggcagaaaatcaccggttacaacaagaactacaggacgccagagaccagaatgagctgctggagtttcgaaacctagagctagaagagagagagagacgatcccctccatttaatctccaaattcacccattctcagatggtgtgagtgctctacagatctactgtatgaaagaaggtgttaaggatgtgaacatccctgatctcataaagcagcttgatatcttgggtgataatgggaatttaagaaatgaagaacaagtggccataattcaggccagcactgtgctgtccctggcagagaagtggatccagcagattgaaggagctgaggctgccctacaccagaaaatgatggaattggaaagtgacatggaacagttctgcaaaataaaaggctatctggaggaagaactagactacagaaaacaagctcttgaccaagcatatatgagaatccaggaactagaagctactttgtacaatgctctacagcaagaaactgttatcaagtttggtgaattattaagtgaaaaacagcaagaggagctgaggacggcagtagaaaagttacggcggcaaatgctgaggaagagcagagagtatgactgtcagattcttcaggagagaatggagctcttacagcaagcccatcagagaattcgtgacttagaagataaaacagacatccagaaaagacaaataaaagacttagaagaaaagtttctgtttctattcttgttcttctctcttgcctttattctatggccttgatgtcaaggtgcctcttaaagagtaaccgaaaacatggataagatcccaggaagacaagtgcttctaaaccttcaaagatggcaaaattgtttacaccagtgagagggagatcaaaagctaagaactaccctgtagccaggactacaactgtgtattttaaagccattattcaaggtttcttacttgacagttcctacacaaccctgttgaaaatctacaatatatgctgcatttaatgaaacatgtatatgtcaaatcagaagagaagaactataaacatatattgtgtaaagaaaaagttcagcaatggaactagtttctgcagatcaagcaaagatgtgtctt

SEQ ID NO: 144739 - DNA, 5915 bp, Homo sapiens
  Payload ID: 8599
  Gene Symbol: JAKMIP2
  Gene Name: janus kinase and microtubule interacting protein 2
  Uniprot ID: Q96AA8
  ENST ID: ENST00000507386
  CDS Start-End: 236-2635
ggaggctgcatccgactcggtcacaaggaaaatggattcagtttgcatctctccctcctttaaacagcttctccgggtctcagcatgggcttccagggcagcgattgaggagaccttaccaaggagcaccacacagtagatgctgagacatcgtactccaggataagaaacagtaacatggcagcacctgcttgaaagaaattaaaaaccaacagactccatttagaaaggaacaatgtccaagaaagggcgaaataagggcgagaagcccgaggcactcattgttgcccttcaagctgccaatgaagacctcaggaccaagctcacagacattcagatagagctgcatcaagagaagtccaaggtatcaaagcttgaaagagagaagactcaagaagcgaagaggattcgtgagctggagcagcgcaagcacacggtgctggtgacagaactcaaagccaagctccatgaggagaagatgaaggagctgcaggctgtgagggagaaccttatcaagcagcacgagcaggaaatgtcaaggacggtgaaggtacgtgatggagagatccagaggctcaagtctgctctctgtgctctccgcgacggcagcagtgacaaagtaaggacagcgctcaccattgaggcccgggaggaggcccggaaactgtttgacacagagcgccttaagctcttacaggaaattgcggacctgaaaacggccaagaagcaggtggacgaggctctgagcaatatgatccaagcagataaaatcaaggctggggaccttcggagtgagcatcagtcccaccaagaagccatctcgaagatcaagtgggagtcggagcgggatattcggaggctgatggatgaaatcaaagccaaggacaggatcatcttttccctggaaaaggaactggagacccagacaggctatgtacagaaactccaacttcagaaggaggctttggacgaacaactctttctggtcaaggaggctgagtgcaacatgagcagcccaaaacgagaaattccaggaagggcaggtgatggttccgaacactgcagcagtcctgatttgcgaagaaatcaaaagagaatagctgaattgaatgccactataagaaaattagaagacaggaataccttgcttggagatgaacgaaatgaactgttaaaacgtgtgcgggaaaccgaaaagcaatgtaaacctctcctggaaaggaacaagtgcctcgccaagagaaacgatgaactgatggtgtccttgcagcgcatggaagaaaaactaaaagccgttaccaaggaaaattcagaaatgagagaaaaaataacatcccatccacccctgaagaaattaaaatctctgaatgacctcgaccaagctaatgaagaacaagaaacagagtttctaaaacttcaggtcattgagcaacagaacattattgatgagctcacaagggaccgagaaaagctcatccgtagaagaaagcatagaagaagttccaagccaattaagaggcctgttttggacccgtttattggctatgatgaggactctatggattcagagacatcatccatggcctcatttagaacagacagaacaccagctactcctgatgatgacttggatgaaagtttagcagctgaagaatctgaactaagatttcgacaattaacaaaagaatatcaggccctccaaagagcatatgccctcctacaggagcagacgggaggcatcatcgacgctgaacgagaagccaaggctcaagaacagctccaagcagaggtgctaaggtataaagccaaaattgaagacctggaagcgactctggctcagaaagggcagatagaaaaacaggaggcagaaaatcaccggttacaacaagaactacaggacgccagagaccagaatgagctgctggagtttcgaaacctagagctagaagagagagagagacgatcccctccatttaatctccaaattcacccattctcagatggtgtgagtgctctacagatctactgtatgaaagaaggtgttaaggatgtgaacatccctgatctcataaagcagcttgatatcttgggtgataatgggaatttaagaaatgaagaacaagtggccataattcaggccagcactgtgctgtccctggcagagaagtggatccagcagattgaaggagctgaggctgccctacaccagaaaatgatggaattggaaagtgacatggaacagttctgcaaaataaaaggctatctggaggaagaactagactacagaaaacaagctcttgaccaagcatatatgagaatccaggaactagaagctactttgtacaatgctctacagcaagaaactgttatcaagtttggtgaattattaagtgaaaaacagcaagaggagctgaggacggcagtagaaaagttacggcggcaaatgctgaggaagagcagagagtatgactgtcagattcttcaggagagaatggagctcttacagcaagcccatcagagaattcgtgacttagaagataaaacagacatccagaaaagacaaataaaagacttagaagaaaagtttctgtttctattcttgttcttctctcttgcctttattctatggccttgatgtcaaggtgcctcttaaagagtaaccgaaaacatggataagatcccaggaagacaagtgcttctaaaccttcaaagatggcaaaattgtttacaccagtgagagggagatcaaaagctaagaactaccctgtagccaggactacaactgtgtattttaaagccattattcaaggtttcttacttgacagttcctacacaaccctgttgaaaatctacaatatatgctgcatttaatgaaacatgtatatgtcaaatcagaagagaagaactataaacatatattgtgtaaagaaaaagttcagcaatggaactagtttctgcagatcaagcaaagatgtgtcttgggcatggaaccaaagttacaatgaaatattcaacccctgctgtgcaggggggtcattttaatgtaacaccacaccccatggaaacactagtcctgataataaacatcattttaaaagatcaaaacaaacaaacaaaaaaaacaagggtgggtggggagtgaagcacgaggaatacctatgaagagctatttacaataaaatgtttcatttgaaaagtctggtttcttactacagggatttgcttttctgtctttatgattgttttaaactcaggaacagagacatccgcatcgtaaatgggaagaaaaacactctctgttttgtttttctgcaaaaggtggagcttgtggaattcattccacagacgacagatgagaagtggatcacagtgaccacaacaaaactggtaacgaagtcaaaggacccgagcgaatgtgacatgtgaaataaaagcagattcgatgcttccttgtcctactctcacatctgcattcctctatcaacaatggactgatctcattcatattgaaaactaagaagatgatactgtaaatcacatgctccctgacttagttctgtttagaacgccaacatctatagggaacatgggccagagagcatctctgaatctttcatttccaaaatactgtttttcaaatggctgcttaaaattgcctgcaaatgaatatgctatatgatttgggcaaaaacacagcagaatcaatgagtaaatttctaccaagagtcgggtttgccacagagatgtgaatattaaactaaactattattttttaaagaatcctcacatgcctagagcattctgacctcttcttgtttagagtgataacattttttcccagacagatgacagcaacaagatagctctacttttttatatggaaataacattatgttactgacaaggtcattttctaccagagacaattagaggactggtacttttcctaagttgtgtattactgagtcttggagtcatctctgagagcaaatgtatgttcctgaaaagctaattttacacctcatttactgtagataacagaacaacctcaatttttcaaatttttgaagttttatttatggggctagaattcccatgcatagagaatatgtgtagggagccagaaactctttctatgaaatgctatacaaatctttccatatgtgggttcactatcatccttcagttttagcactggcatttgcaaagccagaacaataactgaagaatgtacaataaaaactagaatgctggggtcccactttttgttcttacatttactgctgacccaggtatctttggcccagtcacttaacctctctgtgcctcagtttcctcatctgcaaaatggggttaaaatgctttttcataaagttttatttgcaattttagaacaagaggtgcttaaagtagcacaatgtgctttgtaattattacaagtgctgtattatttgactttcttgtgttgttgacaaaaagattccctcatgtaataaaatagtgcttcagtttggttaaatttaagcactatagcactgaagcttgcttatcaagctacttgggacattattagcaataaaaattgagagattcaaaaccaggatctttaataatctataggaaatagatcatctcatgctattgaacaagatagaagagtgtgtcatttctatgataagcatctcccagctctcttgattgcatatgcatgccatcatacagaaccccacttttaccacaggagagccagtcattaaacaaaggcttggagcaaactgacagtatcacataattagcttgattatcttttattctggaggaaagccaggtggtatgccctactgggaagatacaaaacagactatcctgctgtattcttttttttttttttttttgagatggagtcttgctctgttgcccatgctggagtgcattggcacaatctcggctcatggcaagctccacctcctggattcaagtgattctcctgcctcaacctccctagtagctgggattacaggtgcacaccaccacacctggctaatttttgtatttttagtagagacagggtttcactatgctggtcaggctggtctcgaactcctgacctcaagtgatctgcctgcctcagcctcccaaagtgctaggattacaggtgtaagccactgtgcccggcctcctgctggattctttattcaactaggtaggttccagattaaatatgagccatatgctcattaggcaagaaatgtgaaagagggtgcctctacagtgttggtgacccaacactagccaacttgagtcagaaaatatggaagaggataaattactctcacatatctaagacttttccatttttcttcactttctgttgcagggcccatatgagtaaatctatattccgtctgctccaacacacaccttccttctcttaattttgctttcccacccaccaagaaatttgtaagtcaaaatttatttccatgagtaactatttctaaatgattgaaaatttttgaaaaagtggtatggtttatatacctaatctgcttatctgctataagtcatatgagaacaacagctaggatgattgtccaagcagctttagatgtgtttagggccaggcaaaaggtttgcttgttttttctttttgcttaagatctgggagattagcaaatttctcaagactatagactgaactgtaatttttaccaactcttgctcatgagcctcaaaatgaatatatccttgaataaagtataaatatttcaatagatacatctctctattatccattttcacaattataaaagcatcagcaaaattgtggatatgtgttccagtcactcatggatccatggaaatggaccgtgtttaaatgaatgcttcccttggatgggatgttcagcaatagc

SEQ ID NO: 144740 - DNA, 9272 bp, Homo sapiens
  Payload ID: 8599
  Gene Symbol: JAKMIP2
  Gene Name: janus kinase and microtubule interacting protein 2
  Uniprot ID: Q96AA8
  ENST ID: ENST00000616793
  CDS Start-End: 542-3004
tggcaaccagcagctgccgggccagcagcctctaccgcagcaggggtggggcactgggggagggggagagagagaggaggagccagaggaggtgtctgctgcaagttcctggctgcttccgagctcaccccatcctccgagagggaggaggcccaactggtgatgctgctgctgctgctgctgccgccgccgccgcctctattgctgatactctagtggggctggaagggtggttcctattcgcaccatcgccaaccagagacagagggaaaaaaaaaaccggcagccactgctgatgttgggttcggaggctgcatccgactcggtcacaaggaaaatggattcagtttgcatctctccctcctttaaacagcttctccgggtctcagcatgggcttccagggcagcgattgaggagaccttaccaaggagcaccacacagtagatgctgagacatcgtactccaggataagaaacagtaacatggcagcacctgcttgaaagaaattaaaaaccaacagactccatttagaaaggaacaatgtccaagaaagggcgaaataagggcgagaagcccgaggcactcattgttgcccttcaagctgccaatgaagacctcaggaccaagctcacagacattcagatagagctgcatcaagagaagtccaaggtatcaaagcttgaaagagagaagactcaagaagcgaagaggattcgtgagctggagcagcgcaagcacacggtgctggtgacagaactcaaagccaagctccatgaggagaagatgaaggagctgcaggctgtgagggagaaccttatcaagcagcacgagcaggaaatgtcaaggacggtgaaggtacgtgatggagagatccagaggctcaagtctgctctctgtgctctccgcgacggcagcagtgacaaagtaaggacagcgctcaccattgaggcccgggaggaggcccggaaactgtttgacacagagcgccttaagctcttacaggaaattgcggacctgaaaacggccaagaagcaggtggacgaggctctgagcaatatgatccaagcagataaaatcaaggctggggaccttcggagtgagcatcagtcccaccaagaagccatctcgaagatcaagtgggagtcggagcgggatattcggaggctgatggatgaaatcaaagccaaggacaggatcatcttttccctggaaaaggaactggagacccagacaggctatgtacagaaactccaacttcagaaggaggctttggacgaacaactctttctggtcaaggaggctgagtgcaacatgagcagcccaaaacgagaaattccaggaagggcaggtgatggttccgaacactgcagcagtcctgatttgcgaagaaatcaaaagagaatagctgaattgaatgccactataagaaaattagaagacaggaataccttgcttggagatgaacgaaatgaactgttaaaacgtgtgcgggaaaccgaaaagcaatgtaaacctctcctggaaaggaacaagtgcctcgccaagagaaacgatgaactgatggtgtccttgcagcgcatggaagaaaaactaaaagccgttaccaaggaaaattcagaaatgagagaaaaaataacatcccatccacccctgaagaaattaaaatctctgaatgacctcgaccaagctaatgaagaacaagaaacagagtttctaaaacttcaggtcattgagcaacagaacattattgatgagctcacaagggaccgagaaaagctcatccgtagaagaaagcatagaagaagttccaagccaattaagaggcctgttttggacccgtttattggctatgatgaggactctatggattcagagacatcatccatggcctcatttagaacagacagaacaccagctactcctgatgatgacttggatgaaagtttagcagctgaagaatctgaactaagatttcgacaattaacaaaagaatatcaggccctccaaagagcatatgccctcctacaggagcagacgggaggcatcatcgacgctgaacgagaagccaaggctcaagaacagctccaagcagaggtgctaaggtataaagccaaaattgaagacctggaagcgactctggctcagaaagggcaggattcacactgggtagaagataaacaacttttcattaagagaaaccaggagcttttagaaaagatagaaaaacaggaggcagaaaatcaccggttacaacaagaactacaggacgccagagaccagaatgagctgctggagtttcgaaacctagagctagaagagagagagagacgatcccctccatttaatctccaaattcacccattctcagatggtgtgagtgctctacagatctactgtatgaaagaaggtgttaaggatgtgaacatccctgatctcataaagcagcttgatatcttgggtgataatgggaatttaagaaatgaagaacaagtggccataattcaggccagcactgtgctgtccctggcagagaagtggatccagcagattgaaggagctgaggctgccctacaccagaaaatgatggaattggaaagtgacatggaacagttctgcaaaataaaaggctatctggaggaagaactagactacagaaaacaagctcttgaccaagcatatatgagaatccaggaactagaagctactttgtacaatgctctacagcaagaaactgttatcaagtttggtgaattattaagtgaaaaacagcaagaggagctgaggacggcagtagaaaagttacggcggcaaatgctgaggaagagcagagagtatgactgtcagattcttcaggagagaatggagctcttacagcaagcccatcagagaattcgtgacttagaagataaaacagacatccagaaaagacaaataaaagacttagaagaaaagtttctgtttctattcttgttcttctctcttgcctttattctatggccttgatgtcaaggtgcctcttaaagagtaaccgaaaacatggataagatcccaggaagacaagtgcttctaaaccttcaaagatggcaaaattgtttacaccagtgagagggagatcaaaagctaagaactaccctgtagccaggactacaactgtgtattttaaagccattattcaaggtttcttacttgacagttcctacacaaccctgttgaaaatctacaatatatgctgcatttaatgaaacatgtatatgtcaaatcagaagagaagaactataaacatatattgtgtaaagaaaaagttcagcaatggaactagtttctgcagatcaagcaaagatgtgtcttgggcatggaaccaaagttacaatgaaatattcaacccctgctgtgcaggggggtcattttaatgtaacaccacaccccatggaaacactagtcctgataataaacatcattttaaaagatcaaaacaaacaaacaaaaaaaacaagggtgggtggggagtgaagcacgaggaatacctatgaagagctatttacaataaaatgtttcatttgaaaagtctggtttcttactacagggatttgcttttctgtctttatgattgttttaaactcaggaacagagacatccgcatcgtaaatgggaagaaaaacactctctgttttgtttttctgcaaaaggtggagcttgtggaattcattccacagacgacagatgagaagtggatcacagtgaccacaacaaaactggtaacgaagtcaaaggacccgagcgaatgtgacatgtgaaataaaagcagattcgatgcttccttgtcctactctcacatctgcattcctctatcaacaatggactgatctcattcatattgaaaactaagaagatgatactgtaaatcacatgctccctgacttagttctgtttagaacgccaacatctatagggaacatgggccagagagcatctctgaatctttcatttccaaaatactgtttttcaaatggctgcttaaaattgcctgcaaatgaatatgctatatgatttgggcaaaaacacagcagaatcaatgagtaaatttctaccaagagtcgggtttgccacagagatgtgaatattaaactaaactattattttttaaagaatcctcacatgcctagagcattctgacctcttcttgtttagagtgataacattttttcccagacagatgacagcaacaagatagctctacttttttatatggaaataacattatgttactgacaaggtcattttctaccagagacaattagaggactggtacttttcctaagttgtgtattactgagtcttggagtcatctctgagagcaaatgtatgttcctgaaaagctaattttacacctcatttactgtagataacagaacaacctcaatttttcaaatttttgaagttttatttatggggctagaattcccatgcatagagaatatgtgtagggagccagaaactctttctatgaaatgctatacaaatctttccatatgtgggttcactatcatccttcagttttagcactggcatttgcaaagccagaacaataactgaagaatgtacaataaaaactagaatgctggggtcccactttttgttcttacatttactgctgacccaggtatctttggcccagtcacttaacctctctgtgcctcagtttcctcatctgcaaaatggggttaaaatgctttttcataaagttttatttgcaattttagaacaagaggtgcttaaagtagcacaatgtgctttgtaattattacaagtgctgtattatttgactttcttgtgttgttgacaaaaagattccctcatgtaataaaatagtgcttcagtttggttaaatttaagcactatagcactgaagcttgcttatcaagctacttgggacattattagcaataaaaattgagagattcaaaaccaggatctttaataatctataggaaatagatcatctcatgctattgaacaagatagaagagtgtgtcatttctatgataagcatctcccagctctcttgattgcatatgcatgccatcatacagaaccccacttttaccacaggagagccagtcattaaacaaaggcttggagcaaactgacagtatcacataattagcttgattatcttttattctggaggaaagccaggtggtatgccctactgggaagatacaaaacagactatcctgctgtattcttttttttttttttttttgagatggagtcttgctctgttgcccatgctggagtgcattggcacaatctcggctcatggcaagctccacctcctggattcaagtgattctcctgcctcaacctccctagtagctgggattacaggtgcacaccaccacacctggctaatttttgtatttttagtagagacagggtttcactatgctggtcaggctggtctcgaactcctgacctcaagtgatctgcctgcctcagcctcccaaagtgctaggattacaggtgtaagccactgtgcccggcctcctgctggattctttattcaactaggtaggttccagattaaatatgagccatatgctcattaggcaagaaatgtgaaagagggtgcctctacagtgttggtgacccaacactagccaacttgagtcagaaaatatggaagaggataaattactctcacatatctaagacttttccatttttcttcactttctgttgcagggcccatatgagtaaatctatattccgtctgctccaacacacaccttccttctcttaattttgctttcccacccaccaagaaatttgtaagtcaaaatttatttccatgagtaactatttctaaatgattgaaaatttttgaaaaagtggtatggtttatatacctaatctgcttatctgctataagtcatatgagaacaacagctaggatgattgtccaagcagctttagatgtgtttagggccaggcaaaaggtttgcttgttttttctttttgcttaagatctgggagattagcaaatttctcaagactatagactgaactgtaatttttaccaactcttgctcatgagcctcaaaatgaatatatccttgaataaagtataaatatttcaatagatacatctctctattatccattttcacaattataaaagcatcagcaaaattgtggatatgtgttccagtcactcatggatccatggaaatggaccgtgtttaaatgaatgcttcccttggatgggatgttcagcaatagcaaaaaaaaaaaaaaaaaagttatcaataactgagatttcctgtggccccacttctgcatctgtactaccgagatgcatttggctactgagtttgtagcagtcagaacagcattcttccgggttcattaacttaatttttctcaataaaatattcataccctggaaaataaacataactgactactaaagataatttgagataaataaaagacccaatttaaatagttattcaggatagaaaaatttcatgaaagaggggaaaaacatagagagactatctttgactatcatacttaaaaagcatctattactaaattgaatgtcaaacttttctttaatgccaccctacttttaggaaatagaatttgctgaaaaaaattacaacccttctgacttatgctatataaattaaattattaccaacagttaggttttaggggtggaagaatagatcttgatttaatttttttttttttttttggcccacaaataactgctcatacaggttgtatgtgtcttcccaagtccataaggtagagctgatatagaaggcctgggttatcacttaggtagagagcaaatgtgttctccactagtaataggagaaataaagtttgccaaataaattttgctgcagtattttgtttcaactttgctttcaattttaaataaatctctggcaaacttgttcctttttgcccattgactgtcaaattttcctgtaaacccattgtgtaattcttatgtttgctttaacataattcacaagttcattgtttcaaaatgaagcacgtctttttaacctgcctaggtttttgtagaaactgtaaaaagaatattcattggttttgtgttgatgtttaaataattggatcatctgtgttatattacatcaagatagatggacagcatagaaattttatttttaaaatatttaattgcattatttcaatctgtcaaagagtggcacagaatacacacacaaacacacacacacacacacacacacacagagcaatagaaatttgctctgtaatttgggagttgcattgcttgttgccttttgtgaaattttcataacagtgttttggtaattaatgacagcttttggcagtttaattctatcattttactaatttagatttatctattacattgaaaaaattcaatataacttttgaatgataaacattcaaagcaaatcttagatgactgtttatgtcatgagtttatgcttccaatatggacccaagcccctctttaagcagacttctaggtcttaagtgaggaaagatgtcattgtgttctactgccttgtcatttctatataatgtagtatcttgagatctaatttcaggcatattggcaagaagatacagacataatggaaagttggagctaatccctgtaaggcctcttcaagtgccaaattctattattccatttcagaatggggcagggcagattcacaatcctttgctgtcattagtttggcggtttagttcttcctaaataaatctcttgctgggagtccaagtccaatgcttaatcaaaattcctaaagatagctactcagaaggctaaggtggcaggatagcttgggcccaggagtttcataacggcctgggcaacatggtgagacctcatctcaaaaaaaaaaaaaaaaaagaaagaaagaaaagagggagagaggaaaaaaactactaaagatatacttataggggcaatgtagcaaaaataggattataatttcctatattcaaattaatgtggcagagatacacgtggttgatttggtgagggttcctgtttttgtttttttctgcattacggtctttgtacccatgcttatattttcatccttgttatatgcaaagttctgtagggtgagaatggtaaagttaaacaactttgagcccaattttgcccacaatcaagatcccacgaacttactaaagagtggatgatgcaattttccaactaaaacagatccccagcatctgttagtaacaacacttctatttgactgacatctcacagactgtgcctataccagccattaaccatagcaacttcccacaatgaggcagatcaaaatccaaacatttttataaatatgtgatgtaaatatatgcacagatatattctgtacatagtatgatggtgtgagcgcttactaaacgtgtacttctgttctaggatgcaggacttcaagaaaggttttttctgcgctgctgctgcttctgctgggaactcatgtttttgtcgagcatttagtgtttgaactcttcccatccttgactacctcttctctcccttaccccaccttctgttcactactattatttccaattgttgactgaggcagagaccactcggtttttcaattatccaggcccataaaccagcaaataggttttttttatttgtttggttggttggttgatgtttcttttttttgaaagagcaacagaaagttcagcacaatctacagtattaaaattagccaaaagtcccatatctttattagctaaaaattccatctcaacagggttcatgcatgttttagccttcaagatccaatactttggggactcaagtatagagctaatgtgtttgaatacataattccccaggtgtttactgtgttaatgtagccaagggtccaatttcacagagctttcattcaatcaactgcctcaattggggttctttctttccatctcattagcatgactccatatatcacttcagtgcttgtttattaatgaaagaaaaataaaaattgactgagtttcaccagaatgatcctctgaagtacaccgaatatgtacatgtactgtatgtattaccgtagagattggaatcaacttactgtatgtaaagttttatgaatggttattttataatttatgtatttaatataggaatcgatgaactctggtgttttagtttatataaaaataaaacaagctgcattttttaaaa

SEQ ID NO: 144741 - DNA, 6626 bp, Homo sapiens
  Payload ID: 8600
  Gene Symbol: JAKMIP3
  Gene Name: Janus kinase and microtubule interacting protein 3
  Uniprot ID: Q5VZ66
  ENST ID: ENST00000298622
  CDS Start-End: 139-2673
ggtgaatgagaagatgtagtgtgacagcagcccgggtgacacctgctgggagcttggcgtggacaccccagccacccccagcccagcccagccggagcaccctacccctgggcatccccctggccatccagcctcaccatgtccaagaggggcatgagcagccgggccaagggggacaaggcagaggccctcgcggcgctgcaggcggccaacgaggatcttcgagccaagctcacagacatccagatcgagctgcagcaggagaagagcaaggtcagcaaagtggaacgcgagaagaaccaggagctgcggcaggtgcgcgagcatgagcagcataagaccgcggtcttgctcacggagctcaagacaaagctgcacgaggagaagatgaaggagctacaggctgtgcgtgagacgctgctgcggcagcatgaggctgagctgctcagggtcatcaagatcaaggacaacgagaaccagcggctgcaggcactgctcagtgccctgcgtgatggcggccccgaaaaggtcaagaccgtgctgctgtccgaggccaaggaggaggccaagaaggggttcgaggtggagaaggtcaagatgcagcaggagatctccgagctcaagggcgccaaaaggcaggtggaggaggcgctgacgctggtgatccaagcggacaagatcaaggccgcagagatccgcagcgtgtaccacctgcaccaggaggagatcacccgcatcaagaaggagtgcgagcgggagatccgcaggctgatggaggagataaaatttaaagacagagcagtcttcgtgctggagagagagttaggggttcaagccgggcatgctcagagactgcagctccaaaaagaggctctagatgagcagctgtcccaggtccgagaggccgaccggcacccgggcagccccagacgggaacttcctcatgcagctggtgcaggagacgcttcagaccactcgggaagccctgaacagcagttggatgaaaaagatgcccggcgcttccagcttaaaatcgcggagttaagtgcgattatccgcaaactggaggaccgcaatgcattgctgtcggaagagaggaatgagctgttgaagcgcgtaagagaagctgagagtcagtacaagcctctgctggataaaaacaagcgcctcagtcggaagaacgaggatttgtctcatgctttacgccgaatggaaaacaagttaaaatttgtcacccaggagaacatagaaatgagacagagagctggaatcatacggagacccagttccttgaatgaccttgatcaaagtcaggatgagagagaagtcgatttcttgaagcttcagattgtggagcagcaaaacctcatagatgaactgtctaagacccttgagaccgccggctacgtgaagagcgtgttagagcgggacaagctgttaagattccggaagcaaagaaagaaaatggcaaaacttcccaagccggtggttgtggagaccttctttggatacgacgaagaggcttccctggaatccgacggctcctccgtctcttaccaaacagacaggacggaccagaccccgtgcaccccggacgatgacttggaggagggcatggccaaggaggagacggagctgaggttccggcagctgaccatggagtaccaggccctgcagcgtgcctacgctttgttgcaggagcaggttggagggacgctggacgcagagcgagaagttaagacccgtgagcagctacaagccgaagtgcagagggcacaggcgcggatagaggacctggagaaggccctggcggagcaggggcaggatatgaagtggattgaagagaagcaggcactgtaccggagaaatcaagagcttgtggaaaagatcaaacaaatggagacggaagaggctcggctcagacacgaggtgcaggacgccagagaccaaaacgagctgctggagttcaggatcctggagcttgaggagagggagaggaagtcacccgccatcagcttccaccacacgcccttcgtggacgggaagagccccctccaggtgtactgcgaggccgaaggtgtgacggacattgtggttgcggagctgatgaagaagctggacatcctgggcgataacgccaacctgaccaatgaggagcaggtggttgtcatacaagccaggacagtcctgaccttggccgaaaagtggctccagcagattgaggagacagaggcggcgctgcagcggaagatggtggatctggagagcgagaaggagctgttcagtaagcagaagggctacctggacgaggagctggactaccggaaacaggccttggaccaggccaacaagcacatcctggagctggaagccatgctgtatgatgccctgcagcaggaggccggggctaaggtggctgagctgctgtcagaggaggagcgcgagaagctcaaggtggccgtggagcagtggaagcgccaggtcatgagtgagctgcgcgagcgggacgcccagatcctgcgggagcgcatggagctgctgcagctggctcagcagagaattaaagagttagaagaaagaatagaagctcagaagagacaaataaaggaactggaggaaaagtttctatttttgttcttatttttctccttagctttcattctctggtcatagtccgtcttggcaccctgacgtgccccacattgaatcggacccttttcctccagtgggaccagaaagcagggacaaaatgggacgtcgcgtctccatcctgaagacccagggagatttggtctctgcacgcccgtcccgtggaggaagagtgagaaggggcagtgtgtggggcgtggagctgccgtccacgtgggatgtgccagaactagaactggctctgccgacttctcgggggcttctccgggacgggcctggccttggctgctggaccctgggtcccttctcccggacggcagcccccatcccatttccagggatgtgtagcattccctgccaagcaggggtgagaactgcttctgtgcagaagcaccagccgcgggtcccctcctctctcttggttctcacagtagctgccactggtgtctggaggaagattttcagaaacaacagaggcttggcctgatgacaagatgaaagctggacggtgaccttcattcaggggaacctggaggctccctgggatggtcctgggagggctccccgacgcctcaggggcccctccgatgctgcaatatgttgctggggtcctgagcacccgctggccaacagaccccacatccaccctcgttcatcatcatctctgtggggacagacaagagccgtggccgccgcgggccgcgtggtgccatcaaccctctgcctccctactcaacctgagacaggaaggccaagatcccgcccaagccgccagctgggagcaccgcgggactgagccaaggaaggcgtggggagcgtggtgacaggaggtgggacgagggggcggagctggctggaacacggatgccagaggctgcctccatagtgaatctccagaagtcacagaggccctgggcacccagagccacccagcctggaagcccctgcacgggccagccctgcaggccatggaccccggcgggcaccgaagcctcaccccaagcctttgcacacaaggagcagcccaggtggggatggcgggcgcaagaagggaaccgcggggacggcctttcccctcccgccctgtgtggggacgctgcacgagccgtggaccaagaggctgacaggaggggtccgcagcgaggaggaggtgcgaagggggcggcggctccgtcttgcaggtcccctggggcgcgttcttcaggtgcgtggtggacgaggcggcgtcctcgcggggtcgggacctgggtacccagcagcatctggctcctgcatccaccaagggcgcccaggcacagcctcaggccagaaggttcgctgcagaggttcattctagaaggagcgggagaccagcagtcccagccctgtccaaggacgcccgctgcttggcacacgagggcgccgcaggcccaccatccctcaggacatggctgccgagtccccagagacttctggtcccacagcaagagctggagctccaagcataacatctctaactgtgcggcaaggacagcgcagccagagagaggaagcagtgcattggtgaaggcaacgttaggtgtgatttccattcctgctgggagacccgggacgcagcccgggagcttcgtccagcctgtggatggagcctgactggctgcagatggaacttctgtgtcctcccaccctaggtgggctaaggttctgctctcagagctgaattgacaggaggtgtgtgtgtgtgctcacttgtgtgcacaagcatgcgtttatgcatgttttcacgcaaccagaagagccattcgtgggatttagccatttcgaggcacctagaagttgaggcagccagctgtgcagccaggtgtgactgttactggcagcattgtataaaagacacgactcagctgccgtagggaggactgggttgtctggaagtattaggctcattttatatttgtgtcagaagaaatgtctgactttggggcagatgacacggtggctgcggaccaggcatggctccctaggttgaaatcagggaaaagctaatagtatcagacagatatgctttttctttggtggctgcaggatttttgctggaaaatgcactattaatcagcacttgtccaagaaagacccatccatttctgttgtcattcaagccacagttcctgatttactcggcaagatactgggccagttcagtgtctctagctgagcctgacctcggggtttgcgtctcgagtctgaaatcctgtttagtcctctgtgcatagttttgtctcattttaacgactgcatcttcttggcacatttattatactcacaactgaatggcacacaatagccttgtgttaataaaagctaccgtggcgctgtgggtgaaccgctgggttgaagtccgatggactctacgatgcaggcatccagaaatatgttgtaactctacctggctccctgccagcctggcctcctcctctgggagagctcctggcatggtcccaatgtgtacctgcatgggaacaacagctgcatgggccagctgtttcggatctaaagatgtgcagtgaaactcacattcccagattcacatccctcatgtttatttgggtcatcatggtttagcatgttgtatatatgtctggagcacttcatacacctctatccaccacagacactcttaatcacagttctgtaataataataaggcaaactatacggcaaagagaagcatgtaaatatgtaccaaatccttatgaagttgtaattgtttatatgtaaaaagtatgtatataggaacgggagaaggtgcaaggaatgtgctgaataacatccaaactgcatcgcgtctctgccccattcctgaaagcacacatctagttggagcgtcagttcctctccttagatatcattgttttcactcgtctatcataggcaccttctttacatctgattacaatacccagcatttcagaactgggtttttgcccccaaaaaggtaaatatgagcatttatcactgactcctcctggtccagtgagcagcagcagaattcaagtatttaaaaataaggtgcatttctaaattgcaggctataccttcttttccaaaccaatgggctagagtgaatttcctccaagtacttgggctgtcttactgctagctcttctaacaggggaagtctgtatgaatgcatcaccccctaataaggcaagaggaaggaccctgaaatgttgccagaaatgtactgttacatcaacatttacattatattaacatcatcacactctgtgttcaacacacagaacaacatagatactttagtttgtctaaagtaaaaatccacataaatagcagattcctttgttgacaccagtgtgttgtttaccttgtgcccatggtccagattttgagctggagaaggactatggctgttccttaaagtctctgcccttgcagaatctgtagccttcaggataccccgagtgccttacagggcttgtgaacaccgatactagaagtcaaaaagaagagagtgcccaagtgtgggtttggaggcactgacgcattcgccaactcaccgtcatcccatccttgaaaccctgagagagagtgtgtgttttatcacagtaatggaattcagtttagcctcaggaaactcatattgtgaatataggtatcaaatcatatatttgtttactgtatattttttaaaaagctttattgtaaatttatgcaaaaactaaccgggcctgttttcttacggcggcatgccaggtagtgtgtgtattctcccaggcactcccttcatagtcaccctctaaccacgtgacattccgttccatgctaagcagtattcacaggcctaaaataggtttgtatggtgatctacaagattttacaaatatttttgtattgtgattcctatgatatataccagagaattttttactcgtttgtaaattattgtacagttttaataaaaaatgttttaaatctta

SEQ ID NO: 144742 - DNA, 3125 bp, Homo sapiens
  Payload ID: 8601
  Gene Symbol: JAZF1
  Gene Name: JAZF zinc finger 1
  Uniprot ID: Q86VZ6
  ENST ID: ENST00000283928
  CDS Start-End: 167-898
atctctctcgccccctctccctccgtcccgtcctcgccgctcccctcaccccgcctctctccccctcccccagcccctcctctcctcaccccacccggcctccctccctccctcgcccgcccggcgctcgcagagccgacaccaggggggctctcgatgtagcaccatgacaggcatcgccgccgcctccttcttctccaatacctgccgattcgggggctgcggactccacttccccaccctggccgacctcatcgagcacatcgaggacaaccacatcgatacagatccacgggttttagaaaaacaagaattacagcagccaacctatgttgccctgagttacataaatagattcatgacagatgctgcccgccgagagcaggagtccctaaagaagaagattcagccgaagctctcgctgactctgtccagctcagtgtctcgagggaatgtgtccactcccccacgccacagcagtggaagccttactccccccgtgaccccacccatcaccccctcctcttcattccgcagcagcactccgacaggcagcgagtatgacgaggaggaggtggactatgaggagtcggacagcgatgagtcctggaccacagagagtgccatcagctccgaagccatcctcagctccatgtgcatgaatggaggggaagagaagccttttgcctgcccagttcctggatgtaaaaagagatacaagaatgtgaatggcataaagtatcacgctaagaatggtcacagaacacagattcgtgtccgcaaaccattcaagtgtcgctgtgggaagagttacaagacagctcagggcctgcggcaccacacaatcaatttccatcccccggtgtcggctgagattatcaggaagatgcagcaataacatgctggtcataactgtgccaagaaatcctcaccagcagttgctgattttgaaaacagccaccttttttcaggggaagcattcagcaaccctttaaagaaaaagaattaaatgcatgctttaaattttttctgtaattttggaatgatgtatctttgtagagttaatgattttgtacatttgcacatgtaatcatcatacccattttcattactttgatataaggtgctaaacaaaaaaagctctaggttcttcagcacatttcccccaaaacaaaataaaattgagggcatgttgcatattgttgaattgtattgcggtggtatcaacctggggggaggaggggctggcactgagatttttttttcaagattgtaatgtgattgaagttttcaacacatcaactcacatatgttcaaaaccaaaataataccttcattatcaaactggttaccatgccttacataatggagttagtatttgtgagtagaaagactttaggtaatggaaatataaataagaaagaatgtttaacataatatgctaaaaatattttcatatttaaataacatacgtaaaggtgtgctttctgtgttttatattatcttgcaaatccttttgccctttaaaaagctgaaaatcttgccatctgacttactagtcattttagtgttataaatggcattttgtacaaaatagtctattcagttcgttcattcatttaacacacattgattgagtgcctgctgggtacaagggattcaatttatgcctattgatatctgcggaccaagatacccatttagtgaaatacttttttccctgaaatctgttagaaaagactttgaaatacttcagtgcaaagtgtgtgtgtgtgaagtttagttatatcttcatcttcagatgaagttttaaagcactttgtagttctctattgccaacaatttaatgtttatgtgttgccaattcttgcaaccactgccctaccaaacctgtgggttgcaaatcagaactaaaattctaagcacgtttcaaagatgaacacttttgttaagacccctattgcctcttcttcatgctcattttttactttttttaaaaggtacttttctcatcacattgtagagaggtctgcattctcattggaaatgtctgtttagctttataaaacaaacactttgctgaaataggaaaatgagccttattgacaattaagtgcttcttgcagcaggtggtcaaagaaaagcatgactaatacgacctattagagtaatctacatctggaccattccttaagtttttcctcaccgacagtaccatcatgccttgagtgttcttttctcccaagtgctattccttaaacacgagagtttaccagttgcctaataatgcaataaaaaatgctttgagatagctaactgcccataaaacaaactcaaattgcttataaagtttcttcccatgttcccatttgatgaaaagtcttacatcacatataactgggaagcaggggtccctcctcaattttcagacattttgaaaggatgacagttctgtttgttagatgagtaaacctctatattcataagttctaaaatccttcattatgagggattcaaagtatttataaaaacactgccctctaaaaatttcctcagatctgaagtatggtcttggtcctgaatatacagtgttatcctatgtttaaaagggtgatccagacatgagacgcaactagttggtgcataagaaggccccacttggctatttcatatctacctacaattgaccaaaaaaaattttttaggccagcaattattatttagcttcgctctttctagtgcaagaaactgcaggctggatcagtagttcaacagctaaacagtcataaaatagtcattgtgcatgttaaatttctttcaatgctttcaaagataaattccaatttctatttacttattcattgtgacagtattactaaacaggtaaggatgggaatattttgttatactgtgtatagtgaatgtattgtactgtgtctgtgaaaactgtgctttaaattatattttcatatgttttgttggggacagagcacattaagtctgaaagcaacagaggtttgttttagaactgaaggcaatttaatcaaaattcctgtcaagaaaagctgcttataaatgtaaatgaaatcacatttaaaataaactgcctctgacccaaaaataaa

SEQ ID NO: 144743 - DNA, 571 bp, Homo sapiens
  Payload ID: 8601
  Gene Symbol: JAZF1
  Gene Name: JAZF zinc finger 1
  ENST ID: ENST00000430432
  CDS Start-End: 52-571
taatcagctgtaagtgccgtcactggatagaaggtccgtccttgggtctgtatgtgggtggcaaatgatacagatccacgggttttagaaaaacaagaattacagcagccaacctatgttgccctgagttacataaatagattcatgacagatgctgcccgccgagagcaggagtccctaaagaagaagattcagccgaagctctcgctgactctgtccagctcagtgtctcgagggaatgtgtccactcccccacgccacagcagtggaagccttactccccccgtgaccccacccatcaccccctcctcttcattccgcagcagcactccgacaggcagcgagtatgacgaggaggaggtggactatgaggagtcggacagcgatgagtcctggaccacagagagtgccatcagctccgaagccatcctcagctccatgtgcatgaatggaggggaagagaagccttttgcctgcccagttcctggatgtaaaaagagatacaagaatgtgaatggcataaagtatcacgctaagaatggtcacagaacacagattcgtgtccgcaaac

SEQ ID NO: 144744 - DNA, 2919 bp, Homo sapiens
  Payload ID: 8601
  Gene Symbol: JAZF1
  Gene Name: JAZF zinc finger 1
  ENST ID: ENST00000427814
  CDS Start-End: 1-692
gttactttgtgttaggtagcctcatatattctgatgcaaaatctaaaaaaaatcgtaattgtgtttttattacagatacagatccacgggttttagaaaaacaagaattacagcagccaacctatgttgccctgagttacataaatagattcatgacagatgctgcccgccgagagcaggagtccctaaagaagaagattcagccgaagctctcgctgactctgtccagctcagtgtctcgagggaatgtgtccactcccccacgccacagcagtggaagccttactccccccgtgaccccacccatcaccccctcctcttcattccgcagcagcactccgacaggcagcgagtatgacgaggaggaggtggactatgaggagtcggacagcgatgagtcctggaccacagagagtgccatcagctccgaagccatcctcagctccatgtgcatgaatggaggggaagagaagccttttgcctgcccagttcctggatgtaaaaagagatacaagaatgtgaatggcataaagtatcacgctaagaatggtcacagaacacagattcgtgtccgcaaaccattcaagtgtcgctgtgggaagagttacaagacagctcagggcctgcggcaccacacaatcaatttccatcccccggtgtcggctgagattatcaggaagatgcagcaataacatgctggtcataactgtgccaagaaatcctcaccagcagttgctgattttgaaaacagccaccttttttcaggggaagcattcagcaaccctttaaagaaaaagaattaaatgcatgctttaaattttttctgtaattttggaatgatgtatctttgtagagttaatgattttgtacatttgcacatgtaatcatcatacccattttcattactttgatataaggtgctaaacaaaaaaagctctaggttcttcagcacatttcccccaaaacaaaataaaattgagggcatgttgcatattgttgaattgtattgcggtggtatcaacctggggggaggaggggctggcactgagatttttttttcaagattgtaatgtgattgaagttttcaacacatcaactcacatatgttcaaaaccaaaataataccttcattatcaaactggttaccatgccttacataatggagttagtatttgtgagtagaaagactttaggtaatggaaatataaataagaaagaatgtttaacataatatgctaaaaatattttcatatttaaataacatacgtaaaggtgtgctttctgtgttttatattatcttgcaaatccttttgccctttaaaaagctgaaaatcttgccatctgacttactagtcattttagtgttataaatggcattttgtacaaaatagtctattcagttcgttcattcatttaacacacattgattgagtgcctgctgggtacaagggattcaatttatgcctattgatatctgcggaccaagatacccatttagtgaaatacttttttccctgaaatctgttagaaaagactttgaaatacttcagtgcaaagtgtgtgtgtgtgaagtttagttatatcttcatcttcagatgaagttttaaagcactttgtagttctctattgccaacaatttaatgtttatgtgttgccaattcttgcaaccactgccctaccaaacctgtgggttgcaaatcagaactaaaattctaagcacgtttcaaagatgaacacttttgttaagacccctattgcctcttcttcatgctcattttttactttttttaaaaggtacttttctcatcacattgtagagaggtctgcattctcattggaaatgtctgtttagctttataaaacaaacactttgctgaaataggaaaatgagccttattgacaattaagtgcttcttgcagcaggtggtcaaagaaaagcatgactaatacgacctattagagtaatctacatctggaccattccttaagtttttcctcaccgacagtaccatcatgccttgagtgttcttttctcccaagtgctattccttaaacacgagagtttaccagttgcctaataatgcaataaaaaatgctttgagatagctaactgcccataaaacaaactcaaattgcttataaagtttcttcccatgttcccatttgatgaaaagtcttacatcacatataactgggaagcaggggtccctcctcaattttcagacattttgaaaggatgacagttctgtttgttagatgagtaaacctctatattcataagttctaaaatccttcattatgagggattcaaagtatttataaaaacactgccctctaaaaatttcctcagatctgaagtatggtcttggtcctgaatatacagtgttatcctatgtttaaaagggtgatccagacatgagacgcaactagttggtgcataagaaggccccacttggctatttcatatctacctacaattgaccaaaaaaaattttttaggccagcaattattatttagcttcgctctttctagtgcaagaaactgcaggctggatcagtagttcaacagctaaacagtcataaaatagtcattgtgcatgttaaatttctttcaatgctttcaaagataaattccaatttctatttacttattcattgtgacagtattactaaacaggtaaggatgggaatattttgttatactgtgtatagtgaatgtattgtactgtgtctgtgaaaactgtgctttaaattatattttcatatgttttgttggggacagagcacattaagtctgaaagcaacagaggtttgttttagaactgaaggcaatttaatcaaaattcctgtcaagaaaagctgcttataaatgtaaatgaaatcacatttaaaataaactgcctctgacccaaaaataaa

SEQ ID NO: 144745 - DNA, 503 bp, Homo sapiens
  Payload ID: 8601
  Gene Symbol: JAZF1
  Gene Name: JAZF zinc finger 1
  ENST ID: ENST00000454041
  CDS Start-End: 56-256
ctcgcccgcccggcgctcgcagagccgacaccaggggggctctcgatgtagcaccatgacaggcatcgccgccgcctccttcttctccaatacctgccgattcgggggctgcggactccacttccccaccctggccgacctcatcgagcacatcgaggacaaccacatcgatacagatccacgggttttagaaaaacaagaattacagcagccaacctatgttgccctgagttacataaatagacagcggagatgagacagacctagagaagacctcccttctcgctgtcctacttgtccaaaagattcatgacagatgctgcccgccgagagcaggagtccctaaagaagaagattcagccgaagctctcgctgactctgtccagctcagtgtctcgagggaatgtgtccactcccccacgccacagcagtggaagccttactccccccgtgaccccacccatcaccccctcctcttcattccgcagcagcactccgacagg

SEQ ID NO: 144746 - DNA, 585 bp, Homo sapiens
  Payload ID: 8601
  Gene Symbol: JAZF1
  Gene Name: JAZF zinc finger 1
  ENST ID: ENST00000447620
  CDS Start-End: 41-585
aatatttataagggggattgtgcaagagtttgtgtgacagatggacattttatcactgttgatgtttggaattcccttgaaaaatacagatccacgggttttagaaaaacaagaattacagcagccaacctatgttgccctgagttacataaatagattcatgacagatgctgcccgccgagagcaggagtccctaaagaagaagattcagccgaagctctcgctgactctgtccagctcagtgtctcgagggaatgtgtccactcccccacgccacagcagtggaagccttactccccccgtgaccccacccatcaccccctcctcttcattccgcagcagcactccgacaggcagcgagtatgacgaggaggaggtggactatgaggagtcggacagcgatgagtcctggaccacagagagtgccatcagctccgaagccatcctcagctccatgtgcatgaatggaggggaagagaagccttttgcctgcccagttcctggatgtaaaaagagatacaagaatgtgaatggcataaagtatcacgctaagaatggtcacagaacacagattcgtgtccgcaa

SEQ ID NO: 144747 - DNA, 564 bp, Homo sapiens
  Payload ID: 8601
  Gene Symbol: JAZF1
  Gene Name: JAZF zinc finger 1
  ENST ID: ENST00000452993
  CDS Start-End: 2-244
catgacaggcatcgccgccgcctccttcttctccaatacctgccgattcgggggctgcggactccacttccccaccctggccgacctcatcgagcacatcgaggacaaccacatcgatacagatccacgggttttagaaaaacaagaattacagcagccaacctatgttgccctgagttacataaatagggacattgggcatcagatggagtcaaggctgaaccgatctactgtagcatcctgagaggcccctgtgtggaaatgaaagattcatgacagatgctgcccgccgagagcaggagtccctaaagaagaagattcagccgaagctctcgctgactctgtccagctcagtgtctcgagggaatgtgtccactcccccacgccacagcagtggaagccttactccccccgtgaccccacccatcaccccctcctcttcattccgcagcagcactccgacaggcagcgagtatgacgaggaggaggtggactatgaggagtcggacagcgatgagtcctggaccacagagagtgccatcagctccgaagccatcctcagct

SEQ ID NO: 144748 - DNA, 2966 bp, Homo sapiens
  Payload ID: 8602
  Gene Symbol: JMJD7-PLA2G4B
  Gene Name: JMJD7-PLA2G4B readthrough
  ENST ID: ENST00000342159
  CDS Start-End: 9-2690
acgcagccatggcggaggcggctttggaagccgtgcggagcgagttacgagaattcccggccgctgcaagggagctctgcgtgcctcttgctgtgccctacctggacaaacccccaactccgctccacttctaccgggactgggtctgccccaacaggccgtgcattatccgcaacgctctgcagcactggccggccctccagaagtggtccctcccctatttcagagccacagtgggctccacagaggtgagtgtggccgtgaccccagatggttacgcggatgccgtgagaggggatcgcttcatgatgccagctgagcgccgcctgcccctgagcttcgtgctggatgtgctggagggccgggcccagcaccctggagtcctctatgtgcagaagcagtgctccaacctgcccagcgagctgccccagctgctgcctgatctggaatcccatgtgccctgggcctccgaagccctgggaaagatgcccgatgctgtgaacttctggctgggggaggcggctgcagtgacttctttgcacaaggaccactatgagaacctctactgcgtggtctcaggagagaagcatttcctgttccatccgcccagcgaccggcccttcatcccctatgagctgtacacgccggcaacctaccagctaactgaagagggcacctttaaggtggtggatgaagaggccatggagaaggcagaggtgtccaggacctgcctgctcacggttcgtgtcctgcaggcccatcgcctaccctctaaggacctagtgaccccctctgactgctacgtgactctctggctgcccacggcctgcagccacaggctccagacacgcacggtcaagaacagcagtagccctgtctggaaccagagctttcacttcaggatccacaggcagctcaagaatgtcatggaactgaaagtctttgaccaggacctggtgaccggagatgaccctgtgttgtcagtactgtttgatgcggggactctgcgggctggggagttccggcgcgagagcttctcactgagccctcagggtgaggggcgcctggaagttgaatttcgcctgcagagtctggctgaccgtggcgagtggctcgtcagcaatggcgttctggtggcccgggagctctcctgcttgcacgttcaactggaggagacaggagaccagaagtcctcagagcacagagttcagcttgtggttcctgggtcctgtgagggtccgcaggaggcctctgtgggcactggcaccttccgcttccactgcccagcctgctgggagcaggagctgagtattcgcctgcaggatgcccccgaggagcaactaaaggcgccactgagtgccctgccctctggtcaagtggtgaggcttgtcttccccacgtcccaggagcccctgatgagagtggagctgaaaaaagaagcaggactgagggagctggccgtgcgactgggcttcgggccctgtgcagaggagcaggccttcctgagcaggaggaagcaggtggtggccgcggccttgaggcaggccctgcagctggacggagacctgcaggaggatgagatcccagtggtagctattatggccactggtggtgggatccgggcaatgacttccctgtatgggcagctggctggcctgaaggagctgggcctcttggattgcgtctcctacatcaccggggcctcgggctccacctgggccttggccaacctttatgaggacccagagtggtctcagaaggacctggcagggcccactgagttgctgaagacccaggtgaccaagaacaagctgggtgtgctggcccccagccagctgcagcggtaccggcaggagctggccgagcgtgcccgcttgggctacccaagctgcttcaccaacctgtgggccctcatcaacgaggcgctgctgcatgatgagccccatgatcacaagctctcagatcaacgggaggccctgagtcatggccagaaccctctgcccatctactgtgccctcaacaccaaagggcagagcctgaccacttttgaatttggggagtggtgcgagttctctccctacgaggtcggcttccccaagtacggggccttcatcccctctgagctctttggctccgagttctttatggggcagctgatgaagaggcttcctgagtcccgcatctgcttcttagaaggtatctggagcaacctgtatgcagccaacctccaggacagcttatactgggcctcagagcccagccagttctgggaccgctgggtcaggaaccaggccaacctggacaaggagcaggtcccccttctgaagatagaagaaccaccctcaacagccggcaggatagctgagtttttcaccgatcttctgacgtggcgtccactggcccaggccacacataatttcctgcgtggcctccatttccacaaagactactttcagcatcctcacttctccacatggaaagctaccactctggatgggctccccaaccagctgacaccctcggagccccacctgtgcctgctggatgttggctacctcatcaataccagctgcctgcccctcctgcagcccactcgggacgtggacctcatcctgtcattggactacaacctccacggagccttccaggggtccggcggacacccgaggaggcggcagctggggaggtgaacctgtcttcatcggactctccctaccactacacgaaggtgacctacagccaggaggacgtggacaagctgctgcacctgacacattacaatgtctgcaacaaccaggagcagctgctggaggctctgcgccaggcagtgcagcggaggcggcagcgcaggccccactgatggccggggcccctgccacccctaactctcattcattccctggctgctgagttgcaggtgggaactgtcatcacgcagtgcttcagagcctcgggctcaggtggca

SEQ ID NO: 144749 - DNA, 3331 bp, Homo sapiens
  Payload ID: 8602
  Gene Symbol: JMJD7-PLA2G4B
  Gene Name: JMJD7-PLA2G4B readthrough
  ENST ID: ENST00000382448
  CDS Start-End: 10-3048
gacgcagccatggcggaggcggctttggaagccgtgcggagcgagttacgagaattcccggccgctgcaagggagctctgcgtgcctcttgctgtgccctacctggacaaacccccaactccgctccacttctaccgggactgggtctgccccaacaggccgtgcattatccgcaacgctctgcagcactggccggccctccagaagtggtccctcccctatttcagagccacagtgggctccacagaggtgagtgtggccgtgaccccagatggttacgcggatgccgtgagaggggatcgcttcatgatgccagctgagcgccgcctgcccctgagcttcgtgctggatgtgctggagggccgggcccagcaccctggagtcctctatgtgcagaagcagtgctccaacctgcccagcgagctgccccagctgctgcctgatctggaatcccatgtgccctgggcctccgaagccctgggaaagatgcccgatgctgtgaacttctggctgggggaggcggctgcagtgacttctttgcacaaggaccactatgagaacctctactgcgtggtctcaggagagaagcatttcctgttccatccgcccagcgaccggcccttcatcccctatgagctgtacacgccggcaacctaccagctaactgaagagggcacctttaaggtggtggatgaagaggccatggagaaggcagaggtgtccaggacctgcctgctcacggttcgtgtcctgcaggcccatcgcctaccctctaaggacctagtgaccccctctgactgctacgtgactctctggctgcccacggcctgcagccacaggctccagacacgcacggtcaagaacagcagtagccctgtctggaaccagagctttcacttcaggatccacaggcagctcaagaatgtcatggaactgaaagtctttgaccaggacctggtgaccggagatgaccctgtgttgtcagtactgtttgatgcggggactctgcgggctggggagttccggcgcgagagcttctcactgagccctcagggtgaggggcgcctggaagttgaatttcgcctgcagagtctggctgaccgtggcgagtggctcgtcagcaatggcgttctggtggcccgggagctctcctgcttgcacgttcaactggaggagacaggagaccagaagtcctcagagcacagagttcagcttgtggttcctgggtcctgtgagggtccgcaggaggcctctgtgggcactggcaccttccgcttccactgcccagcctgctgggagcaggagctgagtattcgcctgcaggatgcccccgaggagcaactaaaggcgccactgagtgccctgccctctggtcaagtggtgaggcttgtcttccccacgtcccaggagcccctgatgagagtggagctgaaaaaagaagcaggactgagggagctggccgtgcgactgggcttcgggccctgtgcagaggagcaggccttcctgagcaggaggaagcaggtggtggccgcggccttgaggcaggccctgcagctggacggagacctgcaggaggatgagatcccagtggtagctattatggccactggtggtgggatccgggcaatgacttccctgtatgggcagctggctggcctgaaggagctgggcctcttggattgcgtctcctacatcaccggggcctcgggctccacctgggccttggccaacctttatgaggacccagagtggtctcagaaggacctggcagggcccactgagttgctgaagacccaggtgaccaagaacaagctgggtgtgctggcccccagccagctgcagcggtaccggcaggagctggccgagcgtgcccgcttgggctacccaagctgcttcaccaacctgtgggccctcatcaacgaggcgctgctgcatgatgagccccatgatcacaagctctcagatcaacgggaggccctgagtcatggccagaaccctctgcccatctactgtgccctcaacaccaaagggcagagcctgaccacttttgaatttggggagtggtgcgagttctctccctacgaggtcggcttccccaagtacggggccttcatcccctctgagctctttggctccgagttctttatggggcagctgatgaagaggcttcctgagtcccgcatctgcttcttagaaggtatctggagcaacctgtatgcagccaacctccaggacagcttatactgggcctcagagcccagccagttctgggaccgctgggtcaggaaccaggccaacctggacaaggagcaggtcccccttctgaagatagaagaaccaccctcaacagccggcaggatagctgagtttttcaccgatcttctgacgtggcgtccactggcccaggccacacataatttcctgcgtggcctccatttccacaaagactactttcagcatcctcacttctccacatggaaagctaccactctggatgggctccccaaccagctgacaccctcggagccccacctgtgcctgctggatgttggctacctcatcaataccagctgcctgcccctcctgcagcccactcgggacgtggacctcatcctgtcattggactacaacctccacggagccttccagcagttgcagctcctgggccggttctgccaggagcaggggatcccgttcccacccatctcgcccagccccgaagagcagctccagcctcgggagtgccacaccttctccgaccccacctgccccggagcccctgcggtgctgcactttcctctggtcagcgactccttccgggagtactcggcccctggggtccggcggacacccgaggaggcggcagctggggaggtgaacctgtcttcatcggactctccctaccactacacgaaggtgacctacagccaggaggacgtggacaagctgctgcacctgacacattacaatgtctgcaacaaccaggagcagctgctggaggctctgcgccaggcagtgcagcggaggcggcagcgcaggccccactgatggccggggcccctgccacccctaactctcattcattccctggctgctgagttgcaggtgggaactgtcatcacgcagtgcttcagagcctcgggctcaggtggcacggtcccagggtccaggctgagggctgggagctcccttgcgcctcagcagtttgcagtggggtaaggaggccaagcccatttgtgtaatcacccaaaaccccccggcctgtgcctgttttcccttctgcgctaccttgagtagttggagcacttgatacatcacagactcatacaaa

SEQ ID NO: 144750 - DNA, 2734 bp, Homo sapiens
  Payload ID: 8602
  Gene Symbol: JMJD7-PLA2G4B
  Gene Name: JMJD7-PLA2G4B readthrough
  Uniprot ID: P0C869
  ENST ID: ENST00000458483
  CDS Start-End: 102-2447
accaattgggacatcacatccctggctctgggttagaaagctgacagtccttgatcctgtggccactgccccatcattcctgctcctgaggactcagtctcatggctgtggcagaggtgtccaggacctgcctgctcacggttcgtgtcctgcaggcccatcgcctaccctctaaggacctagtgaccccctctgactgctacgtgactctctggctgcccacggcctgcagccacaggctccagacacgcacggtcaagaacagcagtagccctgtctggaaccagagctttcacttcaggatccacaggcagctcaagaatgtcatggaactgaaagtctttgaccaggacctggtgaccggagatgaccctgtgttgtcagtactgtttgatgcggggactctgcgggctggggagttccggcgcgagagcttctcactgagccctcagggtgaggggcgcctggaagttgaatttcgcctgcagagtctggctgaccgtggcgagtggctcgtcagcaatggcgttctggtggcccgggagctctcctgcttgcacgttcaactggaggagacaggagaccagaagtcctcagagcacagagttcagcttgtggttcctgggtcctgtgagggtccgcaggaggcctctgtgggcactggcaccttccgcttccactgcccagcctgctgggagcaggagctgagtattcgcctgcaggatgcccccgaggagcaactaaaggcgccactgagtgccctgccctctggtcaagtggtgaggcttgtcttccccacgtcccaggagcccctgatgagagtggagctgaaaaaagaagcaggactgagggagctggccgtgcgactgggcttcgggccctgtgcagaggagcaggccttcctgagcaggaggaagcaggtggtggccgcggccttgaggcaggccctgcagctggacggagacctgcaggaggatgagatcccagtggtagctattatggccactggtggtgggatccgggcaatgacttccctgtatgggcagctggctggcctgaaggagctgggcctcttggattgcgtctcctacatcaccggggcctcgggctccacctgggccttggccaacctttatgaggacccagagtggtctcagaaggacctggcagggcccactgagttgctgaagacccaggtgaccaagaacaagctgggtgtgctggcccccagccagctgcagcggtaccggcaggagctggccgagcgtgcccgcttgggctacccaagctgcttcaccaacctgtgggccctcatcaacgaggcgctgctgcatgatgagccccatgatcacaagctctcagatcaacgggaggccctgagtcatggccagaaccctctgcccatctactgtgccctcaacaccaaagggcagagcctgaccacttttgaatttggggagtggtgcgagttctctccctacgaggtcggcttccccaagtacggggccttcatcccctctgagctctttggctccgagttctttatggggcagctgatgaagaggcttcctgagtcccgcatctgcttcttagaaggtatctggagcaacctgtatgcagccaacctccaggacagcttatactgggcctcagagcccagccagttctgggaccgctgggtcaggaaccaggccaacctggacaaggagcaggtcccccttctgaagatagaagaaccaccctcaacagccggcaggatagctgagtttttcaccgatcttctgacgtggcgtccactggcccaggccacacataatttcctgcgtggcctccatttccacaaagactactttcagcatcctcacttctccacatggaaagctaccactctggatgggctccccaaccagctgacaccctcggagccccacctgtgcctgctggatgttggctacctcatcaataccagctgcctgcccctcctgcagcccactcgggacgtggacctcatcctgtcattggactacaacctccacggagccttccagcagttgcagctcctgggccggttctgccaggagcaggggatcccgttcccacccatctcgcccagccccgaagagcagctccagcctcgggagtgccacaccttctccgaccccacctgccccggagcccctgcggtgctgcactttcctctggtcagcgactccttccgggagtactcggcccctggggtccggcggacacccgaggaggcggcagctggggaggtgaacctgtcttcatcggactctccctaccactacacgaaggtgacctacagccaggaggacgtggacaagctgctgcacctgacacattacaatgtctgcaacaaccaggagcagctgctggaggctctgcgccaggcagtgcagcggaggcggcagcgcaggccccactgatggccggggcccctgccacccctaactctcattcattccctggctgctgagttgcaggtgggaactgtcatcacgcagtgcttcagagcctcgggctcaggtggcacggtcccagggtccaggctgagggctgggagctcccttgcgcctcagcagtttgcagtggggtaaggaggccaagcccatttgtgtaatcacccaaaaccccccggcctgtgcctgttttcccttctgcgctaccttgagtagttggagcacttgatacatcacagactcatacaaatgtg

SEQ ID NO: 144751 - DNA, 3178 bp, Homo sapiens
  Payload ID: 8602
  Gene Symbol: JMJD7-PLA2G4B
  Gene Name: JMJD7-PLA2G4B readthrough
  ENST ID: ENST00000487292
  CDS Start-End: 1-245
cctggatcccactggaccccttggcgccagacctagcacggtaccctagttacagtcaggcccaggcccttcgctgcacggtgcgggccggtgagatgctctatctgccggctctgtggttccaccacgtccagcagtcccagggctgcatcgcagtgaatttctggtatgacatggaatacgacctcaagtatagttacttccagctgctcgactccctcaccaaggcttcaggccttgactgatggagcactggtgaacaccaccaagcacgcctcgggggacggagccagcccctccctggccaggtcaattctcgagagagcctggagtgtgcatgctggctgctggccccgggtccagcatggcttgagatcagctttggaggatcttggaatgtggtcataaggactcaaggtgccaggcaggtctgggtgagggttctcaggaagttgccacacaggattctgatgagatggaggatgggcctggggttcaggattaggccttgaggcactgctccagcctcctttgtggcccctgtcacccttggcttcatcggcccgtagcaggtctcccctctcccacctctgcaggcagaggtgtccaggacctgcctgctcacggttcgtgtcctgcaggcccatcgcctaccctctaaggacctagtgaccccctctgactgctacgtgactctctggctgcccacggcctgcagccacaggctccagacacgcacggtcaagaacagcagtagccctgtctggaaccagagctttcacttcaggatccacaggcagctcaagaatgtcatggaactgaaagtctttgaccaggacctggtgaccggagatgaccctgtgttgtcagtactgtttgatgcggggactctgcgggctggggagttccggcgcgagagcttctcactgagccctcagggtgaggggcgcctggaagttgaatttcgcctgcagagtctggctgaccgtggcgagtggctcgtcagcaatggcgttctggtggcccgggagctctcctgcttgcacgttcaactggaggagacaggagaccagaagtcctcagagcacagagttcagcttgtggttcctgggtcctgtgagggtccgcaggaggcctctgtgggcactggcaccttccgcttccactgcccagcctgctgggagcaggagctgagtattcgcctgcaggatgcccccgaggagcaactaaaggcgccactgagtgccctgccctctggtcaagtggtgaggcttgtcttccccacgtcccagactgagggagctggccgtgcgactgggcttcgggccctgtgcagaggagcaggccttcctgagcaggaggaagcaggtggtggccgcggccttgaggcaggccctgcagctggacggagacctgcaggaggatgagatcccagtggtagctattatggccactggtggtgggatccgggcaatgacttccctgtatgggcagctggctggcctgaaggagctgggcctcttggattgcgtctcctacatcaccggggcctcgggctccacctgggccttggccaacctttatgaggacccagagtggtctcagaaggacctggcagggcccactgagttgctgaagacccaggtgaccaagaacaagctgggtgtgctggcccccagccagctgcagcggtaccggcaggagctggccgagcgtgcccgcttgggctacccaagctgcttcaccaacctgtgggccctcatcaacgaggcgctgctgcatgatgagccccatgatcacaagctctcagatcaacgggaggccctgagtcatggccagaaccctctgcccatctactgtgccctcaacaccaaagggcagagcctgaccacttttgaatttggggagtggtgcgagttctctccctacgaggtcggcttccccaagtacggggccttcatcccctctgagctctttggctccgagttctttatggggcagctgatgaagaggcttcctgagtcccgcatctgcttcttagaaggtatctggagcaacctgtatgcagccaacctccaggacagcttatactgggcctcagagcccagccagttctgggaccgctgggtcaggaaccaggccaacctggacaaggagcaggtcccccttctgaagatagaagaaccaccctcaacagccggcaggatagctgagtttttcaccgatcttctgacgtggcgtccactggcccaggccacacataatttcctgcgtggcctccatttccacaaagactactttcagcatcctcacttctccacatggaaagctaccactctggatgggctccccaaccagctgacaccctcggagccccacctgtgcctgctggatgttggctacctcatcaataccagctgcctgcccctcctgcagcccactcgggacgtggacctcatcctgtcattggactacaacctccacggagccttccagcagttgcagctcctgggccggttctgccaggagcaggggatcccgttcccacccatctcgcccagccccgaagagcagctccagcctcgggagtgccacaccttctccgaccccacctgccccggagcccctgcggtgctgcactttcctctggtcagcgactccttccgggagtactcggcccctggggtccggcggacacccgaggaggcggcagctggggaggtgaacctgtcttcatcggactctccctaccactacacgaaggtgacctacagccaggaggacgtggacaagctgctgcacctgacacattacaatgtctgcaacaaccaggagcagctgctggaggctctgcgccaggcagtgcagcggaggcggcagcgcaggccccactgatggccggggcccctgccacccctaactctcattcattccctggctgctgagttgcaggtgggaactgtcatcacgcagtgcttcagagcctcgggctcaggtggcacggtcccagggtccaggctgagggctgggagctcccttgcgcctcagcagtttgcagtggggtaaggaggccaagcccatttgtgtaatcacccaaaaccccccggcctgtgcctgttttcccttctgcgctaccttgagtagttggagcacttgatacatcacagactcatacaaa

SEQ ID NO: 144752 - DNA, 1726 bp, Homo sapiens
  Payload ID: 8603
  Gene Symbol: JKAMP
  Gene Name: JNK1/MAPK8-associated membrane protein
  Uniprot ID: Q9P055
  ENST ID: ENST00000261247
  CDS Start-End: 148-1083
ctaaacccggaagcgagggaggaacttcggagctgtcgcccgggttaccgggaggcggagccgccgagctcgctgtggcccggatgttcggtgcagctgccagatccgctgatctagtgcttctcgaaaaaaaccttcaggcggcccatggctgtcgatattcaaccagcatgccttggactttattgtgggaagaccctattatttaaaaatggctcaactgaaatatatggagaatgtggggtatgcccaagaggacagagaacgaatgcacagaaatattgtcagccttgcacagaatctcctgaactttatgattggctctatcttggatttatggcaatgcttcctctggttttacattggttcttcattgaatggtactcggggaaaaagagttccagcgcacttttccaacacatcactgcattatttgaatgcagcatggcagctattatcaccttacttgtgagtgatccagttggtgttctttatattcgttcatgtcgagtattgatgctttctgactggtacacgatgctttacaacccaagtccagattacgttaccacagtacactgtactcatgaagccgtctacccactatataccattgtatttatctattacgcattctgcttggtattaatgatgctgctccgacctcttctggtgaagaagattgcatgtgggttagggaaatctgatcgatttaaaagtatttatgctgcactttacttcttcccaattttaaccgtgcttcaggcagttggtggaggccttttatattacgccttcccatacattatattagtgttatctttggttactctggctgtgtacatgtctgcttctgaaatagagaactgctatgatcttctggtcagaaagaaaagacttattgttctcttcagccactggttacttcatgcctatggaataatctccatttccagagtggataaacttgagcaagatttgccccttttggctttggtacctacaccagcccttttttacttgttcactgcaaaatttaccgaaccttcaaggatactctcagaaggagccaatggacactgagtgtagacatgtgaaatgccaaaaacctgagaagtgctcctaataaaaaagtaaatcaatcttaacagtgtatgagaactattctatcatatatgggaacaagattgtcagtatatcttaatgtttgggtttgtctttgttttgtttatggttagacttacagacttggaaaatgcaaaactctgtaatactctgttacacagggtaatattatctgctacactggaaggccgctaggaagcccttgcttctctcaacagttcagctgttctttagggcaaaatcatgtttctgtgtacctagcaatgtgttcccattttattaagaaaagctttaacacgtgtaatctgcagtccttaacagtggcgtaattgtacttacctgttgtgtttcagtttgtttttcacctataatgaattgtaaaaacaaacatacttgtggggtctgatagcaaacatagaaatgatgtatattgttttttgttatctatttattttcatcaatacagtattttgatgtattgcaaaaatagataataatttatataacaggttttctgtttatagattggttcaagatttgtttggattattgttcctgtaaagaaaacaataataaaaagcttacctacataaaatttcaa

SEQ ID NO: 144753 - DNA, 2524 bp, Homo sapiens
  Payload ID: 8603
  Gene Symbol: JKAMP
  Gene Name: JNK1/MAPK8-associated membrane protein
  Uniprot ID: Q9P055
  ENST ID: ENST00000356057
  CDS Start-End: 233-1192
ctaaacccggaagcgagggaggaacttcggagctgtcgcccgggttaccgggaggcggagccgccgagctcgctgtggcccggatgttcggtgcagctgccagatccgctgatctagtgcttctcgaaaaaaaccttcaggcggcccatggatttatagcgcccgtcacaaagggcaggaccgctgcaaaaaaatggaatcttaaaactttagccatcgttcgctaaaggaaatgaaaggagaaattcaacagtcgcttggagcctgggttttgcttacatgccttggactttattgtgggaagaccctattatttaaaaatggctcaactgaaatatatggagaatgtggggtatgcccaagaggacagagaacgaatgcacagaaatattgtcagccttgcacagaatctcctgaactttatgattggctctatcttggatttatggcaatgcttcctctggttttacattggttcttcattgaatggtactcggggaaaaagagttccagcgcacttttccaacacatcactgcattatttgaatgcagcatggcagctattatcaccttacttgtgagtgatccagttggtgttctttatattcgttcatgtcgagtattgatgctttctgactggtacacgatgctttacaacccaagtccagattacgttaccacagtacactgtactcatgaagccgtctacccactatataccattgtatttatctattacgcattctgcttggtattaatgatgctgctccgacctcttctggtgaagaagattgcatgtgggttagggaaatctgatcgatttaaaagtatttatgctgcactttacttcttcccaattttaaccgtgcttcaggcagttggtggaggccttttatattacgccttcccatacattatattagtgttatctttggttactctggctgtgtacatgtctgcttctgaaatagagaactgctatgatcttctggtcagaaagaaaagacttattgttctcttcagccactggttacttcatgcctatggaataatctccatttccagagtggataaacttgagcaagatttgccccttttggctttggtacctacaccagcccttttttacttgttcactgcaaaatttaccgaaccttcaaggatactctcagaaggagccaatggacactgagtgtagacatgtgaaatgccaaaaacctgagaagtgctcctaataaaaaagtaaatcaatcttaacagtgtatgagaactattctatcatatatgggaacaagattgtcagtatatcttaatgtttgggtttgtctttgttttgtttatggttagacttacagacttggaaaatgcaaaactctgtaatactctgttacacagggtaatattatctgctacactggaaggccgctaggaagcccttgcttctctcaacagttcagctgttctttagggcaaaatcatgtttctgtgtacctagcaatgtgttcccattttattaagaaaagctttaacacgtgtaatctgcagtccttaacagtggcgtaattgtacttacctgttgtgtttcagtttgtttttcacctataatgaattgtaaaaacaaacatacttgtggggtctgatagcaaacatagaaatgatgtatattgttttttgttatctatttattttcatcaatacagtattttgatgtattgcaaaaatagataataatttatataacaggttttctgtttatagattggttcaagatttgtttggattattgttcctgtaaagaaaacaataataaaaagcttacctacataaaatttcaatgttttgacacttaattgttgtttggcacaatagtatggaagtaattcaaactggtaaatagtttcctctcatatctcgggtatatatacataccatattttattgatccagagatacttatttcactttgtgacatctctgaattaggatgcatcttacaactgatggcttattagatttaatgaaatacagaagatacacagaataaaaagggttttcctgtggttggtttgtggtttgtgataggtgttctgtgatgtttatgctttgaaggccttaagactcatggttgcaaccatggaagcaaaatgaaatttttagctcttaacctaacaacctgaccatgtttatccatttttattgtttagaagtttatttactgatacttggtggaggttgtgtgaattagttaaattttaaatgtttaagacttctattaacagctgcaaaatatgaaagtaagtgcactcacttttcctgtagtagtctgtcttttgaattcacagcagttgtatccttgagttactttgttaatgtatttttctcagtacatttaaccactgggaaatgaacccttgtacgaatgtgtttcttcttctctgtaggaataaaaaataaatataaaaattttatttgtattgcacacatttggggggttattagtgttcattaaaattctgagttgccc

SEQ ID NO: 144754 - DNA, 1636 bp, Homo sapiens
  Payload ID: 8603
  Gene Symbol: JKAMP
  Gene Name: JNK1/MAPK8-associated membrane protein
  Uniprot ID: Q9P055
  ENST ID: ENST00000425728
  CDS Start-End: 88-1005
ccgccgagctcgctgtggcccggatgttcggtgcagctgccagatccgctgatctagtgcttctcgaaaaaaaccttcaggcggcccatggcatgccttggactttattgtgggaagaccctattatttaaaaatggctcaactgaaatatatggagaatgtggggtatgcccaagaggacagagaacgaatgcacagaaatattgtcagccttgcacagaatctcctgaactttatgattggctctatcttggatttatggcaatgcttcctctggttttacattggttcttcattgaatggtactcggggaaaaagagttccagcgcacttttccaacacatcactgcattatttgaatgcagcatggcagctattatcaccttacttgtgagtgatccagttggtgttctttatattcgttcatgtcgagtattgatgctttctgactggtacacgatgctttacaacccaagtccagattacgttaccacagtacactgtactcatgaagccgtctacccactatataccattgtatttatctattacgcattctgcttggtattaatgatgctgctccgacctcttctggtgaagaagattgcatgtgggttagggaaatctgatcgatttaaaagtatttatgctgcactttacttcttcccaattttaaccgtgcttcaggcagttggtggaggccttttatattacgccttcccatacattatattagtgttatctttggttactctggctgtgtacatgtctgcttctgaaatagagaactgctatgatcttctggtcagaaagaaaagacttattgttctcttcagccactggttacttcatgcctatggaataatctccatttccagagtggataaacttgagcaagatttgccccttttggctttggtacctacaccagcccttttttacttgttcactgcaaaatttaccgaaccttcaaggatactctcagaaggagccaatggacactgagtgtagacatgtgaaatgccaaaaacctgagaagtgctcctaataaaaaagtaaatcaatcttaacagtgtatgagaactattctatcatatatgggaacaagattgtcagtatatcttaatgtttgggtttgtctttgttttgtttatggttagacttacagacttggaaaatgcaaaactctgtaatactctgttacacagggtaatattatctgctacactggaaggccgctaggaagcccttgcttctctcaacagttcagctgttctttagggcaaaatcatgtttctgtgtacctagcaatgtgttcccattttattaagaaaagctttaacacgtgtaatctgcagtccttaacagtggcgtaattgtacttacctgttgtgtttcagtttgtttttcacctataatgaattgtaaaaacaaacatacttgtggggtctgatagcaaacatagaaatgatgtatattgttttttgttatctatttattttcatcaatacagtattttgatgtattgcaaaaatagataataatttatataacaggttttctgtttatagattggttcaagatttgtttggattattgttcctgtaaagaaaacaataataaaaagcttacctac

SEQ ID NO: 144755 - DNA, 2137 bp, Homo sapiens
  Payload ID: 8603
  Gene Symbol: JKAMP
  Gene Name: JNK1/MAPK8-associated membrane protein
  ENST ID: ENST00000554271
  CDS Start-End: 527-1504
gatccgctgatctagtgcttctcgaaaaaaaccttcaggcggcccatgggtgagtggtcgccaagatcccgggaagcgtttctggtagtcccgactactttcctacacggctggcctcgggctcggctctttgtaggcggccttcggttggcggcgcaggctcgccccttgaccccgcccgccctcgggccgggctccgcactcctgcggggttggggtggtctgtccgcaacgggctactaggggaggcgcgctgtctgcggcgaaatgccaggtctttgttgtttggtccgaaatgtctcttcagtcccttagtttaatgtcgagggaacacttgcttgagggttgacttcggaattgaaaacgcgggtgatagtgcagaaaaaacagtaaagcagaagcaagttgctgcataatttgtctactgcttcaacctcaaacgtagatttatagcgcccgtcacaaagggcaggaccgctgcaaaaaaatggaatcttaaaactttagccatcgttcgctaaaggaaatgaaaggagaaattcaacagtcgcttggagcctgggttttgcttactgtcgatattcaaccagcatgccttggactttattgtgggaagaccctattatttaaaaatggctcaactgaaatatatggagaatgtggggtatgcccaagaggacagagaacgaatgcacagaaatattgtcagccttgcacagaatctcctgaactttatgattggctctatcttggatttatggcaatgcttcctctggttttacattggttcttcattgaatggtactcggggaaaaagagttccagcgcacttttccaacacatcactgcattatttgaatgcagcatggcagctattatcaccttacttgtgagtgatccagttggtgttctttatattcgttcatgtcgagtattgatgctttctgactggtacacgatgctttacaacccaagtccagattacgttaccacagtacactgtactcatgaagccgtctacccactatataccattgtatttatctattacgcattctgcttggtattaatgatgctgctccgacctcttctggtgaagaagattgcatgtgggttagggaaatctgatcgatttaaaagtatttatgctgcactttacttcttcccaattttaaccgtgcttcaggcagttggtggaggccttttatattacgccttcccatacattatattagtgttatctttggttactctggctgtgtacatgtctgcttctgaaatagagaactgctatgatcttctggtcagaaagaaaagacttattgttctcttcagccactggttacttcatgcctatggaataatctccatttccagagtggataaacttgagcaagatttgccccttttggctttggtacctacaccagcccttttttacttgttcactgcaaaatttaccgaaccttcaaggatactctcagaaggagccaatggacactgagtgtagacatgtgaaatgccaaaaacctgagaagtgctcctaataaaaaagtaaatcaatcttaacagtgtatgagaactattctatcatatatgggaacaagattgtcagtatatcttaatgtttgggtttgtctttgttttgtttatggttagacttacagacttggaaaatgcaaaactctgtaatactctgttacacagggtaatattatctgctacactggaaggccgctaggaagcccttgcttctctcaacagttcagctgttctttagggcaaaatcatgtttctgtgtacctagcaatgtgttcccattttattaagaaaagctttaacacgtgtaatctgcagtccttaacagtggcgtaattgtacttacctgttgtgtttcagtttgtttttcacctataatgaattgtaaaaacaaacatacttgtggggtctgatagcaaacatagaaatgatgtatattgttttttgttatctatttattttcatcaatacagtattttgatgtattgcaaaaatagataataatttatataacaggttttctgtttatagattggttcaagatttgtttggattattgttcctgtaaagaaaacaataataaaaagcttacctacat

SEQ ID NO: 144756 - DNA, 856 bp, Homo sapiens
  Payload ID: 8603
  Gene Symbol: JKAMP
  Gene Name: JNK1/MAPK8-associated membrane protein
  ENST ID: ENST00000554795
  CDS Start-End: 116-856
tgcttctcgaaaaaaaccttcaggcggcccatggatttatagcgcccgtcacaaagggcaggaccgctgcaaaaaaatggaatcttaaaactttagccatcgttcgctaaaggaaatgaaaggagaaattcaacagtcgcttggagcctgggttttgcttacatgccttggactttattgtgggaagaccctattatttaaaaatggctcaactgaaatatatggagaatgtggggtatgcccaagaggacagagaacgaatgcacagaaatattgtcagccttgcacagaatctcctgaactttatgattggctctatcttggatttatggcaatgcttcctctggttttacattggttcttcattgaatggtactcggggaaaaagagttccagcgcacttttccaacacatcactgcattatttgaatgcagcatggcagctattatcaccttacttgtgagtgatccagttggtgttctttatattcgttcatgtcgagtattgatgctttctgactggtacacgatgctttacaacccaagtccagattacgttaccacagtacactgtactcatgaagccgtctacccactatataccattgtatttatctattacgcattctgcttggtattaatgatgctgctccgacctcttctggtgaagaagattgcatgtgggttagggaaatctgatcgatttaaaagtatttatgctgcactttacttcttcccaattttaaccgtgcttcaggcagttggtggaggccttttatattacgccttcccatacattatattagtgttatctttggttactctggctgtgtacatgtctgcttctgaaatagag

SEQ ID NO: 144757 - DNA, 592 bp, Homo sapiens
  Payload ID: 8603
  Gene Symbol: JKAMP
  Gene Name: JNK1/MAPK8-associated membrane protein
  ENST ID: ENST00000556985
  CDS Start-End: 54-515
agctgccagatccgctgatctagtgcttctcgaaaaaaaccttcaggcggcccatggctgtcgatattcaaccagcatgccttggactttattgtgggaagaccctattatttaaaaatggctcaactgaaatatatggagaatgtggggtatgcccaagaggacagagaacgaatgcacagaaatattgtcagccttgcacagaatctcctgaactttatgattggctctatcttggatttatggcaatgcttcctctggttttacattggttcttcattgaatggtactcggggaaaaagagttccagcgcacttttccaacacatcactgcattatttgaatgcagcatggcagctattatcaccttacttgtgagtgatccagttggtgttctttatattcgttcatgtcgagtattgatgctttctgactggtacacgatgctttacaacccaagtccagattacgttaccacagtacactgtactcatgaagccgtctacccactgtaagtgtttatttcgacttaagatcattgtttttttttaaatctctgaggattattatagattttatggcgtttggagac

SEQ ID NO: 144758 - DNA, 619 bp, Homo sapiens
  Payload ID: 8603
  Gene Symbol: JKAMP
  Gene Name: JNK1/MAPK8-associated membrane protein
  ENST ID: ENST00000555491
  CDS Start-End: 60-482
cggtgcagctgccagatccgctgatctagtgcttctcgaaaaaaaccttcaggcggcccatggctgtcgatattcaaccagcatgccttggactttattgtgggaagaccctattatttaaaaatggctcaactgaaatatatggagaatgtggggtatgcccaagaggacagagaacgaatgcacagaaatattgtcagccttgcacagaatctcctgaactttatgattggctctatcttggatttatggcaatgcttcctctggttttacattggttcttcattgaatggtactcggggaaaaagagttccagcgcacttttccaacacatcactgcattatttgaatgcagcatggcagctattatcaccttacttatataccattgtatttatctattacgcattctgcttggtattaatgatgctgctccgacctcttctggtgaagaagattgcatgtgggttagggaaatctgatcgatttaaaagtatttatgctgcactttacttcttcccaattttaaccgtgcttcaggcagttggtggaggccttttatattacgccttcccatacattatattagtgttatctttggttactctggctgtgtaca

SEQ ID NO: 144759 - DNA, 2338 bp, Homo sapiens
  Payload ID: 8603
  Gene Symbol: JKAMP
  Gene Name: JNK1/MAPK8-associated membrane protein
  ENST ID: ENST00000616435
  CDS Start-End: 148-786
ctaaacccggaagcgagggaggaacttcggagctgtcgcccgggttaccgggaggcggagccgccgagctcgctgtggcccggatgttcggtgcagctgccagatccgctgatctagtgcttctcgaaaaaaaccttcaggcggcccatggctgtcgatattcaaccagcatgccttggactttattgtgggaagaccctattatttaaaaatggctcaactgaaatatatggagaatgtggggtatgcccaagaggacagagaacgaatgcacagaaatattgtcagccttgcacagaatctcctgaactttatgattggctctatcttggatttatggcaatgcttcctctggttttacattggttcttcattgaatggtactcggggaaaaagagttccagcgcacttttccaacacatcactgcattatttgaatgcagcatggcagctattatcaccttacttgtgagtgatccagttggtgttctttatattcgttcatgtcgagtattgatgctttctgactggtacacgatgctttacaacccaagtccagattacgttaccacagtacactgtactcatgaagccgtctacccactatataccattgtatttatctattacgcattctgcttggtattaatgatgctgctccgacctcttctggtgaagaagattgcatgtgggttagggaaatctgatcgatttaaaagtatttatgctgcactttacttcttcccaattttaaccgtgcttcaggcagttggtggaggccttttataactgctatgatcttctggtcagaaagaaaagacttattgttctcttcagccactggttacttcatgcctatggaataatctccatttccagagtggataaacttgagcaagatttgccccttttggctttggtacctacaccagcccttttttacttgttcactgcaaaatttaccgaaccttcaaggatactctcagaaggagccaatggacactgagtgtagacatgtgaaatgccaaaaacctgagaagtgctcctaataaaaaagtaaatcaatcttaacagtgtatgagaactattctatcatatatgggaacaagattgtcagtatatcttaatgtttgggtttgtctttgttttgtttatggttagacttacagacttggaaaatgcaaaactctgtaatactctgttacacagggtaatattatctgctacactggaaggccgctaggaagcccttgcttctctcaacagttcagctgttctttagggcaaaatcatgtttctgtgtacctagcaatgtgttcccattttattaagaaaagctttaacacgtgtaatctgcagtccttaacagtggcgtaattgtacttacctgttgtgtttcagtttgtttttcacctataatgaattgtaaaaacaaacatacttgtggggtctgatagcaaacatagaaatgatgtatattgttttttgttatctatttattttcatcaatacagtattttgatgtattgcaaaaatagataataatttatataacaggttttctgtttatagattggttcaagatttgtttggattattgttcctgtaaagaaaacaataataaaaagcttacctacataaaatttcaatgttttgacacttaattgttgtttggcacaatagtatggaagtaattcaaactggtaaatagtttcctctcatatctcgggtatatatacataccatattttattgatccagagatacttatttcactttgtgacatctctgaattaggatgcatcttacaactgatggcttattagatttaatgaaatacagaagatacacagaataaaaagggttttcctgtggttggtttgtggtttgtgataggtgttctgtgatgtttatgctttgaaggccttaagactcatggttgcaaccatggaagcaaaatgaaatttttagctcttaacctaacaacctgaccatgtttatccatttttattgtttagaagtttatttactgatacttggtggaggttgtgtgaattagttaaattttaaatgtttaagacttctattaacagctgcaaaatatgaaagtaagtgcactcacttttcctgtagtagtctgtcttttgaattcacagcagttgtatccttgagttactttgttaatgtatttttctcagtacatttaaccactgggaaatgaacccttgtacgaatgtgtttcttcttctctgtaggaataaaaaataaatataaaaattttatttgtattgcacacatttggggggttattagtgttcattaaaattctgagttgccc

SEQ ID NO: 144760 - DNA, 1438 bp, Homo sapiens
  Payload ID: 8604
  Gene Symbol: JCHAIN
  Gene Name: joining chain of multimeric IgA and IgM
  Uniprot ID: P01591
  ENST ID: ENST00000254801
  CDS Start-End: 171-650
agcatttaaacttcagacttcaaccacagttgtgattgtttttagtttgttagctgcctggagtgttattttaagaaagcagaagcaccatcatttgcacactccttatagatcacacaccttaaccctgactttttttgctccagtttttcagaagaagtgaagtcaagatgaagaaccatttgcttttctggggagtcctggcggtttttattaaggctgttcatgtgaaagcccaagaagatgaaaggattgttcttgttgacaacaaatgtaagtgtgcccggattacttccaggatcatccgttcttccgaagatcctaatgaggacattgtggagagaaacatccgaattattgttcctctgaacaacagggagaatatctctgatcccacctcaccattgagaaccagatttgtgtaccatttgtctgacctctgtaaaaaatgtgatcctacagaagtggagctggataatcagatagttactgctacccagagcaatatctgtgatgaagacagtgctacagagacctgctacacttatgacagaaacaagtgctacacagctgtggtcccactcgtatatggtggtgagaccaaaatggtggaaacagccttaaccccagatgcctgctatcctgactaatttaagtcattgctgactgcatagctctttttcttgagaggctctccattttgattcagaaagttagcatatttattaccaatgaatttgaaaccagggcttttttttttttttgggtgatgtaaaaccaactccctgccaccaaaataattaaaatagtcacattgttatctttattaggtaatcacttcttaattatatgttcatactctaagtatcaaaatcttccaattatcatgctcacctgaaagaggtatgctctcttaggaatacagtttctagcattaaacaaataaacaaggggagaaaataaaactcaaggactgaaaatcaggaggtgtaataaaatgttcctcgcattcccccccgcttttttttttttttttgactttgccttggagagccagagcttccgcattttctttactattctttttaaaaaaagtttcactgtgtagagaacatatatgcataaacataggtcaattatatgtctccattagaaaaataataattggaaaacatgttctagaactagttacaaaaataatttaaggtgaaatctctaatatttataaaagtagcaaaataaatgcataattaaaatatatttggacataacagacttggaagcagatgatacagacttctttttttcataatcaggttagtgtaagaaattgccatttgaaacaatccattttgtaactgaaccttatgaaatatatgtatttcatggtacgtattctctagcacagtctgagcaattaaatagattcataagcata

SEQ ID NO: 144761 - DNA, 275 bp, Homo sapiens
  Payload ID: 8604
  Gene Symbol: JCHAIN
  Gene Name: joining chain of multimeric IgA and IgM
  ENST ID: ENST00000470866
  CDS Start-End: 65-275
gacttggaagtaaaatatagagcttctactgaaatatttgtttttcagaagaagtgaagtcaagatgaagaaccatttgcttttctggggagtcctggcggtttttattaaggctgttcatgtgaaagcccaagaagatgaaaggattgttcttgttgacaacaaatgtaagtgtgcccggattacttccaggatcatccgttcttccgaagatcctaatgaggacattgtggagagaaacatccgaattattgttcctctgaacaacagggaga

SEQ ID NO: 144762 - DNA, 508 bp, Homo sapiens
  Payload ID: 8604
  Gene Symbol: JCHAIN
  Gene Name: joining chain of multimeric IgA and IgM
  ENST ID: ENST00000391614
  CDS Start-End: 37-508
tttttgctccagtttttcagaagaagtgaagtcaagatgaagaaccatttgcttttctggggagtcctggcggtttttattaaggctgttcatgtgaaaggttcaagagattcttctgcctcagcctcccgagtagctgggattacagcccaagaagatgaaaggattgttcttgttgacaacaaatgtaagtgtgcccggattacttccaggatcatccgttcttccgaagatcctaatgaggacattgtggagagaaacatccgaattattgttcctctgaacaacagggagaatatctctgatcccacctcaccattgagaaccagatttgtgtaccatttgtctgacctctgtaaaaaatgtgatcctacagaagtggagctggataatcagatagttactgctacccagagcaatatctgtgatgaagacagtgctacagagacctgctacacttatgacagaaacaagtgctacacagctgtggtcccactcgtatatggtg

SEQ ID NO: 144763 - DNA, 640 bp, Homo sapiens
  Payload ID: 8604
  Gene Symbol: JCHAIN
  Gene Name: joining chain of multimeric IgA and IgM
  Uniprot ID: P01591
  ENST ID: ENST00000510437
  CDS Start-End: 152-631
gggaccttaaaggactttcatttctctccccttccttcatctctcctccttcacttaccttcatttattattctaggcatgacaagtgtcagatgtctgatttgaagactaatatgaatatatctagtttttcagaagaagtgaagtcaagatgaagaaccatttgcttttctggggagtcctggcggtttttattaaggctgttcatgtgaaagcccaagaagatgaaaggattgttcttgttgacaacaaatgtaagtgtgcccggattacttccaggatcatccgttcttccgaagatcctaatgaggacattgtggagagaaacatccgaattattgttcctctgaacaacagggagaatatctctgatcccacctcaccattgagaaccagatttgtgtaccatttgtctgacctctgtaaaaaatgtgatcctacagaagtggagctggataatcagatagttactgctacccagagcaatatctgtgatgaagacagtgctacagagacctgctacacttatgacagaaacaagtgctacacagctgtggtcccactcgtatatggtggtgagaccaaaatggtggaaacagccttaaccccagatgcctgctatcctgactaatttaagtca

SEQ ID NO: 144764 - DNA, 533 bp, Homo sapiens
  Payload ID: 8604
  Gene Symbol: JCHAIN
  Gene Name: joining chain of multimeric IgA and IgM
  ENST ID: ENST00000510614
  CDS Start-End: 61-533
gatgtctgatttgaagactaatatgaatatatctagtttttcagaagaagtgaagtcaagatgaagaaccatttgcttttctggggagtcctggcggtttttattaaggctgttcatgtgaaagaaaatggaatacattctgaatttagagcccaagaagatgaaaggattgttcttgttgacaacaaatgtaagtgtgcccggattacttccaggatcatccgttcttccgaagatcctaatgaggacattgtggagagaaacatccgaattattgttcctctgaacaacagggagaatatctctgatcccacctcaccattgagaaccagatttgtgtaccatttgtctgacctctgtaaaaaatgtgatcctacagaagtggagctggataatcagatagttactgctacccagagcaatatctgtgatgaagacagtgctacagagacctgctacacttatgacagaaacaagtgctacacagctgtggtcccactcgtatatggtggtgagaccaaaatggtggaaac

SEQ ID NO: 144765 - DNA, 1406 bp, Homo sapiens
  Payload ID: 8604
  Gene Symbol: JCHAIN
  Gene Name: joining chain of multimeric IgA and IgM
  Uniprot ID: P01591
  ENST ID: ENST00000543780
  CDS Start-End: 142-621
ttgtgattgtttttagtttgttagctgcctggagtgttattttaagaaagcagaagcaccatcatttgcacactccttatagatcacacaccttaaccctgactttttttgctccagtttttcagaagaagtgaagtcaagatgaagaaccatttgcttttctggggagtcctggcggtttttattaaggctgttcatgtgaaagcccaagaagatgaaaggattgttcttgttgacaacaaatgtaagtgtgcccggattacttccaggatcatccgttcttccgaagatcctaatgaggacattgtggagagaaacatccgaattattgttcctctgaacaacagggagaatatctctgatcccacctcaccattgagaaccagatttgtgtaccatttgtctgacctctgtaaaaaatgtgatcctacagaagtggagctggataatcagatagttactgctacccagagcaatatctgtgatgaagacagtgctacagagacctgctacacttatgacagaaacaagtgctacacagctgtggtcccactcgtatatggtggtgagaccaaaatggtggaaacagccttaaccccagatgcctgctatcctgactaatttaagtcattgctgactgcatagctctttttcttgagaggctctccattttgattcagaaagttagcatatttattaccaatgaatttgaaaccagggcttttttttttttttgggtgatgtaaaaccaactccctgccaccaaaataattaaaatagtcacattgttatctttattaggtaatcacttcttaattatatgttcatactctaagtatcaaaatcttccaattatcatgctcacctgaaagaggtatgctctcttaggaatacagtttctagcattaaacaaataaacaaggggagaaaataaaactcaaggactgaaaatcaggaggtgtaataaaatgttcctcgcattcccccccgcttttttttttttttttgactttgccttggagagccagagcttccgcattttctttactattctttttaaaaaaagtttcactgtgtagagaacatatatgcataaacataggtcaattatatgtctccattagaaaaataataattggaaaacatgttctagaactagttacaaaaataatttaaggtgaaatctctaatatttataaaagtagcaaaataaatgcataattaaaatatatttggacataacagacttggaagcagatgatacagacttctttttttcataatcaggttagtgtaagaaattgccatttgaaacaatccattttgtaactgaaccttatgaaatatatgtatttcatggtacgtattctctagcacagtctgagcaattaaatagattcataagc

SEQ ID NO: 144766 - DNA, 3648 bp, Homo sapiens
  Payload ID: 8605
  Gene Symbol: JOSD1
  Gene Name: Josephin domain containing 1
  Uniprot ID: Q15040
  ENST ID: ENST00000216039
  CDS Start-End: 681-1289
acttcccgcgcccgctcgccgctgaccggagttgtctcctcctccgcagggccgcggccagagggctagaatccgcgccttccgagggagccgcgccctgcgggccccaccgtacccgaggggatggagggctgcccccgaggcccccgcgcggctcgcggtcccacgcctgccggcccgcgctagctactcgactcgtgcgctaaatttatccgtcacccaggccttgtctcccgagtcattggcgtcgtggttcaaaagaaatggaagaaaaggagcgatgtgaccgattgtgttcggtcctcctgctttgaggcctggcatttgcagagggaaacagcaagaaaatcgtggggattttggaggggggtgggagggaagggtggggaaacggaaacaaggtcttacattttatgtgtttttttaaattctgcactttgacagtggtagcaaaataaaagtaatccaaaagttatttttctattgagaagagagaagaggtgggttttatttttttccttttgattccaatcttttctcccagtgacaaagcataaatcatggacaccagagaataaggtggacctcaggaatccggaaaagactgagaagcttacattcttcctctagagggaagagtggggtgtttatagccatctctggaacctaaaacaaaaaacatgagttgtgtgccatggaaaggagacaaggccaaatctgaatcattggagctgccccaggcagcacccccacaaatctaccatgagaaacagcgcagggagctttgtgccctccacgccctcaataacgtcttccaggacagcaatgccttcacccgggatacgctgcaagagattttccagaggttgtctccaaacaccatggtgacacctcacaagaagagcatgctgggaaatggcaactacgatgtgaatgtcattatggcagcacttcagaccaaaggctatgaagctgtttggtgggacaagcgcagggatgtcggtgtcattgccctcactaacgtcatgggcttcatcatgaatctgccctccagcctatgctggggtccactgaaactgcccctcaaaaggcagcactggatctgtgttcgagaggtgggaggggcctactacaacctcgactccaaactcaagatgcccgagtggattggaggcgagagcgagctcaggaagtttctaaaacatcatttgcgaggaaagaactgtgaactcctgctggtggtaccagaagaggtagaggctcatcagagttggaggaccgatgtgtaacagttctgcccaacctccctctcgcctcagccccttcagtcctctgtgacgtgctgtggcctctacagtgggtctgcccttgccacttccccaaacatctcatcaagtttttccccttcagatctgacagtgcaataggacagacgtgtggactgttataagaactactcagtgttttgttcctgggcaaggaaggtaggagttctgtgcacttaaggccagtggtcacaaacccttgttttatttaagagacagaggagaaagtggagcggggagggaatcctagcttattttcccttttctatgaggacttgacacaggttctgctgagttgtcactgctgctccagactcacctagagatgctgcctccactttccatcctgtctgggtctgaaaacagtgggtctgcagatagtgcccacaaaccccatgtgactggtttgaaggacccagagcataaaggtctctcaggaaaccatgtccaaaaccctagcagcggtacagcatgctgtctccaacccttatccccaggtttaagggtggtttatggccatacgtggaggttttttgttgttgtttttgagactgagtttcactcttgttgcccaggctggagtgcaatggcaccatctcggctcactgcaacctccacctcctggttcaagcgattctcaggcctcagcttcccaagtagttgggattacaggcgcctgccaccacacctggctaattttgtatttttagtagagatggggtttctccatgttggtcaggctggtctcaaactcccgacctcaagtgatctgcccgccttggcctcccaaagtgctgggattacaggcgtgagccaccgcacccggcagagttttataatgaaaaattaactaatattctagtatgaagtgaggaggatactgaacaggatgtggctaaagccaacctgggacagccatggggtggcttggtttcttcactccagtgttgtccctaccatttcgcagcattgatttaggaggctctgggacaaaagagaagccaaagagcagttttcccagttcactcactctggcaaaatcaggaaaaaaaagtctgcttttgacatcaaattccactaatttggggcagcgttgggtgaggaaagtattgtgaagacaggcttcttggagtaggggcagccacaattcagtagacactctaggctcggaggctgccactgtagttgccaagctcaggttgggtggttctgtgctgtatggatggaataggacctgggctggtcatcttcatgtcgtttcctctctgtatcaatggaagttcaacccgcccctacctcttcagatagttgtaggccacttttctcttgtaactttggaaaacaaaagaggagaaataagtatcataccatatgcgtgtctccaaagtggatgtggttgcctcaaggcaggtggcaggcaggggtgacctgctggccctcagatcaatggtcgtggcaggtctgagagctgtcccactggccagacttctctccagcagcaaagccagcctggggcttgcatgttgatcctgagcaagcttaacggggtgaagctgggctttctcccccctgtgactggagtgcatgttgacaccagcactttttctgcacatgtatcttcaatccaacaaggccgtttttttaatgctgagtaacaggccaccaagcggctactgcgttatatcttctcagcaactggccgcagtctcttctgcaccattttctacaccagacctgcttggcaccacagggagctcttttcctgccctgcacaatgacattccaaccaccaccagccagacattacagccaaccttgctgattgtcacaagcaggaccttggggccactggcactgtcagatagtaagccatttcttgggtagaggaggaaactcctctccacaaatccacttgggcctgtgcaaatggcacttgaaagagtccccatgcacttggagtccatgagccaatgggatatgcaaagacgcttaaacatttcagggctggtttctctgttcatatccaattctggtgcttaggaacagggacccatgctgatgcccaagggcaaaaagccccacttcctttaaggaagtgaacaggcctgaccctgatgcccaataacgggcaaccctaggctttttgtttttcttgcttttattcctttttgttgttggccttgtgctgcgtttgtttacaaaagatgtattttgtttaaccaaatattaaaaatggaaaactccatatatgtctccttgtctgcctgaattctataattgtgtaaagaaaaataaactttagtatgacgctgttttaaaagga

SEQ ID NO: 144767 - DNA, 623 bp, Homo sapiens
  Payload ID: 8605
  Gene Symbol: JOSD1
  Gene Name: Josephin domain containing 1
  ENST ID: ENST00000417712
  CDS Start-End: 437-623
acttgaaatgtgactcccagcgagacacctacccttgacgctccctggacagtgcggcacggtcgggcccactaaccaaggcaatttgcgcccgaccgaatcaggtgcttcaaaatcccccctggtgagccgcgcgttaaccacacataaaacagtcaacgcagaaggagcgagaacgttcggccgaaaagcccggcacagagaagggaggggtgctgaaagccgcggactgcagccgctggcctggctgccgccccgaaacaacgcccacgcccgggagaagggcaggctggcgtccagtgacaaagcataaatcatggacaccagagaataaggtggacctcaggaatccggaaaagactgagaagcttacattcttcctctagagggaagagtggggtgtttatagccatctctggaacctaaaacaaaaaacatgagttgtgtgccatggaaaggagacaaggccaaatctgaatcattggagctgccccaggcagcacccccacaaatctaccatgagaaacagcgcagggagctttgtgccctccacgccctcaataacgtcttccaggacagcaatgccttcacccgggatacgctgcaagagattttccagaggt

SEQ ID NO: 144768 - DNA, 843 bp, Homo sapiens
  Payload ID: 8605
  Gene Symbol: JOSD1
  Gene Name: Josephin domain containing 1
  ENST ID: ENST00000456626
  CDS Start-End: 659-843
gcgcactccaggtggcggccggctgcgggccgcggccagagggctagaatccgcgccttccgagggagccgcgccctgcgggccccaccgtacccgaggggatggagggctgcccccgaggcccccgcgcggctcgcggtcccacgcctgccggcccgcgctagctactcgactcgtgcgctaaatttatccgtcacccaggccttgtctcccgagtcattggcgtcgtggttcaaaagaaatggaagaaaaggagcgatgtgaccgattgtgttcggtcctcctgctttgaggcctggcatttgcagagggaaacagcaagaaaatcgtggggattttggaggggggtgggagggaagggtggggaaacggaaacaaggtcttacattttatgtgtttttttaaattctgcactttgacagtggtagcaaaataaaagtaatccaaaagttatttttctattgagaagagagaagaggtgggttttatttttttccttttgattccaatcttttctcccagtgacaaagcataaatcatggacaccagagaataaggtggacctcaggaatccggaaaagactgagaagcttacattcttcctctagagggaagagtggggtgtttatagccatctctggaacctaaaacaaaaaacatgagttgtgtgccatggaaaggagacaaggccaaatctgaatcattggagctgccccaggcagcacccccacaaatctaccatgagaaacagcgcagggagctttgtgccctccacgccctcaataacgtcttccaggacagcaatgccttcacccgggatacgctgcaagagattttccagag

SEQ ID NO: 144769 - DNA, 571 bp, Homo sapiens
  Payload ID: 8605
  Gene Symbol: JOSD1
  Gene Name: Josephin domain containing 1
  ENST ID: ENST00000427389
  CDS Start-End: 202-571
gaggacggcgcgggagggcgtttccggagcacgcgccgggcgggggccgctgacgtcgggctcagtgacaaagcataaatcatggacaccagagaataaggtggacctcaggaatccggaaaagactgagaagcttacattcttcctctagagggaagagtggggtgtttatagccatctctggaacctaaaacaaaaaacatgagttgtgtgccatggaaaggagacaaggccaaatctgaatcattggagctgccccaggcagcacccccacaaatctaccatgagaaacagcgcagggagctttgtgccctccacgccctcaataacgtcttccaggacagcaatgccttcacccgggatacgctgcaagagattttccagaggttgtctccaaacaccatggtgacacctcacaagaagagcatgctgggaaatggcaactacgatgtgaatgtcattatggcagcacttcagaccaaaggctatgaagctgtttggtgggacaagcgcagggatgtcggtgtcattgccctcactaacgtcatgggcttcatcatgaatctgccct

SEQ ID NO: 144770 - DNA, 529 bp, Homo sapiens
  Payload ID: 8605
  Gene Symbol: JOSD1
  Gene Name: Josephin domain containing 1
  ENST ID: ENST00000412832
  CDS Start-End: 216-529
agttggcggcgcgcactccaggtggcggccggctgcggtgaggggaccgccagcggcgagcagtcccggcggccctgggtgacaaagcataaatcatggacaccagagaataaggtggacctcaggaatccggaaaagactgagaagcttacattcttcctctagagggaagagtggggtgtttatagccatctctggaacctaaaacaaaaaacatgagttgtgtgccatggaaaggagacaaggccaaatctgaatcattggagctgccccaggcagcacccccacaaatctaccatgagaaacagcgcagggagctttgtgccctccacgccctcaataacgtcttccaggacagcaatgccttcacccgggatacgctgcaagagattttccagaggttgtctccaaacaccatggtgacacctcacaagaagagcatgctgggaaatggcaactacgatgtgaatgtcattatggcagcacttcagaccaaaggctatgaagctgtttggtgggacaagcgcag

SEQ ID NO: 144771 - DNA, 647 bp, Homo sapiens
  Payload ID: 8605
  Gene Symbol: JOSD1
  Gene Name: Josephin domain containing 1
  ENST ID: ENST00000545590
  CDS Start-End: 1-463
gaaaggagacaaggccaaatctgaatcattggagctgccccaggcagcacccccacaaatctaccatgagaaacagcgcagggagctttgtgccctccacgccctcaataacgtcttccaggacagcaatgccttcacccgggatacgctgcaagagattttccagagggatgtcggtgtcattgccctcactaacgtcatgggcttcatcatgaatctgccctccagcctatgctggggtccactgaaactgcccctcaaaaggcagcactggatctgtgttcgagaggtgggaggggcctactacaacctcgactccaaactcaagatgcccgagtggattggaggcgagagcgagctcaggaagtttctaaaacatcatttgcgaggaaagaactgtgaactcctgctggtggtaccagaagaggtagaggctcatcagagttggaggaccgatgtgtaacagttctgcccaacctccctctcgcctcagccccttcagtcctctgtgacgtgctgtggcctctacagtgggtctgcccttgccacttccccaaacatctcatcaagtttttccccttcagatctgacagtgcaataggacagacgtgtggactgttataagaactactcagtgttttgttcct

SEQ ID NO: 144772 - DNA, 733 bp, Homo sapiens
  Payload ID: 8606
  Gene Symbol: JOSD2
  Gene Name: Josephin domain containing 2
  Uniprot ID: Q8TAC2
  ENST ID: ENST00000595669
  CDS Start-End: 122-562
cccagtcagcgcggtgttgcccgccccgcactcggagcccagagccgccgcccaggaaggggatgcggaaacccctggctcggtggagcggagaggcaggcgggcaggagccgaggacggcatgtcccaggccccgggagcacagccgagcccacccaccgtgtaccacgaacggcagcgcctggagctgtgtgctgtccacgccctcaacaacgttctgcagcagcagctctttagccaggaggctgccgatgagatctgcaagaggcccctgtcccagctggccctgccccaggtactggggctgatcctgaacctgccctcgcccgtgtcgctggggctgctgtcactgccgctgcgccggcggcactgggtggccctgcgccaggtggacggtgtctactacaacctggactccaagctgcgggcgcccgaggccctgggggatgaggacggagtcagggccttcctggcggctgcgctggcccagggcctgtgcgaggtgctgctggtagtgaccaaggaggtggaggagaagggcagctggctgcggacagactgaccatggctgaccatcggcgcccacagcgcagtccctgcgcatccccctccggctgcgcacactgcatgcctgggaaaggccagcacttcatggaccctggggaggccccgccccctccccacacccctgctccccactgccgctgctgcctcaataaatctgctgatttgc

SEQ ID NO: 144773 - DNA, 996 bp, Homo sapiens
  Payload ID: 8606
  Gene Symbol: JOSD2
  Gene Name: Josephin domain containing 2
  Uniprot ID: Q8TAC2
  ENST ID: ENST00000598418
  CDS Start-End: 255-821
ttcctaggcccgacggccgacttcagggccacgcggcccgggcgttccgtgtggagcaggagtcccgcggggccccacgggagtcgtagtccggcgcgcggggatcaccgggagctgtagtccgtcccgcctgcccagtcagcgcggtgttgcccgccccgcactcggagcccagagccgccgcccaggaaggggatgcggaaacccctggctcggtggagcggagaggcaggcgggcaggagccgaggacggcatgtcccaggccccgggagcacagccgagcccacccaccgtgtaccacgaacggcagcgcctggagctgtgtgctgtccacgccctcaacaacgttctgcagcagcagctctttagccaggaggctgccgatgagatctgcaagaggttggccccagactcccggctgaaccctcatcgcagcctcctgggcaccggcaactatgatgtcaatgtgatcatggccgctctgcaggggctgggcctggccgccgtgtggtgggacaggaggaggcccctgtcccagctggccctgccccaggtactggggctgatcctgaacctgccctcgcccgtgtcgctggggctgctgtcactgccgctgcgccggcggcactgggtggccctgcgccaggtggacggtgtctactacaacctggactccaagctgcgggcgcccgaggccctgggggatgaggacggagtcagggccttcctggcggctgcgctggcccagggcctgtgcgaggtgctgctggtagtgaccaaggaggtggaggagaagggcagctggctgcggacagactgaccatggctgaccatcggcgcccacagcgcagtccctgcgcatccccctccggctgcgcacactgcatgcctgggaaaggccagcacttcatggaccctggggaggccccgccccctccccacacccctgctccccactgccgctgctgcctcaataaatctgctgatttgctgcc

SEQ ID NO: 144774 - DNA, 582 bp, Homo sapiens
  Payload ID: 8606
  Gene Symbol: JOSD2
  Gene Name: Josephin domain containing 2
  ENST ID: ENST00000594350
  CDS Start-End: 100-582
gatgcggaaacccctggctcggtggagcggagaggcaggcggggtgaggggcgttgccaggcaaagggcgagcgccgtggctggggagccgaggacggcatgtcccaggccccgggagcacagccgagcccacccaccgtgtaccacgaacggcagcgcctggagctgtgtgctgtccacgccctcaacaacgttctgcagcagcagctctttagccaggaggctgccgatgagatctgcaagaggttggccccagactcccggctgaaccctcatcgcagcctcctgggcaccggcaactatgatgtcaatgtgatcatggccgctctgcaggggctgggcctggccgccgtgtggtgggacaggaggaggcccctgtcccagctggccctgccccaggtactggggctgatcctgaacctgccctcgcccgtgtcgctggggctgctgtcactgccgctgcgccggcggcactgggtggccctgcgccaggtggacggtgtctactacaacctggactccaagctgcgggcgcccgaggccctgggggatgaggacggagtcagggccttcctggcggct

SEQ ID NO: 144775 - DNA, 802 bp, Homo sapiens
  Payload ID: 8606
  Gene Symbol: JOSD2
  Gene Name: Josephin domain containing 2
  Uniprot ID: Q8TAC2
  ENST ID: ENST00000601423
  CDS Start-End: 61-627
ggggatgcggaaacccctggctcggtggagcggagaggcaggcggggagccgaggacggcatgtcccaggccccgggagcacagccgagcccacccaccgtgtaccacgaacggcagcgcctggagctgtgtgctgtccacgccctcaacaacgttctgcagcagcagctctttagccaggaggctgccgatgagatctgcaagaggttggccccagactcccggctgaaccctcatcgcagcctcctgggcaccggcaactatgatgtcaatgtgatcatggccgctctgcaggggctgggcctggccgccgtgtggtgggacaggaggaggcccctgtcccagctggccctgccccaggtactggggctgatcctgaacctgccctcgcccgtgtcgctggggctgctgtcactgccgctgcgccggcggcactgggtggccctgcgccaggtggacggtgtctactacaacctggactccaagctgcgggcgcccgaggccctgggggatgaggacggagtcagggccttcctggcggctgcgctggcccagggcctgtgcgaggtgctgctggtagtgaccaaggaggtggaggagaagggcagctggctgcggacagactgaccatggctgaccatcggcgcccacagcgcagtccctgcgcatccccctccggctgcgcacactgcatgcctgggaaaggccagcacttcatggaccctggggaggccccgccccctccccacacccctgctccccactgccgctgctgcctcaataaatctgctgatttgctgcc

SEQ ID NO: 144776 - DNA, 2687 bp, Homo sapiens
  Payload ID: 8607
  Gene Symbol: JRK
  Gene Name: Jrk helix-turn-helix protein
  ENST ID: ENST00000571961
  CDS Start-End: 526-2196
ggactggaggagaaccgagtggccggcacttccggccggcggcggctgctccgggtgagcaggcccctgaagtgctgtgcctggagataccattgtggaccctggagaggcacctgctgcttatgcggtaaaacctctaccaccccaaacctggtcagtttgaggggagccgctgccatagtatccacagagaaggccggagttccagccgtgtggagcagcagaggggagtctgacagggtcacctcctccacagagagaattggcagctgactgcactgccaggagccaaggcctaggtgtgtggagcctggaagaccagggatacctgaggcaggaggtgcagcgtgtggagtgagaaacccgagagggactggggcctgtgctcaggatcagcagagcaggcaggcagagtggagagggagagacggagccccagaaggggagcaggaggagagggaagtagtggcagcagcccaggccaggcgtgtgtcctgcaagtgctaggaccagccacccctccccatggcctccaagccggctgccgggaagagcagaggggagaagcggaagagggtggtgctgacactgaaggagaagattgacatctgcacgcgcctggagaagggcgagagccggaaggcactgatgcaggagtacaatgtgggcatgtccaccctctacgacatcagggcccacaaggcgcagctgctccggttcttcgccagctccgactccaacaaggcgctggagcagcggcgcacgctgcacacgcccaagctggagcacctggaccgcgtcctgtacgagtggttcctggggaagcgctccgagggcgtccccgtgtcaggccccatgctcatcgagaaggccaaggacttctacgagcagatgcagctcactgagccctgcgtgttctccggagggtggctttggcgctttaaggccagacacggcattaaaaagctagatgcatccagtgaaaagcagtcagccgaccaccaggccgcggagcagttctgtgcgtttttcaggagcttggctgctgagcacgggctgtccgccgagcaggtttacaacgctgatgagaccggccttttctggcggtgcctgccaaatcccactccggaaggcggggctgtgcctggccccaagcagggcaaggaccggctgaccgtgctgatgtgtgccaacgccacgggctcccacaggctcaagcccttggccatcgggaagtgcagcggtcccagggctttcaaaggcatccagcacctgcccgtcgcctataaggcccaggggaacgcctgggtggacaaggagattttttccgattggttccatcatatctttgtgccctcggtgagagagcacttcagaaccataggtttgccggaagacagcaaagccgttctcttgctggacagctcccgggctcacccgcaggaggccgagctggtgtccagtaacgttttcaccatcttcctgcctgccagcgtggcctcattggtgcagcccatggagcagggcattcggagagatttcatgaggaacttcattaaccctccggtccccctgcagggcccccacgcccgctacaacatgaacgatgccatattcagcgtggcctgtgcctggaacgcagtccctagccacgtcttcaggcgggcctggaggaagctgtggccgtcggttgcgtttgccgaaggctcctcctctgaggaggagttggaggcagagtgcttcccagtgaagccccacaacaagtcctttgcacacatcctggagcttgtgaaggaaggctcctcctgcccgggccagcttcgccagcgccaggccgccagctggggggtagcgggaagggaggcagaagggggacggccccctgctgccacgtcgccagcagaggttgtgtggagttcagaaaagactccgaaagctgaccaggacggcagaggagatcctggtgagggcgaggaggtggcctgggagcaggcggccgtggcctttgacgcagtcctgcgctttgcggagcggcagccatgcttcagtgcgcaggaagtggggcagctgcgggcgctgcgtgccgtgttccggagccagcagcaggagactgtgggccttgaggatgtggtagtgacctcaccagaggagttggcaattcctaagtgctgcctggaggcctctacagagacataatgttggagaacttctgccacatggcagtgctgggtaagacccctctgtccccaccagtgcccttgaggttatgggtgttggtaggtctgtggcctccatctccatgacgatggtgttaaggactgcatgtttgtgtccccccccaaagtttatatgttgaaaccctgacccccaggagggtggtattaggaggtggggcctttgggaggtgactaggcttaggtgagatcgtgagggtggggctcgccgatgagatcgagtccttataagaaaaggaaggaactagagcgaggtcactttgtgctgtgtgagcatacaagaaaactgccatcttcaagctgggtgcagtggctcacgcctgtaatcccagcactggaaggccaaggcattaggattgcatgagtccaggagttcgagaccagcctaggcatgataagaccttattgctaaaaaaaaaaaaaaaggaaataaaatagaaaattgccatctgc

SEQ ID NO: 144777 - DNA, 9124 bp, Homo sapiens
  Payload ID: 8607
  Gene Symbol: JRK
  Gene Name: Jrk helix-turn-helix protein
  ENST ID: ENST00000612905
  CDS Start-End: 526-2232
ggactggaggagaaccgagtggccggcacttccggccggcggcggctgctccgggtgagcaggcccctgaagtgctgtgcctggagataccattgtggaccctggagaggcacctgctgcttatgcggtaaaacctctaccaccccaaacctggtcagtttgaggggagccgctgccatagtatccacagagaaggccggagttccagccgtgtggagcagcagaggggagtctgacagggtcacctcctccacagagagaattggcagctgactgcactgccaggagccaaggcctaggtgtgtggagcctggaagaccagggatacctgaggcaggaggtgcagcgtgtggagtgagaaacccgagagggactggggcctgtgctcaggatcagcagagcaggcaggcagagtggagagggagagacggagccccagaaggggagcaggaggagagggaagtagtggcagcagcccaggccaggcgtgtgtcctgcaagtgctaggaccagccacccctccccatggcctccaagccggctgccgggaagagcagaggggagaagcggaagagggtggtgctgacactgaaggagaagattgacatctgcacgcgcctggagaagggcgagagccggaaggcactgatgcaggagtacaatgtgggcatgtccaccctctacgacatcagggcccacaaggcgcagctgctccggttcttcgccagctccgactccaacaaggcgctggagcagcggcgcacgctgcacacgcccaagctggagcacctggaccgcgtcctgtacgagtggttcctggggaagcgctccgagggcgtccccgtgtcaggccccatgctcatcgagaaggccaaggacttctacgagcagatgcagctcactgagccctgcgtgttctccggagggtggctttggcgctttaaggccagacacggcattaaaaagctagatgcatccagtgaaaagcagtcagccgaccaccaggccgcggagcagttctgtgcgtttttcaggagcttggctgctgagcacgggctgtccgccgagcaggtttacaacgctgatgagaccggccttttctggcggtgcctgccaaatcccactccggaaggcggggctgtgcctggccccaagcagggcaaggaccggctgaccgtgctgatgtgtgccaacgccacgggctcccacaggctcaagcccttggccatcgggaagtgcagcggtcccagggctttcaaaggcatccagcacctgcccgtcgcctataaggcccaggggaacgcctgggtggacaaggagattttttccgattggttccatcatatctttgtgccctcggtgagagagcacttcagaaccataggtttgccggaagacagcaaagccgttctcttgctggacagctcccgggctcacccgcaggaggccgagctggtgtccagtaacgttttcaccatcttcctgcctgccagcgtggcctcattggtgcagcccatggagcagggcattcggagagatttcatgaggaacttcattaaccctccggtccccctgcagggcccccacgcccgctacaacatgaacgatgccatattcagcgtggcctgtgcctggaacgcagtccctagccacgtcttcaggcgggcctggaggaagctgtggccgtcggttgcgtttgccgaaggctcctcctctgaggaggagttggaggcagagtgcttcccagtgaagccccacaacaagtcctttgcacacatcctggagcttgtgaaggaaggctcctcctgcccgggccagcttcgccagcgccaggccgccagctggggggtagcgggaagggaggcagaagggggacggccccctgctgccacgtcgccagcagaggttgtgtggagttcagaaaagactccgaaagctgaccaggacggcagaggagatcctggtgagggcgaggaggtggcctgggagcaggcggccgtggcctttgacgcagtcctgcgctttgcggagcggcagccatgcttcagtgcgcaggaagtggggcagctgcgggcgctgcgtgccgtgttccggagccagcagcaggtgaggaggcggcgtggtgccctcggggctgtggtcaaggttgaagccctccaggagggccctggtggctgtggggccacagctcagtctcccttgccctgctcatccacagcaggtgacaactgatggcttctctgccctgccctggccactggccctgtttctccccacaccctggagtggcatggtcctgtgccccgaccccacctgaggcaggagggcatgtgcagacactcaagagcccttccaggagtgggtcgcccacgggtgtggctcgggtgcccaggacggtctgtgcccgaggttcctgtcaatacaggttttattttatcacttgccgtgtcatccgaaagtgaggaaatgttttggaagggtccaccctagcctagaacaagccagagccgcaccctggctggaatgggggccaggctgagccgatctggtctcgtgttcgctggctgatcattgcagtatcagagggtggagatgtcagtctgtccacgtggagagaagttgccctccaggccgacaggaggccatgcccaccgcccctggacaggcttcgtctcagaaggctctatctgctgggctggcggccatccccgtgttgggtggaccccgagcacggttgcctgaggtccgatggcccgagagctgggactcagttcttggcctgctagcggctgaacaggccgcacatctcacttcagttgtggcctcattcagcagaatgactctggaaccatcctctgttacccgcagatcctgtcccatgggctctggccccaagatgttggggggccccacggagagttgacttggtagagttcctttctgggaagaaagtaggagtggctgaccaggccctgctcatcacccggatagaggacacggaccctgtgtggtattttggcattttggctcagagtccaatgtaccatgttgcccagaatttcatacttatggcctttacatgaatacgtcttgatcagacattcagagattagtcttaggtttgcacgtaagtcactgaaaacagtaaaacaggctgcttagatttctagcagtatgtgtgctcttatccccagctgttagcacgttagtaatacttttggggaggagttgtctgtcctggtcagttttcacagaggcggttgtaagaggatgtggttattttctccatgtctgtagttgctttgcggcatctccatttcacgggcaacactcactgcctgcagctgagattccagaacgccctgtgtccacagtgattagcctcgtctttcagcgagcataaaataggtgcattgtccttttcttttcttgaggcagggtctcactctgttgaccaggctggagtgaagtggtgtgatcccagctcactgcagcctcgacctccctggcttgagtgatcctcccgccccagcctcctgagtagctgggactagaggcacgcaccaccgcgcctttttattttttttgtagagacagggtctcactgtgttgcccaggctggtcttgaactcttggcctcaagcgatcctccttcctcatccttctaaagtgctgggattacaggtgtgagccacagcactcggcctaaataggtttttcttgctatgttattttcagtgctttgcccttgaattcttttcctctcttaaattcatatcatttggccgagtcagcacgtagtttgcattccagcgtctgctgttgattccactgaaacctctgttctcatgaaggagaggatttggctcgctgtggtttctcgtactttcacatctctgtagatacaggggcaaaagtcattgctgacagagccctatctatgtcctggaagtgtgtgtttcttgctttgaatgcatgtgtgaagattataaaagccaaatagtttttaaagatctcggtgctgaacgacagtcccagttcccatttgtgtcccattgtctttgtggtgtcacccgcactgtttgcttcattgtctggggaacttctgcacatcatgtactttgtgccatttctgggctcacgtgtcactcctaatagagcctcttaaccaagactgctggattgcagctgcttgaggcaacacaggaggttagaacatgtcccgagggctctgaaacagtaggacatcctgggtgggtggagctggggagggcatgggcaggccagctggccgagctcctggctggctctcctgagtcctctggacatggcttgtccctgtcagactgtagctcttcaggacctgagctcttcccgttcttgatctgctcttgtgctgactgtgctgggctgatgggtaggcgcttgtccccagtgagtggctgtgtcctcagggtgcccctcttccagaccaactgcagcaaggcctggagcctgactctaggtgcagcccttgtggctggaatcccttgtgccacccaggggactcgggccctgctcctcctgcagcccctcctcacctgggctcgctgctggagtgaggtttttagggagcccagagcgtactcatctctgagctgctgggcccagctgcctggtgcatacctcttgcctcggtcctgtcccccagaacgctttatggagactgccgtgtcctccgagcactttgttttcacttcctgacccgtctcagaagctcaagtggttgaatgttttagcctcagaatctttttccccaagccctctcaggtggagccccgctgtaccagacaccacagcacagctctgtgaggctgtgtctcttcactctgtttctggggctgctgaggcccctgggaagccctggagcttgccagagcagagcgagaaagtctctggtcctgtttaaatgcctccgcgttttatctgtgagcaccaggctggagccactccctgtcttctcacagtgcccctgcaagttgcagcctcagttttccagtggctcgtggggtagcaggtgctgcgtcatatggtttgggacctctgtggctgcttccagcctgctaatagaacctctttccaccactgccttcatctttggggtggcacccctgagtgctcaggcctgagggcgctcctgtgtcctcactcgggacaggcagcctccactctgggagctcccatccctcgggatgcccaggagaggccatactttcagggtggcatggtgaattcaggggttaggatgggtaggtggtctttcagccccttctacgttggggttggtttacagaacacctgtcctgcctgtgccagcctggccttctgcgagcaccccaggcacgctgtcctggaagttgtctgtctcctgcataggagggtctagagcagaccttgccctgggcctgtctgtgcgtgacttccatatgcttcattcgtgctcagccatggctgagcatgcgatggagagcacctggactgcccctgacgtcgcaggccactgttcttatccagtgggccaagtgattgattgctagtggtggagttgattggaagaaaggaagtcgcagcccctgcccacggcttccccagctcgctggggttggaggactgtcatcagttgtccccagttaaagtccatttggaggaggttcagggtcccagtggctggatgtgcttgtggagggacacggtttgaggcaggggtttgcagaaggtgtagactgcatccattcttgggaggctgtggcacagggcagcgacaacttgggacaaatcaagacccgtccacactgcacctcagggacctcacctcacgccccacataaatgtgcttattggggatccgggtgtggtggcttctgcctgaaatcccagtactctggaaggccacggcaggaggatcactttagttcaggagtttgaaaccagcctgggcaacatagggagaccccatctctacagaaagtaaaagaaaatgagccaggtgtggtggcatgtgcctgtaaccccagctactcaggaggccgaggcgggaggatccccaagcccaggagtttgaggctgcagtgagttatggcctctgcactccagcctgggtgacagagtgagagacctaatctctaaaaacaaaaaataacaaaatgtgctttggggtcaggtgtggagatcagggtcggggaggtcatgaggtaggtaggggtcaggatgtggacagtcatgggctggtgggtgtggcagccgtgaggggtgggtggtggcctgggaggcagggcctgggcagggcttctgcacttctgctgcttacccagccccctctgggttcgaggactctccttgacaagggctgagctctcgggcactgcgttggactcagctgcctactgggaggctggggagaatggacctgtgagaccttgtttgtcctcttccctgcccagctcttgtagaccccaggcctggctgtccgcagggccaggagctgcagccatggcagccaccagcctcccacatgagccccagctcccagccccacacgcccactcctttgcccatgtggtgtcagctctggcctctgcttctacacatggaccctcagaccttgcacatctgttgtttcccttgcagggcagtgatgatgacatgaaatgaggtggggtcactcctgtttagggatgagactggggcccagggaggggcaggtgtgaagttgctgagggcagagggagacccagggctacctgctcctaatgaccagcctcacgttctccactgctcactccctgctgttcaccagctgcatgaccttgagcagtgcactcaactgtaaacagaggtgaaaacactcctttaccaactgttttaggggccactcttgtttgaggccttgaacctcctttcagttccgtggtggtcctgagcctctgaatctgggtatggcccctgctgggtcctggtctcttaggcagcacgatggcctccctgctcaaggccctgcacccaggggcagattgtgggaggcccactggccatggctgggccctatcgcagagagcctgtcagcacggccatttccacacccaggctggctgggaagcaagctacgaggtgctcaaaggccctctatgtctgcaggtagccccgtcccacacaggcgaggatcgttgggcctccttagtagccaaaggaactgaggtccagagcagggaatgtgttgcccagtgtcagcatggtctgctctggggtcaggcgtcttgccctggtcctaagccaccccaagccaaggcatgtccctgggcccatttcctctctcgaggtcttgggttccctatttctgatgtgtgtgaaaggaaggcctgtcctctggggtgaccatgaggctcagtgggaggagctgccaggcttgagctgggacttggcacctggccagccttttttctatttcattgtaccttgatgggctgtcagttctgaagagaaaaaatacactaggaatccattcttcctccaccattctccctggcagagggaagtgactacacccctatggtgtggacatactgacgctcctccatgaagcagcaaagttctgttgtttcaggagactgtgggccttgaggatgtggtagtgacctcaccagaggagttggcaattcctaagtgctgcctggaggcctctacagagacataatgttggagaacttctgccacatggcagtgctgggtaagacccctctgtccccaccagtgcccttgaggttatgggtgttggtaggtctgtggcctccatctccatgacgatggtgttaaggactgcatgtttgtgtccccccccaaagtttatatgttgaaaccctgacccccaggagggtggtattaggaggtggggcctttgggaggtgactaggcttaggtgagatcgtgagggtggggctcgccgatgagatcgagtccttataagaaaaggaaggaactagagcgaggtcactttgtgctgtgtgagcatacaagaaaactgccatcttcaagctgggtgcagtggctcacgcctgtaatcccagcactggaaggccaaggcattaggattgcatgagtccaggagttcgagaccagcctaggcatgataagaccttattgctaaaaaaaaaaaaaaaggaaataaaatagaaaattgccatctgcaaatgagaaagccttcagccgacaccagactgccagtgcctttgatattggactttcagtccccagatctgtgaaaaattaatttatgttgtttaagacacctagcctgtggtattttgttatcgcaatcaaaactgactgagacaggcagtaaggagagaacagaggttccagcctgcttcaggtccaggcagttctgccattgcccctaactcctcagtgccagtcatgggccaggcccctgggggacttggaatgagtaaaacatgcacctattgttaaggttcacctggtccagaaggggaggcagacccacctgcccaccatgacccggacagaggcaataaatacggagcacctcatggccagggcctggaggattcccaccataccctacccagcgccaataacagagggaccctggagttgtgtacgcaagatagcagttcagtgcttgcacacatactagttgagaagggaaatcagggctaatgaaacagctcaactgtctggcagagccaggctccttctgccatgatacagtttggatgtttgtccctttctaatcttatatggaaatttgatccccagtgttgaaggtggggcctggtgggaaatgttcctgttatcgggatggatccttcatgaatagcctggtgccatctttgtggtaacaagtgagttctcacttgattagtttctgtgagaactgtttgttaaaaagagcctggtggcacctccctcccttcttcctcctgctcttgctatgtgatgctgctgccctttgccttccgtcatgagtggaagctccctgaagcccccaccagaagcaaatgctggcaccatgctgcttgtacagcctgcagaactgtgagccaaataaacctcttttctttataaatta

SEQ ID NO: 144778 - DNA, 587 bp, Homo sapiens
  Payload ID: 8607
  Gene Symbol: JRK
  Gene Name: Jrk helix-turn-helix protein
  ENST ID: ENST00000503272
  CDS Start-End: 511-587
gaggagaaccgagtggccggcacttccggccggcggcggctgctccggcccctgaagtgctgtgcctggagataccattgtggaccctggagaggcacctgctgcttatgcggtaaaacctctaccaccccaaacctggtcagtttgaggggagccgctgccatagtatccacagagaaggccggagttccagccgtgtggagcagcagaggggagtctgacagggtcacctcctccacagagagaattggcagctgactgcactgccaggagccaaggcctaggtgtgtggagcctggaagaccagggatacctgaggcaggaggtgcagcgtgtggagtgagaaacccgagagggactggggcctgtgctcaggatcagcagagcaggcaggcagagtggagagggagagacggagccccagaaggggagcaggaggagagggaagtagtggcagcagcccaggccaggcgtgtgtcctgcaagtgctaggaccagccacccctccccatggcctccaagccggctgccgggaagagcagaggggagaagcggaagagggtggtgctgacactgaaggagaagat

SEQ ID NO: 144779 - DNA, 2823 bp, Homo sapiens
  Payload ID: 8607
  Gene Symbol: JRK
  Gene Name: Jrk helix-turn-helix protein
  ENST ID: ENST00000615982
  CDS Start-End: 502-2172
ggcacttccggccggcggcggctgctccgggtgagcaggcccctgaagtgctgtgcctggagataccattgtggaccctggagaggcacctgctgcttatgcggtaaaacctctaccaccccaaacctggtcagtttgaggggagccgctgccatagtatccacagagaaggccggagttccagccgtgtggagcagcagaggggagtctgacagggtcacctcctccacagagagaattggcagctgactgcactgccaggagccaaggcctaggtgtgtggagcctggaagaccagggatacctgaggcaggaggtgcagcgtgtggagtgagaaacccgagagggactggggcctgtgctcaggatcagcagagcaggcaggcagagtggagagggagagacggagccccagaaggggagcaggaggagagggaagtagtggcagcagcccaggccaggcgtgtgtcctgcaagtgctaggaccagccacccctccccatggcctccaagccggctgccgggaagagcagaggggagaagcggaagagggtggtgctgacactgaaggagaagattgacatctgcacgcgcctggagaagggcgagagccggaaggcactgatgcaggagtacaatgtgggcatgtccaccctctacgacatcagggcccacaaggcgcagctgctccggttcttcgccagctccgactccaacaaggcgctggagcagcggcgcacgctgcacacgcccaagctggagcacctggaccgcgtcctgtacgagtggttcctggggaagcgctccgagggcgtccccgtgtcaggccccatgctcatcgagaaggccaaggacttctacgagcagatgcagctcactgagccctgcgtgttctccggagggtggctttggcgctttaaggccagacacggcattaaaaagctagatgcatccagtgaaaagcagtcagccgaccaccaggccgcggagcagttctgtgcgtttttcaggagcttggctgctgagcacgggctgtccgccgagcaggtttacaacgctgatgagaccggccttttctggcggtgcctgccaaatcccactccggaaggcggggctgtgcctggccccaagcagggcaaggaccggctgaccgtgctgatgtgtgccaacgccacgggctcccacaggctcaagcccttggccatcgggaagtgcagcggtcccagggctttcaaaggcatccagcacctgcccgtcgcctataaggcccaggggaacgcctgggtggacaaggagattttttccgattggttccatcatatctttgtgccctcggtgagagagcacttcagaaccataggtttgccggaagacagcaaagccgttctcttgctggacagctcccgggctcacccgcaggaggccgagctggtgtccagtaacgttttcaccatcttcctgcctgccagcgtggcctcattggtgcagcccatggagcagggcattcggagagatttcatgaggaacttcattaaccctccggtccccctgcagggcccccacgcccgctacaacatgaacgatgccatattcagcgtggcctgtgcctggaacgcagtccctagccacgtcttcaggcgggcctggaggaagctgtggccgtcggttgcgtttgccgaaggctcctcctctgaggaggagttggaggcagagtgcttcccagtgaagccccacaacaagtcctttgcacacatcctggagcttgtgaaggaaggctcctcctgcccgggccagcttcgccagcgccaggccgccagctggggggtagcgggaagggaggcagaagggggacggccccctgctgccacgtcgccagcagaggttgtgtggagttcagaaaagactccgaaagctgaccaggacggcagaggagatcctggtgagggcgaggaggtggcctgggagcaggcggccgtggcctttgacgcagtcctgcgctttgcggagcggcagccatgcttcagtgcgcaggaagtggggcagctgcgggcgctgcgtgccgtgttccggagccagcagcaggagactgtgggccttgaggatgtggtagtgacctcaccagaggagttggcaattcctaagtgctgcctggaggcctctacagagacataatgttggagaacttctgccacatggcagtgctgggttcacctggtccagaaggggaggcagacccacctgcccaccatgacccggacagaggcaataaatacggagcacctcatggccagggcctggaggattcccaccataccctacccagcgccaataacagagggaccctggagttgtgtacgcaagatagcagttcagtgcttgcacacatactagttgagaagggaaatcagggctaatgaaacagctcaactgtctggcagagccaggctccttctgccatgatacagtttggatgtttgtccctttctaatcttatatggaaatttgatccccagtgttgaaggtggggcctggtgggaaatgttcctgttatcgggatggatccttcatgaatagcctggtgccatctttgtggtaacaagtgagttctcacttgattagtttctgtgagaactgtttgttaaaaagagcctggtggcacctccctcccttcttcctcctgctcttgctatgtgatgctgctgccctttgccttccgtcatgagtggaagctccctgaagcccccaccagaagcaaatgctggcaccatgctgcttgtacagcctgcagaactgtgagccaaataaacctcttttctttataaa

SEQ ID NO: 144780 - DNA, 8932 bp, Homo sapiens
  Payload ID: 8607
  Gene Symbol: JRK
  Gene Name: Jrk helix-turn-helix protein
  ENST ID: ENST00000614134
  CDS Start-End: 334-2040
cccctgaagtgctgtgcctggagataccattgtggaccctggagaggcacctgctgcttatgcgagagaattggcagctgactgcactgccaggagccaaggcctaggtgtgtggagcctggaagaccagggatacctgaggcaggaggtgcagcgtgtggagtgagaaacccgagagggactggggcctgtgctcaggatcagcagagcaggcaggcagagtggagagggagagacggagccccagaaggggagcaggaggagagggaagtagtggcagcagcccaggccaggcgtgtgtcctgcaagtgctaggaccagccacccctccccatggcctccaagccggctgccgggaagagcagaggggagaagcggaagagggtggtgctgacactgaaggagaagattgacatctgcacgcgcctggagaagggcgagagccggaaggcactgatgcaggagtacaatgtgggcatgtccaccctctacgacatcagggcccacaaggcgcagctgctccggttcttcgccagctccgactccaacaaggcgctggagcagcggcgcacgctgcacacgcccaagctggagcacctggaccgcgtcctgtacgagtggttcctggggaagcgctccgagggcgtccccgtgtcaggccccatgctcatcgagaaggccaaggacttctacgagcagatgcagctcactgagccctgcgtgttctccggagggtggctttggcgctttaaggccagacacggcattaaaaagctagatgcatccagtgaaaagcagtcagccgaccaccaggccgcggagcagttctgtgcgtttttcaggagcttggctgctgagcacgggctgtccgccgagcaggtttacaacgctgatgagaccggccttttctggcggtgcctgccaaatcccactccggaaggcggggctgtgcctggccccaagcagggcaaggaccggctgaccgtgctgatgtgtgccaacgccacgggctcccacaggctcaagcccttggccatcgggaagtgcagcggtcccagggctttcaaaggcatccagcacctgcccgtcgcctataaggcccaggggaacgcctgggtggacaaggagattttttccgattggttccatcatatctttgtgccctcggtgagagagcacttcagaaccataggtttgccggaagacagcaaagccgttctcttgctggacagctcccgggctcacccgcaggaggccgagctggtgtccagtaacgttttcaccatcttcctgcctgccagcgtggcctcattggtgcagcccatggagcagggcattcggagagatttcatgaggaacttcattaaccctccggtccccctgcagggcccccacgcccgctacaacatgaacgatgccatattcagcgtggcctgtgcctggaacgcagtccctagccacgtcttcaggcgggcctggaggaagctgtggccgtcggttgcgtttgccgaaggctcctcctctgaggaggagttggaggcagagtgcttcccagtgaagccccacaacaagtcctttgcacacatcctggagcttgtgaaggaaggctcctcctgcccgggccagcttcgccagcgccaggccgccagctggggggtagcgggaagggaggcagaagggggacggccccctgctgccacgtcgccagcagaggttgtgtggagttcagaaaagactccgaaagctgaccaggacggcagaggagatcctggtgagggcgaggaggtggcctgggagcaggcggccgtggcctttgacgcagtcctgcgctttgcggagcggcagccatgcttcagtgcgcaggaagtggggcagctgcgggcgctgcgtgccgtgttccggagccagcagcaggtgaggaggcggcgtggtgccctcggggctgtggtcaaggttgaagccctccaggagggccctggtggctgtggggccacagctcagtctcccttgccctgctcatccacagcaggtgacaactgatggcttctctgccctgccctggccactggccctgtttctccccacaccctggagtggcatggtcctgtgccccgaccccacctgaggcaggagggcatgtgcagacactcaagagcccttccaggagtgggtcgcccacgggtgtggctcgggtgcccaggacggtctgtgcccgaggttcctgtcaatacaggttttattttatcacttgccgtgtcatccgaaagtgaggaaatgttttggaagggtccaccctagcctagaacaagccagagccgcaccctggctggaatgggggccaggctgagccgatctggtctcgtgttcgctggctgatcattgcagtatcagagggtggagatgtcagtctgtccacgtggagagaagttgccctccaggccgacaggaggccatgcccaccgcccctggacaggcttcgtctcagaaggctctatctgctgggctggcggccatccccgtgttgggtggaccccgagcacggttgcctgaggtccgatggcccgagagctgggactcagttcttggcctgctagcggctgaacaggccgcacatctcacttcagttgtggcctcattcagcagaatgactctggaaccatcctctgttacccgcagatcctgtcccatgggctctggccccaagatgttggggggccccacggagagttgacttggtagagttcctttctgggaagaaagtaggagtggctgaccaggccctgctcatcacccggatagaggacacggaccctgtgtggtattttggcattttggctcagagtccaatgtaccatgttgcccagaatttcatacttatggcctttacatgaatacgtcttgatcagacattcagagattagtcttaggtttgcacgtaagtcactgaaaacagtaaaacaggctgcttagatttctagcagtatgtgtgctcttatccccagctgttagcacgttagtaatacttttggggaggagttgtctgtcctggtcagttttcacagaggcggttgtaagaggatgtggttattttctccatgtctgtagttgctttgcggcatctccatttcacgggcaacactcactgcctgcagctgagattccagaacgccctgtgtccacagtgattagcctcgtctttcagcgagcataaaataggtgcattgtccttttcttttcttgaggcagggtctcactctgttgaccaggctggagtgaagtggtgtgatcccagctcactgcagcctcgacctccctggcttgagtgatcctcccgccccagcctcctgagtagctgggactagaggcacgcaccaccgcgcctttttattttttttgtagagacagggtctcactgtgttgcccaggctggtcttgaactcttggcctcaagcgatcctccttcctcatccttctaaagtgctgggattacaggtgtgagccacagcactcggcctaaataggtttttcttgctatgttattttcagtgctttgcccttgaattcttttcctctcttaaattcatatcatttggccgagtcagcacgtagtttgcattccagcgtctgctgttgattccactgaaacctctgttctcatgaaggagaggatttggctcgctgtggtttctcgtactttcacatctctgtagatacaggggcaaaagtcattgctgacagagccctatctatgtcctggaagtgtgtgtttcttgctttgaatgcatgtgtgaagattataaaagccaaatagtttttaaagatctcggtgctgaacgacagtcccagttcccatttgtgtcccattgtctttgtggtgtcacccgcactgtttgcttcattgtctggggaacttctgcacatcatgtactttgtgccatttctgggctcacgtgtcactcctaatagagcctcttaaccaagactgctggattgcagctgcttgaggcaacacaggaggttagaacatgtcccgagggctctgaaacagtaggacatcctgggtgggtggagctggggagggcatgggcaggccagctggccgagctcctggctggctctcctgagtcctctggacatggcttgtccctgtcagactgtagctcttcaggacctgagctcttcccgttcttgatctgctcttgtgctgactgtgctgggctgatgggtaggcgcttgtccccagtgagtggctgtgtcctcagggtgcccctcttccagaccaactgcagcaaggcctggagcctgactctaggtgcagcccttgtggctggaatcccttgtgccacccaggggactcgggccctgctcctcctgcagcccctcctcacctgggctcgctgctggagtgaggtttttagggagcccagagcgtactcatctctgagctgctgggcccagctgcctggtgcatacctcttgcctcggtcctgtcccccagaacgctttatggagactgccgtgtcctccgagcactttgttttcacttcctgacccgtctcagaagctcaagtggttgaatgttttagcctcagaatctttttccccaagccctctcaggtggagccccgctgtaccagacaccacagcacagctctgtgaggctgtgtctcttcactctgtttctggggctgctgaggcccctgggaagccctggagcttgccagagcagagcgagaaagtctctggtcctgtttaaatgcctccgcgttttatctgtgagcaccaggctggagccactccctgtcttctcacagtgcccctgcaagttgcagcctcagttttccagtggctcgtggggtagcaggtgctgcgtcatatggtttgggacctctgtggctgcttccagcctgctaatagaacctctttccaccactgccttcatctttggggtggcacccctgagtgctcaggcctgagggcgctcctgtgtcctcactcgggacaggcagcctccactctgggagctcccatccctcgggatgcccaggagaggccatactttcagggtggcatggtgaattcaggggttaggatgggtaggtggtctttcagccccttctacgttggggttggtttacagaacacctgtcctgcctgtgccagcctggccttctgcgagcaccccaggcacgctgtcctggaagttgtctgtctcctgcataggagggtctagagcagaccttgccctgggcctgtctgtgcgtgacttccatatgcttcattcgtgctcagccatggctgagcatgcgatggagagcacctggactgcccctgacgtcgcaggccactgttcttatccagtgggccaagtgattgattgctagtggtggagttgattggaagaaaggaagtcgcagcccctgcccacggcttccccagctcgctggggttggaggactgtcatcagttgtccccagttaaagtccatttggaggaggttcagggtcccagtggctggatgtgcttgtggagggacacggtttgaggcaggggtttgcagaaggtgtagactgcatccattcttgggaggctgtggcacagggcagcgacaacttgggacaaatcaagacccgtccacactgcacctcagggacctcacctcacgccccacataaatgtgcttattggggatccgggtgtggtggcttctgcctgaaatcccagtactctggaaggccacggcaggaggatcactttagttcaggagtttgaaaccagcctgggcaacatagggagaccccatctctacagaaagtaaaagaaaatgagccaggtgtggtggcatgtgcctgtaaccccagctactcaggaggccgaggcgggaggatccccaagcccaggagtttgaggctgcagtgagttatggcctctgcactccagcctgggtgacagagtgagagacctaatctctaaaaacaaaaaataacaaaatgtgctttggggtcaggtgtggagatcagggtcggggaggtcatgaggtaggtaggggtcaggatgtggacagtcatgggctggtgggtgtggcagccgtgaggggtgggtggtggcctgggaggcagggcctgggcagggcttctgcacttctgctgcttacccagccccctctgggttcgaggactctccttgacaagggctgagctctcgggcactgcgttggactcagctgcctactgggaggctggggagaatggacctgtgagaccttgtttgtcctcttccctgcccagctcttgtagaccccaggcctggctgtccgcagggccaggagctgcagccatggcagccaccagcctcccacatgagccccagctcccagccccacacgcccactcctttgcccatgtggtgtcagctctggcctctgcttctacacatggaccctcagaccttgcacatctgttgtttcccttgcagggcagtgatgatgacatgaaatgaggtggggtcactcctgtttagggatgagactggggcccagggaggggcaggtgtgaagttgctgagggcagagggagacccagggctacctgctcctaatgaccagcctcacgttctccactgctcactccctgctgttcaccagctgcatgaccttgagcagtgcactcaactgtaaacagaggtgaaaacactcctttaccaactgttttaggggccactcttgtttgaggccttgaacctcctttcagttccgtggtggtcctgagcctctgaatctgggtatggcccctgctgggtcctggtctcttaggcagcacgatggcctccctgctcaaggccctgcacccaggggcagattgtgggaggcccactggccatggctgggccctatcgcagagagcctgtcagcacggccatttccacacccaggctggctgggaagcaagctacgaggtgctcaaaggccctctatgtctgcaggtagccccgtcccacacaggcgaggatcgttgggcctccttagtagccaaaggaactgaggtccagagcagggaatgtgttgcccagtgtcagcatggtctgctctggggtcaggcgtcttgccctggtcctaagccaccccaagccaaggcatgtccctgggcccatttcctctctcgaggtcttgggttccctatttctgatgtgtgtgaaaggaaggcctgtcctctggggtgaccatgaggctcagtgggaggagctgccaggcttgagctgggacttggcacctggccagccttttttctatttcattgtaccttgatgggctgtcagttctgaagagaaaaaatacactaggaatccattcttcctccaccattctccctggcagagggaagtgactacacccctatggtgtggacatactgacgctcctccatgaagcagcaaagttctgttgtttcaggagactgtgggccttgaggatgtggtagtgacctcaccagaggagttggcaattcctaagtgctgcctggaggcctctacagagacataatgttggagaacttctgccacatggcagtgctgggtaagacccctctgtccccaccagtgcccttgaggttatgggtgttggtaggtctgtggcctccatctccatgacgatggtgttaaggactgcatgtttgtgtccccccccaaagtttatatgttgaaaccctgacccccaggagggtggtattaggaggtggggcctttgggaggtgactaggcttaggtgagatcgtgagggtggggctcgccgatgagatcgagtccttataagaaaaggaaggaactagagcgaggtcactttgtgctgtgtgagcatacaagaaaactgccatcttcaagctgggtgcagtggctcacgcctgtaatcccagcactggaaggccaaggcattaggattgcatgagtccaggagttcgagaccagcctaggcatgataagaccttattgctaaaaaaaaaaaaaaaggaaataaaatagaaaattgccatctgcaaatgagaaagccttcagccgacaccagactgccagtgcctttgatattggactttcagtccccagatctgtgaaaaattaatttatgttgtttaagacacctagcctgtggtattttgttatcgcaatcaaaactgactgagacaggcagtaaggagagaacagaggttccagcctgcttcaggtccaggcagttctgccattgcccctaactcctcagtgccagtcatgggccaggcccctgggggacttggaatgagtaaaacatgcacctattgttaaggttcacctggtccagaaggggaggcagacccacctgcccaccatgacccggacagaggcaataaatacggagcacctcatggccagggcctggaggattcccaccataccctacccagcgccaataacagagggaccctggagttgtgtacgcaagatagcagttcagtgcttgcacacatactagttgagaagggaaatcagggctaatgaaacagctcaactgtctggcagagccaggctccttctgccatgatacagtttggatgtttgtccctttctaatcttatatggaaatttgatccccagtgttgaaggtggggcctggtgggaaatgttcctgttatcgggatggatccttcatgaatagcctggtgccatctttgtggtaacaagtgagttctcacttgattagtttctgtgagaactgtttgttaaaaagagcctggtggcacctccctcccttcttcctcctgctcttgctatgtgatgctgctgccctttgccttccgtcatgagtggaagctccctgaagcccccaccagaagcaaatgctggcaccatgctgcttgtacagcctgcagaactgtgagccaaataaacctcttttctttataaatta

SEQ ID NO: 144781 - DNA, 2855 bp, Homo sapiens
  Payload ID: 8608
  Gene Symbol: JRKL
  Gene Name: JRK-like
  Uniprot ID: Q9Y4A0
  ENST ID: ENST00000332349
  CDS Start-End: 248-1822
atcttccgggagcgtggctaggggcggagcgactgccgcgcgatagtcagggagctgtgcgggtcctggttgcaagagagtctatttgccagccaaccccagcccgggaggggatcagggccaccaggttgctggtaaggatgaaagactgagtgtgttaagactgttgaagtgagcctgtgtaagagaaggaaggattttgtggattgctacattgtgagtgtggggtgagtcccagaacctcgctatgtcagggaaacggaagcgtgtggtgttgactattaaagataagcttgatataataaagaaacttgaagacggaggttcttccaaacaactggcagtgatttatggaattggtgaaacaacagttcgggatataagaaaaaataaggaaaagattataacttatgcaagcagttctgattccacaagtcttttggccaagaggaaatctatgaagccatccatgtatgaggaattggacagggcaatgctggaatggttcaaccagcaaagagcaaaagggaatcccatatctggaccaatttgtgcaaaaagggcagagttcttcttttatgctttgggaatggatggtgattttaacccctctgccggttggctaactcgttttaagcagcggcacagcattagagagattaacattagaaatgaaagattaaatggagatgagactgcggtggaagatttttgtaataactttcgagattttattgaacgagagaatttacagcctgaacaaatctacaatgcagatgaaactggactcttttggaagtgcttgccttctaggatttcagtaatcaaaggtaaatgcactgtccctgggcacaaatcaattgaagaaagagtcacaatcatgtgttgtgccaatgcaacaggtttacacaaacttaaactttgtgttgtggggaaagcaaagaaacctcgctcctttaaatcaactgacaccttaaacctgccagtctcttatttcagccaaaaaggtgcatggatggatctttccattttccgacaatggtttgataaaatttttgtgccgcaagttcgagagtatttaagatctaaaggcttgcaggaaaaggctgtgctcttgttggataattcaccaacacatccaaatgaaaatgtcctaaggtcagatgatggccaaatatttgctaaatatttaccacctaatgtggcctcattgattcagccttcagatcagggagtcatagcaacgatgaagagaaattatcgtgcaggtcttctccagaacaacttggaagaaggtaatgacctgaaatcattctggaagaagctaactctgttggatgcactttatgaaatagcaatggcatggaacttagtaaaaccagttaccattagcagagcatggaagaagattctccctatggtagaggagaaagagagcctggactttgatgttgaagatatttctgtggctactgtggctgccattttacaacacaccaaaggattggaaaatgtgactactgagaaccttgaaaaatggcttgaagtagacagtactgaaccaggctatgaagtgttaactgatagcgaaatcatcagaagagcacaaggccaggcagatgaatccagtgaaaatgaggaggaggaaatagaactaattccagagaaacatattaatcatgcagctgccctccagtggactgaaaatttattggattatctagaacaacaaggtgatatgattctacctgatagactggtaatacgtaaacttcgagccaccatcagaaataaacagaagatgacaaagtcaagtcaataatgtcatttcaattttattgttctgctcattgtgtttgtgacaaactctttgcaatatggcttaattttctttgtgttctgaattctcagacttggtcctgtgaaatacaggcacaaaatgtatctgaagtggtttgaggattatgtgttttcatcatctgtgtcttttgtccttttatttgtacagataatcagaagatgatactgaatagatataaattacatgtacacatgtattcactttttagaatctgcaattataccttctgtaacagtggcattcccttaattttctagtgaaagttagagataactgaacagactgaagcacttttctgaaatcttttgcttgatttatgaaggctgccatagttatcttttcttgtgttaaccatcttaaatgatgttttgtatattttaatagactgataggatgagaaagatttatattattagatttcaggatgatttataataattcaaaaatgaaattcaataatggggaaataattatgaattatagaaattatgccttcattctcttacatttgtgtgggttgcaagagggggagattattctggaaatgaagtaaatatgggaagttattgccaaatgagagagaaactatgggaaagctgatctataaagaggcattctgatcaattcatttgtaggaaactgggaaataaaaacctggggaactttaggttatttatacaaagggaataaataggctgattttaatttggtaagttgatctttttattatgaatttggtaatagtataggtttattatttattcatctaattttatagtacaggttttgtaatgttacatgtgatgatatgagctcccaccttatatgggggaacatcttgggaatttgagatttaataagtttttttttttttttttttagtgtttttactgcatactcacaaatgttgtctataatttgaaaaatattgtcatatctggccctttgatgagaaaaggaaattacaataataaagttttatgattttaaataa

SEQ ID NO: 144782 - DNA, 3781 bp, Homo sapiens
  Payload ID: 8609
  Gene Symbol: JMJD1C
  Gene Name: jumonji domain containing 1C
  ENST ID: ENST00000327520
  CDS Start-End: 1-2870
ctgatagtatgccagcaatgcagttagcttctaaagatcgtgttagtgaaagatcttcagctggggcacataaaacagattgcctcaaactagcagaagccggagaaactggaagaatcattttgccaaatgtgaattcagacagtgttcacacaaaatctgaaaaaaactttcaggctgtctcacagggcagtgttcccagttcagtcatgtctgctgtaaatacgatgtgtaataccaaaacggatgtaatcacatctgctgccgatactaccagtgtttccagctggggtggttcagaagtaatttcctctttatcaaataccattttggcctctacatcatcagaatgtgtatcttcaaaaagtgtcagtcagccagtggctcaaaaacaagaatgcaaggtcagcaccacagcaccagttacattagccagtagtaagacaggaagtgttgttcaacccagttctgggttctcaggcacaactgattttatccatttaaaaaagcacaaggcagcattggctgcagctcagtataaaagtagtaatgccagtgagactgaacctaatgctataaaaaatcagacactttcagcctcccttcctctggatagcactgtaatctgtagtacaattaacaaagcaaactctgtaggaaatgggcaagcttcccagacaagtcaaccaaactaccatactaaactgaaaaaggcctggctcaccagacactcagaagaagataaaaatactaataaaatggaaaattcagggaattctgtatcagaaattattaagccatgttctgtcaacttaatagcctctacatctagtgatatacaaaatagtgtagatagtaagatcatagttgataaatatgtaaaagatgataaagtcaacaggagaaaagccaaaagaacttatgaatctggctctgaaagtggagactcagatgaaagtgaaagcaagtcagagcaaaggactaaaagacaacctaagccaacttacaaaaagaagcaaaatgatttgcaaaagagaaaaggtgaaatagaagaagatttgaaacccaatggagttctcagcaggagtgccaaagaaagaagtaaactgaagttgcaaagcaacagtaataccaaaattgcctggaaaagagcagtgagaggagtccgggagatgtgtgatgcatgtgaagcaacattgtttaacattcactgggtctgccaaaaatgtggatttgtggtctgcttagattgttacaaggcaaaggaaaggaagagttctagagataaagaactatatgcttggatgaagtgtgtgaagggacagcctcatgatcacaaacatttaatgccaacccaaattatacctggttctgttttgacagatcttctagatgccatgcacactcttagggaaaaatatggtattaaatcccattgtcattgtactaacaaacagaatttacaagttggaaattttcctacaatgaatggtgtatctcaagttttacagaatgttcttaatcacagtaataaaatttctctgtgcatgcctgagtctcagcagcaaaatactcctccgaagtctgagaaaaatggtggcagcagcccagagagtgatgtaggcacagataacaagttaactcctccagaatcccagtcaccactgcactggttagcagatcttgcagagcaaaaagccagagaggaaaaaaaagaaaacaaagaacttacccttgaaaaccaaattaaagaagaaagagaacaagacaactctgaatctccaaatggcagaacatcacctcttgtgtcccagaataatgaacaaggctcaaccttacgggatttgctgactacaacagctggaaagctacgtgtggggtctacagatgctggcattgcctttgccccagtatattcaatgggagccccaagtagcaaaagtggacggactatgcctaacattcttgatgacataattgcttcagttgttgaaaacaaaattccaccaagtaaaacctccaagataaatgtaaaaccagagcttaaagaagagcctgaagaaagcataatatctgcagtggatgaaaataataaattatacagtgatataccacattcttggatctgtgagaagcatattttatggcttaaggattataagaatagcagtaattggaagcttttcaaagaatgttggaaacaaggacagcctgcagtggtttctggtgtgcataagaaaatgaacattagcctatggaaggcggaatcaattagtcttgattttggagaccaccaagctgatctcctgaactgcaaagatagcatcatttcaaatgccaatgttaaggaattctgggatggttttgaagaagtttcaaaacggcagaaaaacaagagtggagaaacagttgttttaaaattgaaagactggccttcaggagaagacttcaagactatgatgccagcaagatacgaagatcttttaaaaagtctgccattgccagaatattgtaatccagaaggaaaattcaatttggcctctcatttgccaggattttttgtacgtcctgatctaggacccaggttgtgcagtgcctatggtgtagttgctgctaaagatcatgatataggaacaacaaatctccatattgaagtttctgatgttgtaaatatactagtttatgttggcatagcaaaaggaaatggcattctctcaaaagcaggaattctcaagaaatttgaggaagaagatttggatgacattttaaggaaaagattgaaggactcaagtgaaatacctggtgctctgtggcatatttatgctgggaaagatgttgacaagataagggaatttcttcaaaaggtataagttagtttgcaaataatatctcttcccctcaagcaaggacttattcattgttgccgtaccttcacttggcattcaacaatataagaccattacataatttttacttcaaagtagatgggagtttttgttgaaagtcaaaaccctgtttctcttgctcctctttgaaagtctgttaacattttgagggttttgaatggtgatttgttcccagttggtagtgtgcctccattccctgttaataaaagactgatctgttcttgagccagatattagttgggtggcgaaaagtagctatctggagtcgcgggatgtaaaaacaaatatttcatggaaacgtctaaagaaggtaggatctttattttctttgaatctgatagatatttttggctgctgacctagggaatgattctactctatcacatctgatactatgatacttactgagtagactcagattttgagtaatcataccttgactgtagttggcatatactctgaaagaaatttatatatcaacctgaaataattggttgaaaccctttgctcaggtactttttaaacttcgtaattatggaaatttgttttaagaaatgttcagtgctgatacatcatctttctgaaaggatgtaagttctgtctgtgatcaatgtgaagtaaaagagttacagccttttttgtaccattttatccctgaatacttacctgtattttaatctgaagtatgatcatttgtgccttctaaagcagattatttaactgattaaagagtcccttgaaattgatttttcaagtgttagaaggttagccatgtaaaggtatttatacttacctcaaaaaaggatcaataaatgtttatgaaatccatacatatgaatggtttggcttttggtaaaaaaaaaaaaaaaaaaaaa

SEQ ID NO: 144783 - DNA, 8666 bp, Homo sapiens
  Payload ID: 8609
  Gene Symbol: JMJD1C
  Gene Name: jumonji domain containing 1C
  Uniprot ID: Q15652
  ENST ID: ENST00000399262
  CDS Start-End: 220-7842
cacaaggctgcgaatctgggagtccaaaggagtgtttgcggggagggcccgaggtcgctgtgtccggggcagagcggccggttcgtcccgagtctgcgctctttcgggtccgctgctgtgtcccggtccgctctcctcagcatgagcggccggtaggagtgaggtttcatcggttccctcgcactggaggaggcagcggccgcttcggcagcgacagctatggcggtagagacgcgggcagagctggtgggtaagcggttcctgtgtgtggcggtcggcgacgaggcacgttcggagcgctgggagagcggacgcggctggcgaagctggcgagcgggggtcatccgagccgtgtcacacagggacagccgcaatccggacctggcggtgtatgtggaatttgatgatcttgaatgggataaacgagagtgggttaaagtttatgaagatttttcaactttcttggtggaataccacttaatctgggccaaaaggaatgaccctagccagactcagggatcaaagagcaaacagattcagtggcctgcattgactttcaaacctctggttgaaagaaatatacccagttcagtcactgcagtagaattccttgtagataagcaactggattttttaactgaagatagtgcctttcagccctaccaggacgacatagacagcctaaacccagttctcagggacaacccgcagcttcatgaggaagtgaaagtctgggtaaaggaacaaaaggttcaggagatttttatgcaaggtccttattccttaaatggatacagagtgagagtatatagacaagactctgccacccagtggtttactggcataattactcatcatgatctcttcacccgcaccatgatcgttatgaatgatcaggtactagaaccacagaatgtcgatccttctatggttcaaatgacctttctagatgatgttgttcactctttgttaaaaggtgaaaatattggcattacatcacgacgcaggtctcgtgccaatcaaaacgtcaacgctgttcacagccattatacacgtgcccaagcaaatagtcccagaccagcaatgaactcccaagctgctgtaccaaaacagaatacacaccagcaacagcaacaaagaagtatccgtccaaataagaggaagggctcagatagcagtataccagatgaagagaagatgaaggaggaaaaatatgattatatatcacgaggagaaaatcctaaaggtaaaaacaaacacttgatgaataaaagaaggaaacctgaggaggatgaaaagaaactaaatatgaaaagacttcgaactgacaatgtttcagacttttctgagagcagtgactcagaaaattcaaataagagaataatagataattcctcagaacagaagccagagaatgaattgaaaaataaaaatacttcaaaaataaatggagaagaaggaaaaccccataataatgagaaggcaggagaagagaccctaaaaaatagccagcctccctgggatcaaatacaggaagataaaaaacatgaagaagcagagaagcggaagtctgttgacactcagcttcaagaagatatgattattcattcgtcagaacagtccacagtttctgatcataattctaatgatttacttcctcaggaatgcaatatggataaaacacataccatggaattgctaccaaaggagaagtttgtatccagaccacccacaccaaaatgtgttattgatattacaaatgacactaatttagaaaaggtggctcaggaaaactcaagtacctttggccttcagacacttcagaaaatggatcctaatgttagtgattcaaaacactctattgcaaatgcaaaattcttggaaacagcaaaaaaagattctgaccagagctgggtcagtgatgtagttaaagtggatctaacccaatcaagtgttacaaatgcttcttcaggaaatgatcacttgaacatggaaaaagagaagtatgtctcttacatttctcctttaagtgcagtttctgtcatggaagataagctgcataagcgaagtccacctccagagactataaaatctaaacttaatacttcagtagatactcacaagataaaatccagcccatcacctgaagttgttaaacccaaaataactcattctcctgattctgtaaagtctaaggccacttatgtgaacagccaagctactggtgaaagaagattggcaaataagatagaacatgagctatcaagatgcagttttcatccaattcctactcgaagcagtacattagaaactacaaagagtcctcttatcattgataaaaatgagcattttacagtttacagagatcctgcacttattgggtcagaaacaggagctaatcatatttcacctttcctaagccagcatccttttcctcttcactcctcatctcatagaacctgtttaaatccaggtacccatcatcctgccttaactcctgcaccccatttactagccggatcatctagtcaaactccattacctaccattaacactcatcctctgactagtggtccacaccatgctgttcatcaccctcatttacttcccactgtgttacctggagtgcctactgcctccttacttggtggccacccacgactagagagtgctcatgccagcagcttgagccacttagcgctagcacaccagcaacaacaacagttgttacagcaccagtcacctcatcttcttggacaagcccatccttctgcttcatataatcagcttggactttatccaattatttggcagtatccaaatggaacacatgcatactcaggacttggtttgccttcttctaagtgggttcacccagaaaatgcagttaatgctgaagcttcattaaggaggaattctcccagtccttggctacatcagcccacccctgtgacctcagcagatggtattggattacttagtcacattcctgtcagaccttccagtgcagagcctcatcggcctcttaaaattacagcccattccagtccaccattgacaaaaactttagtagatcatcataaggaagaattagaaagaaaagcttttatggaaccattacggtctgttgcatccacatcagccaaaaatgacctggatctaaataggtcacagactggaaaagattgtcacttacataggcattttgtggatccagtattaaatcagttacagaggccaccccaggagactggagagaggttaaacaaatacaaagaggaacaccgtcgaattcttcaagaaagtattgatgttgctccctttacaactaaaatcaagggacttgagggtgagagagagaattattccagagtggcatcatcatcttccagtcctaaaagccatatcatcaaacaagatatggatgtagaacgctcagtatcagatctttataaaatgaagcactcagtgcctcagagtttaccccaaagtaactatttcactacattgtctaatagtgtggtcaatgaaccaccaagatcatacccatccaaagaagtttcaaatatttacggtgataaacagagtaatgcccttgcagcggcagcagctaatcctcaaactctgacttcatttataacatctctttcaaagcctccacctttgattaaacaccaaccagaaagtgaaggtttagtaggcaagataccagaacatcttccacatcagattgcatctcactcagtaacaaccttcagaaatgattgtaggagtcctacccatttgacagtttcttctacaaatacactccgcagtatgcctgcattacatagagcaccagtatttcacccaccaatccatcacagcctggaaagaaaggaaggcagctatagtagtctttcccctccaactttaactccggtgatgccagtaaatgctggtggtaaagttcaagaatcacagaagcctccaactctaatacccgaaccaaaagactcccaggcaaattttaagagttcttcagaacagagtttgacggagatgtggagacctaataataacctcagcaaagagaaaactgaatggcatgtggagaaaagcagcggaaagttacaggctgctatggcatctgtcattgtgcgtccatcttctagtacaaaaactgatagtatgccagcaatgcagttagcttctaaagatcgtgttagtgaaagatcttcagctggggcacataaaacagattgcctcaaactagcagaagccggagaaactggaagaatcattttgccaaatgtgaattcagacagtgttcacacaaaatctgaaaaaaactttcaggctgtctcacagggcagtgttcccagttcagtcatgtctgctgtaaatacgatgtgtaataccaaaacggatgtaatcacatctgctgccgatactaccagtgtttccagctggggtggttcagaagtaatttcctctttatcaaataccattttggcctctacatcatcagaatgtgtatcttcaaaaagtgtcagtcagccagtggctcaaaaacaagaatgcaaggtcagcaccacagcaccagttacattagccagtagtaagacaggaagtgttgttcaacccagttctgggttctcaggcacaactgattttatccatttaaaaaagcacaaggcagcattggctgcagctcagtataaaagtagtaatgccagtgagactgaacctaatgctataaaaaatcagacactttcagcctcccttcctctggatagcactgtaatctgtagtacaattaacaaagcaaactctgtaggaaatgggcaagcttcccagacaagtcaaccaaactaccatactaaactgaaaaaggcctggctcaccagacactcagaagaagataaaaatactaataaaatggaaaattcagggaattctgtatcagaaattattaagccatgttctgtcaacttaatagcctctacatctagtgatatacaaaatagtgtagatagtaagatcatagttgataaatatgtaaaagatgataaagtcaacaggagaaaagccaaaagaacttatgaatctggctctgaaagtggagactcagatgaaagtgaaagcaagtcagagcaaaggactaaaagacaacctaagccaacttacaaaaagaagcaaaatgatttgcaaaagagaaaaggtgaaatagaagaagatttgaaacccaatggagttctcagcaggagtgccaaagaaagaagtaaactgaagttgcaaagcaacagtaatactggcattcctcgttcagtattgaaagattggcgtaaagtcaagaagctgaagcaaactggggaatcctttttacaggatgactcctgctgtgagatagggcctaatttacaaaagtgtcgagaatgtagacttattcgcagtaaaaaaggagaagaaccagctcactcaccagtattttgtagattttactactttagacggttgtcatttagtaaaaacggagtagttagaatagatggtttctcttctcctgaccaatatgatgatgaagctatgagtttgtggacacatgaaaattttgaagatgatgaactagatatagagacttctaaatatatcttggatataataggtgataagttctgtcaattagtaacatctgaaaaaacagctttgtcctgggtgaaaaaggatgccaaaattgcctggaaaagagcagtgagaggagtccgggagatgtgtgatgcatgtgaagcaacattgtttaacattcactgggtctgccaaaaatgtggatttgtggtctgcttagattgttacaaggcaaaggaaaggaagagttctagagataaagaactatatgcttggatgaagtgtgtgaagggacagcctcatgatcacaaacatttaatgccaacccaaattatacctggttctgttttgacagatcttctagatgccatgcacactcttagggaaaaatatggtattaaatcccattgtcattgtactaacaaacagaatttacaagttggaaattttcctacaatgaatggtgtatctcaagttttacagaatgttcttaatcacagtaataaaatttctctgtgcatgcctgagtctcagcagcaaaatactcctccgaagtctgagaaaaatggtggcagcagcccagagagtgatgtaggcacagataacaagttaactcctccagaatcccagtcaccactgcactggttagcagatcttgcagagcaaaaagccagagaggaaaaaaaagaaaacaaagaacttacccttgaaaaccaaattaaagaagaaagagaacaagacaactctgaatctccaaatggcagaacatcacctcttgtgtcccagaataatgaacaaggctcaaccttacgggatttgctgactacaacagctggaaagctacgtgtggggtctacagatgctggcattgcctttgccccagtatattcaatgggagccccaagtagcaaaagtggacggactatgcctaacattcttgatgacataattgcttcagttgttgaaaacaaaattccaccaagtaaaacctccaagataaatgtaaaaccagagcttaaagaagagcctgaagaaagcataatatctgcagtggatgaaaataataaattatacagtgatataccacattcttggatctgtgagaagcatattttatggcttaaggattataagaatagcagtaattggaagcttttcaaagaatgttggaaacaaggacagcctgcagtggtttctggtgtgcataagaaaatgaacattagcctatggaaggcggaatcaattagtcttgattttggagaccaccaagctgatctcctgaactgcaaagatagcatcatttcaaatgccaatgttaaggaattctgggatggttttgaagaagtttcaaaacggcagaaaaacaagagtggagaaacagttgttttaaaattgaaagactggccttcaggagaagacttcaagactatgatgccagcaagatacgaagatcttttaaaaagtctgccattgccagaatattgtaatccagaaggaaaattcaatttggcctctcatttgccaggattttttgtacgtcctgatctaggacccaggttgtgcagtgcctatggtgtagttgctgctaaagatcatgatataggaacaacaaatctccatattgaagtttctgatgttgtaaatatactagtttatgttggcatagcaaaaggaaatggcattctctcaaaagcaggaattctcaagaaatttgaggaagaagatttggatgacattttaaggaaaagattgaaggactcaagtgaaatacctggtgctctgtggcatatttatgctgggaaagatgttgacaagataagggaatttcttcaaaagatttcaaaagaacaaggccttgaagttctaccagaacatgatccaatacgtgaccaaagttggtatgtgaacaaaaagctccgtcaaaggctgcttgaagaatatggagtcagaacctgtactcttattcagttccttggtgatgctattgttttgccagcgggagcacttcatcaggttcagaattttcacagctgtattcaggtaactgaagattttgtgtctccagaacatcttgtagagtcatttcatttaacacaggaactgagacttttgaaggaagaaatcaattatgatgataaactacaggttaaaaatattttgtatcatgcagtcaaagaaatggtgagagccttgaagatacacgaggatgaagtagaggatatggaagaaaattaagtgtgatccagtttgatatttttaggttgttgaactgggattacttaaccttgaatgatgatatgtatgcacactgactttaagcttcataaaaccatcagtgccaagaaattctctttgtagtaattacttgttactgacaccacagcagtatagcatatgtcacagctcctgtgattcaatgttataaaacaagcagaattttaaaagcagcactatatagctgttttgtattatagtgtatatgatgtttgtgaaaatgccagatttaaaatgatgtatttatttttggtaaaaaataaaaaattctatgctatattgttgatcaagtgtaaatgtgaccttgtacagtttactaaaattactgatatttttcactacattgagacagttactgtgagaataggacacaaacaccagctattgcctgcatctgggaaattgctgaatcgcacagcagtcatgtcataatcagaaaattactgccaaataattgtaaaatttgtaaagtataaagtatataaagtagatactaaatacagacacttcaatattttgttgaagctattgactgtacaattaaacattttcaaaaggtgtaatttatttaaaattgtctcattttggtaaaatttatgtgaacttttaaagctaaatattaaacttaatatgctatgtaaatatatacatatatacatttaatgatgtatttttttaaaacattggcttgcttttgttaaagtgcaagtgttacatatggctttgtacattaaagttgaaaggggttttacattttccattaaaaggactttatcaaaaattga

SEQ ID NO: 144784 - DNA, 8149 bp, Homo sapiens
  Payload ID: 8609
  Gene Symbol: JMJD1C
  Gene Name: jumonji domain containing 1C
  Uniprot ID: Q15652
  ENST ID: ENST00000542921
  CDS Start-End: 618-7694
cctgacccagatcggaggatgcagtagtgcttcagctgcaggatttcttagtcgttaacaccacagtgctgatgacaaagagcgagttgtaatcctcatcactgccagggctgagccagagcagacagaaaatcgtcatttgctcgttggagacttgttaggttacagctcctgcttcgttctgtggtcttggcttttcttcctatacaatgacgccgctgcaagtgagctcagaaatgcttggtttgagagccatttgcctgtgatttttgaagactaaagaagtatttacactagatactcttccagaacaaaatagaaatttcagcaaatacttactgacctttaaagccttgttgtggatttctgagatttaaagatactttaaaattctcaagaacaaaactttcaaacctctggttgaaagaaatatacccagttcagtcactgcagtagaattccttgtagataagcaactggattttttaactgaagatagtgcctttcagccctaccaggacgacatagacagcctaaacccagttctcagggacaacccgcagcttcatgaggaagtgaaagtctgggtaaaggaacaaaaggttcaggagatttttatgcaaggtccttattccttaaatggatacagagtgagagtatatagacaagactctgccacccagtggtttactggcataattactcatcatgatctcttcacccgcaccatgatcgttatgaatgatcaggtactagaaccacagaatgtcgatccttctatggttcaaatgacctttctagatgatgttgttcactctttgttaaaaggtgaaaatattggcattacatcacgacgcaggtctcgtgccaatcaaaacgtcaacgctgttcacagccattatacacgtgcccaagcaaatagtcccagaccagcaatgaactcccaagctgctgtaccaaaacagaatacacaccagcaacagcaacaaagaagtatccgtccaaataagaggaagggctcagatagcagtataccagatgaagagaagatgaaggaggaaaaatatgattatatatcacgaggagaaaatcctaaaggtaaaaacaaacacttgatgaataaaagaaggaaacctgaggaggatgaaaagaaactaaatatgaaaagacttcgaactgacaatgtttcagacttttctgagagcagtgactcagaaaattcaaataagagaataatagataattcctcagaacagaagccagagaatgaattgaaaaataaaaatacttcaaaaataaatggagaagaaggaaaaccccataataatgagaaggcaggagaagagaccctaaaaaatagccagcctccctgggatcaaatacaggaagataaaaaacatgaagaagcagagaagcggaagtctgttgacactcagcttcaagaagatatgattattcattcgtcagaacagtccacagtttctgatcataattctaatgatttacttcctcaggaatgcaatatggataaaacacataccatggaattgctaccaaaggagaagtttgtatccagaccacccacaccaaaatgtgttattgatattacaaatgacactaatttagaaaaggtggctcaggaaaactcaagtacctttggccttcagacacttcagaaaatggatcctaatgttagtgattcaaaacactctattgcaaatgcaaaattcttggaaacagcaaaaaaagattctgaccagagctgggtcagtgatgtagttaaagtggatctaacccaatcaagtgttacaaatgcttcttcaggaaatgatcacttgaacatggaaaaagagaagtatgtctcttacatttctcctttaagtgcagtttctgtcatggaagataagctgcataagcgaagtccacctccagagactataaaatctaaacttaatacttcagtagatactcacaagataaaatccagcccatcacctgaagttgttaaacccaaaataactcattctcctgattctgtaaagtctaaggccacttatgtgaacagccaagctactggtgaaagaagattggcaaataagatagaacatgagctatcaagatgcagttttcatccaattcctactcgaagcagtacattagaaactacaaagagtcctcttatcattgataaaaatgagcattttacagtttacagagatcctgcacttattgggtcagaaacaggagctaatcatatttcacctttcctaagccagcatccttttcctcttcactcctcatctcatagaacctgtttaaatccaggtacccatcatcctgccttaactcctgcaccccatttactagccggatcatctagtcaaactccattacctaccattaacactcatcctctgactagtggtccacaccatgctgttcatcaccctcatttacttcccactgtgttacctggagtgcctactgcctccttacttggtggccacccacgactagagagtgctcatgccagcagcttgagccacttagcgctagcacaccagcaacaacaacagttgttacagcaccagtcacctcatcttcttggacaagcccatccttctgcttcatataatcagcttggactttatccaattatttggcagtatccaaatggaacacatgcatactcaggacttggtttgccttcttctaagtgggttcacccagaaaatgcagttaatgctgaagcttcattaaggaggaattctcccagtccttggctacatcagcccacccctgtgacctcagcagatggtattggattacttagtcacattcctgtcagaccttccagtgcagagcctcatcggcctcttaaaattacagcccattccagtccaccattgacaaaaactttagtagatcatcataaggaagaattagaaagaaaagcttttatggaaccattacggtctgttgcatccacatcagccaaaaatgacctggatctaaataggtcacagactggaaaagattgtcacttacataggcattttgtggatccagtattaaatcagttacagaggccaccccaggagactggagagaggttaaacaaatacaaagaggaacaccgtcgaattcttcaagaaagtattgatgttgctccctttacaactaaaatcaagggacttgagggtgagagagagaattattccagagtggcatcatcatcttccagtcctaaaagccatatcatcaaacaagatatggatgtagaacgctcagtatcagatctttataaaatgaagcactcagtgcctcagagtttaccccaaagtaactatttcactacattgtctaatagtgtggtcaatgaaccaccaagatcatacccatccaaagaagtttcaaatatttacggtgataaacagagtaatgcccttgcagcggcagcagctaatcctcaaactctgacttcatttataacatctctttcaaagcctccacctttgattaaacaccaaccagaaagtgaaggtttagtaggcaagataccagaacatcttccacatcagattgcatctcactcagtaacaaccttcagaaatgattgtaggagtcctacccatttgacagtttcttctacaaatacactccgcagtatgcctgcattacatagagcaccagtatttcacccaccaatccatcacagcctggaaagaaaggaaggcagctatagtagtctttcccctccaactttaactccggtgatgccagtaaatgctggtggtaaagttcaagaatcacagaagcctccaactctaatacccgaaccaaaagactcccaggcaaattttaagagttcttcagaacagagtttgacggagatgtggagacctaataataacctcagcaaagagaaaactgaatggcatgtggagaaaagcagcggaaagttacaggctgctatggcatctgtcattgtgcgtccatcttctagtacaaaaactgatagtatgccagcaatgcagttagcttctaaagatcgtgttagtgaaagatcttcagctggggcacataaaacagattgcctcaaactagcagaagccggagaaactggaagaatcattttgccaaatgtgaattcagacagtgttcacacaaaatctgaaaaaaactttcaggctgtctcacagggcagtgttcccagttcagtcatgtctgctgtaaatacgatgtgtaataccaaaacggatgtaatcacatctgctgccgatactaccagtgtttccagctggggtggttcagaagtaatttcctctttatcaaataccattttggcctctacatcatcagaatgtgtatcttcaaaaagtgtcagtcagccagtggctcaaaaacaagaatgcaaggtcagcaccacagcaccagttacattagccagtagtaagacaggaagtgttgttcaacccagttctgggttctcaggcacaactgattttatccatttaaaaaagcacaaggcagcattggctgcagctcagtataaaagtagtaatgccagtgagactgaacctaatgctataaaaaatcagacactttcagcctcccttcctctggatagcactgtaatctgtagtacaattaacaaagcaaactctgtaggaaatgggcaagcttcccagacaagtcaaccaaactaccatactaaactgaaaaaggcctggctcaccagacactcagaagaagataaaaatactaataaaatggaaaattcagggaattctgtatcagaaattattaagccatgttctgtcaacttaatagcctctacatctagtgatatacaaaatagtgtagatagtaagatcatagttgataaatatgtaaaagatgataaagtcaacaggagaaaagccaaaagaacttatgaatctggctctgaaagtggagactcagatgaaagtgaaagcaagtcagagcaaaggactaaaagacaacctaagccaacttacaaaaagaagcaaaatgatttgcaaaagagaaaaggtgaaatagaagaagatttgaaacccaatggagttctcagcaggagtgccaaagaaagaagtaaactgaagttgcaaagcaacagtaatactggcattcctcgttcagtattgaaagattggcgtaaagtcaagaagctgaagcaaactggggaatcctttttacaggatgactcctgctgtgagatagggcctaatttacaaaagtgtcgagaatgtagacttattcgcagtaaaaaaggagaagaaccagctcactcaccagtattttgtagattttactactttagacggttgtcatttagtaaaaacggagtagttagaatagatggtttctcttctcctgaccaatatgatgatgaagctatgagtttgtggacacatgaaaattttgaagatgatgaactagatatagagacttctaaatatatcttggatataataggtgataagttctgtcaattagtaacatctgaaaaaacagctttgtcctgggtgaaaaaggatgccaaaattgcctggaaaagagcagtgagaggagtccgggagatgtgtgatgcatgtgaagcaacattgtttaacattcactgggtctgccaaaaatgtggatttgtggtctgcttagattgttacaaggcaaaggaaaggaagagttctagagataaagaactatatgcttggatgaagtgtgtgaagggacagcctcatgatcacaaacatttaatgccaacccaaattatacctggttctgttttgacagatcttctagatgccatgcacactcttagggaaaaatatggtattaaatcccattgtcattgtactaacaaacagaatttacaagttggaaattttcctacaatgaatggtgtatctcaagttttacagaatgttcttaatcacagtaataaaatttctctgtgcatgcctgagtctcagcagcaaaatactcctccgaagtctgagaaaaatggtggcagcagcccagagagtgatgtaggcacagataacaagttaactcctccagaatcccagtcaccactgcactggttagcagatcttgcagagcaaaaagccagagaggaaaaaaaagaaaacaaagaacttacccttgaaaaccaaattaaagaagaaagagaacaagacaactctgaatctccaaatggcagaacatcacctcttgtgtcccagaataatgaacaaggctcaaccttacgggatttgctgactacaacagctggaaagctacgtgtggggtctacagatgctggcattgcctttgccccagtatattcaatgggagccccaagtagcaaaagtggacggactatgcctaacattcttgatgacataattgcttcagttgttgaaaacaaaattccaccaagtaaaacctccaagataaatgtaaaaccagagcttaaagaagagcctgaagaaagcataatatctgcagtggatgaaaataataaattatacagtgatataccacattcttggatctgtgagaagcatattttatggcttaaggattataagaatagcagtaattggaagcttttcaaagaatgttggaaacaaggacagcctgcagtggtttctggtgtgcataagaaaatgaacattagcctatggaaggcggaatcaattagtcttgattttggagaccaccaagctgatctcctgaactgcaaagatagcatcatttcaaatgccaatgttaaggaattctgggatggttttgaagaagtttcaaaacggcagaaaaacaagagtggagaaacagttgttttaaaattgaaagactggccttcaggagaagacttcaagactatgatgccagcaagatacgaagatcttttaaaaagtctgccattgccagaatattgtaatccagaaggaaaattcaatttggcctctcatttgccaggattttttgtacgtcctgatctaggacccaggttgtgcagtgcctatggtgtagttgctgctaaagatcatgatataggaacaacaaatctccatattgaagtttctgatgttgtaaatatactagtttatgttggcatagcaaaaggaaatggcattctctcaaaagcaggaattctcaagaaatttgaggaagaagatttggatgacattttaaggaaaagattgaaggactcaagtgaaatacctggtgctctgtggcatatttatgctgggaaagatgttgacaagataagggaatttcttcaaaagatttcaaaagaacaaggccttgaagttctaccagaacatgatccaatacgtgaccaaagttggtatgtgaacaaaaagctccgtcaaaggctgcttgaagaatatggagtcagaacctgtactcttattcagttccttggtgatgctattgttttgccagcgggagcacttcatcaggttcagaattttcacagctgtattcaggtaactgaagattttgtgtctccagaacatcttgtagagtcatttcatttaacacaggaactgagacttttgaaggaagaaatcaattatgatgataaactacaggttaaaaatattttgtatcatgcagtcaaagaaatggtgagagccttgaagatacacgaggatgaagtagaggatatggaagaaaattaagtgtgatccagtttgatatttttaggttgttgaactgggattacttaaccttgaatgatgatatgtatgcacactgactttaagcttcataaaaccatcagtgccaagaaattctctttgtagtaattacttgttactgacaccacagcagtatagcatatgtcacagctcctgtgattcaatgttataaaacaagcagaattttaaaagcagcactatatagctgttttgtattatagtgtatatgatgtttgtgaaaatgccagatttaaaatgatgtatttatttttggtaaaaaataaaaaattctatgctatattgttgatcaagtgtaaatgtgaccttgtacagtttactaaaattactgatatttttcactacattgagacagttactgtgagaataggacacaaacaccagctattgcctgcatctgggaaattgctgaatcgcac

SEQ ID NO: 144785 - DNA, 2595 bp, Homo sapiens
  Payload ID: 8610
  Gene Symbol: JMJD4
  Gene Name: jumonji domain containing 4
  Uniprot ID: Q9H9V9
  ENST ID: ENST00000366758
  CDS Start-End: 1-1392
atgcgtgcaggcccggagccccaggcgctggcggggcagaaacgcggcgccctgcgtcttctggttccgaggctggtcctcaccgtttccgctccggcggaagtgaggaggagggtccttcgacccgtgctgagctggatggaccgcgagacgcgcgccctcgccgacagccacttccgaggcctgggggtcgatgtccccggcgtcggccaggctccgggccgggtagccttcgtctcggagccgggcgccttctcctacgccgactttgtgcggggcttcttgctgcccaacctgccctgcgtgttttccagcgccttcacgcagggctggggcagccggcggcgctgggtgacgcccgcggggaggcccgacttcgaccacctgctacggacctacggagacgtggttgtaccagttgcaaactgtggggtccaggaatacaactcgaaccccaaagagcacatgactctcagagactacatcacctactggaaagagtacatacaggcgggctactcctctcccaggggctgtctctacctcaaagactggcacttgtgcagggactttccggtggaggacgttttcaccctgcctgtgtacttctcgtccgactggctgaatgagttctgggatgcactggatgtggatgactaccgctttgtctacgcggggcctgcgggcagctggtccccgttccatgctgacatcttccgctccttcagctggtctgtcaatgtctgtgggaggaagaagtggctcctcttccccccagggcaggaagaggccctgcgggaccgccacggcaacctgccctacgacgtgacctccccagcactctgcgacacacacctgcacccacggaaccagcttgctggcccacccttggagatcacgcaggaagcgggcgagatggtgtttgtgcccagtggctggcaccaccaggtgcacaacctggatgacaccatctccatcaaccacaactgggtcaatggcttcaacctggccaacatgtggcgcttcttgcagcaggagctatgcgccgtgcaggaggaggtcagcgagtggagggactccatgcccgactggcaccaccactgccaggtcatcatgaggtcctgctcgggcatcaactttgaagagttttaccacttcctcaaggtcatcgctgagaagaggctcctggtcctgagggaggcagccgctgaggacggtgctgggttgggtttcgaacaggcagcctttgatgttgggcgcatcacagaggtgctggcctccttggttgcgcaccccgacttccagagagtggacaccagcgcgttctcaccacagcccaaagagctgctgcagcagctgagagaggctgttgatgctgctgcggccccatagcacctgtcgtgaggatagaaggacgggtggaagagaggcagcctcctgctccggggcccttccagaaataaagaccgccctccctgtgacctggggcccacccctgtcgaggcttgtggcctggctgttcatggccactgcctgggtgcctgttttcaggtgaggcccaatgaggtcagggacccaagatgggatgtggcccttctgacctgcagcaggcctgctgggagctcggagatggtgccaggacctggctcttttgggggccctgcctccttaggccaggacgcctgagctgacaggagtctgtgtctggtgtgccttctctggtggctcctcttaataggccagccctgtcccctcgtctcaggccattggaccacccctggctctgccctgtgggttcagggaggggttggagcagtgctgggcaagctcaccagggcctccaggcagggctggggttggcctccatcacctccaggtgatgggctgtggaaccagcggcctgcgccttcctctgggtacccagagtggagggctgggttgggctggcctttgccacctccctgcctttgcagggcctgtggacagctggagaggccacagatggggtggaatcccatctgctgctgaatcctcacctgggcctgagggactgtgcctgctgtgcactcacagctgggtcttcccaaggatgctgttctcaggagtggtgggtccccagcccctcttcacactgggtatgatggaggtgtgggcgggctcgtccaggccgatcaaggcacagcagtgagcagcggaggcctgtggtggggaatggactctcgtgggatcctcttgcagaggatgccccaggcctgaaccctctagtggatccacagtttgtggagactggcactctcccagccctgtccttgaccgagagtccagcattttttcagttggcccctggttggctgcctcaccccagcaggggaggaggcatccgaatccacagggacggcacgtgccatggctatgcacattgcctgcccgtggcatcaactggggccgctggcacttgtctaggatggaagcccccaagaagggcaggggtttctgtctgctctgttcagtgaatcatgtgaagtgcttgcaaaggcagctttacacagtaggtgcttcatatgtgtctgtcgaatgaatgcgctccagccaaca

SEQ ID NO: 144786 - DNA, 2502 bp, Homo sapiens
  Payload ID: 8610
  Gene Symbol: JMJD4
  Gene Name: jumonji domain containing 4
  Uniprot ID: Q9H9V9
  ENST ID: ENST00000438896
  CDS Start-End: 1-1344
atgcgtgcaggcccggagccccaggcgctggcggggcagaaacgcggcgccctgcgtcttctggttccgaggctggtcctcaccgtttccgctccggcggaagtgaggaggagggtccttcgacccgtgctgagctggatggaccgcgagacgcgcgccctcgccgacagccacttccgaggcctgggggtcgatgtccccggcgtcggccaggctccgggccgggtagccttcgtctcggagccgggcgccttctcctacgccgactttgtgcggggcttcttgctgcccaacctgccctgcgtgttttccagcgccttcacgcagggctggggcagccggcggcgctgggtgacgcccgcggggaggcccgacttcgaccacctgctacggacctacggagacgtggttgtaccagttgcaaactgtggggtccaggaatacaactcgaaccccaaagagcacatgactctcagagactacatcacctactggaaagagtacatacaggcgggctactcctctcccaggggctgtctctacctcaaagactggcacttgtgcagggactttccggtggaggacgttttcaccctgcctgtgtacttctcgtccgactggctgaatgagttctgggatgcactggatgtggatgactaccgctttgtctacgcggggcctgcgggcagctggtccccgttccatgctgacatcttccgctccttcagctggtctgtcaatgtctgtgggaggaagaagtggctcctcttccccccagggcaggaagaggccctgcgggaccgccacggcaacctgccctacgacgtgacctccccagcactctgcgacacacacctgcacccacggaaccagcttgctggcccacccttggagatcacgcaggaagcgggcgagatggtgtttgtgcccagtggctggcaccaccaggtgcacaacctggatgacaccatctccatcaaccacaactgggtcaatggcttcaacctggccaacatgtggcgcttcttgcagcaggagctatgcgccgtgcaggaggaggtcatcatgaggtcctgctcgggcatcaactttgaagagttttaccacttcctcaaggtcatcgctgagaagaggctcctggtcctgagggaggcagccgctgaggacggtgctgggttgggtttcgaacaggcagcctttgatgttgggcgcatcacagaggtgctggcctccttggttgcgcaccccgacttccagagagtggacaccagcgcgttctcaccacagcccaaagagctgctgcagcagctgagagaggctgttgatgctgctgcggccccatagcacctgtcgtgaggatagaaggacgggtggaagagaggcagcctcctgctccggggcccttccagaaataaagaccgccctccctgtgacctggggcccacccctgtcgaggcttgtggcctggctgttcatggccactgcctgggtgcctgttttcaggtgaggcccaatgaggtcagggacccaagatgggatgtggcccttctgacctgcagcaggcctgctgggagctcggagatggtgccaggacctggctcttttgggggccctgcctccttaggccaggacgcctgagctgacaggagtctgtgtctggtgtgccttctctggtggctcctcttaataggccagccctgtcccctcgtctcaggccattggaccacccctggctctgccctgtgggttcagggaggggttggagcagtgctgggcaagctcaccagggcctccaggcagggctggggttggcctccatcacctccaggtgatgggctgtggaaccagcggcctgcgccttcctctgggtacccagagtggagggctgggttgggctggcctttgccacctccctgcctttgcagggcctgtggacagctggagaggccacagatggggtggaatcccatctgctgctgaatcctcacctgggcctgagggactgtgcctgctgtgcactcacagctgggtcttcccaaggatgctgttctcaggagtggtgggtccccagcccctcttcacactgggtatgatggaggtgtgggcgggctcgtccaggccgatcaaggcacagcagtgagcagcggaggcctgtggtggggaatggactctcgtgggatcctcttgcagaggatgccccaggcctgaaccctctagtggatccacagtttgtggagactggcactctcccagccctgtccttgaccgagagtccagcattttttcagttggcccctggttggctgcctcaccccagcaggggaggaggcatccgaatccacagggacggcacgtgccatggctatgcacattgcctgcccgtggcatcaactggggccgctggcacttgtctaggatggaagcccccaagaagggcaggggtttctgtctgctctgttcagtgaatcatgtgaagtgcttgcaaaggcagctttacacagt

SEQ ID NO: 144787 - DNA, 2432 bp, Homo sapiens
  Payload ID: 8610
  Gene Symbol: JMJD4
  Gene Name: jumonji domain containing 4
  ENST ID: ENST00000620518
  CDS Start-End: 11-1264
gctgagctggatggaccgcgagacgcgcgccctcgccgacagccacttccgaggcctgggggtcgatgtccccggcgtcggccaggctccgggccgggtagccttcgtctcggagccgggcgccttctcctacgccgactttgtgcggggcttcttgctgcccaacctgccctgcgtgttttccagcgccttcacgcagggctggggcagccggcggcgctgggtgacgcccgcggggaggcccgacttcgaccacctgctacggacctacggagacgtggttgtaccagttgcaaactgtggggtccaggaatacaactcgaaccccaaagagcacatgactctcagagactacatcacctactggaaagagtacatacaggcgggctactcctctcccaggggctgtctctacctcaaagactggcacttgtgcagggactttccggtggaggacgttttcaccctgcctgtgtacttctcgtccgactggctgaatgagttctgggatgcactggatgtggatgactaccgctttgtctacgcggggcctgcgggcagctggtccccgttccatgctgacatcttccgctccttcagctggtctgtcaatgtctgtgggaggaagaagtggctcctcttccccccagggcaggaagaggccctgcgggaccgccacggcaacctgccctacgacgtgacctccccagcactctgcgacacacacctgcacccacggaaccagcttgctggcccacccttggagatcacgcaggaagcgggcgagatggtgtttgtgcccagtggctggcaccaccaggtgcacaacctggatgacaccatctccatcaaccacaactgggtcaatggcttcaacctggccaacatgtggcgcttcttgcagcaggagctatgcgccgtgcaggaggaggtcagcgagtggagggactccatgcccgactggcaccaccactgccaggtcatcatgaggtcctgctcgggcatcaactttgaagagttttaccacttcctcaaggtcatcgctgagaagaggctcctggtcctgagggaggcagccgctgaggacggtgctgggttgggtttcgaacaggcagcctttgatgttgggcgcatcacagaggtgctggcctccttggttgcgcaccccgacttccagagagtggacaccagcgcgttctcaccacagcccaaagagctgctgcagcagctgagagaggctgttgatgctgctgcggccccatagcacctgtcgtgaggatagaaggacgggtggaagagaggcagcctcctgctccggggcccttccagaaataaagaccgccctccctgtgacctggggcccacccctgtcgaggcttgtggcctggctgttcatggccactgcctgggtgcctgttttcaggtgaggcccaatgaggtcagggacccaagatgggatgtggcccttctgacctgcagcaggcctgctgggagctcggagatggtgccaggacctggctcttttgggggccctgcctccttaggccaggacgcctgagctgacaggagtctgtgtctggtgtgccttctctggtggctcctcttaataggccagccctgtcccctcgtctcaggccattggaccacccctggctctgccctgtgggttcagggaggggttggagcagtgctgggcaagctcaccagggcctccaggcagggctggggttggcctccatcacctccaggtgatgggctgtggaaccagcggcctgcgccttcctctgggtacccagagtggagggctgggttgggctggcctttgccacctccctgcctttgcagggcctgtggacagctggagaggccacagatggggtggaatcccatctgctgctgaatcctcacctgggcctgagggactgtgcctgctgtgcactcacagctgggtcttcccaaggatgctgttctcaggagtggtgggtccccagcccctcttcacactgggtatgatggaggtgtgggcgggctcgtccaggccgatcaaggcacagcagtgagcagcggaggcctgtggtggggaatggactctcgtgggatcctcttgcagaggatgccccaggcctgaaccctctagtggatccacagtttgtggagactggcactctcccagccctgtccttgaccgagagtccagcattttttcagttggcccctggttggctgcctcaccccagcaggggaggaggcatccgaatccacagggacggcacgtgccatggctatgcacattgcctgcccgtggcatcaactggggccgctggcacttgtctaggatggaagcccccaagaagggcaggggtttctgtctgctctgttcagtgaatcatgtgaagtgcttgcaaaggcagctttacacagtaggtgcttca

SEQ ID NO: 144788 - DNA, 2591 bp, Homo sapiens
  Payload ID: 8610
  Gene Symbol: JMJD4
  Gene Name: jumonji domain containing 4
  Uniprot ID: Q9H9V9
  ENST ID: ENST00000615711
  CDS Start-End: 1-1392
atgcgtgcaggcccggagccccaggcgctggcggggcagaaacgcggcgccctgcgtcttctggttccgaggctggtcctcaccgtttccgctccggcggaagtgaggaggagggtccttcgacccgtgctgagctggatggaccgcgagacgcgcgccctcgccgacagccacttccgaggcctgggggtcgatgtccccggcgtcggccaggctccgggccgggtagccttcgtctcggagccgggcgccttctcctacgccgactttgtgcggggcttcttgctgcccaacctgccctgcgtgttttccagcgccttcacgcagggctggggcagccggcggcgctgggtgacgcccgcggggaggcccgacttcgaccacctgctacggacctacggagacgtggttgtaccagttgcaaactgtggggtccaggaatacaactcgaaccccaaagagcacatgactctcagagactacatcacctactggaaagagtacatacaggcgggctactcctctcccaggggctgtctctacctcaaagactggcacttgtgcagggactttccggtggaggacgttttcaccctgcctgtgtacttctcgtccgactggctgaatgagttctgggatgcactggatgtggatgactaccgctttgtctacgcggggcctgcgggcagctggtccccgttccatgctgacatcttccgctccttcagctggtctgtcaatgtctgtgggaggaagaagtggctcctcttccccccagggcaggaagaggccctgcgggaccgccacggcaacctgccctacgacgtgacctccccagcactctgcgacacacacctgcacccacggaaccagcttgctggcccacccttggagatcacgcaggaagcgggcgagatggtgtttgtgcccagtggctggcaccaccaggtgcacaacctggatgacaccatctccatcaaccacaactgggtcaatggcttcaacctggccaacatgtggcgcttcttgcagcaggagctatgcgccgtgcaggaggaggtcagcgagtggagggactccatgcccgactggcaccaccactgccaggtcatcatgaggtcctgctcgggcatcaactttgaagagttttaccacttcctcaaggtcatcgctgagaagaggctcctggtcctgagggaggcagccgctgaggacggtgctgggttgggtttcgaacaggcagcctttgatgttgggcgcatcacagaggtgctggcctccttggttgcgcaccccgacttccagagagtggacaccagcgcgttctcaccacagcccaaagagctgctgcagcagctgagagaggctgttgatgctgctgcggccccatagcacctgtcgtgaggatagaaggacgggtggaagagaggcagcctcctgctccggggcccttccagaaataaagaccgccctccctgtgacctggggcccacccctgtcgaggcttgtggcctggctgttcatggccactgcctgggtgcctgttttcaggtgaggcccaatgaggtcagggacccaagatgggatgtggcccttctgacctgcagcaggcctgctgggagctcggagatggtgccaggacctggctcttttgggggccctgcctccttaggccaggacgcctgagctgacaggagtctgtgtctggtgtgccttctctggtggctcctcttaataggccagccctgtcccctcgtctcaggccattggaccacccctggctctgccctgtgggttcagggaggggttggagcagtgctgggcaagctcaccagggcctccaggcagggctggggttggcctccatcacctccaggtgatgggctgtggaaccagcggcctgcgccttcctctgggtacccagagtggagggctgggttgggctggcctttgccacctccctgcctttgcagggcctgtggacagctggagaggccacagatggggtggaatcccatctgctgctgaatcctcacctgggcctgagggactgtgcctgctgtgcactcacagctgggtcttcccaaggatgctgttctcaggagtggtgggtccccagcccctcttcacactgggtatgatggaggtgtgggcgggctcgtccaggccgatcaaggcacagcagtgagcagcggaggcctgtggtggggaatggactctcgtgggatcctcttgcagaggatgccccaggcctgaaccctctagtggatccacagtttgtggagactggcactctcccagccctgtccttgaccgagagtccagcattttttcagttggcccctggttggctgcctcaccccagcaggggaggaggcatccgaatccacagggacggcacgtgccatggctatgcacattgcctgcccgtggcatcaactggggccgctggcacttgtctaggatggaagcccccaagaagggcaggggtttctgtctgctctgttcagtgaatcatgtgaagtgcttgcaaaggcagctttacacagtaggtgcttcatatgtgtctgtcgaatgaatgcgctccagcc

SEQ ID NO: 144789 - DNA, 1893 bp, Homo sapiens
  Payload ID: 8611
  Gene Symbol: JMJD6
  Gene Name: jumonji domain containing 6
  ENST ID: ENST00000303996
  CDS Start-End: 310-1317
cgcagccgacgtgaccttcccaacatggcggaggcccgccgtatgtgaaggagtaccccaggggagccaaagccaatggaaaaccgcgagaggcgtcggggcggggaagacggcggccgcttgcccaacccgaggctcgggaggtggctggggagtgaattttctggaaggcgactttaaaggcgccgggactgagcgaagggcgtttgggtactgccgtcgccgccgcccaggccggggaggggtgcgttagtgtcaggaagcgggctgcgccgaggtcgtagcggaaccagctggcgaccccgcagaatgaaccacaagagcaagaagcgcatccgcgaggccaagcggagtgcgcggccggagctcaaggactcgctggattggacccggcacaactactacgagagcttctcgctgagcccggcggccgtggcggataacgtggaaagggcagatgctttacagctgtctgtggaagaatttgtggagcggtatgaaagaccttacaagcccgtggttttgttgaatgcgcaagagggctggtctgcgcaggagaaatggactctggagcgcctaaaaaggaaatatcggaaccagaagttcaagtgtggtgaggataacgatggctactcagtgaagatgaagatgaaatactacatcgagtacatggagagcactcgagatgatagtcccctttacatctttgacagcagctatggtgaacaccctaaaagaaggaaacttttggaagactacaaggtgccaaagtttttcactgatgaccttttccagtatgctggggagaagcgcaggcccccttacaggtggtttgtgatggggccaccacgctccggaactgggattcacatcgaccctctgggaaccagtgcctggaatgccttagttcagggccacaagcgctggtgcctgtttcctaccagcactcccagggaactcatcaaagtgacccgagacgaaggagggaaccagcaagacgaagctattacctggtttaatgttatttatccccggacacagcttccaacctggccacctgaattcaaacccctggaaatcttacaaaaaccaggagagactgtctttgtaccaggaggctggtggcatgttgtcctcaatctcgacactactatcgccatcacccaaaattttgccagcagcaccaacttccctgtggtatggcacaagacggtaagagggagaccaaagttatcaaggaaatggtatagatacagcacgggcagcggcagtgcaagccacccacagccaccccgtgccactgtgtcccaaccctgacctggagggaccagctctcggggattttgaagcaagagcaccccgagttggcagtcctcgcagactcggttgaccttcaggagtccacagggatagcttccgacagctccagcgactcttccagctcctccagctccagttcgtcagactccgactcagagtgcgagtctggatccgagggcgatgggacagtgcaccgcaggaagaagaggaggacgtgcagcatggtgggaaacggggacaccacctcccaggacgactgtgtcagcaaagagcgcagctcctccaggtgacccagcaaggctgttgtctgtatggaaggacacgctcgcggcaagggcagggcctggggagggtggcctgtccagtcctgcagacaaggggaggcctgacagagcccaagaatgaggacaccctcggcacgggaacccattcacttagcgtttgctccagtagctttccctctgctaccaatgcagataaacgcggcttgttttactcaggcaagagaatgtgaatagtgccaagaaaatcctttacattatttaataaaaattgaatccattttctatcttg

SEQ ID NO: 144790 - DNA, 1603 bp, Homo sapiens
  Payload ID: 8611
  Gene Symbol: JMJD6
  Gene Name: jumonji domain containing 6
  Uniprot ID: Q6NYC1
  ENST ID: ENST00000397625
  CDS Start-End: 116-1327
agcgaagggcgtttgggtactgccgtcgccgccgcccaggccggggaggggtgcgttagtgtcaggaagcgggctgcgccgaggtcgtagcggaaccagctggcgaccccgcagaatgaaccacaagagcaagaagcgcatccgcgaggccaagcggagtgcgcggccggagctcaaggactcgctggattggacccggcacaactactacgagagcttctcgctgagcccggcggccgtggcggataacgtggaaagggcagatgctttacagctgtctgtggaagaatttgtggagcggtatgaaagaccttacaagcccgtggttttgttgaatgcgcaagagggctggtctgcgcaggagaaatggactctggagcgcctaaaaaggaaatatcggaaccagaagttcaagtgtggtgaggataacgatggctactcagtgaagatgaagatgaaatactacatcgagtacatggagagcactcgagatgatagtcccctttacatctttgacagcagctatggtgaacaccctaaaagaaggaaacttttggaagactacaaggtgccaaagtttttcactgatgaccttttccagtatgctggggagaagcgcaggcccccttacaggtggtttgtgatggggccaccacgctccggaactgggattcacatcgaccctctgggaaccagtgcctggaatgccttagttcagggccacaagcgctggtgcctgtttcctaccagcactcccagggaactcatcaaagtgacccgagacgaaggagggaaccagcaagacgaagctattacctggtttaatgttatttatccccggacacagcttccaacctggccacctgaattcaaacccctggaaatcttacaaaaaccaggagagactgtctttgtaccaggaggctggtggcatgttgtcctcaatctcgacactactatcgccatcacccaaaattttgccagcagcaccaacttccctgtggtatggcacaagacggtaagagggagaccaaagttatcaaggaaatggtataggattttgaagcaagagcaccccgagttggcagtcctcgcagactcggttgaccttcaggagtccacagggatagcttccgacagctccagcgactcttccagctcctccagctccagttcgtcagactccgactcagagtgcgagtctggatccgagggcgatgggacagtgcaccgcaggaagaagaggaggacgtgcagcatggtgggaaacggggacaccacctcccaggacgactgtgtcagcaaagagcgcagctcctccaggtgacccagcaaggctgttgtctgtatggaaggacacgctcgcggcaagggcagggcctggggagggtggcctgtccagtcctgcagacaaggggaggcctgacagagcccaagaatgaggacaccctcggcacgggaacccattcacttagcgtttgctccagtagctttccctctgctaccaatgcagataaacgcggcttgttttactcaggcaagagaatgtgaatagtgccaagaaaatcctttacattatttaataaaaattgaatccattttc

SEQ ID NO: 144791 - DNA, 5303 bp, Homo sapiens
  Payload ID: 8611
  Gene Symbol: JMJD6
  Gene Name: jumonji domain containing 6
  Uniprot ID: Q6NYC1
  ENST ID: ENST00000445478
  CDS Start-End: 205-1449
gaagacggcggccgcttgcccaacccgaggctcgggaggtggctggggagtgaattttctggaaggcgactttaaaggcgccgggactgagcgaagggcgtttgggtactgccgtcgccgccgcccaggccggggaggggtgcgttagtgtcaggaagcgggctgcgccgaggtcgtagcggaaccagctggcgaccccgcagaatgaaccacaagagcaagaagcgcatccgcgaggccaagcggagtgcgcggccggagctcaaggactcgctggattggacccggcacaactactacgagagcttctcgctgagcccggcggccgtggcggataacgtggaaagggcagatgctttacagctgtctgtggaagaatttgtggagcggtatgaaagaccttacaagcccgtggttttgttgaatgcgcaagagggctggtctgcgcaggagaaatggactctggagcgcctaaaaaggaaatatcggaaccagaagttcaagtgtggtgaggataacgatggctactcagtgaagatgaagatgaaatactacatcgagtacatggagagcactcgagatgatagtcccctttacatctttgacagcagctatggtgaacaccctaaaagaaggaaacttttggaagactacaaggtgccaaagtttttcactgatgaccttttccagtatgctggggagaagcgcaggcccccttacaggtggtttgtgatggggccaccacgctccggaactgggattcacatcgaccctctgggaaccagtgcctggaatgccttagttcagggccacaagcgctggtgcctgtttcctaccagcactcccagggaactcatcaaagtgacccgagacgaaggagggaaccagcaagacgaagctattacctggtttaatgttatttatccccggacacagcttccaacctggccacctgaattcaaacccctggaaatcttacaaaaaccaggagagactgtctttgtaccaggaggctggtggcatgttgtcctcaatctcgacactactatcgccatcacccaaaattttgccagcagcaccaacttccctgtggtatggcacaagacggtaagagggagaccaaagttatcaaggaaatggtataggattttgaagcaagagcaccccgagttggcagtcctcgcagactcggttgaccttcaggagtccacagggatagcttccgacagctccagcgactcttccagctcctccagctccagttcgtcagactccgactcagagtgcgagtctggatccgagggcgatgggacagtgcaccgcaggaagaagaggaggacgtgcagcatggtgggaaacggggacaccacctcccaggacgactgtgtcagcaaagagcgcagctcctccaggattagggacacttgtggaggccgggctcacccctgagcagataaagagactctccctgaggtgctttcagcgtaagcttttggcagccacccaactcagttctcgcatcttctgctcctaccttctcctctgtcttctttgaatttggatattccttccctggtccaagctcctatcttcggtcaaatgctgtttttactgcttcctaaggatagattatcaagaaatttaacagctcggccagctcagtgaaacactgaagctaatgggatgttgggtaagaaggttctgtgctgtctcattgaaaaccgagccagtcaaccacaaggctggcagggtgtgatccttgtaacgtcttgtgtctgttacctcacggatgtcggtaaggagtttccacagagccagctgtgtaccacagagactgagagtggtgagtggactttgtgagccaattatgtgtcggaaggacttggagtctgcccttcttcctgtatgtcatcatcagcccacaaatgcattcagtggcagtgacccagcaccatcaccatcacccactgctcagtctgtcttaggattccttatctttttctccatcatcatagagactgaaatttcaggggtgtttttgtacagtgtatttttttgtgggggggtgatacattggggttttttgtttgcatagagtgggaacggtgtgcaatgtgctcttaccacagaacttaaagtatgaataggctccattcttccgcaccatgggatccataagaagtgctcactttgcgaggtactctgagattagcgttccccatttgtttgacctacagacgttaagtgggtgacttgtgttacacacggggagtaaattcagagatggcacctgtagtctttgcagtctgttgatacttctaaataactaactggatgactttttggggattgaccagcagatgccatctcttgccctcttgattcacctgcttgccttaatttgtccctaaattcaactaaacttcaataagaggggttgtcaaggccatggggcgcacttggaagcactgcctgggctggagcgttggaggcattggcaggcaggtgggaaggagctctcactgcagtgttcacaggcagggaggctgtgtgtggatgtgttagaattgtgtgctgttgcctctcaaaatatccactagaaacaggtgtaaccaggaaaatacaggtctctgctcactgttattaacagactgtcatttcctgacattgggtcatgtggctttactctaggaggctggttctctatttttgtcttagttcaattttctgcatcctcaaatgccaaccccagtatgtggctgggtaggtagaactgtgctgcctgcctgccatgggggctgctctccctccttacccccacgcccacagcccccttggttctgtggtgggcacaggatgtgtttgggtgtgagtaaagtcaaactctgaatgtataatctcttggtagtaatatctgagtggtgttgctactcctgctttttaaaaagacttttcttgccatctataaaaagcttttttctttttcccagcattgctcctgtgctgccacgcttgccctttttccttaccttcctttcagttttctatcaacaactcctctaaacttcagtttaaaataaaaaacagcccaaaaaggctctttgccaccagggggcgtggtaggacacgttgccagtggtctggataggggagcagaaattttgaattttaaaaattagccaccaaggccaggtgcagtggctcacacctgtaatcccagcactttgggaagctgaggcagggggattgcttgagtccaggagttcaagaccagtctgggcaacatagtgagatcccatctctcaaaaaaataataatctagaaaataaagattagccacccagttttctttctccagatgctaaagttgattcctgtttgataacagtattccagaaatgaggggaataacatatctgataggcccaagtcagctctggatagtacagtgtctggatagtacagattctgtgctcctgggacatgctttgtttattcctgccaggccagggattcagcagccctattccccaacccccgttactgtctctgtgggctagccaggctgtccgttatgtaagcacaacaggggcaaggtggggaaaccgtgtgtggaaaaggagtggagtggtggcgggtggccaaggtagactaggaagagtgggtacccagagaccacttgttcagaagttaactcctcttcccatctggcgtgagctactccattgaatggtgccaacaacagtaaagtgaaggagataatgttagattattttcagggatgattctccaagatgacagcagatcttaaaaccaaagagctgggtcctggaagaagggatcttggattattaacttctgatggaaggaccagagtgggagagagaagagttggggacctagaacatcaggaggaccctgggtctttggggatgaggcttcaccatcagctggaagaatccatgcttcacacacatgcctctgccattagtggtactgggatgtttagggtgacatccttgaggggagagccactgaaaagagggacattcacattttgctgtattcttgcagctgtccgtgtcttaataattcaagcgttcaataggtgtttgagggccaggcactgctcttgaggtgctggagataacggtgacaagcccaggtccctgacaagctccacaagcttaatggacagtgaatgtgcggctgttgcggctgttcacagggccgctggtgagggcaggtagaagaaagtgcagaccttcttaaatgcaggtgtaacggatctacatgaaagagcataattaacaccaatgtatacttaaggtagtaacagcttcttcataaagtagcaaaactaaggatctgtgggaaggttgctggtgcaaatgctttataagcttactagagactgagccttggatttaggactttagacgagtataggatggaacaaaatttttgcagtaaatgtaaaaaatgctgtgtaggaggaaggcgtataaggatgccccagctgtaggttctttagattgtctgtagtatttccacgagtaagttgtttttgatgtgtgtactggtattgctggtagatttgaagtggagtctggcggcttcttccacactcccctcccactagcttgtgtcaagatgtgacatcctatgcagcaaaactaggtgagcttgcacccccaggcggtggctctcaactttgtctcattgttcagaaatttcggccaggcgccgtagctcacccctgtaatcccagcactttgggaggccatggcaggtggatcacttgaggtcaggagttcaagaccagcctggccaacacggtgaaaccccgtctctactaaaaatacaaaaattagccaggtgtggtggcacatgcctgtagtcccagctacttggtcaactcaggcaggagaatcacttgaacccaggaggcagaggttgcagtgagctgagatcaagccactccagcctgggtgacagaccgagactctgtctttaaaaaaaaagaaatgtcatctaagccccagtgaacctcctgggaggagagctagccctggccagctgtctccaaagtgactggatgctacagaagaactgggactgtcttctgcacactcgtgcctcctggagttgtcagaacactgagcagtctcctagttctgcgtccgtctagccatggggtctgccatgaaagcctgtggatctgctattgggttggtattttaaactttcacttgggtgaaacttgttcatcattttaaataaagcaacatgatttggagttg

SEQ ID NO: 144792 - DNA, 1898 bp, Homo sapiens
  Payload ID: 8611
  Gene Symbol: JMJD6
  Gene Name: jumonji domain containing 6
  ENST ID: ENST00000542934
  CDS Start-End: 310-1395
cgcagccgacgtgaccttcccaacatggcggaggcccgccgtatgtgaaggagtaccccaggggagccaaagccaatggaaaaccgcgagaggcgtcggggcggggaagacggcggccgcttgcccaacccgaggctcgggaggtggctggggagtgaattttctggaaggcgactttaaaggcgccgggactgagcgaagggcgtttgggtactgccgtcgccgccgcccaggccggggaggggtgcgttagtgtcaggaagcgggctgcgccgaggtcgtagcggaaccagctggcgaccccgcagaatgaaccacaagagcaagaagcgcatccgcgaggccaagcggagtgcgcggccggagctcaaggactcgctggattggacccggcacaactactacgagagcttctcgctgagcccggcggccgtggcggataacgtggaaagggcagatgctttacagctgtctgtggaagaatttgtggagcggtatgaaagaccttacaagcccgtggttttgttgaatgcgcaagagggctggtctgcgcaggagaaatggactctggagcgcctaaaaaggaaatatcggaaccagaagttcaagtgtggtgaggataacgatggctactcagtgaagatgaagatgaaatactacatcgagtacatggagagcactcgagatgatagtcccctttacatctttgacagcagctatggtgaacaccctaaaagaaggaaacttttggaagactacaaggtgccaaagtttttcactgatgaccttttccagtatgctggggagaagcgcaggcccccttacaggtggtttgtgatggggccaccacgctccggaactgggattcacatcgaccctctgggaaccagtgcctggaatgccttagttcagggccacaagcgctggtgcctgtttcctaccagcactcccagggaactcatcaaagtgacccgagacgaaggagggaaccagcaagacgaagctattacctggtttaatgttatttatccccggacacagcttccaacctggccacctgaattcaaacccctggaaatcttacaaaaaccaggagagactgtctttgtaccaggaggctggtggcatgttgtcctcaatctcgacactactatcgccatcacccaaaattttgccagcagcaccaacttccctgtggtatggcacaagacggtaagagggagaccaaagttatcaaggaaatggtatagaacagatacagcacgggcagcggcagtgcaagccacccacagccaccccgtgccactgtgtcccaaccctgacctggagggaccagctctcggggattttgaagcaagagcaccccgagttggcagtcctcgcagactcggttgaccttcaggagtccacagggatagcttccgacagctccagcgactcttccagctcctccagctccagttcgtcagactccgactcagagtgcgagtctggatccgagggcgatgggacagtgcaccgcaggaagaagaggaggacgtgcagcatggtgggaaacggggacaccacctcccaggacgactgtgtcagcaaagagcgcagctcctccaggtgacccagcaaggctgttgtctgtatggaaggacacgctcgcggcaagggcagggcctggggagggtggcctgtccagtcctgcagacaaggggaggcctgacagagcccaagaatgaggacaccctcggcacgggaacccattcacttagcgtttgctccagtagctttccctctgctaccaatgcagataaacgcggcttgttttactcaggcaagagaatgtgaatagtgccaagaaaatcctttacattatttaataaaaattgaatccattttctatcttg

SEQ ID NO: 144793 - DNA, 1330 bp, Homo sapiens
  Payload ID: 8611
  Gene Symbol: JMJD6
  Gene Name: jumonji domain containing 6
  ENST ID: ENST00000585429
  CDS Start-End: 29-1216
tagcggaaccagctggcgaccccgcagaatgaaccacaagagcaagaagcgcatccgcgaggccaagcggagtgcgcggccggagctcaaggactcgctggattggacccggcacaactactacgagagcttctcgctgagcccggcggccgtggcggataacgtggaaagggcagatgctttacagctgtctgtggaagaatttgtggagcggtatgaaagaccttacaagcccgtggttttgttgaatgcgcaagagggctggtctgcgcaggagaaatggactctggagcgcctaaaaaggaaatatcggaaccagaagttcaagtgtggtgaggataacgatggctactcagtgaagatgaagatgaaatactacatcgagtacatggagagcactcgagatgatagtcccctttacatctttgacagcagctatggtgaacaccctaaaagaaggaaacttttggaagactacaaggtgccaaagtttttcactgatgaccttttccagtatgctggggagaagcgcaggcccccttacaggtggtttgtgatggggccaccacgctccggaactgggattcacatcgaccctctgggaaccagtgcctggaatgccttagttcagggccacaagcgctggtgcctgtttcctaccagcactcccagggaactcatcaaagtgacccgagacgaaggagggaaccagcaagacgaagctattacctggtttaatgttatttatccccggacacagcttccaacctggccacctgaattcaaacccctggaaatcttacaaaaaccaggagagactgtctttgtaccaggaggctggtggcatgttgtcctcaatctcgacactactatcgccatcacccaaaattttgccagcagcaccaacttccctgtggtatggcacaagacggtaagagggagaccaaagttatcaaggaaatggtatagtgcgagtctggatccgagggcgatgggacagtgcaccgcaggaagaagaggaggacgtgcagcatggtgggaaacggggacaccacctcccaggacgactgtgtcagcaaagagcgcagctcctccaggtgacccagcaaggctgttgtctgtatggaaggacacgctcgcggcaagggcagggcctggggagggtggcctgtccagtcctgcagacaaggggaggcctgacagagcccaagaatgaggacaccctcggcacgggaacccattcacttagcgtttgctccagtagctttccctctgctaccaatgcagataaacgcggcttgttttactcaggcaagagaatgtgaatagt

SEQ ID NO: 144794 - DNA, 5517 bp, Homo sapiens
  Payload ID: 8611
  Gene Symbol: JMJD6
  Gene Name: jumonji domain containing 6
  ENST ID: ENST00000617192
  CDS Start-End: 325-1410
ggggcggggcggtgacgcagccgacgtgaccttcccaacatggcggaggcccgccgtatgtgaaggagtaccccaggggagccaaagccaatggaaaaccgcgagaggcgtcggggcggggaagacggcggccgcttgcccaacccgaggctcgggaggtggctggggagtgaattttctggaaggcgactttaaaggcgccgggactgagcgaagggcgtttgggtactgccgtcgccgccgcccaggccggggaggggtgcgttagtgtcaggaagcgggctgcgccgaggtcgtagcggaaccagctggcgaccccgcagaatgaaccacaagagcaagaagcgcatccgcgaggccaagcggagtgcgcggccggagctcaaggactcgctggattggacccggcacaactactacgagagcttctcgctgagcccggcggccgtggcggataacgtggaaagggcagatgctttacagctgtctgtggaagaatttgtggagcggtatgaaagaccttacaagcccgtggttttgttgaatgcgcaagagggctggtctgcgcaggagaaatggactctggagcgcctaaaaaggaaatatcggaaccagaagttcaagtgtggtgaggataacgatggctactcagtgaagatgaagatgaaatactacatcgagtacatggagagcactcgagatgatagtcccctttacatctttgacagcagctatggtgaacaccctaaaagaaggaaacttttggaagactacaaggtgccaaagtttttcactgatgaccttttccagtatgctggggagaagcgcaggcccccttacaggtggtttgtgatggggccaccacgctccggaactgggattcacatcgaccctctgggaaccagtgcctggaatgccttagttcagggccacaagcgctggtgcctgtttcctaccagcactcccagggaactcatcaaagtgacccgagacgaaggagggaaccagcaagacgaagctattacctggtttaatgttatttatccccggacacagcttccaacctggccacctgaattcaaacccctggaaatcttacaaaaaccaggagagactgtctttgtaccaggaggctggtggcatgttgtcctcaatctcgacactactatcgccatcacccaaaattttgccagcagcaccaacttccctgtggtatggcacaagacggtaagagggagaccaaagttatcaaggaaatggtatagaacagatacagcacgggcagcggcagtgcaagccacccacagccaccccgtgccactgtgtcccaaccctgacctggagggaccagctctcggggattttgaagcaagagcaccccgagttggcagtcctcgcagactcggttgaccttcaggagtccacagggatagcttccgacagctccagcgactcttccagctcctccagctccagttcgtcagactccgactcagagtgcgagtctggatccgagggcgatgggacagtgcaccgcaggaagaagaggaggacgtgcagcatggtgggaaacggggacaccacctcccaggacgactgtgtcagcaaagagcgcagctcctccaggattagggacacttgtggaggccgggctcacccctgagcagataaagagactctccctgaggtgctttcagcgtaagcttttggcagccacccaactcagttctcgcatcttctgctcctaccttctcctctgtcttctttgaatttggatattccttccctggtccaagctcctatcttcggtcaaatgctgtttttactgcttcctaaggatagattatcaagaaatttaacagctcggccagctcagtgaaacactgaagctaatgggatgttgggtaagaaggttctgtgctgtctcattgaaaaccgagccagtcaaccacaaggctggcagggtgtgatccttgtaacgtcttgtgtctgttacctcacggatgtcggtaaggagtttccacagagccagctgtgtaccacagagactgagagtggtgagtggactttgtgagccaattatgtgtcggaaggacttggagtctgcccttcttcctgtatgtcatcatcagcccacaaatgcattcagtggcagtgacccagcaccatcaccatcacccactgctcagtctgtcttaggattccttatctttttctccatcatcatagagactgaaatttcaggggtgtttttgtacagtgtatttttttgtgggggggtgatacattggggttttttgtttgcatagagtgggaacggtgtgcaatgtgctcttaccacagaacttaaagtatgaataggctccattcttccgcaccatgggatccataagaagtgctcactttgcgaggtactctgagattagcgttccccatttgtttgacctacagacgttaagtgggtgacttgtgttacacacggggagtaaattcagagatggcacctgtagtctttgcagtctgttgatacttctaaataactaactggatgactttttggggattgaccagcagatgccatctcttgccctcttgattcacctgcttgccttaatttgtccctaaattcaactaaacttcaataagaggggttgtcaaggccatggggcgcacttggaagcactgcctgggctggagcgttggaggcattggcaggcaggtgggaaggagctctcactgcagtgttcacaggcagggaggctgtgtgtggatgtgttagaattgtgtgctgttgcctctcaaaatatccactagaaacaggtgtaaccaggaaaatacaggtctctgctcactgttattaacagactgtcatttcctgacattgggtcatgtggctttactctaggaggctggttctctatttttgtcttagttcaattttctgcatcctcaaatgccaaccccagtatgtggctgggtaggtagaactgtgctgcctgcctgccatgggggctgctctccctccttacccccacgcccacagcccccttggttctgtggtgggcacaggatgtgtttgggtgtgagtaaagtcaaactctgaatgtataatctcttggtagtaatatctgagtggtgttgctactcctgctttttaaaaagacttttcttgccatctataaaaagcttttttctttttcccagcattgctcctgtgctgccacgcttgccctttttccttaccttcctttcagttttctatcaacaactcctctaaacttcagtttaaaataaaaaacagcccaaaaaggctctttgccaccagggggcgtggtaggacacgttgccagtggtctggataggggagcagaaattttgaattttaaaaattagccaccaaggccaggtgcagtggctcacacctgtaatcccagcactttgggaagctgaggcagggggattgcttgagtccaggagttcaagaccagtctgggcaacatagtgagatcccatctctcaaaaaaataataatctagaaaataaagattagccacccagttttctttctccagatgctaaagttgattcctgtttgataacagtattccagaaatgaggggaataacatatctgataggcccaagtcagctctggatagtacagtgtctggatagtacagattctgtgctcctgggacatgctttgtttattcctgccaggccagggattcagcagccctattccccaacccccgttactgtctctgtgggctagccaggctgtccgttatgtaagcacaacaggggcaaggtggggaaaccgtgtgtggaaaaggagtggagtggtggcgggtggccaaggtagactaggaagagtgggtacccagagaccacttgttcagaagttaactcctcttcccatctggcgtgagctactccattgaatggtgccaacaacagtaaagtgaaggagataatgttagattattttcagggatgattctccaagatgacagcagatcttaaaaccaaagagctgggtcctggaagaagggatcttggattattaacttctgatggaaggaccagagtgggagagagaagagttggggacctagaacatcaggaggaccctgggtctttggggatgaggcttcaccatcagctggaagaatccatgcttcacacacatgcctctgccattagtggtactgggatgtttagggtgacatccttgaggggagagccactgaaaagagggacattcacattttgctgtattcttgcagctgtccgtgtcttaataattcaagcgttcaataggtgtttgagggccaggcactgctcttgaggtgctggagataacggtgacaagcccaggtccctgacaagctccacaagcttaatggacagtgaatgtgcggctgttgcggctgttcacagggccgctggtgagggcaggtagaagaaagtgcagaccttcttaaatgcaggtgtaacggatctacatgaaagagcataattaacaccaatgtatacttaaggtagtaacagcttcttcataaagtagcaaaactaaggatctgtgggaaggttgctggtgcaaatgctttataagcttactagagactgagccttggatttaggactttagacgagtataggatggaacaaaatttttgcagtaaatgtaaaaaatgctgtgtaggaggaaggcgtataaggatgccccagctgtaggttctttagattgtctgtagtatttccacgagtaagttgtttttgatgtgtgtactggtattgctggtagatttgaagtggagtctggcggcttcttccacactcccctcccactagcttgtgtcaagatgtgacatcctatgcagcaaaactaggtgagcttgcacccccaggcggtggctctcaactttgtctcattgttcagaaatttcggccaggcgccgtagctcacccctgtaatcccagcactttgggaggccatggcaggtggatcacttgaggtcaggagttcaagaccagcctggccaacacggtgaaaccccgtctctactaaaaatacaaaaattagccaggtgtggtggcacatgcctgtagtcccagctacttggtcaactcaggcaggagaatcacttgaacccaggaggcagaggttgcagtgagctgagatcaagccactccagcctgggtgacagaccgagactctgtctttaaaaaaaaagaaatgtcatctaagccccagtgaacctcctgggaggagagctagccctggccagctgtctccaaagtgactggatgctacagaagaactgggactgtcttctgcacactcgtgcctcctggagttgtcagaacactgagcagtctcctagttctgcgtccgtctagccatggggtctgccatgaaagcctgtggatctgctattgggttggtattttaaactttcacttgggtgaaacttgttcatcattttaaataaagcaacatgatttggagttg

SEQ ID NO: 144795 - DNA, 1416 bp, Homo sapiens
  Payload ID: 8612
  Gene Symbol: JMJD7
  Gene Name: jumonji domain containing 7
  Uniprot ID: P0C870
  ENST ID: ENST00000397299
  CDS Start-End: 41-991
gtcggggaaaggcggggtctcggccggcgctgacgcagccatggcggaggcggctttggaagccgtgcggagcgagttacgagaattcccggccgctgcaagggagctctgcgtgcctcttgctgtgccctacctggacaaacccccaactccgctccacttctaccgggactgggtctgccccaacaggccgtgcattatccgcaacgctctgcagcactggccggccctccagaagtggtccctcccctatttcagagccacagtgggctccacagaggtgagtgtggccgtgaccccagatggttacgcggatgccgtgagaggggatcgcttcatgatgccagctgagcgccgcctgcccctgagcttcgtgctggatgtgctggagggccgggcccagcaccctggagtcctctatgtgcagaagcagtgctccaacctgcccagcgagctgccccagctgctgcctgatctggaatcccatgtgccctgggcctccgaagccctgggaaagatgcccgatgctgtgaacttctggctgggggaggcggctgcagtgacttctttgcacaaggaccactatgagaacctctactgcgtggtctcaggagagaagcatttcctgttccatccgcccagcgaccggcccttcatcccctatgagctgtacacgccggcaacctaccagctaactgaagagggcacctttaaggtggtggatgaagaggccatggagaaggtgccctggatcccactggaccccttggcgccagacctagcacggtaccctagttacagtcaggcccaggcccttcgctgcacggtgcgggccggtgagatgctctatctgccggctctgtggttccaccacgtccagcagtcccagggctgcatcgcagtgaatttctggtatgacatggaatacgacctcaagtatagttacttccagctgctcgactccctcaccaaggcttcaggccttgactgatggagcactggtgaacaccaccaagcacgcctcgggggacggagccagcccctccctggccaggtcaattctcgagagagcctggagtgtgcatgctggctgctggccccgggtccagcatggcttgagatcagctttggaggatcttggaatgtggtcataaggactcaaggtgccaggcaggtctgggtgagggttctcaggaagttgccacacaggtgagcagagtggggatcaggtgcagcggcacctctccccagcgctgtgatgttgggcgagtcactgcgtctcgggcattggtgtcctgtcagtaaagagataataatggctgtacctcgcggggctgttgtgggcttggagatgatgtctatgaggaccagcatggagctggcacacaggacatgttgaataaaaggtagctgtga

SEQ ID NO: 144796 - DNA, 1192 bp, Homo sapiens
  Payload ID: 8612
  Gene Symbol: JMJD7
  Gene Name: jumonji domain containing 7
  ENST ID: ENST00000408047
  CDS Start-End: 243-896
tctcggccggcgctgacgcagccatggcggaggcggctttggaagccgtgcggagcgagttacgagaattcccggccgctgcaaggggtgggagctgccctggggtcaggtgtgagcagtgattactggcatctgggcatgggctgagtgtccattcctctagagccacagtgggctccacagaggtgagtgtggccgtgaccccagatggttacgcggatgccgtgagaggggatcgcttcatgatgccagctgagcgccgcctgcccctgagcttcgtgctggatgtgctggagggccgggcccagcaccctggagtcctctatgtgcagaagcagtgctccaacctgcccagcgagctgccccagctgctgcctgatctggaatcccatgtgccctgggcctccgaagccctgggaaagatgcccgatgctgtgaacttctggctgggggaggcggctgcagtgacttctttgcacaaggaccactatgagaacctctactgcgtggtctcaggagagaagcatttcctgttccatccgcccagcgaccggcccttcatcccctatgagctgtacacgccggcaacctaccagctaactgaagagggcacctttaaggtggtggatgaagaggccatggagaaggtgccctggatcccactggaccccttggcgccagacctagcacggtaccctagttacagtcaggcccaggcccttcgctgcacggtgcgggccggtgagatgctctatctgccggctctgtggttccaccacgtccagcagtcccagggctgcatcgcagtgaatttctggtatgacatggaatacgacctcaagtatagttacttccagctgctcgactccctcaccaaggcttcaggccttgactgatggagcactggtgaacaccaccaagcacgcctcgggggacggagccagcccctccctggccaggtcaattctcgagagagcctggagtgtgcatgctggctgctggccccgggtccagcatggcttgagatcagctttggaggatcttggaatgtggtcataaggactcaaggtgccaggcaggtctgggtgagggttctcaggaagttgccacacaggtgagcagagtggggatcaggtgcagcggcacctctccccagcgctgtgatgttgggcgagtcactgcgtctcgggca

SEQ ID NO: 144797 - DNA, 828 bp, Homo sapiens
  Payload ID: 8612
  Gene Symbol: JMJD7
  Gene Name: jumonji domain containing 7
  ENST ID: ENST00000431823
  CDS Start-End: 424-828
gccggcgctgacgcagccatggcggaggcggctttggaagccgtgcggagcgagttacgagaattcccggccgctgcaaggggcccggtgccgtcttgaccgtggtcgcggcgaagccctgtgtttcctacagtcttgagcagcttgctgttacccttgttgaaagctcatcgaaggcacacagctggtgagctctgcgtgcctcttgctgtgccctacctggacaaacccccaactccgctccacttctaccgggactgggtctgccccaacaggccgtgcattatccgcaacgctctgcagcactggccggccctccagaagtggtccctcccctatttcagagccacagtgggctccacagaggtgagtgtggccgtgaccccagatggttacgcggatgccgtgagaggggatcgcttcatgatgccagctgagcgccgcctgcccctgagcttcgtgctggatgtgctggagggccgggcccagcaccctggagtcctctatgtgcagaagcagtgctccaacctgcccagcgagctgccccagctgctgcctgatctggaatcccatgtgccctgggcctccgaagccctgggaaagatgcccgatgctgtgaacttctggctgggggaggcggctgcagtgacttctttgcacaaggaccactatgagaacctctactgcgtggtctcaggagagaagcatttcctgttccatccgcccagcgaccggcccttcatcccctatgagctgtacacgccggcaacctaccagctaactgaagagggcacctttaaggtggtggatgaagaggccatggagaag

SEQ ID NO: 144798 - DNA, 2038 bp, Homo sapiens
  Payload ID: 8613
  Gene Symbol: JMJD8
  Gene Name: jumonji domain containing 8
  Uniprot ID: Q96S16
  ENST ID: ENST00000412368
  CDS Start-End: 58-915
acttccggggtccgtcccggttcccggccgttgccacgacgacgaagctgccggccaatggctggcggatgggcccaaggttcccggcgtgcagcgcggctgcctgagggcggcaggctcatggcgccggcgtcgcggttgctcgcgctctgggcgctggcggctgtggctctacccggctccggggcggagggcgacggcgggtggcgcccgggcgggccgggggccgtggcggaggaggagcgctgcacggtggagcgtcgggccgacctcacctacgcggagttcgtgcagcagtacgccttcgtcaggcccgtcatcctgcagggactcacggacaactcgaggttccgggccctgtgctcccgcgacaggttgctggcttcgtttggggacagagtggtccggctgagcaccgccaacacctactcctaccacaaagtggacttgcccttccaggagtatgtggagcagctgctgcacccccaggaccccacctccctgggcaatgacaccctgtacttcttcggggacaacaacttcaccgagtgggcctctctctttcggcactactccccacccccatttggcctgctgggaaccgctccagcttacagctttggaatcgcaggagctggctcgggggtgcccttccactggcatggacccgggtactcagaagtgatctacggtcgtaagcgctggttcctttacccacctgagaagacgccagagttccaccccaacaagaccacgctggcctggctccgggacacatacccagccctgccaccgtctgcacggcccctggagtgtaccatccgggctggtgaggtgctgtacttccccgaccgctggtggcatgctacgctcaaccttgacaccagcgtcttcatctccaccttcctcggctagccaaaacagctggcaggactgccggtcacacaccagcacgtcccacctcgtgctcacggattttattacacagatagtggcggcaatggcctcagcccagcccaccctcacctgcttttccagcccacaaagggggacgatcacggcccagcaaaagcgatgctgagaggggaaacagtccagagtccaacagcagaacttgggggaagcggtcggggtggccaggaacataaactatgtataggggccgggggcttctgcccagggctcccctggaccaggacgccaggtagggcagggaacctcagtagtcctccacccagccattctcagagatgaatgcgtcaataacctccttcatagccaagttggggatgagctgttcctgggtcagggggctccgggtcacggggtcaaaatgacccacacgctgcagtgacaagaagggcagagggcagtcatggggcccaggaccatgccactggccctgctcccccagccgcaggcctcacctgcaggtgctcctcgatgtccttgcggtcgtaggtgatgccactgggcgtgatgcacggctcccgcatcagctcaaagctgatcttgccacacaggtagtcggggatgtctcgcttctgtggcacaggggcacacggtcagaggctgaaaaggggcactgcacgagcacctgccagccatcggcagcaagcgacacacactcaccttcctcttctcatccacctgagaaaaaagctcgtccatgtccgccatgtacttgtcctgtgaagagttgagtgctgtgcttgggggagacaccccacctccctcctccatggggcacagacccaacacaaggcggggatgctcccacgccacgtgcacacacacagacccacatgtgggtggggggcaccctcacgtgcttggcctcaatgcaggcctgctgggcccggacgtggctgtcgtcctcatcaccctcgtggtttcgctggcactcttccagctccctgggggttgaccaggagccggtcagagatggacctggccagatgtctgaccacaccccaatctcagagctaacatccacacttccccacatttcctgcttgccagtaaagccttcgataaa

SEQ ID NO: 144799 - DNA, 1015 bp, Homo sapiens
  Payload ID: 8613
  Gene Symbol: JMJD8
  Gene Name: jumonji domain containing 8
  ENST ID: ENST00000562824
  CDS Start-End: 45-749
aaggttcccggcgtgcagcgcggctgcctgagggcggcaggctcatggcgccggcgtcgcggttgctcgcgctctgggcgctggcggctgtggctctacccggctccggggcggagggcgacggcgggtggtacgccttcgtcaggcccgtcatcctgcagggactcacggacaactcgaggttccgggccctgtgctcccgcgacaggttgctggcttcgtttggggacagagtggtccggctgagcaccgccaacacctactcctaccacaaagtggacttgcccttccaggagtatgtggagcagctgctgcacccccaggaccccacctccctgggcaatgacaccctgtacttcttcggggacaacaacttcaccgagtgggcctctctctttcggcactactccccacccccatttggcctgctgggaaccgctccagcttacagctttggaatcgcaggagctggctcgggggtgcccttccactggcatggacccgggtactcagaagtgatctacggtcgtaagcgctggttcctttacccacctgagaagacgccagagttccaccccaacaagaccacgctggcctggctccgggacacatacccagccctgccaccgtctgcacggcccctggagtgtaccatccgggctggtgaggtgctgtacttccccgaccgctggtggcatgctacgctcaaccttgacaccagcgtcttcatctccaccttcctcggctagccaaaacagctggcaggactgccggtcacacaccagcacgtcccacctcgtgctcacggattttattacacagatagtggcggcaatggcctcagcccagcccaccctcacctgcttttccagcccacaaagggggacgatcacggcccagcaaaagcgatgctgagaggggaaacagtccagagtccaacagcagaacttgggggaagcggtcggggtggccaggaacataaactatgtataggggccgggggcttctgcccagg

SEQ ID NO: 144800 - DNA, 497 bp, Homo sapiens
  Payload ID: 8613
  Gene Symbol: JMJD8
  Gene Name: jumonji domain containing 8
  ENST ID: ENST00000565258
  CDS Start-End: 1-245
agtggacttgcccttccaggagtatgtggagcagctgctgcacccccaggaccccacctccctgggcaatgacaccctgtacttcttcggggacaacaacttcaccgagtgggcctctctctttcggcactactccccacccccatttggcctgctgggaaccgctccagcttacagctttggaatcgcaggagctggctcgggggtgcccttccactggcatggacccgggtactcagaagtgatctacggtcgtaagcgctggttcctttacccacctgagaagacgccagagttccaccccaacaagaccacgctggcctggctccgggacacatacccagccctgccaccgtctgcacggcccctggagtgtaccatccgggctggtgaggtgctgtacttccccgaccgctggtggcatgctacgctcaaccttgacaccagcgtcttcatctccaccttcctcggctagccaaaacagctggcaggactgc

SEQ ID NO: 144801 - DNA, 823 bp, Homo sapiens
  Payload ID: 8613
  Gene Symbol: JMJD8
  Gene Name: jumonji domain containing 8
  ENST ID: ENST00000562111
  CDS Start-End: 28-687
gcgcggctgcctgagggcggcaggctcatggcgccggcgtcgcggttgctcgcgctctgggcgctggcggctgtggctctacccggctccggggcggagggcgacggcgggtggcgcccgggcgggccgggggccgtggcggaggaggagcgctgcacggtggagcgtcgggccgacctcacctacgcggagttcgtgcagcagtacgccttcgtcaggcccgtcatcctgcagggactcacggacaactcgaggttccgggccctgtgctcccgcgacaggttgctggcttcgtttggggacagagtggtccggctgagcaccgccaacacctactcctaccacaaagtggacttgcccttccaggagtatgtggagcagctgctgcacccccaggaccccacctccctgggcaatgacaccctgtacttcttcggggacaacaacttcaccgagtgggcctctctctttcggcactactccccacccccatttggcctgctgggaaccgctccagcttacagctttggaatcgcaggagctggctcgggggtgcccttccactggcatggacccgggtactcagaagtgatctacggtcgtaaggtgctgtacttccccgaccgctggtggcatgctacgctcaaccttgacaccagcgtcttcatctccaccttcctcggctagccaaaacagctggcaggactgccggtcacacaccagcacgtcccacctcgtgctcacggattttattacacagatagtggcggcaatggcctcagcccagcccaccctcacctgcttttccagcccacaaaggggg

SEQ ID NO: 144802 - DNA, 1901 bp, Homo sapiens
  Payload ID: 8613
  Gene Symbol: JMJD8
  Gene Name: jumonji domain containing 8
  Uniprot ID: Q96S16
  ENST ID: ENST00000609261
  CDS Start-End: 16-810
gagggcggcaggctcatggcgccggcgtcgcggttgctcgcgctctgggcgctggcggctgtggctctacccggctccggggcggagggcgacggcgggtggcgcccgggcgggccgggggccgtggcggaggaggagcgctgcacggtggagcgtcgggccgacctcacctacgcggagttcgtgcagcagtacgccttcgtcaggcccgtcatcctgcagggactcacggacaactcgaggttccgggccctgtgctcccgcgacaggttgctggcttcgtttggggacagagtggtccggctgagcaccgccaacacctactcctaccacaaagtggacttgcccttccaggagtatgtggagcagctgctgcacccccaggaccccacctccctgggcaatgacaccctgtacttcttcggggacaacaacttcaccgagtgggcctctctctttcggcactactccccacccccatttggcctgctgggaaccgctccagcttacagctttggaatcgcaggagctggctcgggggtgcccttccactggcatggacccgggtactcagaagtgatctacggtcgtaagcgctggttcctttacccacctgagaagacgccagagttccaccccaacaagaccacgctggcctggctccgggacacatacccagccctgccaccgtctgcacggcccctggagtgtaccatccgggctggtgaggtgctgtacttccccgaccgctggtggcatgctacgctcaaccttgacaccagcgtcttcatctccaccttcctcggctagccaaaacagctggcaggactgccggtcacacaccagcacgtcccacctcgtgctcacggattttattacacagatagtggcggcaatggcctcagcccagcccaccctcacctgcttttccagcccacaaagggggacgatcacggcccagcaaaagcgatgctgagaggggaaacagtccagagtccaacagcagaacttgggggaagcggtcggggtggccaggaacataaactatgtataggggccgggggcttctgcccagggctcccctggaccaggacgccaggtagggcagggaacctcagtagtcctccacccagccattctcagagatgaatgcgtcaataacctccttcatagccaagttggggatgagctgttcctgggtcagggggctccgggtcacggggtcaaaatgacccacacgctgcagtgacaagaagggcagagggcagtcatggggcccaggaccatgccactggccctgctcccccagccgcaggcctcacctgcaggtgctcctcgatgtccttgcggtcgtaggtgatgccactgggcgtgatgcacggctcccgcatcagctcaaagctgatcttgccacacaggtagtcggggatgtctcgcttctgtggcacaggggcacacggtcagaggctgaaaaggggcactgcacgagcacctgccagccatcggcagcaagcgacacacactcaccttcctcttctcatccacctgagaaaaaagctcgtccatgtccgccatgtacttgtcctgtgaagagttgagtgctgtgcttgggggagacaccccacctccctcctccatggggcacagacccaacacaaggcggggatgctcccacgccacgtgcacacacacagacccacatgtgggtggggggcaccctcacgtgcttggcctcaatgcaggcctgctgggcccggacgtggctgtcgtcctcatcaccctcgtggtttcgctggcactcttccagctccctgggggttgaccaggagccggtcagagatggacctggccagatgtctgaccacaccccaatctcagagctaacatccacacttccccac

SEQ ID NO: 144803 - DNA, 5755 bp, Homo sapiens
  Payload ID: 8614
  Gene Symbol: JARID2
  Gene Name: jumonji, AT rich interactive domain 2
  Uniprot ID: Q92833
  ENST ID: ENST00000341776
  CDS Start-End: 245-3985
gttttactaaagtgaatttttttttgtttgcttcgttcgtctttggctctttttttttccttcccaatttcggatttatttcaaggcgaatctggctttgggggaagaggaagaaaagtcggattacaagatcaaccaccaccaacaacaataaaaaccaccaggatatttttttgcaaatttctgacggctttaaattcatgaagcaattgtccccttttgcaatcagcatttggatctcagaatgagcaaggaaagacccaagaggaatatcattcagaagaaatacgatgacagtgatgggattccgtggtcagaagaacgggtggtacgtaaagtcctttatttgtctctgaaggagttcaagaattcccagaagaggcagcatgcggaaggcattgctgggagcctgaaaactgtgaatgggctccttggtaatgaccagtctaagggattaggaccagcatcagaacagtcagagaatgaaaaggacgatgcatcccaagtgtcctccactagcaacgatgttagttcttcagattttgaagaagggccgtcgaggaaaaggcccaggctgcaagcacaaaggaagtttgctcagtctcagccgaatagtcccagcacaactccagtaaagatagtggagccattgctaccccctccagctactcagatatcagacctctctaaaaggaagcctaagacagaagattttcttacctttctctgccttcgaggttctcctgcgctgcccaacagcatggtgtattttggaagctctcaggatgaggaggaagtcgaggaggaagatgatgagacagaagacgtcaaaacagccaccaacaatgcttcatcttcatgccagtcgacccccaggaaaggaaaaacccacaaacatgttcacaacgggcatgttttcaatggttccagcaggtcaacacgggagaaggaacctgttcaaaaacacaaaagcaaagaggccactcccgcaaaggagaagcacagcgatcaccgggctgacagccgccgggagcaggcttcagctaaccaccccgcagcggccccctccacgggttcctcggccaaggggcttgctgccacccatcaccacccccctctgcatcggtcggctcaggacttacggaaacaggtttctaaggtaaacggagtcactcgaatgtcatctctgggtgcaggtgtaaccagtgccaaaaagatgcgcgaggtcagaccttcaccatccaaaactgtgaagtacactgccacggtgacgaagggggctgtcacatacaccaaagccaagagagaactggtcaaggacaccaaacccaatcaccacaagcccagttccgctgtcaaccacacaatctcagggaaaactgaaagtagcaatgcaaaaacccgcaaacaggtgctatccctcgggggggcgtccaagtccactgggcccgccgtcaatggcctcaaggtcagtggcaggttgaacccaaagtcatgcactaaggaggtgggggggcggcagctgcgggagggcctgcagctgcgggaggggctgcggaactccaagaggagactggaagaggcacaccaggcggagaagccgcagtcgccccccaagaagatgaaaggggcggctggccccgccgaaggccctggcaagaaggccccggccgagagaggtctgctgaacggacacgtgaagaaggaagtgccggagcgcagtctggagaggaatcggccgaagcgggccacggccgggaagagcacgccaggcagacaagcacatggcaaggcggacagcgcctcctgtgaaaatcgttctacctcgcaaccggagtccgtgcacaagccgcaggactcgggcaaggccgagaagggcggcggcaaggccgggtgggcggccatggacgagatccccgtcctcaggccctccgccaaggagttccacgatccgctcatctacatcgagtcggtccgcgctcaggtggagaagttcgggatgtgcagggtgatcccccctccggactggcggcccgagtgcaagctcaacgatgagatgcggtttgtcacgcagattcagcacatccacaagctgggccggcgctggggccccaacgtgcagcggctggcctgcatcaagaagcacctcaaatctcagggcatcaccatggacgagctcccgctcatagggggctgtgagctcgacctggcctgctttttccggctgattaatgagatgggcggcatgcagcaagtgactgacctcaaaaaatggaacaaactagcagacatgctgcgcatccccagaactgcccaggaccggctggccaagctgcaggaggcctactgccagtacctactctcctacgactccctgtccccagaggagcaccggcggctggagaaggaggtgctgatggagaaggagatcctggagaagcgcaaggggccgctggaaggccacacagagaacgaccaccacaagttccaccctctgccccgcttcgagcccaagaatgggctcatccacggcgtggcccccaggaacggcttccgcagcaagctcaaggaggtgggccaggcccagttgaagactggccggcggcgactcttcgctcaggaaaaagaagtggtcaaggaagaggaggaggacaaaggcgtcctcaatgacttccacaagtgcatctataagggaaggtctgtttctctaacaactttttatcgaacagcgaggaatatcatgagcatgtgtttcagcaaggagcctgccccagccgaaatcgagcaagagtactggaggctagtggaagagaaggactgccacgtggcagtgcactgcggcaaggtggacaccaacactcacggcagtggattcccagtaggaaaatcagaacccttttcgaggcatggatggaacctcaccgtcctccccaataacacagggtccatcctgcgtcacctcggtgctgtgcctggagtgactattccctggctaaatattggcatggtcttttctacctcatgctggtctcgagaccaaaatcaccttccatacattgactacttacacactggtgctgactgcatttggtattgcattcctgctgaggaggagaacaagctggaagatgtggtccacaccctgctgcaagccaatggcaccccagggctgcagatgctggaaagcaacgtcatgatctccccggaggtgctgtgcaaagaggggatcaaggtgcacaggaccgtgcagcagagtggccagtttgtcgtctgcttcccgggatcctttgtgtccaaagtgtgctgtgggtacagcgtgtctgaaaccgtgcactttgctaccacccagtggacaagtatgggctttgagaccgccaaggaaatgaagcgtcgccatatagctaagccattctccatggagaagttactctaccagattgcacaagcagaagcaaaaaaagaaaacggtcccactctcagtaccatctcagccctcctggatgagctcagggatacagagctgcggcagcgcaggcagctgttcgaggctggcctccactcctccgcacgctatggcagccacgatggcagcagcacggtggcggacgggaagaaaaagcctcgaaagtggctgcagttggagacgtcagagaggaggtgtcagatctgccagcacctgtgctacctgtccatggtggtacaagagaacgaaaacgtcgtgttctgtctggagtgtgctctgcgccacgtggagaaacagaagtcctgccgagggctgaagttgatgtaccgctacgatgaggaacagattatcagtctggtcaatcagatctgcggcaaagtgtctggtaaaaacggcagcattgagaactgtctcagtaaacccacaccaaaaagaggtccccgcaagagagcgacagtggacgtgcccccctcccgtctgtcagcctccagttcatccaaaagtgcttcgagctcatcatgaagatgccaacgcccgtggtcgatttatatatatttttttgtaattattatattctagtttggagtacttgctgtaggattcaagctgtctttgcactagctctaaagaagattttcttctggttttagagaactaattttgttttagcattaaactgttgaacttttttttgtacttagaaaacctagatactgcagtcagattttggaaactgccgtatagtcactgttttaaaaaccccggaggggctgtattaatttgtattgccccatggctgacaaaagcctttttttttggttttgatttttttttttttgtaactgttggggggaaaaaggctttttaacccatttttgaagagggtgaagtttggagaacaaatttaaaaaccatcagtcatgtgagcagattttttagaagggataggagacacacgcgcacacacacacacacacgaaacttgaaatggctttgctttggctgtcgtcttctgccgtgtgccagatgagcttgtgatctgggaagccggggcacccccgttttgtttctctgggcggttgtggcagctgaaggcggacgttgtttcctaaccataggtggaacgaggagacgggagcgagtgggctctccaccagcacatcactatgcatctgttccaggaaagaagaaaagcgagcgaggaagacggaaaagactgcctgccttggaggggtcacatgagggagacctgtgcctgatttcattaggaaatccattctgttattttttggtgctgttggctactttatcaaaaaacccttcaatagcatccttaagatttaaaaaaaaaaaaaaaaaaaaggaaaaaaaagtgatggaagccgtaagtgcttctttgtcatcgacgtgcaatctttctaacattccatctccatctcaccgcttcttgtttgacaccttcacaagtcagcattaatctttcttttaaaacttgtttcatttatgatcatgtagagagccactaggaggcctgcagttatttttgaatgtgaaaatgcatttgcgttcatcttgtctattttttctcttcatgttgtaacaaaaaggaaaaaagaaaaaaaaatcccatcccttttgtacatatgcctgtaaattgttttaaatacttgagcctttttctcggtggggggtggggaggggggtgagaagacaagatgaagaaaagccttacatttcagtttcttcatcggttggattggatgcttacagggtttttcttgtaacatttataagtgctgcttacatcactgaacaacaacaaaaaaataataatggagtagctgttgcccttctccggttgtgtgtacagtatgtgtggaataaaaaagggaaactgttttcacaagctgttctttgtttcataattggattcatcaatcccgtagctacccatattgcactgagcttgccagtggtgactgccaggaacgtcctatgatccactttgttggttgttgttgcagaagactgaactgttttggaatatttaacaattacagaaacagtcaagtgttttccaatgtggttgtccggtttctatggccttgctgtgtactttccctctttttgacagtaaacttctgcctatggcttacagtttgacatttaatttattagcgctgctctgcacccctcccttgggagggagacttcatgtggtttattgcgagttttttgtttacttttcaggtttgtactacaaggtttaataataaaaacaaagttttttgg

SEQ ID NO: 144804 - DNA, 5595 bp, Homo sapiens
  Payload ID: 8614
  Gene Symbol: JARID2
  Gene Name: jumonji, AT rich interactive domain 2
  Uniprot ID: Q92833
  ENST ID: ENST00000397311
  CDS Start-End: 582-3806
gggcgggggcgggggctgccgcagagccgggctgcggcgtgggaggaggaagaggaggaagatgcgctcggcctctgccttccgctccggagcgtcgcgcttcccaccaggatgacagtgatgggattccgtggtcagaagaacgggtggtacgtaaagtcctttatttgtctctgaaggagttcaagaattcccagaagaggcagcatgcggaaggcattgctgggagcctgaaaactgtgaatgggctccttggtaatgaccagtctaagggattaggaccagcatcagaacagtcagagaatgaaaaggacgatgcatcccaagtgtcctccactagcaacgatgttagttcttcagattttgaagaagggccgtcgaggaaaaggcccaggctgcaagcacaaaggaagtttgctcagtctcagccgaatagtcccagcacaactccagtaaagatagtggagccattgctaccccctccagctactcagatatcagacctctctaaaaggaagcctaagacagaagattttcttacctttctctgccttcgaggttctcctgcgctgcccaacagcatggtgtattttggaagctctcaggatgaggaggaagtcgaggaggaagatgatgagacagaagacgtcaaaacagccaccaacaatgcttcatcttcatgccagtcgacccccaggaaaggaaaaacccacaaacatgttcacaacgggcatgttttcaatggttccagcaggtcaacacgggagaaggaacctgttcaaaaacacaaaagcaaagaggccactcccgcaaaggagaagcacagcgatcaccgggctgacagccgccgggagcaggcttcagctaaccaccccgcagcggccccctccacgggttcctcggccaaggggcttgctgccacccatcaccacccccctctgcatcggtcggctcaggacttacggaaacaggtttctaaggtaaacggagtcactcgaatgtcatctctgggtgcaggtgtaaccagtgccaaaaagatgcgcgaggtcagaccttcaccatccaaaactgtgaagtacactgccacggtgacgaagggggctgtcacatacaccaaagccaagagagaactggtcaaggacaccaaacccaatcaccacaagcccagttccgctgtcaaccacacaatctcagggaaaactgaaagtagcaatgcaaaaacccgcaaacaggtgctatccctcgggggggcgtccaagtccactgggcccgccgtcaatggcctcaaggtcagtggcaggttgaacccaaagtcatgcactaaggaggtgggggggcggcagctgcgggagggcctgcagctgcgggaggggctgcggaactccaagaggagactggaagaggcacaccaggcggagaagccgcagtcgccccccaagaagatgaaaggggcggctggccccgccgaaggccctggcaagaaggccccggccgagagaggtctgctgaacggacacgtgaagaaggaagtgccggagcgcagtctggagaggaatcggccgaagcgggccacggccgggaagagcacgccaggcagacaagcacatggcaaggcggacagcgcctcctgtgaaaatcgttctacctcgcaaccggagtccgtgcacaagccgcaggactcgggcaaggccgagaagggcggcggcaaggccgggtgggcggccatggacgagatccccgtcctcaggccctccgccaaggagttccacgatccgctcatctacatcgagtcggtccgcgctcaggtggagaagttcgggatgtgcagggtgatcccccctccggactggcggcccgagtgcaagctcaacgatgagatgcggtttgtcacgcagattcagcacatccacaagctgggccggcgctggggccccaacgtgcagcggctggcctgcatcaagaagcacctcaaatctcagggcatcaccatggacgagctcccgctcatagggggctgtgagctcgacctggcctgctttttccggctgattaatgagatgggcggcatgcagcaagtgactgacctcaaaaaatggaacaaactagcagacatgctgcgcatccccagaactgcccaggaccggctggccaagctgcaggaggcctactgccagtacctactctcctacgactccctgtccccagaggagcaccggcggctggagaaggaggtgctgatggagaaggagatcctggagaagcgcaaggggccgctggaaggccacacagagaacgaccaccacaagttccaccctctgccccgcttcgagcccaagaatgggctcatccacggcgtggcccccaggaacggcttccgcagcaagctcaaggaggtgggccaggcccagttgaagactggccggcggcgactcttcgctcaggaaaaagaagtggtcaaggaagaggaggaggacaaaggcgtcctcaatgacttccacaagtgcatctataagggaaggtctgtttctctaacaactttttatcgaacagcgaggaatatcatgagcatgtgtttcagcaaggagcctgccccagccgaaatcgagcaagagtactggaggctagtggaagagaaggactgccacgtggcagtgcactgcggcaaggtggacaccaacactcacggcagtggattcccagtaggaaaatcagaacccttttcgaggcatggatggaacctcaccgtcctccccaataacacagggtccatcctgcgtcacctcggtgctgtgcctggagtgactattccctggctaaatattggcatggtcttttctacctcatgctggtctcgagaccaaaatcaccttccatacattgactacttacacactggtgctgactgcatttggtattgcattcctgctgaggaggagaacaagctggaagatgtggtccacaccctgctgcaagccaatggcaccccagggctgcagatgctggaaagcaacgtcatgatctccccggaggtgctgtgcaaagaggggatcaaggtgcacaggaccgtgcagcagagtggccagtttgtcgtctgcttcccgggatcctttgtgtccaaagtgtgctgtgggtacagcgtgtctgaaaccgtgcactttgctaccacccagtggacaagtatgggctttgagaccgccaaggaaatgaagcgtcgccatatagctaagccattctccatggagaagttactctaccagattgcacaagcagaagcaaaaaaagaaaacggtcccactctcagtaccatctcagccctcctggatgagctcagggatacagagctgcggcagcgcaggcagctgttcgaggctggcctccactcctccgcacgctatggcagccacgatggcagcagcacggtggcggacgggaagaaaaagcctcgaaagtggctgcagttggagacgtcagagaggaggtgtcagatctgccagcacctgtgctacctgtccatggtggtacaagagaacgaaaacgtcgtgttctgtctggagtgtgctctgcgccacgtggagaaacagaagtcctgccgagggctgaagttgatgtaccgctacgatgaggaacagattatcagtctggtcaatcagatctgcggcaaagtgtctggtaaaaacggcagcattgagaactgtctcagtaaacccacaccaaaaagaggtccccgcaagagagcgacagtggacgtgcccccctcccgtctgtcagcctccagttcatccaaaagtgcttcgagctcatcatgaagatgccaacgcccgtggtcgatttatatatatttttttgtaattattatattctagtttggagtacttgctgtaggattcaagctgtctttgcactagctctaaagaagattttcttctggttttagagaactaattttgttttagcattaaactgttgaacttttttttgtacttagaaaacctagatactgcagtcagattttggaaactgccgtatagtcactgttttaaaaaccccggaggggctgtattaatttgtattgccccatggctgacaaaagcctttttttttggttttgatttttttttttttgtaactgttggggggaaaaaggctttttaacccatttttgaagagggtgaagtttggagaacaaatttaaaaaccatcagtcatgtgagcagattttttagaagggataggagacacacgcgcacacacacacacacacgaaacttgaaatggctttgctttggctgtcgtcttctgccgtgtgccagatgagcttgtgatctgggaagccggggcacccccgttttgtttctctgggcggttgtggcagctgaaggcggacgttgtttcctaaccataggtggaacgaggagacgggagcgagtgggctctccaccagcacatcactatgcatctgttccaggaaagaagaaaagcgagcgaggaagacggaaaagactgcctgccttggaggggtcacatgagggagacctgtgcctgatttcattaggaaatccattctgttattttttggtgctgttggctactttatcaaaaaacccttcaatagcatccttaagatttaaaaaaaaaaaaaaaaaaaaggaaaaaaaagtgatggaagccgtaagtgcttctttgtcatcgacgtgcaatctttctaacattccatctccatctcaccgcttcttgtttgacaccttcacaagtcagcattaatctttcttttaaaacttgtttcatttatgatcatgtagagagccactaggaggcctgcagttatttttgaatgtgaaaatgcatttgcgttcatcttgtctattttttctcttcatgttgtaacaaaaaggaaaaaagaaaaaaaaatcccatcccttttgtacatatgcctgtaaattgttttaaatacttgagcctttttctcggtggggggtggggaggggggtgagaagacaagatgaagaaaagccttacatttcagtttcttcatcggttggattggatgcttacagggtttttcttgtaacatttataagtgctgcttacatcactgaacaacaacaaaaaaataataatggagtagctgttgcccttctccggttgtgtgtacagtatgtgtggaataaaaaagggaaactgttttcacaagctgttctttgtttcataattggattcatcaatcccgtagctacccatattgcactgagcttgccagtggtgactgccaggaacgtcctatgatccactttgttggttgttgttgcagaagactgaactgttttggaatatttaacaattacagaaacagtcaagtgttttccaatgtggttgtccggtttctatggccttgctgtgtactttccctctttttgacagtaaacttctgcctatggcttacagtttgacatttaatttattagcgctgctctgcacccctcccttgggagggagacttcatgtggtttattgcgagttttttgtttacttttcaggtttgtactacaaggtttaataataaaaacaaagttttttggacatttgtctgtcttgtgg

SEQ ID NO: 144805 - DNA, 1287 bp, Homo sapiens
  Payload ID: 8615
  Gene Symbol: JTB
  Gene Name: jumping translocation breakpoint
  Uniprot ID: O76095
  ENST ID: ENST00000271843
  CDS Start-End: 437-877
gcaggcgaggcgccaccgacgcggaagactataagccccagcgggcgacgaccgaacgcccccgggaacaccgggccccgagctcggtcccgcgcccgaggatcctccacggggctagatggctgcgtcgggggcgggagcggaggtgagcgggcgctagggccgcgagcccccgccggcccttcctccagcgccctgcggaccccgcagaaggcgctcgcctccctagcccgcaaaaacatatcgatttttctcgctgtggcaacggggacgtcctgatagatcctctgctccaataggcaactccggccttccctgccctgacctggaacctctgggagggctgcagagtaagtgccgcctctgcgctccgacggaggcacgaggcctgtggagtaggtccctctgttccgacaggtgcgacacttggcgctccatgcttgcgggtgccgggaggcctggcctcccccagggccgccacctctgctggttgctctgtgctttcaccttaaagctctgccaagcagaggctcccgtgcaggaagagaagctgtcagcaagcacctcaaatttgccatgctggctggtggaagagtttgtggtagcagaagagtgctctccatgctctaatttccgggctaaaactacccctgagtgtggtcccacaggatatgtagagaaaatcacatgcagctcatctaagagaaatgagttcaaaagctgccgctcagctttgatggaacaacgcttattttggaagttcgaaggggctgtcgtgtgtgtggccctgatcttcgcttgtcttgtcatcattcgtcagcgacaattggacagaaaggctctggaaaaggtccggaagcaaatcgagtccatatagctacattccacccttgtatcctgggtcttagagaccctatctcagacagtgaaagtgaaatggactgatttgcactcttggttctttggagccttgtggtggaatccccttttccccatcttcttctttcagatcattaatgagcagaataaaaagagtaaaatggtttccttcccttctgtaacttggagcaggaagtcatgggggcagagagggaaaggaggtggttacttaaggccccaatctaccaagtcttccccaccacttctcccttgttttccccctcttctactacttatttcaaacttctgggatacaatttcagctaaaacgtttatttctcactcaaaacttatttcccctcaaccctatacccaaagaagaaataaaatcacagatacataacagaa

SEQ ID NO: 144806 - DNA, 1040 bp, Homo sapiens
  Payload ID: 8615
  Gene Symbol: JTB
  Gene Name: jumping translocation breakpoint
  Uniprot ID: O76095
  ENST ID: ENST00000356648
  CDS Start-End: 520-873
accgaacgcccccgggaacaccgggccccgagctcggtcccgcgcccgaggatcctccacggggctagatggctgcgtcgggggcgggagcggaggcaactccggccttccctgccctgacctggaacctctgggagggctgcagagtaagtgccgcctctgcgctccgacggaggcacgaggcctgtggagtaggtccctctgttccgacaggtgcgacacttggcgctccatgcttgcgggtgccgggaggcctggcctcccccagggccgccacctctgctggttgctctgtgctttcaccttaaagctctgccaagcagaggctcccgtgcaggaagagaagctgtcaggtgggtgattgtctgggaacccgacacgtcccgtcgtttgtttttggttttagtatcttccccatataccaagagcacaggtggaaaaggccggcaccacatggaatgagggcaagcgctgtgccgggaagttggatgggcagagcctgggagaaatgttttctgaatggcctggggctggcatttatctttcctttcagcaagcacctcaaatttgccatgctggctggtggaagagtttgtggtagcagaagagtgctctccatgctctaatttccgggctaaaactacccctgagtgtggtcccacaggatatgtagagaaaatcacatgcagctcatctaagagaaatgagttcaaaagctgccgctcagctttgatggaacaacgcttattttggaagttcgaaggggctgtcgtgtgtgtggccctgatcttcgcttgtcttgtcatcattcgtcagcgacaattggacagaaaggctctggaaaaggtccggaagcaaatcgagtccatatagctacattccacccttgtatcctgggtcttagagaccctatctcagacagtgaaagtgaaatggactgatttgcactcttggttctttggagccttgtggtggaatccccttttccccatcttcttctttcagatcattaatgagcagaataaaaagagtaaaatggt

SEQ ID NO: 144807 - DNA, 1216 bp, Homo sapiens
  Payload ID: 8615
  Gene Symbol: JTB
  Gene Name: jumping translocation breakpoint
  Uniprot ID: O76095
  ENST ID: ENST00000368589
  CDS Start-End: 696-1049
ctataagccccagcgggcgacgaccgaacgcccccgggaacaccgggccccgagctcggtcccgcgcccgaggatcctccacggggctagatggctgcgtcgggggcgggagcggaggtgagcgggcgctagggccgcgagcccccgccggcccttcctccagcgccctgcggaccccgcagaaggcgctcgcctccctagcccgcaaaaacatatcgatttttctcgctgtggcaacggggacgtcctgatagatcctctgctccaataggcaactccggccttccctgccctgacctggaacctctgggagggctgcagagtaagtgccgcctctgcgctccgacggaggcacgaggcctgtggagtaggtccctctgttccgacaggtgcgacacttggcgctccatgcttgcgggtgccgggaggcctggcctcccccagggccgccacctctgctggttgctctgtgctttcaccttaaagctctgccaagcagaggctcccgtgcaggaagagaagctgtcaggtgggtgattgtctgggaacccgacacgtcccgtcgtttgtttttggttttagtatcttccccatataccaagagcacaggtggaaaaggccggcaccacatggaatgagggcaagcgctgtgccgggaagttggatgggcagagcctgggagaaatgttttctgaatggcctggggctggcatttatctttcctttcagcaagcacctcaaatttgccatgctggctggtggaagagtttgtggtagcagaagagtgctctccatgctctaatttccgggctaaaactacccctgagtgtggtcccacaggatatgtagagaaaatcacatgcagctcatctaagagaaatgagttcaaaagctgccgctcagctttgatggaacaacgcttattttggaagttcgaaggggctgtcgtgtgtgtggccctgatcttcgcttgtcttgtcatcattcgtcagcgacaattggacagaaaggctctggaaaaggtccggaagcaaatcgagtccatatagctacattccacccttgtatcctgggtcttagagaccctatctcagacagtgaaagtgaaatggactgatttgcactcttggttctttggagccttgtggtggaatccccttttccccatcttcttctttcagatcattaatgagcagaataaaaagagtaaaatggt

SEQ ID NO: 144808 - DNA, 520 bp, Homo sapiens
  Payload ID: 8615
  Gene Symbol: JTB
  Gene Name: jumping translocation breakpoint
  Uniprot ID: O76095
  ENST ID: ENST00000428469
  CDS Start-End: 170-520
aataggcaactccggccttccctgccctgacctggaacctctgggagggctgcagatatcttccccatataccaagagcacaggtggaaaaggccggcaccacatggaatgagggcaagcgctgtgccgggaagttggatgggcagagcctgggagaaatgttttctgaatggcctggggctggcatttatctttcctttcagcaagcacctcaaatttgccatgctggctggtggaagagtttgtggtagcagaagagtgctctccatgctctaatttccgggctaaaactacccctgagtgtggtcccacaggatatgtagagaaaatcacatgcagctcatctaagagaaatgagttcaaaagctgccgctcagctttgatggaacaacgcttattttggaagttcgaaggggctgtcgtgtgtgtggccctgatcttcgcttgtcttgtcatcattcgtcagcgacaattggacagaaaggctctggaaaaggtccggaagcaaatcgagtccata

SEQ ID NO: 144809 - DNA, 1820 bp, Homo sapiens
  Payload ID: 8616
  Gene Symbol: JUNB
  Gene Name: jun B proto-oncogene
  Uniprot ID: P17275
  ENST ID: ENST00000302754
  CDS Start-End: 277-1320
gagcggccaggccagcctcggagccagcagggagctgggagctgggggaaacgacgccaggaaagctatcgcgccagagagggcgacgggggctcgggaagcctgacagggcttttgcgcacagctgccggctggctgctacccgcccgcgccagcccccgagaacgcgcgaccaggcacccagtccggtcaccgcagcggagagctcgccgctcgctgcagcgaggcccggagcggccccgcagggaccctccccagaccgcctgggccgcccggatgtgcactaaaatggaacagcccttctaccacgacgactcatacacagctacgggatacggccgggcccctggtggcctctctctacacgactacaaactcctgaaaccgagcctggcggtcaacctggccgacccctaccggagtctcaaagcgcctggggctcgcggacccggcccagagggcggcggtggcggcagctacttttctggtcagggctcggacaccggcgcgtctctcaagctcgcctcttcggagctggaacgcctgattgtccccaacagcaacggcgtgatcacgacgacgcctacacccccgggacagtacttttacccccgcgggggtggcagcggtggaggtgcagggggcgcagggggcggcgtcaccgaggagcaggagggcttcgccgacggctttgtcaaagccctggacgatctgcacaagatgaaccacgtgacaccccccaacgtgtccctgggcgctaccggggggcccccggctgggcccgggggcgtctacgccggcccggagccacctcccgtttacaccaacctcagcagctactccccagcctctgcgtcctcgggaggcgccggggctgccgtcgggaccgggagctcgtacccgacgaccaccatcagctacctcccacacgcgccgcccttcgccggtggccacccggcgcagctgggcttgggccgcggcgcctccaccttcaaggaggaaccgcagaccgtgccggaggcgcgcagccgggacgccacgccgccggtgtcccccatcaacatggaagaccaagagcgcatcaaagtggagcgcaagcggctgcggaaccggctggcggccaccaagtgccggaagcggaagctggagcgcatcgcgcgcctggaggacaaggtgaagacgctcaaggccgagaacgcggggctgtcgagtaccgccggcctcctccgggagcaggtggcccagctcaaacagaaggtcatgacccacgtcagcaacggctgtcagctgctgcttggggtcaagggacacgccttctgaacgtcccctgcccctttacggacaccccctcgcttggacggctgggcacacgcctcccactggggtccagggagcaggcggtgggcacccaccctgggacctaggggcgccgcaaaccacactggactccggccctcctaccctgcgcccagtccttccacctcgacgtttacaagcccccccttccacttttttttgtatgttttttttctgctggaaacagactcgattcatattgaatataatatatttgtgtatttaacagggaggggaagagggggcgatcgcggcggagctggccccgccgcctggtactcaagcccgcggggacattgggaaggggacccccgccccctgccctcccctctctgcaccgtactgtggaaaagaaacacgcacttagtctctaaagagtttattttaagacgtgtttgtgtttgtgtgtgtttgttctttttattgaatctatttaagtaaaaaaaaaattggttctttattaa

SEQ ID NO: 144810 - DNA, 1863 bp, Homo sapiens
  Payload ID: 8617
  Gene Symbol: JUND
  Gene Name: jun D proto-oncogene
  Uniprot ID: P17535
  ENST ID: ENST00000252818
  CDS Start-End: 139-1182
aggagccgccgccagtggagggccgggcgctgcggccgcggccggggcgggcgcagggccgagcggacgggggggcgcgggccccccgggaggccgcggccactcccccccgggccggcgcggcgggggaggcggaggatggaaacacccttctacggcgatgaggcgctgagcggcctgggcggcggcgccagtggcagcggcggcagcttcgcgtccccgggccgcttgttccccggggcgcccccgacggccgcggccggcagcatgatgaagaaggacgcgctgacgctgagcctgagtgagcaggtggcggcagcgctcaagcctgcggccgcgccgcctcctacccccctgcgcgccgacggcgcccccagcgcggcaccccccgacggcctgctcgcctctcccgacctggggctgctgaagctggcctcccccgagctcgagcgcctcatcatccagtccaacgggctggtcaccaccacgccgacgagctcacagttcctctaccccaaggtggcggccagcgaggagcaggagttcgccgagggcttcgtcaaggccctggaggatttacacaagcagaaccagctcggcgcgggcgcggccgctgccgccgccgccgccgccgccggggggccctcgggcacggccacgggctccgcgccccccggcgagctggccccggcggcggccgcgcccgaagcgcctgtctacgcgaacctgagcagctacgcgggcggcgccgggggcgcggggggcgccgcgacggtcgccttcgctgccgaacctgtgcccttcccgccgccgccacccccaggcgcgttggggccgccgcgcctggctgcgctcaaggacgagccacagacggtgcccgacgtgccgagcttcggcgagagcccgccgttgtcgcccatcgacatggacacgcaggagcgcatcaaggcggagcgcaagcggctgcgcaaccgcatcgccgcctccaagtgccgcaagcgcaagctggagcgcatctcgcgcctggaagagaaagtgaagaccctcaagagtcagaacacggagctggcgtccacggcgagcctgctgcgcgagcaggtggcgcagctcaagcagaaagtcctcagccacgtcaacagcggctgccagctgctgccccagcaccaggtgcccgcgtactgagtccgcgcgcggggcgcatgcgcggccaccctccccaaggggcgggctcgcgggggggtgtcgtgggcgccccggacttggagagggtgcggccctggggaccccccctccccgagtgtgcccaggaactcagagagggcgcggcccccggggattccccccccccgagggtgcccaggactcgacaagctggaccccctgctcccgggggggcgagcgcatgacccccccgccctcgcgctgcctctttcccccgcgcggccgccccgtgttgcacaaacccgcgcgtctcggctgcccctttgtacaccgcgccgcggaagggggctccgagggggcgcagcctcaaaccctgcctttcctttacttttacttttttttttttttctttggaagagagaagaacagagtgttcgattctgccctatttatgtttctactcgggaacaaacgttggttgtgtgtgtgtgtgttttcttgtgttggttttttaaagaaatgggaagaagaaaaaaaaattctccgcccctttcctcgatctcgctccccccttcggttctttcgaccggtcccccctcccttttttgttctgttttgttttgttttgctacgagtccacattcctgtttgtaatccttggttcgcccggttttctgttttcagtaaagtctcgttacgcca

SEQ ID NO: 144811 - DNA, 500 bp, Homo sapiens
  Payload ID: 8617
  Gene Symbol: JUND
  Gene Name: jun D proto-oncogene
  ENST ID: ENST00000600972
  CDS Start-End: 1-500
gcggccgcgcccgaagcgcctgtctacgcgaacctgagcagctacgcgggcggcgccgggggcgcggggggcgccgcgacggtcgccttcgctgccgaacctgtgcccttcccgccgccgccacccccaggcgcgttggggccgccgcgcctggctgcgctcaaggacgagccacagacggtgcccgacgtgccgagcttcggcgagagcccgccgttgtcgcccatcgacatggacacgcaggagcgcatcaaggcggagcgcaagcggctgcgcaaccgcatcgccgcctccaagtgccgcaagcgcaagctggagcgcatctcgcgcctggaagagaaagtgaagaccctcaagagtcagaacacggagctggcgtccacggcgagcctgctgcgcgagcaggtggcgcagctcaagcagaaagtcctcagccacgtcaacagcggctgccagctgctgccccagcaccagagagaagaacagagtgttcgattctg

SEQ ID NO: 144812 - DNA, 1700 bp, Homo sapiens
  Payload ID: 8618
  Gene Symbol: JDP2
  Gene Name: Jun dimerization protein 2
  Uniprot ID: Q8WYK2
  ENST ID: ENST00000267569
  CDS Start-End: 194-718
ctgaagagggccttttgctgctcgccttcactctcagtcttggggccttccccatcatcttgcttctcgccttctggatctcctcgacttttggaagccgcgtgacctacgtcattcagattccaagagagaggtcatcctgggtgattccttagctccaagaagaggcttggtggttgattctccaagattcatggtagcaggctggcctgccactcctcctgctatgatgcctgggcagatcccggacccttcggtgaccacaggctccctgccagggcttggccccctgaccgggctccccagctcggccctgactgtggaggagctgaaatacgctgacatccgcaacctcggggccatgattgcacccttgcacttcctggaggtgaaactgggcaagaggccccagcccgtgaaaagtgagctagatgaggaagaggagcgaaggaaaaggcgccgggagaagaacaaagtcgcagcagcccgatgccggaacaagaagaaggagcgcacggagtttctgcagcgggaatccgagcggctggaactcatgaacgcagagctgaagacccagattgaggagctgaagcaggagcggcagcagctcatcctgatgctgaaccgacaccgccccacctgcatcgtccggaccgacagtgtcaagacccccgagtcagaaggcaacccactgctcgagcagctcgagaagaagtgaccatgggctgggaggaggtggaggaggaggaagaggagaaggaaaagtgacgaagagagaggaggaggggggccccagatggcccttcctttggtgcatgaaaaactgtacaatgaggttcagcacagccagcatcagccgagcttttttgtgaaactcagatcagccacccaggaggaagagcgggctgaggaaacccagagggaccaagcgctgagaccaaagttgaccctcgggtagggttgtcctgcctggggccccacttgaaggaggcaggacagaggcaccgaggccagggagacgcccaacgaggcagccctgggctcttctctggcctcttcaccagggcacccatccaaggaacctccgaacagccaggaaaagccatgagttgcaaccaaaacgcggctgaggatggaactcagaatgaaactgcaacccacctgcccccagccctgcccctcgccctgatgcgaagctggagaggggcgtgctgcggggccctgatgcccccacccacctcggtccagcgcggccctgcccaggaggcggcagccgggcgcaccctcgccagccctgctggagtttgctgtgggcactgaggcgcgggcgcccttccaaagcacatactcaccgaatgtttacagactggctgtcctggcagggctttcaactgcacatgttttttatactttcctttttttttttttttttaatattttttacaaaaaaaaagattttatacaagcaatatatatatggatttctataatcactcgatgtgatacagtataaatatgctatggtttgtttgttatgaacagatagccaccagttacggccgttgtgtgtaactcctaagtactgtagtctctgggtgtcgggggtggccagggcgggggcggggtgcatttccatccttgtaaacccttcatagtactcagtcctgtatcgctcagtaaacattgctcttacttacata

SEQ ID NO: 144813 - DNA, 5401 bp, Homo sapiens
  Payload ID: 8618
  Gene Symbol: JDP2
  Gene Name: Jun dimerization protein 2
  Uniprot ID: Q8WYK2
  ENST ID: ENST00000435893
  CDS Start-End: 274-765
gccccagcccagccccgcggggaggctcccgcagcccagggacctcgagctttccccgcgccgggcgctgcagccgggcccctcccgcgaggcgcccggcagcctgaggcttccttttggttcccgccccgggacgggaggctccgtccgctccctggacagccggggtgctccctccttctccctcccgcgctctcctcccccgtccgtttgcagggaggtgctctcctcgggcggcggggaaggcggggctggcctgccactcctcctgctatgatgcctgggcagatcccggacccttcggtgaccacaggctccctgccagggcttggccccctgaccgggctccccagctcggccctgactgtggaggagctgaaatacgctgacatccgcaacctcggggccatgattgcacccttgcacttcctggaggtgaaactgggcaagaggccccagcccgtgaaaagtgagctagatgaggaagaggagcgaaggaaaaggcgccgggagaagaacaaagtcgcagcagcccgatgccggaacaagaagaaggagcgcacggagtttctgcagcgggaatccgagcggctggaactcatgaacgcagagctgaagacccagattgaggagctgaagcaggagcggcagcagctcatcctgatgctgaaccgacaccgccccacctgcatcgtccggaccgacagtgtcaagacccccgagtcagaaggcaacccactgctcgagcagctcgagaagaagtgaccatgggctgggaggaggtggaggaggaggaagaggagaaggaaaagtgacgaagagagaggaggaggggggccccagatggcccttcctttggtgcatgaaaaactgtacaatgaggttcagcacagccagcatcagccgagcttttttgtgaaactcagatcagccacccaggaggaagagcgggctgaggaaacccagagggaccaagcgctgagaccaaagttgaccctcgggtagggttgtcctgcctggggccccacttgaaggaggcaggacagaggcaccgaggccagggagacgcccaacgaggcagccctgggctcttctctggcctcttcaccagggcacccatccaaggaacctccgaacagccaggaaaagccatgagttgcaaccaaaacgcggctgaggatggaactcagaatgaaactgcaacccacctgcccccagccctgcccctcgccctgatgcgaagctggagaggggcgtgctgcggggccctgatgcccccacccacctcggtccagcgcggccctgcccaggaggcggcagccgggcgcaccctcgccagccctgctggagtttgctgtgggcactgaggcgcgggcgcccttccaaagcacatactcaccgaatgtttacagactggctgtcctggcagggctttcaactgcacatgttttttatactttcctttttttttttttttttaatattttttacaaaaaaaaagattttatacaagcaatatatatatggatttctataatcactcgatgtgatacagtataaatatgctatggtttgtttgttatgaacagatagccaccagttacggccgttgtgtgtaactcctaagtactgtagtctctgggtgtcgggggtggccagggcgggggcggggtgcatttccatccttgtaaacccttcatagtactcagtcctgtatcgctcagtaaacattgctcttacttacatagccgccttgcgtggtgtctgcctggggaatgggtgcaaggccctctcagggtcggagactgtttggagcctctgctataggcctgttcattttcacaacagctctcctatttcacagatgaggaagctaaggctcagagacattaagccacctgcagttactattttgagagcagtcagagtgttcgctcactctgcagatgttttctgagggcctgttgtgtgtgccaggccctgagaattcactggaggatgaaacagacctaagtcttgcccttgtggggcctccagtaaggagtgaatcctgtgcttgctccataagttgtctcatttcgtcttcatggcagccttgccagggaacagcacttgtccccaattcacagatggcgaattagaggtccagggaattaaactcgcagacaccatttgttgaagacttattttgtgacaagcagacatagtctcttcccttctcacaagagcacaaactaggcacgattcttctcattttacagatggtttaactgaggctcagagaaggtaagcgacttatccaaggtaacccagctagcaagggatagagctggtgtttgaactctccctccagaggcctgtgactctcctcctgtcaccaacccactatgattgtcctcatggttgaataggaagcttatgaggccacagttatagatttagtttctgggaaggctggatagagttccaggttgtcccatgatcacagagtgaaccaactaccctggtcaatgtgtgtctgacccagggaagggtgtggatggcttctctgccccctcacctcgacagctgaatccctgccacccagggccggagcagctcagtggcattcactcagtgcctgctgtgtacctggcactcggcagttctcaaggcatgtcacgcatgaggaaggcgggagaggtgtttttagcttccttgtatactgaagcttgcaaaggctacagtttacccaactaaacttgactcctgcattctaatcatgtgttctttctcctccatccctggacttaggataactagttgctggtgatgacttcgtgtcaagaacagcagtgaacctgggttgcttcccaaattgtggacgaggccttctgggatgggcagaagtggagaatggtgattaacacacctgtgatccctccctcgctcactcctctcagtttccctccacccaacacacttggtgtggactcccctgcaccccgccctagaaacaggacctggtcctctcactgtcagctgtggcagaaggttgtggcagcgggttgccttctgtctcgggggtcttgaggctgtcggtccggacgatgcaggtgaggcagtgtcagttctgcatcaggaacccctcgcgctgtaatcctttgatatttttcaagccatgagaaaaatgaagtggacttaccagggtccctccagtgacctagtggatgttcttacaggactgccgtgtgccactggctgtggcttccctggtcctgtgcttggccaccgggagctggcatctccaaaatagagcctccttagcctgtgcaggtgggctgtcttccaaagtcaccacaccagtgacttgtgctgtgcggagccttcctcaccaggaccactggctgctcctgtggctagaagtcacaattataggcttcattgcaagagccagcatttgagtttcttctgggcacctgccactgtgcatgtgtgacctcaactgctttgtgcaccctgactggggggtaggtgctagcgttccaacattacagatgagaaaaccgaggcacacagaagaggtaacctgcccaaggtcacaggtgttaggtggcagagccaagatgttattgtcagtctgacttcaggtgcataaaacctgaggctgagcctccccatgagaggaaaaatgtgtttgtggtgtgacctcagttgccagggaacttgtgcaggaagccgggagagatggcacagacccacctgtgctcacagtacatgttaagaattcccaagtctcaggcaaaccatctccaagggtgttcacagaagacacaccttaaaggcaaacgggttcatgatgtaatcttctattgactagctgtgaacctcatttttcttatctgtgaagtgggaacagtaataatccaagtctttttatggagttatcaagatcaaaaaaggaatggatatacaaagtgttttgtgaaataaaagctccctaaaatggtaattattttgtcctctgttagtgtcggtagttattgatatctacatagtacaggttatttaaatatgttttattctgtaaagatgggctgccaagtttgtgttctgaccctgtacgtggtccctatggtgtgatgaatgcctgggatcgcagactcctggatctgttcagctcctgactggtcacaaccagccatgctggatgcatcattccctccctgggcctcagtgtgccctcctgccaggtggtcacacataagacctgtgccacctctgcccagggttcctatgagaatcaatcgagttgatgaatgcaaccatggcctgagaaagacaagacgctttagctatcagatgggcagaaacaagtatgtgttggtaagaatatggattaaaggttgggaggccaagatgggtggatcatgaggtcagaagattgagaccaccctggataacacggtgaaaccctgtctctactaataatacaaaaaattagccgggcatggtggcacgtgcctgtagtcccagctactcgggaggctgaggcaggagaatcacttggacctgggaggtggaggttgcagtgagccaagattgcgccactgcactccagcctgggtgacagagcgagactccatctcaaaaaaaacaaaacaaaaaaaatgtggattaaaggaaacttagatatgctgccagtgagaaactgtgcaaagcaatttggaaataaccagtaaaactaaagctaaacgcatcctttgacctagcagttttcctcctagtcttgggaggaactctagcacaggggcaaaaggaaatgtacaagaatgttcactgatggctttgtttgtatttttaaaaagttgaaaacaacctaaatgatgatcagcataagaacaaataaattgtggtattttcctaaaattgaatattactcaacaggtaaaaaagaatgaaccagagctatatgtatcaatatggataaatctcagaaacctactgttgagatggagggtaggggagtgaactgcggaaggataccacttatgtcatatttctaactaaatgtatacgttgatactttattgtttatggctacacacacatctgggtaatagaggtataaaagcctgcacaagaatgctgtcaatatcacaatcagtcatagggagtgctcctgggagggccgcggagaggagggaactagggatgccactgcaagggtaagtaggacgctggacttcaacttcaactatacacataacatttcatttatttttttaaaatccccatcaaatgtagaatgacaggatttttcagaggtgggtgatgtgtgcacagatgtgggctatcttctccacactcctctgtatatttgatattctttgcaataaaagagaacaagccacaatacaaa

SEQ ID NO: 144814 - DNA, 3775 bp, Homo sapiens
  Payload ID: 8618
  Gene Symbol: JDP2
  Gene Name: Jun dimerization protein 2
  Uniprot ID: Q8WYK2
  ENST ID: ENST00000437176
  CDS Start-End: 60-551
cccgggggcgccgcctccccccgcaccttctgcacggctggcctgccactcctcctgctatgatgcctgggcagatcccggacccttcggtgaccacaggctccctgccagggcttggccccctgaccgggctccccagctcggccctgactgtggaggagctgaaatacgctgacatccgcaacctcggggccatgattgcacccttgcacttcctggaggtgaaactgggcaagaggccccagcccgtgaaaagtgagctagatgaggaagaggagcgaaggaaaaggcgccgggagaagaacaaagtcgcagcagcccgatgccggaacaagaagaaggagcgcacggagtttctgcagcgggaatccgagcggctggaactcatgaacgcagagctgaagacccagattgaggagctgaagcaggagcggcagcagctcatcctgatgctgaaccgacaccgccccacctgcatcgtccggaccgacagtgtcaagacccccgagtcagaaggcaacccactgctcgagcagctcgagaagaagtgaccatgggctgggaggaggtggaggaggaggaagaggagaaggaaaagtgacgaagagagaggaggaggggggccccagatggcccttcctttggtgcatgaaaaactgtacaatgaggttcagcacagccagcatcagccgagcttttttgtgaaactcagatcagccacccaggaggaagagcgggctgaggaaacccagagggaccaagcgctgagaccaaagttgaccctcgggtagggttgtcctgcctggggccccacttgaaggaggcaggacagaggcaccgaggccagggagacgcccaacgaggcagccctgggctcttctctggcctcttcaccagggcacccatccaaggaacctccgaacagccaggaaaagccatgagttgcaaccaaaacgcggctgaggatggaactcagaatgaaactgcaacccacctgcccccagccctgcccctcgccctgatgcgaagctggagaggggcgtgctgcggggccctgatgcccccacccacctcggtccagcgcggccctgcccaggaggcggcagccgggcgcaccctcgccagccctgctggagtttgctgtgggcactgaggcgcgggcgcccttccaaagcacatactcaccgaatgtttacagactggctgtcctggcagggctttcaactgcacatgttttttatactttcctttttttttttttttttaatattttttacaaaaaaaaagattttatacaagcaatatatatatggatttctataatcactcgatgtgatacagtataaatatgctatggtttgtttgttatgaacagatagccaccagttacggccgttgtgtgtaactcctaagtactgtagtctctgggtgtcgggggtggccagggcgggggcggggtgcatttccatccttgtaaacccttcatagtactcagtcctgtatcgctcagtaaacattgctcttacttacatagccgccttgcgtggtgtctgcctggggaatgggtgcaaggccctctcagggtcggagactgtttggagcctctgctataggcctgttcattttcacaacagctctcctatttcacagatgaggaagctaaggctcagagacattaagccacctgcagttactattttgagagcagtcagagtgttcgctcactctgcagatgttttctgagggcctgttgtgtgtgccaggccctgagaattcactggaggatgaaacagacctaagtcttgcccttgtggggcctccagtaaggagtgaatcctgtgcttgctccataagttgtctcatttcgtcttcatggcagccttgccagggaacagcacttgtccccaattcacagatggcgaattagaggtccagggaattaaactcgcagacaccatttgttgaagacttattttgtgacaagcagacatagtctcttcccttctcacaagagcacaaactaggcacgattcttctcattttacagatggtttaactgaggctcagagaaggtaagcgacttatccaaggtaacccagctagcaagggatagagctggtgtttgaactctccctccagaggcctgtgactctcctcctgtcaccaacccactatgattgtcctcatggttgaataggaagcttatgaggccacagttatagatttagtttctgggaaggctggatagagttccaggttgtcccatgatcacagagtgaaccaactaccctggtcaatgtgtgtctgacccagggaagggtgtggatggcttctctgccccctcacctcgacagctgaatccctgccacccagggccggagcagctcagtggcattcactcagtgcctgctgtgtacctggcactcggcagttctcaaggcatgtcacgcatgaggaaggcgggagaggtgtttttagcttccttgtatactgaagcttgcaaaggctacagtttacccaactaaacttgactcctgcattctaatcatgtgttctttctcctccatccctggacttaggataactagttgctggtgatgacttcgtgtcaagaacagcagtgaacctgggttgcttcccaaattgtggacgaggccttctgggatgggcagaagtggagaatggtgattaacacacctgtgatccctccctcgctcactcctctcagtttccctccacccaacacacttggtgtggactcccctgcaccccgccctagaaacaggacctggtcctctcactgtcagctgtggcagaaggttgtggcagcgggttgccttctgtctcgggggtcttgaggctgtcggtccggacgatgcaggtgaggcagtgtcagttctgcatcaggaacccctcgcgctgtaatcctttgatatttttcaagccatgagaaaaatgaagtggacttaccagggtccctccagtgacctagtggatgttcttacaggactgccgtgtgccactggctgtggcttccctggtcctgtgcttggccaccgggagctggcatctccaaaatagagcctccttagcctgtgcaggtgggctgtcttccaaagtcaccacaccagtgacttgtgctgtgcggagccttcctcaccaggaccactggctgctcctgtggctagaagtcacaattataggcttcattgcaagagccagcatttgagtttcttctgggcacctgccactgtgcatgtgtgacctcaactgctttgtgcaccctgactggggggtaggtgctagcgttccaacattacagatgagaaaaccgaggcacacagaagaggtaacctgcccaaggtcacaggtgttaggtggcagagccaagatgttattgtcagtctgacttcaggtgcataaaacctgaggctgagcctccccatgagaggaaaaatgtgtttgtggtgtgacctcagttgccagggaacttgtgcaggaagccgggagagatggcacagacccacctgtgctcacagtacatgttaagaattcccaagtctcaggcaaaccatctccaagggtgttcacagaagacacaccttaaaggcaaacgggttcatgatgtaatcttctattgactagctgtgaacctcatttttcttatctgtgaagtgggaacagtaataatccaagtctttttatggagttatcaagatcaaaaaaggaatggatatacaaagtgttttgtgaaataaaagctccctaaaatggt

SEQ ID NO: 144815 - DNA, 972 bp, Homo sapiens
  Payload ID: 8618
  Gene Symbol: JDP2
  Gene Name: Jun dimerization protein 2
  Uniprot ID: Q8WYK2
  ENST ID: ENST00000419727
  CDS Start-End: 158-649
cctgctttctcgagcgctcctgcaccgtggggtggcggagccgggggactgcatggaacccgggacgcccccgcggggagaggagcgcgagcggccgcgggaggagggcgcccaaggcggcgggggaggttaaggctggcctgccactcctcctgctatgatgcctgggcagatcccggacccttcggtgaccacaggctccctgccagggcttggccccctgaccgggctccccagctcggccctgactgtggaggagctgaaatacgctgacatccgcaacctcggggccatgattgcacccttgcacttcctggaggtgaaactgggcaagaggccccagcccgtgaaaagtgagctagatgaggaagaggagcgaaggaaaaggcgccgggagaagaacaaagtcgcagcagcccgatgccggaacaagaagaaggagcgcacggagtttctgcagcgggaatccgagcggctggaactcatgaacgcagagctgaagacccagattgaggagctgaagcaggagcggcagcagctcatcctgatgctgaaccgacaccgccccacctgcatcgtccggaccgacagtgtcaagacccccgagtcagaaggcaacccactgctcgagcagctcgagaagaagtgaccatgggctgggaggaggtggaggaggaggaagaggagaaggaaaagtgacgaagagagaggaggaggggggccccagatggcccttcctttggtgcatgaaaaactgtacaatgaggttcagcacagccagcatcagccgagcttttttgtgaaactcagatcagccacccaggaggaagagcgggctgaggaaacccagagggaccaagcgctgagaccaaagttgaccctcgggtagggttgtcctgcctggggccccacttgaaggaggcaggacagaggcaccgaggccagggagacgcccaacgaggcagccctggg

SEQ ID NO: 144816 - DNA, 631 bp, Homo sapiens
  Payload ID: 8618
  Gene Symbol: JDP2
  Gene Name: Jun dimerization protein 2
  ENST ID: ENST00000559060
  CDS Start-End: 231-631
ggacgctcggcggccgcgacggggggcgctggcggcggcggacgctgcagcggcggcggggctggcgccgcggcggctcccgggccgggacaggcctgggcaccgggcggagctccgcggccgggcggcagcggcgcggagcgggcacggcgcctgcagccgggccccggccccgggggcgccgcctccccccgcaccttctgcacggctggcctgccactcctcctgctatgatgcctgggcagatcccggacccttcggtgaccacaggctccctgccagggcttggccccctgaccgggctccccagctcggccctgactgtggaggagctgaaatacgctgacatccgcaacctcggggccatgattgcacccttgcacttcctggaggtgaaactgggcaagaggccccagcccgtgaaaagtgagctagatgaggaagaggagcgaaggaaaaggcgccgggagaagaacaaagtcgcagcagcccgatgccggaacaagaagaaggagcgcacggagtttctgcagcgggaatccgagcggctggaactcatgaacgcagagctgaagacccagattgaggagctgaagcaggagcggcagcagctcatcctgatgctgaaccg

SEQ ID NO: 144817 - DNA, 3540 bp, Homo sapiens
  Payload ID: 8619
  Gene Symbol: JUN
  Gene Name: jun proto-oncogene
  Uniprot ID: P05412
  ENST ID: ENST00000371222
  CDS Start-End: 1258-2253
cggggaggggaccggggaagagagggccgagaggcgtgcggcaggggggagggtaggagaaagaagggcccgactgtaggagggcagcggagcattacctcatcccgtgagcctccgcgggcccagagaagaatcttctagggtggagtctccatggtgacgggcgggcccgcccccctgagagcgacgcgagccaatgggaaggccttggggtgacatcatgggctatttttaggggttgactggtagcagataagtgttgagctcgggctggataagggctcagagttgcactgagtgtggctgaagcagcgaggcgggagtggaggtgcgcggagtcaggcagacagacagacacagccagccagccaggtcggcagtatagtccgaactgcaaatcttattttcttttcaccttctctctaactgcccagagctagcgcctgtggctcccgggctggtgtttcgggagtgtccagagagcctggtctccagccgcccccgggaggagagccctgctgcccaggcgctgttgacagcggcggaaagcagcggtacccacgcgcccgccgggggaagtcggcgagcggctgcagcagcaaagaactttcccggctgggaggaccggagacaagtggcagagtcccggagccaacttttgcaagcctttcctgcgtcttaggcttctccacggcggtaaagaccagaaggcggcggagagccacgcaagagaagaaggacgtgcgctcagcttcgctcgcaccggttgttgaacttgggcgagcgcgagccgcggctgccgggcgccccctccccctagcagcggaggaggggacaagtcgtcggagtccgggcggccaagacccgccgccggccggccactgcagggtccgcactgatccgctccgcggggagagccgctgctctgggaagtgagttcgcctgcggactccgaggaaccgctgcgcacgaagagcgctcagtgagtgaccgcgacttttcaaagccgggtagcgcgcgcgagtcgacaagtaagagtgcgggaggcatcttaattaaccctgcgctccctggagcgagctggtgaggagggcgcagcggggacgacagccagcgggtgcgtgcgctcttagagaaactttccctgtcaaaggctccggggggcgcgggtgtcccccgcttgccacagccctgttgcggccccgaaacttgtgcgcgcagcccaaactaacctcacgtgaagtgacggactgttctatgactgcaaagatggaaacgaccttctatgacgatgccctcaacgcctcgttcctcccgtccgagagcggaccttatggctacagtaaccccaagatcctgaaacagagcatgaccctgaacctggccgacccagtggggagcctgaagccgcacctccgcgccaagaactcggacctcctcacctcgcccgacgtggggctgctcaagctggcgtcgcccgagctggagcgcctgataatccagtccagcaacgggcacatcaccaccacgccgacccccacccagttcctgtgccccaagaacgtgacagatgagcaggagggcttcgccgagggcttcgtgcgcgccctggccgaactgcacagccagaacacgctgcccagcgtcacgtcggcggcgcagccggtcaacggggcaggcatggtggctcccgcggtagcctcggtggcagggggcagcggcagcggcggcttcagcgccagcctgcacagcgagccgccggtctacgcaaacctcagcaacttcaacccaggcgcgctgagcagcggcggcggggcgccctcctacggcgcggccggcctggcctttcccgcgcaaccccagcagcagcagcagccgccgcaccacctgccccagcagatgcccgtgcagcacccgcggctgcaggccctgaaggaggagcctcagacagtgcccgagatgcccggcgagacaccgcccctgtcccccatcgacatggagtcccaggagcggatcaaggcggagaggaagcgcatgaggaaccgcatcgctgcctccaagtgccgaaaaaggaagctggagagaatcgcccggctggaggaaaaagtgaaaaccttgaaagctcagaactcggagctggcgtccacggccaacatgctcagggaacaggtggcacagcttaaacagaaagtcatgaaccacgttaacagtgggtgccaactcatgctaacgcagcagttgcaaacattttgaagagagaccgtcgggggctgaggggcaacgaagaaaaaaaataacacagagagacagacttgagaacttgacaagttgcgacggagagaaaaaagaagtgtccgagaactaaagccaagggtatccaagttggactgggttgcgtcctgacggcgcccccagtgtgcacgagtgggaaggacttggcgcgccctcccttggcgtggagccagggagcggccgcctgcgggctgccccgctttgcggacgggctgtccccgcgcgaacggaacgttggacttttcgttaacattgaccaagaactgcatggacctaacattcgatctcattcagtattaaaggggggagggggagggggttacaaactgcaatagagactgtagattgcttctgtagtactccttaagaacacaaagcggggggagggttggggaggggcggcaggagggaggtttgtgagagcgaggctgagcctacagatgaactctttctggcctgccttcgttaactgtgtatgtacatatatatattttttaatttgatgaaagctgattactgtcaataaacagcttcatgcctttgtaagttatttcttgtttgtttgtttgggtatcctgcccagtgttgtttgtaaataagagatttggagcactctgagtttaccatttgtaataaagtatataatttttttatgttttgtttctgaaaattccagaaaggatatttaagaaaatacaataaactattggaaagtactcccctaacctcttttctgcatcatctgtagatactagctatctaggtggagttgaaagagttaagaatgtcgattaaaatcactctcagtgcttcttactattaagcagtaaaaactgttctctattagactttagaaataaatgtacctgatgtacctgatgctatggtcaggttatactcctcctcccccagctatctatatggaattgcttaccaaaggatagtgcgatgtttcaggaggctggaggaaggggggttgcagtggagagggacagcccactgagaagtcaaacatttcaaagtttggattgtatcaagtggcatgtgctgtgaccatttataatgttagtagaaattttacaataggtgcttattctcaaagcaggaattggtggcagattttacaaaagatgtatccttccaatttggaatcttctctttgacaattcctagataaaaagatggcctttgcttatgaatatttataacagcattcttgtcacaataaatgtattcaaataccaataa

SEQ ID NO: 144818 - DNA, 9042 bp, Homo sapiens
  Payload ID: 8620
  Gene Symbol: JMY
  Gene Name: junction mediating and regulatory protein, p53 cofactor
  Uniprot ID: Q8N9B5
  ENST ID: ENST00000396137
  CDS Start-End: 463-3429
agtcaggccggctccgggctttctgcagcagcaccaggggcgggggcggggatcttgacctgggcgagcgaccgggacgcatacagcgccggcctgaccccgcgggacccgcgcctcaccaccggagcgccgcagacgcagctccacggcctcgcgcggggggcggcgggcggccgcgaggcgctgcggcagcgcggagcttgtaaacagatccggccgcaggtgaccatgtgaactacctgctcccgggacgcttattgtccttctctcgatccgcgccacaaaggagctcggcggtcggggcgcggagggacaggcgaacgagccgggagagccggccggcgcactaagatggctgaaggcgcccggcgagggtgagcggggggcgcggcgcagccagcggggagtcctcgggcgggccgggccggcggcccttccccgcggcgagaagccggagccaccatgtcgttcgcgctggaggagacgctcgagtcggactgggtggctgtgcggccccatgtgttcgacgagcgcgagaaacacaaattcgtctttattgtggcctggaacgagattgagggcaagtttgccataacctgccacaaccggacggcccagaggcagaggagcggctcccgggagcaagcgggggcgcgagggggcgccgaggccggcggagctgcgtccgacgggagccgcgggcccggcagcccggcgggcaggggtcggcccgaggccactgcctctgcaactctggttaggagccccgggccccggcggagctcggcctgggcggagggcggctctcctcggagcactcgcagccttctgggggacccgcggctgcggagtcctggcagcaaaggggcggagagtcgtcttaggagcccagtgcgggccaaacccatcccgggtcagaaaacatctgaagccgacgatgcggcgggggcagccgctgcagcagcccggccggcgcccagagaggcccaggtgtcctctgtacggatagtgagcgcctctgggacggtctccgaggagatagaggtgctggaaatggtgaaggaggacgaggcacctctggcgctctcggacgcggagcagccgccgcccgccaccgagctggagtctccggccgaagagtgcagctgggccggactgttttctttccaggacctgcgcgccgtgcaccagcagctgtgctcggtgaactcgcagttggagccgtgcctgccggtgttccccgaggaaccttcgggcatgtggactgtgctgtttgggggcgcccccgagatgaccgagcaggaaatcgacactctgtgttaccagctccaggtctacctgggccacggcctggacacctgcggctggaagatcctctcccaggtgctcttcaccgagaccgatgatcccgaggagtattacgaaagcctcagcgagctgcggcagaagggctacgaagaagtgcttcagcgggccaggaagcgcatccaggagctcttggataagcacaagaatacagagagcatggtggagcttctggacttgtatcagatggaggatgaagcctacagcagccttgcagaagctacaaccgaactctatcagtatttactacagccattccgagacatgagagaacttgccatgctacgaagacagcagatcaagatttccatggagaatgattatctgggacctcgaagaattgagagtctacaaaaagaagatgctgattggcagcggaaagctcacatggctgtactgtctattcaagatcttactgtcaagtactttgaaataacagctaaagctcaaaaagctgtgtatgatcgaatgcgagctgatcagaagaaatttggtaaagcatcatgggcagcggctgctgaacggatggaaaaactccagtatgcagtttctaaggaaactttgcagatgatgagagctaaagagatatgcttggaacagcggaaacatgcactaaaggaagagatgcagagtttgcggggtggtacagaagcgatagcacgattggatcagttagaagctgattattatgatctgcaacttcagttgtatgaagtacagtttgaaatcttgaagtgtgaagagttactattgacagcgcaactagaaagcatcaaaagacttatatcagaaaaaagagatgaagtggtatactatgacacttacgaaagcatggaggccatgctggagaaggaagagatggcagcatctgcgtacttacagagagaagagctgcagaaacttcagcagaaagcacgccagctggaagcaagacgtggacgggtttctgccaagaaatcctacctcagaaataaaaaggaaatatgtattgcaaaacacaatgaaaaaatccaacagcgcactcggattgaagatgaatatagaacccatcacacagtacaactaaagagagaaaaattacatgatgaagaagaaagaaaaagtgcctgggttagccaagagagacagagaacactggatagacttcgaacatttaaacagaggtatcctgggcaagtcatacttaaatcaaccagattacgactagctcatgcaagaagaaaaggtgcagcaagtcctgttctccaagaggatcattgtgactctttaccaagtgtgttacaggtagaagagaaaactgaagaggtgggagaaggaagagtcaagcgtgggccatcacagacaacagaaccccagagccttgtgcaacttgaagatacttcattaacacaacttgaagccacctcattacctctcagtggtgttacctctgaactgcctcccactatatctcttccacttttgaataacaacctcgaaccatgttctgttaccataaatccactcccatcccctcttcctccaacaccaccacctcccccacctcctccccctcccccaccaccaccacctctgcctgttgctaaggacagtggcccagagacactggagaaagatctgcctagaaaggaggggaatgagaagaggatcccaaagtcagccagtgccccctcagcacacctctttgacagcagccagctggtcagtgcacggaagaagctcagaaagactgctgaaggtttgcagaggaggagagtgagctcacccatggatgaggtgctagcctccttgaagcgtggtagttttcatctgaaaaaggttgaacagcgaactctgcctccttttcctgatgaagatgatagtaataatatcttggcacaaataaggaaaggggtaaaattgaagaaggtacagaaggatgttttgagagaatccttcacacttctacccgatacagaccctctaacacggagcatccatgaagctcttagaagaattaaagaagcatccccagagtcagaggacgaagaggaggctttaccttgcacagactgggagaactaacaagtgacataacagaagaaaaatatcattcaagattggttctgattcttttggaaaatgacagtttaagcacttggttcctcagttggataacattagatccaaagttcattggttcagtggtgtgaagaaaggaagcacaattggcaggttatcactttccagtcgttccaatagatgatggttaacatgaattttacatgtgcaatgttcctgactgcaatgaagaaaaggccttctggagatttctgttttttaagcacattctccttccatccacatatttacatccttgtaatggccagttaagctagggcttgctgtaagttggaagaacactgggttgacagagatctactgtgagctgtattgggactgctttgagaaccatctttcaatgcactgaaaagtcatctgaaaaaatagcttcttccatatcagcttatattaaatactgtgacactctgagaaagtttatcatcatgatagctgtaagtcaggcattaaaatcaaatggaaatacacctaaaatgtccgcattactcatttccaaaggatttttcataaagatgttcagcaacatctgaaaagctgcatttatggagatacatctattaatatgttcacaacatgatacatttaacatggcatatttttaggagtcttatactttgtaaggttttgaagtttccgtgcttttaaatcactcttcatatttcttgaatttataatagtttgaattttatgtgcatccttgtttatggaaggcagtactttgataatatttcaaattatttttattttgtttgaattattgcttgattgctatgactgacatgactttcctattgagaatcaaaaatcaagattcaatcatagggatgcagatcttaactcttttcacaaattaccattttaagtttttatttttatgctccacagtgaaaagcatgtgctctacaaagatagaaagtagagacaagtctccgtggctggcatttcaccatcttcacatgcactgaatggaattttgggagaatgcctttgttatagtcactaaaattttaaacttatacacagctttaggtgctgattttggctgtgatggagtcctgaaggacacatttatatgttccagattttcagcaggattgttgtgggcttgaatacatgtagatcattggactcagtgtgcagtaccctgtacatataattctgcataagacagatcttggcctttctgtggagggagttaagaactaaaataccaaaaatcactttatttcttttaagacaattatctggcctaaacccagaaagcagtactggagcaaaagcccagtgtatatgaattggtattcctagagaaaaaaagaaatgctcacacctttgttattttaaagtgttttcttgaaaataattagggagaaaattttctggcaacaggttatgtaagacaacaactttttttattatttcaaaacaaaacaggcacatgccaccatgccccagctaatttttatattttttatagagacagggttttgccatgttgcccacgctggtcttgaactcctggactcaagcaatctgccagcctcggcctgctaaagtgctaggattataggcgtgagcctctgtgcccagcctgacaaaatcttttatttatttaaatgttagtaatacgtttattgatgagactaggagcttctctgcagcatcttcataatacattggttttagttcccacactattcccacatcttatctgggaagattagaaatacagatgtaatatggaagcttcaacagcatgggggtggtgatagtgtcctatttgcccttggtaaaatattaaagcgtatttcttaacccaaagagtgattggttatatgaatatatttgaaaaagttaaagcaaatttgcaaacctttacaaaatcatgtatcaattttatgctatccagtttttacgtacccatgtgtcaacatttcatatatccagttctttgggtgctggttcactttttttcatttattcaaattcagaaaaatacggacggatctaatgttaaattaaccagaaaccctggaacattcatatcttgagagggaatttgctactcttttacttttgggatttcattataaaataggctcattttatacatatgtcctgtggtctgtcttccagagtgtgctgtaatcataagtctctagcaaagagtggagggtggagggtgtgtagaactccactcagcctcatggatacatctacaagtctctcaacccatcctgttacagttctccatgagagtcacctcacacttggaaaagaaggaggttaaagcagagtattgttggcagccagctatgcccatcctcttgtaaataactttccaacacacccatttccttgccttaaggtgcaggttcctacttctacaaaatttcaaatgattgcaggtcaaaaacctttggagttactcacaaataataataaaatttcaaataactagggtctacttgtccatcaagatgacattaccagtggaacccacctgttaattttaaagtagcttcagaacccaacaaaaattatgtaagcctggttaaatgtccttttttcttcttgcctctaataaaatcaggatcttcggccttgatactaaatatgtgtatatttagttatgatggtacttgtagatgctcacatttccagttccaaactcgcccgtactttttatgtgcttcaaaatattggacacatttctgttaatatatgatttctgtatccacaaaccgctgtttgcttatgctgagtcaatttagaagttaatttccaatctagtctcaactgcaatgcatttaaaataggtaaaacaagtaaatgagtttgggacattttgagattaatgttactgcccacttgactgtcaatttcaaatggctcctaatgcaaccaaaattataaccaatgtagcatgtgtaggaaaggtatttttaattatttaaaatcattgtgtatattacagcagtatgaggaatgcctggctaaagaggattttttaaaagatgaagaatggttttgcttgtattatataggcttactgagtttgtgagcagcataaaaacaatcattccttaattcttcattgtggaactgaaatatttctgtaatgcattttttaaaaggagactcctagacacagctgtaatagtgggaatagaaatgtagagcttttctcataacacaaaaccagaaaataattttcagcactttgacttactctatgtaataaggaaaaaaattgtttccacaaagttgaactatgtagtaatatttggtaacatatggcatggccactttatatcacagaatgtgtgtcaagttgcaaagcatacttgggccatagtagacactaagaattaaaactcttaaatcagtgaaacaaaaactaatgggcagcattctctctgtttggaatgggatcagtatacaattaatacaatttaattttacacattccctaagacaccatttttaagttacagtcacatgagtgtttgtataaatttaagtcaatgcttttagcctaggcaaagctaaatacaaggtttttggggttttcttttttcagctttattattgaagtattacaaacttaacatcagataccaatgtgtaaaaagtactattgggtccttaagggctctatcagggagttgaaatttcatacgctttaccaggttacttgtaaaaaatgaacagctgtaagacatttcaaaaccattgcagacacattgttaaaatgcagccatttgataatgaaagcagaaaccttaagttttacctaattattgcactaaatgtaaatgataacataaaattaagtgtgcattttaaacagattctatttcccacttactgcttagcatagaaaaagagctatggttagaggagtgaccagcaagatttatttcagatggaaaaggggtgagaaagtggaagcaccttactgttagagcatgttgcatctatttagtgctactgaacaattcagtagttatttctgaactttgctgcaaagtgctctttagttaaagcacattaagaagggtcactgcttaattgctttgtaaaatgaagcaatggtattttttatccgatatagtgtaatttaaaagttttcctacaaagtgagtttatattgttgcctaaactatgttatgtaagcaaagggtttggaaaggcgggagggagtctagattcggcgagagtgtgcgtttgtgtgtgtgaatgtatgaaaagtttccccattgggttattcttaagatgtgtttattgtaaagttttctacgttttgcccacagtaaatgtacaacttcgcaattgtaggatttaattgattgaattccaaatttatactgtctcttcccttctgcagagacattatgccactgtaaggtgcatgtacagaaaatacctctgaggttgacttgttaaataactgatgaatgttatttcacactgaatctcaaagcagtcatttgttttgcgggttaggggaaagttttgttttttgctggtgttttttgttgtttttaattaggcacactaagagtggctaaatttgggggaattggtggataggaaagaccttgaaaagtgatgtgtagatgaaaacacaaggtatggatgttggttacagagttcagttttaacaagggaaatttggggattttttttttttttacttgcatgttctatgggtagctatcaaagggtgtaacaaattattccagcttttcccaatactaattatattggttttaaaaagtctgcataatcactaggtggcattttcccttcatttgtgaaccaagaggggtaaatgatgctacccatacagtgacttctgagttctttaactttgacagaatctccattgtttcattgaatttctcattgtattatatgtctttccaagtgtgcaaactataatatgtagttaatgaaaaatggaaggctgcagattattttgcatgaataattaattgcccattagggctaaggagactgacatgatttttatcggttctgggtaaatgaaaattttaatggaaaactcattcaccatttactagctttgtgcaatattataaaaggtagaagcaaaacactagcacattgtgctttgcttggcttgtaaggatggctttagtaccattacattaaatggacagtgtgcacagtgtattgtaaatgccaactcttgcaaatttacaatacttaaatatgttcaattaacatcctaaagtattaaaagtacagaggaaaaactaagcaagcatttatagcaataccatgaaatctccagtaatcgttttgactgttgccttttgctctttagtgcagcttttctgcattgtaattgtattgctttgtatttcatgttttttacactcatgacttcagagttaagtacttgtacaccaagtattgcaatcacctttctcttgttgtacatgcaatgtaacaacctacagttttggtgcttttaacaatattcctctttttctttaataaaggatatttatttgaattaattaa

SEQ ID NO: 144819 - DNA, 3200 bp, Homo sapiens
  Payload ID: 8621
  Gene Symbol: JUP
  Gene Name: junction plakoglobin
  Uniprot ID: P14923
  ENST ID: ENST00000310706
  CDS Start-End: 120-2357
ggccagagtccggagcagccgccgcccgaccacgccgagctcagttcgctgtccgcgccggctcccaccccggcccgaccccgacccggcccggtcaggccccatactcagtagccacgatggaggtgatgaacctgatggagcagcctatcaaggtgactgagtggcagcagacatacacctacgactcgggtatccactcgggcgccaacacctgcgtgccctccgtcagcagcaagggcatcatggaggaggatgaggcctgcgggcgccagtacacgctcaagaaaaccaccacttacacccagggggtgccccccagccaaggtgatctggagtaccagatgtccacaacagccagggccaaacgggtgcgggaggccatgtgccctggtgtgtcaggcgaggacagctcgcttctgctggccacccaggtggaggggcaggccaccaacctgcagcgactggccgagccgtcccagctgctcaagtcggccattgtgcatctcatcaactaccaggacgatgccgagctggccactcgcgccctgcccgagctcaccaaactgctcaacgacgaggacccggtggtggtgaccaaggcggccatgattgtgaaccagctgtcgaagaaggaggcgtcgcggcgggccctgatgggctcgccccagctggtggccgctgtcgtgcgtaccatgcagaataccagcgacctggacacagcccgctgcaccaccagcatcctgcacaacctctcccaccaccgggaggggctgctcgccatcttcaagtcgggtggcatccctgctctggtccgcatgctcagctcccctgtggagtcggtcctgttctatgccatcaccacgctgcacaacctgctcctgtaccaggagggcgccaagatggccgtgcgcctggccgacgggctgcaaaagatggtgcccctgctcaacaagaacaaccccaagttcctggccatcaccaccgactgcctgcagctcctggcctacggcaaccaggagagcaagctgatcatcctggccaatggtgggccccaggccctcgtgcagatcatgcgtaactacagttatgaaaagctgctctggaccaccagtcgtgtgctcaaggtgctatccgtgtgtcccagcaataagcctgccattgtggaggctggtgggatgcaggccctgggcaagcacctgaccagcaacagcccccgcctggtgcagaactgcctgtggaccctgcgcaacctctcagatgtggccaccaagcaggagggcctggagagtgtgctgaagattctggtgaatcagctgagtgtggatgacgtcaacgtcctcacctgtgccacgggcacactctccaacctgacatgcaacaacagcaagaacaagacgctggtgacacagaacagcggtgtggaggctctcatccatgccatcctgcgtgctggtgacaaggacgacatcacggagcctgccgtctgcgctctgcgccacctcactagccgccaccctgaggccgagatggcccagaactctgtgcgtctcaactatggcatcccagccatcgtgaagctgctcaaccagcccaaccagtggccactggtcaaggcaaccatcggcttgatcaggaatctggccctgtgcccagccaaccatgccccgctgcaggaggcagcggtcatcccccgcctcgtccaactgctggtgaaggcccaccaggatgcccagcgccacgtagctgcaggcacacagcagccctacacggatggtgtgaggatggaggagattgtggagggctgcaccggagcactgcacatcctcgcccgggaccccatgaaccgcatggagatcttccggctcaacaccattcccctgtttgtgcagctcctgtactcgtcggtggagaacatccagcgcgtggctgccggggtgctgtgtgagctggcccaggacaaggaggcggccgacgccattgatgcagagggggcctcggccccactcatggagttgctgcactcccgcaacgagggcactgccacctacgctgctgccgtcctgttccgcatctccgaggacaagaacccagactaccggaagcgcgtgtccgtggagctcaccaactccctcttcaagcatgacccggctgcctgggaggctgcccagagcatgattcccatcaatgagccctatggagatgacatggatgccacctaccgccccatgtactccagcgatgtgccccttgacccgctggagatgcacatggacatggatggagactaccccatcgacacctacagcgacggcctcaggcccccgtaccccactgcagaccacatgctggcctaggcggcctggccccagtgcggttcctcatctgagaggctctccgtgcaggcgatggggcaagacagaaaagtgcctgagctggggaagccggggtgtaacttcctgctgcaccctgcgcctccagaggtcctccgtagggtctttcttgggatagtgttctgctcctgcttttctgtcctgggcatgggtccagggcctgacaccccctccccgcccctgtggccctggccactaaagcttcagactcaagtacccattctgttttcccccagcaacgcccctccaaacctccagcctccctgtctccagctgcctgggcccggaagggctttggttccttctctgggtctgattttctcactgaactccaccgaccaactgccctaagcccccagggcctccagggcccaggttcgagacccaaacccccaaaatccaaaacttctcttgaaaagttcagggaccgtccaggggagatggggaggagatatggagtgagtcacctgctccagaagatgccagcttctctctccagggtgcttagttggctttgcccacccctcactccccagggagctctggggacagcttcctcacacccctgtcccacccacacagctgccctagctgaccccgagaagtgctcttggctgacccctctggtgtgtggtgaggggctttctcttccccttcctgtttcagacccccccatttcccgcacatggtgtggggggctgggggaggtccaagcagagtgttttattattatcgctttatgtttttggttattggtttttttgtatagaccaaagcaaagaaaataaaaataacacagatgcgttg

SEQ ID NO: 144820 - DNA, 3298 bp, Homo sapiens
  Payload ID: 8621
  Gene Symbol: JUP
  Gene Name: junction plakoglobin
  Uniprot ID: P14923
  ENST ID: ENST00000393930
  CDS Start-End: 218-2455
catgctttctggaggcctgcacagacctttcccacccgctttcctgaaagaatttgacagggaaagtgagaccgcaggaaggctttttgggggaaggtttcttcaatgctagactctctcaggcagagctgcatcgggccccctgccttccctgctcccaatttcctgagaccgcccccccccacccagaattggggatcttgatcaggtagccacgatggaggtgatgaacctgatggagcagcctatcaaggtgactgagtggcagcagacatacacctacgactcgggtatccactcgggcgccaacacctgcgtgccctccgtcagcagcaagggcatcatggaggaggatgaggcctgcgggcgccagtacacgctcaagaaaaccaccacttacacccagggggtgccccccagccaaggtgatctggagtaccagatgtccacaacagccagggccaaacgggtgcgggaggccatgtgccctggtgtgtcaggcgaggacagctcgcttctgctggccacccaggtggaggggcaggccaccaacctgcagcgactggccgagccgtcccagctgctcaagtcggccattgtgcatctcatcaactaccaggacgatgccgagctggccactcgcgccctgcccgagctcaccaaactgctcaacgacgaggacccggtggtggtgaccaaggcggccatgattgtgaaccagctgtcgaagaaggaggcgtcgcggcgggccctgatgggctcgccccagctggtggccgctgtcgtgcgtaccatgcagaataccagcgacctggacacagcccgctgcaccaccagcatcctgcacaacctctcccaccaccgggaggggctgctcgccatcttcaagtcgggtggcatccctgctctggtccgcatgctcagctcccctgtggagtcggtcctgttctatgccatcaccacgctgcacaacctgctcctgtaccaggagggcgccaagatggccgtgcgcctggccgacgggctgcaaaagatggtgcccctgctcaacaagaacaaccccaagttcctggccatcaccaccgactgcctgcagctcctggcctacggcaaccaggagagcaagctgatcatcctggccaatggtgggccccaggccctcgtgcagatcatgcgtaactacagttatgaaaagctgctctggaccaccagtcgtgtgctcaaggtgctatccgtgtgtcccagcaataagcctgccattgtggaggctggtgggatgcaggccctgggcaagcacctgaccagcaacagcccccgcctggtgcagaactgcctgtggaccctgcgcaacctctcagatgtggccaccaagcaggagggcctggagagtgtgctgaagattctggtgaatcagctgagtgtggatgacgtcaacgtcctcacctgtgccacgggcacactctccaacctgacatgcaacaacagcaagaacaagacgctggtgacacagaacagcggtgtggaggctctcatccatgccatcctgcgtgctggtgacaaggacgacatcacggagcctgccgtctgcgctctgcgccacctcactagccgccaccctgaggccgagatggcccagaactctgtgcgtctcaactatggcatcccagccatcgtgaagctgctcaaccagcccaaccagtggccactggtcaaggcaaccatcggcttgatcaggaatctggccctgtgcccagccaaccatgccccgctgcaggaggcagcggtcatcccccgcctcgtccaactgctggtgaaggcccaccaggatgcccagcgccacgtagctgcaggcacacagcagccctacacggatggtgtgaggatggaggagattgtggagggctgcaccggagcactgcacatcctcgcccgggaccccatgaaccgcatggagatcttccggctcaacaccattcccctgtttgtgcagctcctgtactcgtcggtggagaacatccagcgcgtggctgccggggtgctgtgtgagctggcccaggacaaggaggcggccgacgccattgatgcagagggggcctcggccccactcatggagttgctgcactcccgcaacgagggcactgccacctacgctgctgccgtcctgttccgcatctccgaggacaagaacccagactaccggaagcgcgtgtccgtggagctcaccaactccctcttcaagcatgacccggctgcctgggaggctgcccagagcatgattcccatcaatgagccctatggagatgacatggatgccacctaccgccccatgtactccagcgatgtgccccttgacccgctggagatgcacatggacatggatggagactaccccatcgacacctacagcgacggcctcaggcccccgtaccccactgcagaccacatgctggcctaggcggcctggccccagtgcggttcctcatctgagaggctctccgtgcaggcgatggggcaagacagaaaagtgcctgagctggggaagccggggtgtaacttcctgctgcaccctgcgcctccagaggtcctccgtagggtctttcttgggatagtgttctgctcctgcttttctgtcctgggcatgggtccagggcctgacaccccctccccgcccctgtggccctggccactaaagcttcagactcaagtacccattctgttttcccccagcaacgcccctccaaacctccagcctccctgtctccagctgcctgggcccggaagggctttggttccttctctgggtctgattttctcactgaactccaccgaccaactgccctaagcccccagggcctccagggcccaggttcgagacccaaacccccaaaatccaaaacttctcttgaaaagttcagggaccgtccaggggagatggggaggagatatggagtgagtcacctgctccagaagatgccagcttctctctccagggtgcttagttggctttgcccacccctcactccccagggagctctggggacagcttcctcacacccctgtcccacccacacagctgccctagctgaccccgagaagtgctcttggctgacccctctggtgtgtggtgaggggctttctcttccccttcctgtttcagacccccccatttcccgcacatggtgtggggggctgggggaggtccaagcagagtgttttattattatcgctttatgtttttggttattggtttttttgtatagaccaaagcaaagaaaataaaaataacacagatgcgttg

SEQ ID NO: 144821 - DNA, 3497 bp, Homo sapiens
  Payload ID: 8621
  Gene Symbol: JUP
  Gene Name: junction plakoglobin
  Uniprot ID: P14923
  ENST ID: ENST00000393931
  CDS Start-End: 120-2357
ggccagagtccggagcagccgccgcccgaccacgccgagctcagttcgctgtccgcgccggctcccaccccggcccgaccccgacccggcccggtcaggccccatactcagtagccacgatggaggtgatgaacctgatggagcagcctatcaaggtgactgagtggcagcagacatacacctacgactcgggtatccactcgggcgccaacacctgcgtgccctccgtcagcagcaagggcatcatggaggaggatgaggcctgcgggcgccagtacacgctcaagaaaaccaccacttacacccagggggtgccccccagccaaggtgatctggagtaccagatgtccacaacagccagggccaaacgggtgcgggaggccatgtgccctggtgtgtcaggcgaggacagctcgcttctgctggccacccaggtggaggggcaggccaccaacctgcagcgactggccgagccgtcccagctgctcaagtcggccattgtgcatctcatcaactaccaggacgatgccgagctggccactcgcgccctgcccgagctcaccaaactgctcaacgacgaggacccggtggtggtgaccaaggcggccatgattgtgaaccagctgtcgaagaaggaggcgtcgcggcgggccctgatgggctcgccccagctggtggccgctgtcgtgcgtaccatgcagaataccagcgacctggacacagcccgctgcaccaccagcatcctgcacaacctctcccaccaccgggaggggctgctcgccatcttcaagtcgggtggcatccctgctctggtccgcatgctcagctcccctgtggagtcggtcctgttctatgccatcaccacgctgcacaacctgctcctgtaccaggagggcgccaagatggccgtgcgcctggccgacgggctgcaaaagatggtgcccctgctcaacaagaacaaccccaagttcctggccatcaccaccgactgcctgcagctcctggcctacggcaaccaggagagcaagctgatcatcctggccaatggtgggccccaggccctcgtgcagatcatgcgtaactacagttatgaaaagctgctctggaccaccagtcgtgtgctcaaggtgctatccgtgtgtcccagcaataagcctgccattgtggaggctggtgggatgcaggccctgggcaagcacctgaccagcaacagcccccgcctggtgcagaactgcctgtggaccctgcgcaacctctcagatgtggccaccaagcaggagggcctggagagtgtgctgaagattctggtgaatcagctgagtgtggatgacgtcaacgtcctcacctgtgccacgggcacactctccaacctgacatgcaacaacagcaagaacaagacgctggtgacacagaacagcggtgtggaggctctcatccatgccatcctgcgtgctggtgacaaggacgacatcacggagcctgccgtctgcgctctgcgccacctcactagccgccaccctgaggccgagatggcccagaactctgtgcgtctcaactatggcatcccagccatcgtgaagctgctcaaccagcccaaccagtggccactggtcaaggcaaccatcggcttgatcaggaatctggccctgtgcccagccaaccatgccccgctgcaggaggcagcggtcatcccccgcctcgtccaactgctggtgaaggcccaccaggatgcccagcgccacgtagctgcaggcacacagcagccctacacggatggtgtgaggatggaggagattgtggagggctgcaccggagcactgcacatcctcgcccgggaccccatgaaccgcatggagatcttccggctcaacaccattcccctgtttgtgcagctcctgtactcgtcggtggagaacatccagcgcgtggctgccggggtgctgtgtgagctggcccaggacaaggaggcggccgacgccattgatgcagagggggcctcggccccactcatggagttgctgcactcccgcaacgagggcactgccacctacgctgctgccgtcctgttccgcatctccgaggacaagaacccagactaccggaagcgcgtgtccgtggagctcaccaactccctcttcaagcatgacccggctgcctgggaggctgcccagagcatgattcccatcaatgagccctatggagatgacatggatgccacctaccgccccatgtactccagcgatgtgccccttgacccgctggagatgcacatggacatggatggagactaccccatcgacacctacagcgacggcctcaggcccccgtaccccactgcagaccacatgctggcctaggcggcctggccccagtacggccccctctttgcaggcttttcctcctctctagaacctccttctgttggaggccctcccatctccccgctgaaacctgcgctccttttttggggggatcctttgctgctgagcttccccaagcacggtgtgccctggcctgccttcttcttgtgtctttggtggggatggggaggcctattcctgctggccccttctgggggtggtgggcaggtgacacggagtggcttgagcttctggggatgcaggtccaccgagcccctgacccctgtctgtccccgctcccctaacaggtgcggttcctcatctgagaggctctccgtgcaggcgatggggcaagacagaaaagtgcctgagctggggaagccggggtgtaacttcctgctgcaccctgcgcctccagaggtcctccgtagggtctttcttgggatagtgttctgctcctgcttttctgtcctgggcatgggtccagggcctgacaccccctccccgcccctgtggccctggccactaaagcttcagactcaagtacccattctgttttcccccagcaacgcccctccaaacctccagcctccctgtctccagctgcctgggcccggaagggctttggttccttctctgggtctgattttctcactgaactccaccgaccaactgccctaagcccccagggcctccagggcccaggttcgagacccaaacccccaaaatccaaaacttctcttgaaaagttcagggaccgtccaggggagatggggaggagatatggagtgagtcacctgctccagaagatgccagcttctctctccagggtgcttagttggctttgcccacccctcactccccagggagctctggggacagcttcctcacacccctgtcccacccacacagctgccctagctgaccccgagaagtgctcttggctgacccctctggtgtgtggtgaggggctttctcttccccttcctgtttcagacccccccatttcccgcacatggtgtggggggctgggggaggtccaagcagagtgttttattattatcgctttatgtttttggttattggtttttttgtatagaccaaagcaaagaaaataaaaataacacagatgcgttg

SEQ ID NO: 144822 - DNA, 1069 bp, Homo sapiens
  Payload ID: 8621
  Gene Symbol: JUP
  Gene Name: junction plakoglobin
  ENST ID: ENST00000449889
  CDS Start-End: 177-1069
tgtgggggccgagcgcacattttcccagcgactctggccccacctgccgagcaggtgagcgcacggagtccagaggccctgccctccagctcccagagcctcgtcgatactacctgcggcgcctccctccacgccggtgggagcccggctctggcttcttcagcggagtagccacgatggaggtgatgaacctgatggagcagcctatcaaggtgactgagtggcagcagacatacacctacgactcgggtatccactcgggcgccaacacctgcgtgccctccgtcagcagcaagggcatcatggaggaggatgaggcctgcgggcgccagtacacgctcaagaaaaccaccacttacacccagggggtgccccccagccaaggtgatctggagtaccagatgtccacaacagccagggccaaacgggtgcgggaggccatgtgccctggtgtgtcaggcgaggacagctcgcttctgctggccacccaggtggaggggcaggccaccaacctgcagcgactggccgagccgtcccagctgctcaagtcggccattgtgcatctcatcaactaccaggacgatgccgagctggccactcgcgccctgcccgagctcaccaaactgctcaacgacgaggacccggtggtggtgaccaaggcggccatgattgtgaaccagctgtcgaagaaggaggcgtcgcggcgggccctgatgggctcgccccagctggtggccgctgtcgtgcgtaccatgcagaataccagcgacctggacacagcccgctgcaccaccagcatcctgcacaacctctcccaccaccgggaggggctgctcgccatcttcaagtcgggtggcatccctgctctggtccgcatgctcagctcccctgtggagtcggtcctgttctatgccatcaccacgctgcacaacctgctcctgtaccaggagggcgccaagatggccgtgcgcctggccgacgggctgcaaaagatggtgcccctgctcaacaagaacaaccccaagttcctggccatcaccaccgactgcctgcagctcctggcctacgg

SEQ ID NO: 144823 - DNA, 1029 bp, Homo sapiens
  Payload ID: 8621
  Gene Symbol: JUP
  Gene Name: junction plakoglobin
  ENST ID: ENST00000437187
  CDS Start-End: 143-1029
ctagagccgactggcagtccccggggccaatggcaagcggataaacagaggcggccgtggaagaggactggaggcgaggctccgcccctccacgggacagtcaggcgagatagccagtgagctcgcaccagaggtagccacgatggaggtgatgaacctgatggagcagcctatcaaggtgactgagtggcagcagacatacacctacgactcgggtatccactcgggcgccaacacctgcgtgccctccgtcagcagcaagggcatcatggaggaggatgaggcctgcgggcgccagtacacgctcaagaaaaccaccacttacacccagggggtgccccccagccaaggtgatctggagtaccagatgtccacaacagccagggccaaacgggtgcgggaggccatgtgccctggtgtgtcaggcgaggacagctcgcttctgctggccacccaggtggaggggcaggccaccaacctgcagcgactggccgagccgtcccagctgctcaagtcggccattgtgcatctcatcaactaccaggacgatgccgagctggccactcgcgccctgcccgagctcaccaaactgctcaacgacgaggacccggtggtggtgaccaaggcggccatgattgtgaaccagctgtcgaagaaggaggcgtcgcggcgggccctgatgggctcgccccagctggtggccgctgtcgtgcgtaccatgcagaataccagcgacctggacacagcccgctgcaccaccagcatcctgcacaacctctcccaccaccgggaggggctgctcgccatcttcaagtcgggtggcatccctgctctggtccgcatgctcagctcccctgtggagtcggtcctgttctatgccatcaccacgctgcacaacctgctcctgtaccaggagggcgccaagatggccgtgcgcctggccgacgggctgcaaaagatggtgcccctgctcaacaagaacaaccccaagttcctggccatcaccaccgactgcctgcagctcctggc

SEQ ID NO: 144824 - DNA, 949 bp, Homo sapiens
  Payload ID: 8621
  Gene Symbol: JUP
  Gene Name: junction plakoglobin
  ENST ID: ENST00000424457
  CDS Start-End: 243-949
tgagttgctgccttggccagagtccggagcagccgccgcccgaccacgccgagctcagttcgctgtccgcgccggctcccaccccggcccgaccccgacccggcccggtcaggccccatactcagcctctgacctctgcaggtcagttcccaggacagtggagccaaacacagaccaagcgggaagttcacctccctggtacaaagttcggccctgctactcattaaccttcagtagccacgatggaggtgatgaacctgatggagcagcctatcaaggtgactgagtggcagcagacatacacctacgactcgggtatccactcgggcgccaacacctgcgtgccctccgtcagcagcaagggcatcatggaggaggatgaggcctgcgggcgccagtacacgctcaagaaaaccaccacttacacccagggggtgccccccagccaaggtgatctggagtaccagatgtccacaacagccagggccaaacgggtgcgggaggccatgtgccctggtgtgtcaggcgaggacagctcgcttctgctggccacccaggtggaggggcaggccaccaacctgcagcgactggccgagccgtcccagctgctcaagtcggccattgtgcatctcatcaactaccaggacgatgccgagctggccactcgcgccctgcccgagctcaccaaactgctcaacgacgaggacccggtggtggtgaccaaggcggccatgattgtgaaccagctgtcgaagaaggaggcgtcgcggcgggccctgatgggctcgccccagctggtggccgctgtcgtgcgtaccatgcagaataccagcgacctggacacagcccgctgcaccaccagcatcctgcacaacctctcccaccaccgggaggggctgctcgccatcttcaagtcgggtggcatccctgctctggtccgcatgctcag

SEQ ID NO: 144825 - DNA, 586 bp, Homo sapiens
  Payload ID: 8621
  Gene Symbol: JUP
  Gene Name: junction plakoglobin
  ENST ID: ENST00000437369
  CDS Start-End: 327-586
catgctttctggaggcctgcacagacctttcccacccgctttcctgaaagaatttgacagggaaagtgagaccgcaggaaggctttttgggggaaggtttcttcaatgctagactctctcaggcagagctgcatcgggccccctgccttccctgctcccaatttcctgagaccgcccccccccacccagaattggggatcttgatcaggcctctgacctctgcaggtcagttcccaggacagtggagccaaacacagaccaagcgggaagttcacctccctggtacaaagttcggccctgctactcattaaccttcagtagccacgatggaggtgatgaacctgatggagcagcctatcaaggtgactgagtggcagcagacatacacctacgactcgggtatccactcgggcgccaacacctgcgtgccctccgtcagcagcaagggcatcatggaggaggatgaggcctgcgggcgccagtacacgctcaagaaaaccaccacttacacccagggggtgccccccagccaaggtgatctggagtaccagatgtccacaacagccagggccaaacgggtgcggga

SEQ ID NO: 144826 - DNA, 915 bp, Homo sapiens
  Payload ID: 8621
  Gene Symbol: JUP
  Gene Name: junction plakoglobin
  ENST ID: ENST00000420370
  CDS Start-End: 86-915
cccaggggacctcagaagctgctagaagccctgagtgccttctcttgcccctgggagagttgggtcagggcagcaagtagccacgatggaggtgatgaacctgatggagcagcctatcaaggtgactgagtggcagcagacatacacctacgactcgggtatccactcgggcgccaacacctgcgtgccctccgtcagcagcaagggcatcatggaggaggatgaggcctgcgggcgccagtacacgctcaagaaaaccaccacttacacccagggggtgccccccagccaaggtgatctggagtaccagatgtccacaacagccagggccaaacgggtgcgggaggccatgtgccctggtgtgtcaggcgaggacagctcgcttctgctggccacccaggtggaggggcaggccaccaacctgcagcgactggccgagccgtcccagctgctcaagtcggccattgtgcatctcatcaactaccaggacgatgccgagctggccactcgcgccctgcccgagctcaccaaactgctcaacgacgaggacccggtggtggtgaccaaggcggccatgattgtgaaccagctgtcgaagaaggaggcgtcgcggcgggccctgatgggctcgccccagctggtggccgctgtcgtgcgtaccatgcagaataccagcgacctggacacagcccgctgcaccaccagcatcctgcacaacctctcccaccaccgggaggggctgctcgccatcttcaagtcgggtggcatccctgctctggtccgcatgctcagctcccctgtggagtcggtcctgttctatgccatcaccacgctgcacaacctgctcctgtaccaggagggcgccaagatggccgtgcgcctggccgacgggctgcaaaagatggtgcccctgct

SEQ ID NO: 144827 - DNA, 432 bp, Homo sapiens
  Payload ID: 8621
  Gene Symbol: JUP
  Gene Name: junction plakoglobin
  ENST ID: ENST00000465293
  CDS Start-End: 425-432
ttaccgtttggggaacttgctgccgctggtctctttggggccaccctcaccccaccccacgcgtcatcctcgctttccctccctccctactcccccaggcctgggtggggccctattgtttgcgcccagcttgcccaactgtgggggccgagcgcacattttcccagcgactctggccccacctgccgagcaggtgagcgcacggagtccagaggccctgccctccagctcccagagcctcgtcgatactacctgcggcgcctccctccacgccggtgggagcccggctctggcttcttcagcggagcctctgacctctgcaggtcagttcccaggacagtggagccaaacacagaccaagcgggaagttcacctccctggtacaaagttcggccctgctactcattaaccttcagtagccacgatggaggt

SEQ ID NO: 144828 - DNA, 583 bp, Homo sapiens
  Payload ID: 8621
  Gene Symbol: JUP
  Gene Name: junction plakoglobin
  ENST ID: ENST00000591690
  CDS Start-End: 272-583
gtggcgaggggcgtggcttggctgtcaggtctcttcgccttttgttcggttactgagttgctgccttggccagagtccggagcagccgccgcccgaccacgccgagctcagttcgctgtccgcgccggctcccaccccggcccgaccccgacccggcccggtcaggccccatactcaggtgcgggctatcgggggcgcaggtatcgttggggacagaggggtggcgagcggccgcggggccggtcccagccgtccctgggcagtagccacgatggaggtgatgaacctgatggagcagcctatcaaggtgactgagtggcagcagacatacacctacgactcgggtatccactcgggcgccaacacctgcgtgccctccgtcagcagcaagggcatcatggaggaggatgaggcctgcgggcgccagtacacgctcaagaaaaccaccacttacacccagggggtgccccccagccaaggtgatctggagtaccagatgtccacaacagccagggccaaacgggtgcgggaggccatgtgccctggtgtgtcaggcgaggacagctcgcttctgctggccacc

SEQ ID NO: 144829 - DNA, 4209 bp, Homo sapiens
  Payload ID: 8622
  Gene Symbol: JAM2
  Gene Name: junctional adhesion molecule 2
  Uniprot ID: P57087
  ENST ID: ENST00000312957
  CDS Start-End: 541-1329
gggaagaaaggagttggggcaaaacaggaggcgtttccctacccgcatacatccccgtccccgagacacccaatccccccacccccagcctgcccgcgcctcccgcccccagctcctcgccctggggacagctggcagccccgcgcggaccagacacaaagccgatcaatcccggaggcgtgggggcggagggacgacccgccggggctttcccgggcgctgctctcctcctgctgccccctcgctaggacccggcggacgcctcgtctggttttcacgccctctagcccctacccccacacccccaaaacagaacagacccccatccctgggctggaggacccgcctcttggcagccagctgagaaggcgccccggggagggggaaactgacatcccatctagagccgtccctcctcttcctcccctcccgactctctgctcctttcccgccccagaagttcaagggcccccggcctcctgcgctcctgccgccgggaccctcgacctcctcagagcagccggctgccgccccgggaagatggcgaggaggagccgccaccgcctcctcctgctgctgctgcgctacctggtggtcgccctgggctatcataaggcctatgggttttctgccccaaaagaccaacaagtagtcacagcagtagagtaccaaggtgattttaaaaatcgagctgagatgatagatttcaatatccggatcaaaaatgtgacaagaagtgatgcggggaaatatcgttgtgaagttagtgccccatctgagcaaggccaaaacctggaagaggatacagtcactctggaagtattagtggctccagcagttccatcatgtgaagtaccctcttctgctctgagtggaactgtggtagagctacgatgtcaagacaaagaagggaatccagctcctgaatacacatggtttaaggatggcatccgtttgctagaaaatcccagacttggctcccaaagcaccaacagctcatacacaatgaatacaaaaactggaactctgcaatttaatactgtttccaaactggacactggagaatattcctgtgaagcccgcaattctgttggatatcgcaggtgtcctgggaaacgaatgcaagtagatgatctcaacataagtggcatcatagcagccgtagtagttgtggccttagtgatttccgtttgtggccttggtgtatgctatgctcagaggaaaggctacttttcaaaagaaacctccttccagaagagtaattcttcatctaaagccacgacaatgagtgaaaatgatttcaagcacacaaaatcctttataatttaaagactccactttagagatacaccaaagccaccgttgttacacaagttattaaactattataaaactctgctttgtccgacatttgcaaagaggtacacgaggaaatggaattggtatttcattttaattttcatgactactaactcacctgaacttgctattttaaacaaatagttctgtcgacacctaaaatataatctggcttcttgtgtctggactaagttaaaagaattaaaatactttgtaatgtcctgggctttgggaaatgttaaccacgtcctaacttctagagaacgttactaaaatataacatactgattgtgaagtcaatccacaggtcatgaaaatataaatcagactctgcacgagagtctgatttagggggtccaacaaatactctgacagatgcaaaaggaacctctggtctcatttctgccagaatcctcttttctcccctaatatcatccttattctgatgctcgttcatcactaacacacccacagaaaggaggaagcgggatgggtcttatgcccaaggatttgcactttgtgtttacttccattcctgggaactaaaagcaacatcaaaagaaatgcctaatggctggagcccacaggtgtgcaccacaggatttgcctggtgtgtgtcactgatttcttcattaaacgtaatttagatggtcaaacacaaacccaagtggcttatttcacccctactgctgcttgccactgcttccttcttgtaagatttctttgaagaggatcagtgactttgacatcagaactcaccactggagcctacacaagtttgcagatacctttccctgcaggagtggtgacttcacatctttctgtctctaaaaattgtgcagtgacattccgggccaagtcccttagtcaggggttgacaattctgcttttggacaaggagggatgtggagggaagaagtaatagtctaccaggaaaatgagacgaaaaagctcagtatgactccctgcatctggtacccctcttgaaacacagtgggcacatgagcaatggctcaaacgaaaagtggatctaatgtgggtttctcaaccgatgaaccacaaaagcttccagctactattacaatgtgaaaattccaatgatccgtttaccagagcaattagactatgttaaaaattcatatcatttgtaacttcttttaattactgaattgatattaaaaacaaaatatggctagggcatgtcctattcttctgggcaaatgtggatgaaaaggtcacttgctacctttgacaactatgaacatgatggttaatcttctttctttttttttttttttttttgagacggagtctcactctgtcgcccaggctggagtacagtggcacaatcttggctcactgcaacctccgcctcccctccgcctcccagattcaagcacttctcctgcctcagcctcccaagtagctgagattataggcgtgtaccaccacacctggctaatttttgtattttagtagagaagggtttcaccatgttggccaggctggtctcaaacctctgacctcaaatgatccacccccatcagcctcccaaagtgctgggattataggcatgagccactgcactgggcaggttaatcttctttcaaaagagtctgctctttctacccaattggcgaagcaaatccccaggattcaccgaacaaatggattaagcacccactgagtgcctagcatgtgcctggacaccaggccaccgggaagatgctccccctttgacttgtctatgacatgctatgtctctcaccagatcccttcctggaggtcgggcttctgtaacatggctctgcccccaaaataaaattttcaccacgagtcagggatcggcaaacattttctgtaaagagccagaaagtagatattttaagtcataaggtccctgttaacaactacttgactctgccattgtagcacaaaggcagccacagacaaaacaagcaagtagtcatgtctgtgttccaataagactttatttacaaaaacagcaggcacagacaagatttggcccacaggcatagattcccaactcatggtggtgaagtacagaaaaaaacacctgtctacaagcttttgtaagaaatcaggctaaatgttacctatgttttggttggaagatttctttggtttgaggaatgctttcctcttgcattggcatgccaagaggatagatgactctgaaagacgcctcttcagacatacctgtcatcacacaagatcaacttcttcagtttaaatgacacaaatccatattgtggaaggaaaatatgtagtgccttagcttcactaatagttgtaaaacttctttttaagacatcaaaggctagaggattcattttatgcagtgcgaacatctaataacactctctgtgtcaaatatatattgtacattaccttaaactattgtaatagctaggtaaaaatccttgtataaaagaatgttttcccccacacaaagggcagagtattgagcactaatttcctattaaaagtatatatatgtatctgtgggtcactggtgtccagacttgtatttgcatttgtgtttacttgaggaacttgaacactaacaactggtaaaatcccattgtaattcttacagcattttgactttattttcctgcagtgaattgtgttgtgtaaagattagggctttaaaatcttattagcaagctttgttttgttttaattattgttgctgttgtaactagatttaatttatttttagttggaggtttgacctaagtctggaccaattgattgcttttcaatacaactttgcaaagaacttcctttttccacaggtggctttgttcgattaaagtctacact

SEQ ID NO: 144830 - DNA, 1757 bp, Homo sapiens
  Payload ID: 8622
  Gene Symbol: JAM2
  Gene Name: junctional adhesion molecule 2
  Uniprot ID: P57087
  ENST ID: ENST00000400532
  CDS Start-End: 551-1489
agccaacgaggggaagaaaggagttggggcaaaacaggaggcgtttccctacccgcatacatccccgtccccgagacacccaatccccccacccccagcctgcccgcgcctcccgcccccagctcctcgccctggggacagctggcagccccgcgcggaccagacacaaagccgatcaatcccggaggcgtgggggcggagggacgacccgccggggctttcccgggcgctgctctcctcctgctgccccctcgctaggacccggcggacgcctcgtctggttttcacgccctctagcccctacccccacacccccaaaacagaacagacccccatccctgggctggaggacccgcctcttggcagccagctgagaaggcgccccggggagggggaaactgacatcccatctagagccgtccctcctcttcctcccctcccgactctctgctcctttcccgccccagaagttcaagggcccccggcctcctgcgctcctgccgccgggaccctcgacctcctcagagcagccggctgccgccccgggaagatggcgaggaggagccgccaccgcctcctcctgctgctgctgcgctacctggtggtcgccctgggctatcataaggcctatgggttttctgccccaaaagaccaacaagtagtcacagcagtagagtaccaagaggctattttagcctgcaaaaccccaaagaagactgtttcctccagattagagtggaagaaactgggtcggagtgtctcctttgtctactatcaacagactcttcaaggtgattttaaaaatcgagctgagatgatagatttcaatatccggatcaaaaatgtgacaagaagtgatgcggggaaatatcgttgtgaagttagtgccccatctgagcaaggccaaaacctggaagaggatacagtcactctggaagtattagtggctccagcagttccatcatgtgaagtaccctcttctgctctgagtggaactgtggtagagctacgatgtcaagacaaagaagggaatccagctcctgaatacacatggtttaaggatggcatccgtttgctagaaaatcccagacttggctcccaaagcaccaacagctcatacacaatgaatacaaaaactggaactctgcaatttaatactgtttccaaactggacactggagaatattcctgtgaagcccgcaattctgttggatatcgcaggtgtcctgggaaacgaatgcaagtagatgatctcaacataagtggcatcatagcagccgtagtagttgtggccttagtgatttccgtttgtggccttggtgtatgctatgctcagaggaaaggctacttttcaaaagaaacctccttccagaagagtaattcttcatctaaagccacgacaatgagtgaaaatgtgcagtggctcacgcctgtaatcccagcactttggaaggccgcggcgggcggatcacgaggtcaggagttctagaccagtctggccaatatggtgaaaccccatctctactaaaatacaaaaattagctgggcatggtggcatgtgcctgcagttccagctgcttgggagacaggagaatcacttgaacccgggaggcggaggttgcagtgagctgagatcacgccactgcagtccagcctgggtaacagagcaagattccatctcaaaaaataaaataaataaataaataaatactggtttttacctgtagaattcttacaataaatatagcttgatattc

SEQ ID NO: 144831 - DNA, 4337 bp, Homo sapiens
  Payload ID: 8622
  Gene Symbol: JAM2
  Gene Name: junctional adhesion molecule 2
  Uniprot ID: P57087
  ENST ID: ENST00000480456
  CDS Start-End: 551-1447
agccaacgaggggaagaaaggagttggggcaaaacaggaggcgtttccctacccgcatacatccccgtccccgagacacccaatccccccacccccagcctgcccgcgcctcccgcccccagctcctcgccctggggacagctggcagccccgcgcggaccagacacaaagccgatcaatcccggaggcgtgggggcggagggacgacccgccggggctttcccgggcgctgctctcctcctgctgccccctcgctaggacccggcggacgcctcgtctggttttcacgccctctagcccctacccccacacccccaaaacagaacagacccccatccctgggctggaggacccgcctcttggcagccagctgagaaggcgccccggggagggggaaactgacatcccatctagagccgtccctcctcttcctcccctcccgactctctgctcctttcccgccccagaagttcaagggcccccggcctcctgcgctcctgccgccgggaccctcgacctcctcagagcagccggctgccgccccgggaagatggcgaggaggagccgccaccgcctcctcctgctgctgctgcgctacctggtggtcgccctgggctatcataaggcctatgggttttctgccccaaaagaccaacaagtagtcacagcagtagagtaccaagaggctattttagcctgcaaaaccccaaagaagactgtttcctccagattagagtggaagaaactgggtcggagtgtctcctttgtctactatcaacagactcttcaaggtgattttaaaaatcgagctgagatgatagatttcaatatccggatcaaaaatgtgacaagaagtgatgcggggaaatatcgttgtgaagttagtgccccatctgagcaaggccaaaacctggaagaggatacagtcactctggaagtattagtggctccagcagttccatcatgtgaagtaccctcttctgctctgagtggaactgtggtagagctacgatgtcaagacaaagaagggaatccagctcctgaatacacatggtttaaggatggcatccgtttgctagaaaatcccagacttggctcccaaagcaccaacagctcatacacaatgaatacaaaaactggaactctgcaatttaatactgtttccaaactggacactggagaatattcctgtgaagcccgcaattctgttggatatcgcaggtgtcctgggaaacgaatgcaagtagatgatctcaacataagtggcatcatagcagccgtagtagttgtggccttagtgatttccgtttgtggccttggtgtatgctatgctcagaggaaaggctacttttcaaaagaaacctccttccagaagagtaattcttcatctaaagccacgacaatgagtgaaaatgatttcaagcacacaaaatcctttataatttaaagactccactttagagatacaccaaagccaccgttgttacacaagttattaaactattataaaactctgctttgtccgacatttgcaaagaggtacacgaggaaatggaattggtatttcattttaattttcatgactactaactcacctgaacttgctattttaaacaaatagttctgtcgacacctaaaatataatctggcttcttgtgtctggactaagttaaaagaattaaaatactttgtaatgtcctgggctttgggaaatgttaaccacgtcctaacttctagagaacgttactaaaatataacatactgattgtgaagtcaatccacaggtcatgaaaatataaatcagactctgcacgagagtctgatttagggggtccaacaaatactctgacagatgcaaaaggaacctctggtctcatttctgccagaatcctcttttctcccctaatatcatccttattctgatgctcgttcatcactaacacacccacagaaaggaggaagcgggatgggtcttatgcccaaggatttgcactttgtgtttacttccattcctgggaactaaaagcaacatcaaaagaaatgcctaatggctggagcccacaggtgtgcaccacaggatttgcctggtgtgtgtcactgatttcttcattaaacgtaatttagatggtcaaacacaaacccaagtggcttatttcacccctactgctgcttgccactgcttccttcttgtaagatttctttgaagaggatcagtgactttgacatcagaactcaccactggagcctacacaagtttgcagatacctttccctgcaggagtggtgacttcacatctttctgtctctaaaaattgtgcagtgacattccgggccaagtcccttagtcaggggttgacaattctgcttttggacaaggagggatgtggagggaagaagtaatagtctaccaggaaaatgagacgaaaaagctcagtatgactccctgcatctggtacccctcttgaaacacagtgggcacatgagcaatggctcaaacgaaaagtggatctaatgtgggtttctcaaccgatgaaccacaaaagcttccagctactattacaatgtgaaaattccaatgatccgtttaccagagcaattagactatgttaaaaattcatatcatttgtaacttcttttaattactgaattgatattaaaaacaaaatatggctagggcatgtcctattcttctgggcaaatgtggatgaaaaggtcacttgctacctttgacaactatgaacatgatggttaatcttctttctttttttttttttttttttgagacggagtctcactctgtcgcccaggctggagtacagtggcacaatcttggctcactgcaacctccgcctcccctccgcctcccagattcaagcacttctcctgcctcagcctcccaagtagctgagattataggcgtgtaccaccacacctggctaatttttgtattttagtagagaagggtttcaccatgttggccaggctggtctcaaacctctgacctcaaatgatccacccccatcagcctcccaaagtgctgggattataggcatgagccactgcactgggcaggttaatcttctttcaaaagagtctgctctttctacccaattggcgaagcaaatccccaggattcaccgaacaaatggattaagcacccactgagtgcctagcatgtgcctggacaccaggccaccgggaagatgctccccctttgacttgtctatgacatgctatgtctctcaccagatcccttcctggaggtcgggcttctgtaacatggctctgcccccaaaataaaattttcaccacgagtcagggatcggcaaacattttctgtaaagagccagaaagtagatattttaagtcataaggtccctgttaacaactacttgactctgccattgtagcacaaaggcagccacagacaaaacaagcaagtagtcatgtctgtgttccaataagactttatttacaaaaacagcaggcacagacaagatttggcccacaggcatagattcccaactcatggtggtgaagtacagaaaaaaacacctgtctacaagcttttgtaagaaatcaggctaaatgttacctatgttttggttggaagatttctttggtttgaggaatgctttcctcttgcattggcatgccaagaggatagatgactctgaaagacgcctcttcagacatacctgtcatcacacaagatcaacttcttcagtttaaatgacacaaatccatattgtggaaggaaaatatgtagtgccttagcttcactaatagttgtaaaacttctttttaagacatcaaaggctagaggattcattttatgcagtgcgaacatctaataacactctctgtgtcaaatatatattgtacattaccttaaactattgtaatagctaggtaaaaatccttgtataaaagaatgttttcccccacacaaagggcagagtattgagcactaatttcctattaaaagtatatatatgtatctgtgggtcactggtgtccagacttgtatttgcatttgtgtttacttgaggaacttgaacactaacaactggtaaaatcccattgtaattcttacagcattttgactttattttcctgcagtgaattgtgttgtgtaaagattagggctttaaaatcttattagcaagctttgttttgttttaattattgttgctgttgtaactagatttaatttatttttagttggaggtttgacctaagtctggaccaattgattgcttttcaatacaactttgcaaagaacttcctttttccacaggtggctttgttcgattaaagtctacactaataaaaata

SEQ ID NO: 144832 - DNA, 1025 bp, Homo sapiens
  Payload ID: 8622
  Gene Symbol: JAM2
  Gene Name: junctional adhesion molecule 2
  ENST ID: ENST00000460679
  CDS Start-End: 1-785
aggctattttagcctgcaaaaccccaaagaagactgtttcctccagattagagtggaagaaactgggtcggagtgtctcctttgtctactatcaacagactcttcaaggtgattttaaaaatcgagctgagatgatagatttcaatatccggatcaaaaatgtgacaagaagtgatgcggggaaatatcgttgtgaagttagtgccccatctgagcaaggccaaaacctggaagaggatacagtcactctggaagtattagtggctccagcagttccatcatgtgaagtaccctcttctgctctgagtggaactgtggtagagctacgatgtcaagacaaagaagggaatccagctcctgaatacacatggtttaaggatggcatccgtttgctagaaaatcccagacttggctcccaaagcaccaacagctcatacacaatgaatacaaaaactggaactctgcaatttaatactgtttccaaactggacactggagaatattcctgtgaagcccgcaattctgttggatatcgcaggtgtcctgggaaacgaatgcaagtagatgatctcaacataagtggcatcatagcagccgtagtagttgtggccttagtgatttccgtttgtggccttggtgtatgctatgctcagaggaaaggctacttttcaaaagaaacctccttccaatctggcagacctaactttggctctatgggcgtagagagaagatggatgacaaactatctgaggctatggcagctgggagtggagaagatatactgaagccatggcttcagacagtttgtcatctcctaattcctttgaagaatcatctgccattgacttcctgttcccagatttctggctcaatcctggtctctcagtctcgaagagtaattcttcatctaaagccacgacaatgagtgaaaatgatttcaagcacacaaaatcctttataatttaaagactccactttagagatacaccaaagccaccgttgttacacaagttattaaactatta

SEQ ID NO: 144833 - DNA, 3912 bp, Homo sapiens
  Payload ID: 8623
  Gene Symbol: JAM3
  Gene Name: junctional adhesion molecule 3
  Uniprot ID: Q9BX67
  ENST ID: ENST00000299106
  CDS Start-End: 160-1092
tagacctcagcttcctctgtcaccatggtgccggctcggctgggcccggcggtcgccatggtaactggggcgggtcgcagggtcctggcaggctgggcgcatgcgcgcggggactacaagccgcgccgcgctgccgctggcccctcagcaaccctcgacatggcgctgaggcggccaccgcgactccggctctgcgctcggctgcctgacttcttcctgctgctgcttttcaggggctgcctgataggggctgtaaatctcaaatccagcaatcgaaccccagtggtacaggaatttgaaagtgtggaactgtcttgcatcattacggattcgcagacaagtgaccccaggatcgagtggaagaaaattcaagatgaacaaaccacatatgtgttttttgacaacaaaattcagggagacttggcgggtcgtgcagaaatactggggaagacatccctgaagatctggaatgtgacacggagagactcagccctttatcgctgtgaggtcgttgctcgaaatgaccgcaaggaaattgatgagattgtgatcgagttaactgtgcaagtgaagccagtgacccctgtctgtagagtgccgaaggctgtaccagtaggcaagatggcaacactgcactgccaggagagtgagggccacccccggcctcactacagctggtatcgcaatgatgtaccactgcccacggattccagagccaatcccagatttcgcaattcttctttccacttaaactctgaaacaggcactttggtgttcactgctgttcacaaggacgactctgggcagtactactgcattgcttccaatgacgcaggctcagccaggtgtgaggagcaggagatggaagtctatgacctgaacattggcggaattattgggggggttctggttgtccttgctgtactggccctgatcacgttgggcatctgctgtgcatacagacgtggctacttcatcaacaataaacaggatggagaaagttacaagaacccagggaaaccagatggagttaactacatccgcactgacgaggagggcgacttcagacacaagtcatcgtttgtgatctgagacccgcggtgtggctgagagcgcacagagcgcacgtgcacatacctctgctagaaactcctgtcaaggcagcgagagctgatgcactcggacagagctagacactcattcagaagcttttcgttttggccaaagttgaccactactcttcttactctaacaagccacatgaatagaagaattttcctcaagatggacccggtaaatataaccacaaggaagcgaaactgggtgcgttcactgagttgggttcctaatctgtttctggcctgattcccgcatgagtattagggtgatcttaaagagtttgctcacgtaaacgcccgtgctgggccctgtgaagccagcatgttcaccactggtcgttcagcagccacgacagcaccatgtgagatggcgaggtggctggacagcaccagcagcgcatcccggcgggaacccagaaaaggcttcttacacagcagccttacttcatcggcccacagacaccaccgcagtttcttcttaaaggctctgctgatcggtgttgcagtgtccattgtggagaagctttttggatcagcattttgtaaaaacaaccaaaatcaggaaggtaaattggttgctggaagagggatcttgcctgaggaaccctgcttgtccaacagggtgtcaggatttaaggaaaaccttcgtcttaggctaagtctgaaatggtactgaaatatgcttttctatgggtcttgtttattttataaaattttacatctaaatttttgctaaggatgtattttgattattgaaaagaaaatttctatttaaactgtaaatatattgtcatacaatgttaaataacctatttttttaaaaaagttcaacttaaggtagaagttccaagctactagtgttaaattggaaaatatcaataattaagagtattttacccaaggaatcctctcatggaagtttactgtgatgttccttttctcacacaagttttagcctttttcacaagggaactcatactgtctacacatcagaccatagttgcttaggaaacctttaaaaattccagttaagcaatgttgaaatcagtttgcatctcttcaaaagaaacctctcaggttagctttgaactgcctcttcctgagatgactaggacagtctgtacccagaggccacccagaagccctcagatgtacatacacagatgccagtcagctcctggggttgcgccaggcgcccccgctctagctcactgttgcctcgctgtctgccaggaggccctgccatccttgggccctggcagtggctgtgtcccagtgagctttactcacgtggcccttgcttcatccagcacagctctcaggtgggcactgcagggacactggtgtcttccatgtagcgtcccagctttgggctcctgtaacagacctctttttggttatggatggctcacaaaatagggcccccaatgctattttttttttttaagtttgtttaattatttgttaagattgtctaaggccaaaggcaattgcgaaatcaagtctgtcaagtacaataacatttttaaaagaaaatggatcccactgttcctctttgccacagagaaagcacccagacgccacaggctctgtcgcatttcaaaacaaaccatgatggagtggcggccagtccagccttttaaagaacgtcaggtggagcagccaggtgaaaggcctggcggggaggaaagtgaaacgcctgaatcaaaagcagttttctaattttgactttaaatttttcatccgccggagacactgctcccatttgtggggggacattagcaacatcactcagaagcctgtgttcttcaagagcaggtgttctcagcctcacatgccctgccgtgctggactcaggactgaagtgctgtaaagcaaggagctgctgagaaggagcactccactgtgtgcctggagaatggctctcactactcaccttgtctttcagcttccagtgtcttgggttttttatactttgacagcttttttttaattgcatacatgagactgtgttgactttttttagttatgtgaaacactttgccgcaggccgcctggcagaggcaggaaatgctccagcagtggctcagtgctccctggtgtctgctgcatggcatcctggatgcttagcatgcaagttccctccatcattgccaccttggtagagagggatggctccccaccctcagcgttggggattcacgctccagcctccttcttggttgtcatagtgatagggtagccttattgccccctcttcttataccctaaaaccttctacactagtgccatgggaaccaggtctgaaaaagtagagagaagtgaaagtagagtctgggaagtagctgcctataactgagactagacggaaaaggaatactcgtgtattttaagatatgaatgtgactcaagactcgaggccgatacgaggctgtgattctgcctttggatggatgttgctgtacacagatgctacagacttgtactaacacaccgtaatttggcatttgtttaacctcatttataaaagcttcaaaaaaacccaaacattgcttcattctttgttatttgctcttacgttgggtttgtctcttcttcctagcatttcagtggttaggcatgcacactaaaaatgctatcaatcacccatccaccagggaagtcagtgctgggcaggaggtcagcctgtgtgctcaagagcagtgctgcgcctctccgccaccgagcccacctgtgttgcggttcccacttgggatggcagtgggcagatctcagtggcatcccatcccccaaa

SEQ ID NO: 144834 - DNA, 3363 bp, Homo sapiens
  Payload ID: 8623
  Gene Symbol: JAM3
  Gene Name: junctional adhesion molecule 3
  Uniprot ID: Q9BX67
  ENST ID: ENST00000441717
  CDS Start-End: 14-793
agcaaccctcgacatggcgctgaggcggccaccgcgactccggctctgcgctcggctgcctgacttcttcctgctgctgcttttcaggggctgcctgataggggctgtaaatctcaaatccagcaatcgaaccccagtggtacaggaatttgaaagtgtggaactgtcttgcatcattacggattcgcagacaagtgaccccaggatcgagtggaagaaaattcaagatgaacaaaccacatatgtgttttttgacaacaaaattcaggtgaagccagtgacccctgtctgtagagtgccgaaggctgtaccagtaggcaagatggcaacactgcactgccaggagagtgagggccacccccggcctcactacagctggtatcgcaatgatgtaccactgcccacggattccagagccaatcccagatttcgcaattcttctttccacttaaactctgaaacaggcactttggtgttcactgctgttcacaaggacgactctgggcagtactactgcattgcttccaatgacgcaggctcagccaggtgtgaggagcaggagatggaagtctatgacctgaacattggcggaattattgggggggttctggttgtccttgctgtactggccctgatcacgttgggcatctgctgtgcatacagacgtggctacttcatcaacaataaacaggatggagaaagttacaagaacccagggaaaccagatggagttaactacatccgcactgacgaggagggcgacttcagacacaagtcatcgtttgtgatctgagacccgcggtgtggctgagagcgcacagagcgcacgtgcacatacctctgctagaaactcctgtcaaggcagcgagagctgatgcactcggacagagctagacactcattcagaagcttttcgttttggccaaagttgaccactactcttcttactctaacaagccacatgaatagaagaattttcctcaagatggacccggtaaatataaccacaaggaagcgaaactgggtgcgttcactgagttgggttcctaatctgtttctggcctgattcccgcatgagtattagggtgatcttaaagagtttgctcacgtaaacgcccgtgctgggccctgtgaagccagcatgttcaccactggtcgttcagcagccacgacagcaccatgtgagatggcgaggtggctggacagcaccagcagcgcatcccggcgggaacccagaaaaggcttcttacacagcagccttacttcatcggcccacagacaccaccgcagtttcttcttaaaggctctgctgatcggtgttgcagtgtccattgtggagaagctttttggatcagcattttgtaaaaacaaccaaaatcaggaaggtaaattggttgctggaagagggatcttgcctgaggaaccctgcttgtccaacagggtgtcaggatttaaggaaaaccttcgtcttaggctaagtctgaaatggtactgaaatatgcttttctatgggtcttgtttattttataaaattttacatctaaatttttgctaaggatgtattttgattattgaaaagaaaatttctatttaaactgtaaatatattgtcatacaatgttaaataacctatttttttaaaaaagttcaacttaaggtagaagttccaagctactagtgttaaattggaaaatatcaataattaagagtattttacccaaggaatcctctcatggaagtttactgtgatgttccttttctcacacaagttttagcctttttcacaagggaactcatactgtctacacatcagaccatagttgcttaggaaacctttaaaaattccagttaagcaatgttgaaatcagtttgcatctcttcaaaagaaacctctcaggttagctttgaactgcctcttcctgagatgactaggacagtctgtacccagaggccacccagaagccctcagatgtacatacacagatgccagtcagctcctggggttgcgccaggcgcccccgctctagctcactgttgcctcgctgtctgccaggaggccctgccatccttgggccctggcagtggctgtgtcccagtgagctttactcacgtggcccttgcttcatccagcacagctctcaggtgggcactgcagggacactggtgtcttccatgtagcgtcccagctttgggctcctgtaacagacctctttttggttatggatggctcacaaaatagggcccccaatgctattttttttttttaagtttgtttaattatttgttaagattgtctaaggccaaaggcaattgcgaaatcaagtctgtcaagtacaataacatttttaaaagaaaatggatcccactgttcctctttgccacagagaaagcacccagacgccacaggctctgtcgcatttcaaaacaaaccatgatggagtggcggccagtccagccttttaaagaacgtcaggtggagcagccaggtgaaaggcctggcggggaggaaagtgaaacgcctgaatcaaaagcagttttctaattttgactttaaatttttcatccgccggagacactgctcccatttgtggggggacattagcaacatcactcagaagcctgtgttcttcaagagcaggtgttctcagcctcacatgccctgccgtgctggactcaggactgaagtgctgtaaagcaaggagctgctgagaaggagcactccactgtgtgcctggagaatggctctcactactcaccttgtctttcagcttccagtgtcttgggttttttatactttgacagcttttttttaattgcatacatgagactgtgttgactttttttagttatgtgaaacactttgccgcaggccgcctggcagaggcaggaaatgctccagcagtggctcagtgctccctggtgtctgctgcatggcatcctggatgcttagcatgcaagttccctccatcattgccaccttggtagagagggatggctccccaccctcagcgttggggattcacgctccagcctccttcttggttgtcatagtgatagggtagccttattgccccctcttcttataccctaaaaccttctacactagtgccatgggaaccaggtctgaaaaagtagagagaagtgaaagtagagtctgggaagtagctgcctataactgagactagacggaaaaggaatactcgtgtattttaagatatgaatgtgactcaagactcgaggccgatacgaggctgtgattctgcctttggatggatgttgctgtacacagatgctacagacttgtactaacacaccgtaatttggcatttgtttaacctcatttataaaagcttcaaaaaaaccc

SEQ ID NO: 144835 - DNA, 564 bp, Homo sapiens
  Payload ID: 8623
  Gene Symbol: JAM3
  Gene Name: junctional adhesion molecule 3
  ENST ID: ENST00000532252
  CDS Start-End: 14-130
agcaaccctcgacatggcgctgaggcggccaccgcgactccggctctgcgctcggctgcctgacttcttcctgctgctgcttttcagggagtcaagtctagtctgctttccaaggctgcattctaagtagtgaagcctcaacttcatatttacctaaagcaggacaccacactcttcccctggcagccatccgcaggctgcctgataggggctgtaaatctcaaatccagcaatcgaaccccagtggtacaggaatttgaaagtgtggaactgtcttgcatcattacggattcgcagacaagtgaccccaggatcgagtggaagaaaattcaagatgaacaaaccacatatgtgttttttgacaacaaaattcagggagacttggcgggtcgtgcagaaatactggggaagacatccctgaagatctggaatgtgacacggagagactcagccctttatcgctgtgaggtcgttgctcgaaatgaccgcaaggaaattgatgagattgtgatcgagttaactgtgcaagtgaagccagtgacccctgtctgtagagtgccgaag

SEQ ID NO: 144836 - DNA, 385 bp, Homo sapiens
  Payload ID: 8623
  Gene Symbol: JAM3
  Gene Name: junctional adhesion molecule 3
  ENST ID: ENST00000534549
  CDS Start-End: 14-385
agcaaccctcgacatggcgctgaggcggccaccgcgactccggctctgcgctcggctgcctgacttcttcctgctgctgcttttcaggggagacttggcgggtcgtgcagaaatactggggaagacatccctgaagatctggaatgtgacacggagagactcagccctttatcgctgtgaggtcgttgctcgaaatgaccgcaaggaaattgatgagattgtgatcgagttaactgtgcaagtgaagccagtgacccctgtctgtagagtgccgaaggctgtaccagtaggcaagatggcaacactgcactgccaggagagtgagggccacccccggcctcactacagctggtatcgcaatgatgtaccactgcccacggattcc

SEQ ID NO: 144837 - DNA, 1138 bp, Homo sapiens
  Payload ID: 8624
  Gene Symbol: JSRP1
  Gene Name: junctional sarcoplasmic reticulum protein 1
  Uniprot ID: Q96MG2
  ENST ID: ENST00000300961
  CDS Start-End: 66-1061
gtcctgtccacaaggctcagcaaagcggctggcggcctggcctgggacctgctgctgctccagccatgtccatgacaaccagagcctgggaggagctggatggcggcctgggcagctgccaggccctggaggaccactctgcgctggccgagacccaggaggacagggcttcagcgacacccaggctggccgactccggcagcgtgccccacgactctcaggtggctgaaggccccagtgtggacaccaggcccaagaagatggaaaaagagcctgccgccagggggaccccaggaacggggaaggagaggctgaaagccggagcgagccctcggagcgtccccgcgcgcaagaaggcgcagaccgcgccgcccctgcagccgccgccgccgcccccggccctgagcgaggagctgccctggggagacctgtcgctcaacaagtgcctggtgctcgcctcgctggtggcgctgctgggctcggctttccagctgtgccgcgacgccgtccctggggaggcagcactccaagcacgtgtgcccgagccctgggtcccgccaagctcagccccgagggagccatcgtcgcccctgcctaagttcgaggcccaggcgcctccatcagcgccgcctgcgccccgggccgaggcagaggtcagacccaagattcccgggagtcgggaggctgcagagaacgacgaagaggagcccggcgaggccaccggagaggccgtccgggaggaccgtgtgaccctcgcagaccggggacccaaggagaggcctcggagagaggggaagccgcggaaggagaagccgcggaaggaggagagacctaagaaagagaggccgcggaaagaggagaggccacgggccgccagggagccccgggaagccctaccccagcgctgggagtcacgcgaagggggccaccggccgtgggcacgggactccagggacgccgagcccaggaagaagcaggcctgggtgtccccgaggcgtcccgacgaggagcagcggcctgggagtcgccagaagctccgcgcaggcaaggggcgggactgagccggccccgcgccggagtccaggggccccttctggacgccccgcgactctggcgaaataaagcgagtgctgcggcc

SEQ ID NO: 144838 - DNA, 843 bp, Homo sapiens
  Payload ID: 8624
  Gene Symbol: JSRP1
  Gene Name: junctional sarcoplasmic reticulum protein 1
  ENST ID: ENST00000593238
  CDS Start-End: 61-843
gggcggggcacttacctctcactgctgctgccgccgcggctgtgcaggcttaggagcggcatggtgcggctggcgtggatggtggcgctgggtttatccccttccttctctctggcgaagcagtggctattgaggatccgctgcagggaggatttcaccatccggccgctggggtccgaaaccaggaaaacctccgctgcgtctctccgcgccgccgccgctgctcgccgttcgcaaaatggcgcctctgccgccgcccgcctttatagatgctgcgcccaggccacgccccccgcgccgccgggaacgcgaccgcacgaggggcagagccgcggggccgccgggaaaaaaagtcgcgcccgcccctcccagcgcctgattggtgaaagggaaagggaaaggaagaggctctctggagattggttgcctggcctgggacctgctgctgctccagccatgtccatgacaaccagagcctgggaggagctggatggcggcctgggcagctgccaggccctggaggaccactctgcgctggccgagacccaggaggacagggcttcagcgacacccaggctggccgactccggcagcgtgccccacgactctcaggtggctgaaggccccagtgtggacaccaggcccaagaagatggaaaaagagcctgccgccagggggaccccaggaacggggaaggagaggctgaaagccggagcgagccctcggagcgtccccgcgcgcaagaaggcgcagaccgcgccgcccctgcagccgccgccgccgcccccggccctgagcgaggagctgccctggggagacctgtcgctcaacaagtgcctggtg

SEQ ID NO: 144839 - DNA, 4378 bp, Homo sapiens
  Payload ID: 8625
  Gene Symbol: JPH1
  Gene Name: junctophilin 1
  Uniprot ID: Q9HDC5
  ENST ID: ENST00000342232
  CDS Start-End: 42-2027
gtccgtgcccctgcggggagcgcgccggggctgccccccgaatgacgggcggaaggttcgacttcgacgatggcggcacctactgcggcggctgggaggagggcaaggcgcacgggcatggcatctgcacggggcccaagggccagggcgagtactcgggctcctggtcgcacggcttcgaggtggtcggaggctacacctggcccagcggcaacacctaccagggctactgggcgcagggcaagcggcacgggctgggggtggagacgaagggcaagtggatgtaccggggggagtggtcacatggtttcaaggggcgctacggggtccggcagagcctgtgcacccccgctcgctacgagggtacctggagtaacgggctgcaagacgggtacggcgtggagacctacggggacggaggtacctaccagggccagtgggccggaggcatgcggcatggctacggcgtgcgccagagcgtgccctacggcatggccacggtgatccgctcaccgctgcgtacctcgctggcctcgctgcgcagcgagcagagcaatggcagcgtgctccacgacgccgcagccgccgccgacagcccggccggcacccgcggcggtttcgtgctcaacttccacgcagacgctgagctagcgggcaagaagaagggcggcctcttccggaggggctcccttcttggaagcatgaaacttcgcaagtccgaatccaagtcttccatctcgagcaagcgcagctctgtccgcagcgacgcggccatgagcagaattagttccagcgatgccaactccacgatcagctttggcgatgtagattgtgatttttgcccggtggaagaccacgtggacgccaccaccacggaaacctacatgggcgagtggaagaacgacaagcgcaacggcttcggcgttagcgagcgctccaatggcatgaagtatgaaggggagtgggcaaataacaagaggcatggatatggctgtaccgtgtttcctgacggctccaaagaagagggaaaatacaaaaataatattctggtccgtgggataaggaagcagcttataccaataagacatacaaaaactagggagaaggtggacagagcaattgaaggcgcccaaagggcagctgccatggccagaaccaaagtggaaatagcaaattcaaggactgcacatgccagagcgaaggccgatgccgccgaccaggccgcgctggccgctcgccaggagtgcgacatcgcgagagctgtggccagggagctgtcacctgatttctaccaaccaggccctgattacgtcaaacagagatttcaggaaggtgtagatgctaaagaaaatccagaagaaaaggtaccagaaaagccacctacaccaaaggagtctcctcatttttatcgcaaaggcacgacacccccaagatctcctgaggcaagtcccaaacacagccactctcctgcttcctccccaaagcccctgaagaagcaaaaccccagctcaggggcgagactcaaccaagacaaaaggagtgtggctgatgagcaggtgacggccattgtcaataagcccttgatgtcaaaggctcccacgaaggaggcaggagcggttgtgccccagtccaagtactctggccgccaccacatccccaaccccagtaacggggagctgcattctcagtatcacggctactacgtgaagctgaacgccccccagcaccctccagtagacgtggaggacggcgatggatccagccagtcttcctcagcactggtgcacaagccatccgctaacaagtggagtccctccaaatctgtgacaaaaccagttgccaaagaaagcaaagctgagccaaaagctaagaagtctgaacttgctataccaaagaatccagcaagcaacgattcatgccctgctttggaaaaagaagccaattcaggccctaattcaatcatgattgtccttgtcatgctgttgaatatcgggttggccattctttttgttcactttctaacttgattggaattaggaaagtgaagtcctgacaactagtggtgtgttagcccacagttctctgcagtggtgccgtcagccctttaaatggcccaccccaggcagactcagacacagggaaggaggcttggaattaggatgggatcgcgagagagatgaaacttggaaaattcagccagaggacctgttcggttcccctgggagtgctttgtggctttggggtcctctgggagctgaagcacacggccatgttggagagcaaaacttaataataattcttttttaaaatctgctgaagcagccccatccggcgaagttcttggcattggctactccatctgtcctagcagagtgtgactaaactggaaatgtatggagctgcattttttttttttttttgatggaagtcaacagctgccttactattttaccatctgacgtttttagtagggagctggggaaacgactgcccgaggaatgcggtcggaggattgtgttgctgtggacgtggttccaacattcactcctatctcattagaagaaataggtagcagcatcactcaccagtcttatgccatgacctgctgctttaacatctcctggaatgttctgggagagaacgtttcgtttgcttgtgcacgactctgttcatttttgctgtttatttaaatctgacgtatagtcatctaccacctgcggtcctggccggacgaaacacacgtgttgcatctcaaggaaaagaaacaacaaaatgctagtgaaaatgtgcttattttgatagcaatataccatcttttatgtcatttattcttcctatacttgtaaaaggttatttatctttaaaatttagcaatttgaagacactatgccttcctaagaactaatttaattctaaatatttttaacattactgaggtgaattatttatgcacttaggaagtgctaaattttaaaagctgaaacacaacagaattctaagaaatatagtccaaacgttgcatggattgcagtaatcagtgtttaaaggattcagtttctttgctgacgtactttacaaccaaataaaatcttgtcggtggctgtgttaattcccatgaaagttaagcaagatgctattaataaactgctctgctctttcttgttttctttttccaacttaaatttctgttgaatacattcaggtagaacataaagccttgttcaatcactgcctctcagttttctgcctttcctgtttttcaaagtccttttgtaatttcatttcacattttaaaggcttagacatttttattttaaatatgtgtcttttacagtcttttgtcattctgacatttctggatttttgctgttttataatttaccctttgttattcagaagcatgcttacttatagaaactaaatggtctttataaaagtaattacttaaaaagaaatcaggggaagaaagatatctatctaatctattaaatctttataaaacattacattgcagagggggagctactcctaaatattttcatgatttgcatggtttaatcagatttttttttttttttacaccatattagctaccttttcaatggagaagagacagttcacacaattccctggttagcacagatgtggactgagtgctttgtcacctgcagggtagtaacccagtgatgtttcttacagaagcacaatatgttgaaaatcctgggtgtgaccaatatggaataaagaagaaggcagaaagagagcaaatgaaaaatttcaacttgtatattcattttttacattttgctttgacttttaaatttaggaagtccgtttttacctgagaacaaatgtttaaagttcctgcgtcactctcagtactctcactgcccctcccaaaccctatagctccttacgctgggaaagctggttttttaaaaaaataataataaaatatttaatcttattaagtgttcatttaaaatgcgtaatgctttggaaataatgggtaacagatagcgagaggatatgtttataaagtgagcatgttggtcccatttataaatatatgtatgatttataagcttttttaaaacaaagctcaaattgttggtatttttctaaaatgtgcacagctgtattttacatgaaggctctttctaatgggttgttatactgtactcaacattttggacagcacatgaagtctgccaatgtacttaataaaacatgactttgtttatttaaagtttcttgctgtgaaaaagaactccctacctgtgagttcctttatttataattcttgaaaccaaaatgtataatgtacagttttcacaactgtatctgctctaataaaaaaaagttggttattaatgaa

SEQ ID NO: 144840 - DNA, 1651 bp, Homo sapiens
  Payload ID: 8625
  Gene Symbol: JPH1
  Gene Name: junctophilin 1
  ENST ID: ENST00000519947
  CDS Start-End: 41-280
tccgtgcccctgcggggagcgcgccggggctgccccccgaatgacgggcggaaggtacctaccagggccagtgggccggaggcatgcggcatggctacggcgtgcgccagagcgtgccctacggcatggccacggtgatccgctcaccgctgcgtacctcgctggcctcgctgcgcagcgagcagagcaatggcagcgtgctccacgacgccgcagccgccgccgacagcccggccggcacccgcggcggtttcgtgctcaacttccacgcagacgctgagctagcgggcaagaagaagggcggcctcttccggaggggctcccttcttggaagcatgaaacttcgcaagtccgaatccaagtcttccatctcgagcaagcgcagctctgtccgcagcgacgcggccatgagcagaattagttccagcgatgccaactccacgatcagctttggcgatgtagattgtgatttttgcccggtggaagaccacgtggacgccaccaccacggaaacctacatgggcgagtggaagaacgacaagcgcaacggcttcggcgttagcgagcgctccaatggcatgaagtatgaaggggagtgggcaaataacaagaggcatggatatggctgtaccgtgtttcctgacggctccaaagaagagggaaaatacaaaaataatattctggtccgtgggataaggaagcagcttataccaataagacatacaaaaactagggagaaggtggacagagcaattgaaggcgcccaaagggcagctgccatggccagaaccaaagtggaaatagcaaattcaaggactgcacatgccagagcgaaggccgatgccgccgaccaggccgcgctggccgctcgccaggagtgcgacatcgcgagagctgtggccagggagctgtcacctgatttctaccaaccaggccctgattacgtcaaacagagatttcaggaaggtgtagatgctaaagaaaatccagaagaaaaggtaccagaaaagccacctacaccaaaggagtctcctcatttttatcgcaaaggcacgacacccccaagatctcctgaggcaagtcccaaacacagccactctcctgcttcctccccaaagcccctgaagaagcaaaaccccagctcaggggcgagactcaaccaagacaaaaggagtgtggctgatgagcaggtgacggccattgtcaataagcccttgatgtcaaaggctcccacgaaggaggcaggagcggttgtgccccagtccaagtactctggccgccaccacatccccaaccccagtaacggggagctgcattctcagtatcacggctactacgtgaagctgaacgccccccagcaccctccagtagacgtggaggacggcgatggatccagccagtcttcctcagcactggtgcacaagccatccgctaacaagtggagtccctccaaatctgtgacaaaaccagttgccaaagaaagcaaagctgagccaaaagctaagaagtctgaacttgctataccaaagaatccagcaagcaacgattcatgccctgctttggaaaaagaagccaattcaggccctaattcaatcatgattgtccttgtcatgctgttgaatatcgggttggccattctttttgttcactt

SEQ ID NO: 144841 - DNA, 1923 bp, Homo sapiens
  Payload ID: 8626
  Gene Symbol: JPH2
  Gene Name: junctophilin 2
  Uniprot ID: Q9BR39
  ENST ID: ENST00000342272
  CDS Start-End: 389-778
ctttgaaaaggctggggacccctccaccccaccctttcactgggcttcttaaagagatcacaccgttttcccttggacttcttggaaggcagacttgggacgctttgtggggactttgaacctttccttcctgctttctttccagcaggcagccttgctctggctggtggagtcggggctcccgggcatggcactgactagccgacccggtgctgacttggcgccggggctctttcagcctctgctggcatcctgcttcccccctcctggggtgcagtggtgagtctgggggcctgcccccgagggcactggaggagtgttgcaggcatcacccacgccctctgcacccacgctggaggacggggaggttgtcaggggctatgatgagatgagtgggggccgcttcgactttgatgatggaggggcgtactgcgggggctgggaggggggaaaggcccatgggcatggactgtgcacaggccccaagggccagggcgaatactctggctcctggaactttggctttgaggtggcaggtgtctacacctggcccagcggaaacacctttgagggatactggagccagggcaaacggcatgggctgggcatagagaccaaggggcgctggctctacaagggcgagtggacacatggcttcaagggacgctacggaatccggcagagctcaagcagcggtgccaagtatgagggcacctggaacaatggcctgcaagacggctatggcaccgagacctatgctgatggagggatgtgttaaaatcgccctcagaatatggtcgagacaatgaaacaagacaatgaagcactgagcatcatgcctggcacataggaaatgccaaaatatatattcccgtatttccttcacattccaaagggtgaattaattcaggatggcctgaaccatagctgtcactgtcttcgggaggatatttgaggacaaaaacgagtttttgactttggaacagtaaataagacaagactttgattcgcttagttctgccttgagtcctgccagtgtagatggaatccatgccagacatgattccatttcgaatgtagaatcagcataatttaacctcatcttggaaatctcatgtcccagttcacagccaggcatcagcgtgacagtcagctgagctgctgtcttggcagcttctgggcattctatggagaccccaggagagcacagcagacccttagcagaacagaaaagcggaccgtattagtctttcctgtccacggccttgttttcagtgattcatgtgcccgattggccaaatctctgcagacgtgcccctgtccgaggccaggcttctgggattcatcgagcttgcttgtttccgggacctgctaattccgtgcccagcagctgttccccggagcaggccctgccctccacaccctcatgaggaatgccgagtctcattttctgagggccctggttgagggtggggtgtggggcgagggggacagggttgcttcctgccatagacttcctgccttggagggttatccttgttctcacctatcccttcccgagctgaagccacagagtaggagagaagttagggctggcacacctccctcccgtgtaactttcactccctgcttaaagggaactgatgagagttgcctggcacagatctgtgcctggcagaatccacagagcagcccaggtgtgctaggaactccagagtgacccctgctccaggccaggaatgagcaccttgtgcctggaggtcttcctgccactgctggctgcccattgctgtggatggggtagagctggagtcacacatggaggctggacagctgcatgcagcctgcaggggacactctggatggcatgtaccatgtttttattatttctatttttaattaaattggaatcctttatggata

SEQ ID NO: 144842 - DNA, 4787 bp, Homo sapiens
  Payload ID: 8626
  Gene Symbol: JPH2
  Gene Name: junctophilin 2
  Uniprot ID: Q9BR39
  ENST ID: ENST00000372980
  CDS Start-End: 874-2964
ggattttcagtgttccaggactgggtgttctgctggtctccctctcccctcccttccccgattccccggtgccctccctgcgcgcagacccaggggactctgagaatggaagggagctctcattcccgggaggaaaagacaccaggttccctgggctgcctgcactcagttctcagcctccttcctcatgcctccagccactgcccgggtctgcggcacgggcgcgatttgaaatacccctccttcccgctttgaagaaggctgggctggctgggggttattttgggagcagcttctgagatccaatggccttgttagggcaacactgacctttccgtcccagaaggagggcaggattggagaagggggcggggcagcggcggggagaccgacagccccgcacacccactggggtggagaagggggccagcgggctgcgggaattcagcctccggcgggggctgccaccgaggggaatttcccctctttgaaaaggctggggacccctccaccccaccctttcactgggcttcttaaagagatcacaccgttttcccttggacttcttggaaggcagacttgggacgctttgtggggactttgaacctttccttcctgctttctttccagcaggcagccttgctctggctggtggagtcggggctcccgggcatggcactgactagccgacccggtgctgacttggcgccggggctctttcagcctctgctggcatcctgcttcccccctcctggggtgcagtggtgagtctgggggcctgcccccgagggcactggaggagtgttgcaggcatcacccacgccctctgcacccacgctggaggacggggaggttgtcaggggctatgatgagatgagtgggggccgcttcgactttgatgatggaggggcgtactgcgggggctgggaggggggaaaggcccatgggcatggactgtgcacaggccccaagggccagggcgaatactctggctcctggaactttggctttgaggtggcaggtgtctacacctggcccagcggaaacacctttgagggatactggagccagggcaaacggcatgggctgggcatagagaccaaggggcgctggctctacaagggcgagtggacacatggcttcaagggacgctacggaatccggcagagctcaagcagcggtgccaagtatgagggcacctggaacaatggcctgcaagacggctatggcaccgagacctatgctgatggagggacgtaccaaggccagttcaccaacggcatgcgccatggctacggagtacgccagagcgtgccctacgggatggccgtggtggtgcgctcgccgctgcgcacgtcgctgtcgtccctgcgcagcgagcacagcaacggcacggtggccccggactctcccgcctcgccggcctccgacggccccgcgctgccctcgcccgccatcccgcgtggcggcttcgcgctcagcctcctggccaatgccgaggcggccgcgcgggcgcccaagggcggcggcctcttccagcggggcgcgctgctgggcaagctgcggcgcgcagagtcgcgcacgtccgtgggtagccagcgcagccgtgtcagcttccttaagagcgacctcagctcgggcgccagcgacgccgcgtccaccgccagcctgggagaggccgccgagggcgccgacgaggccgcacccttcgaggccgatatcgacgccaccaccaccgagacctacatgggcgagtggaagaacgacaaacgctcgggcttcggcgtgagcgaacgctccagtggcctccgctacgagggcgagtggctggacaacctgcgccacggctatggctgcaccacgctgcccgacggccaccgcgaggagggcaagtaccgccacaacgtgctggtcaaggacaccaagcgccgcatgctgcagctcaagagcaacaaggtccgccagaaagtggagcacagtgtggagggtgcccagcgcgccgctgctatcgcgcgccagaaggccgagattgccgcctccaggacaagccacgccaaggccaaagctgaggcagcggaacaggccgccctggctgccaaccaggagtccaacattgctcgcactttggccagggagctggctccggacttctaccagccaggtccggaatatcagaagcgccggctgctgcaggagatcctggagaactcggagagcctgctggagccccccgaccggggcgccggcgcagcgggcctcccacagccgccccgcgagagcccgcagctgcacgagcgtgagacccctcggcccgagggtggctccccgtcaccggccgggacgcccccgcagcccaagcggcccaggcccggggtgtccaaggacggcctgctgagcccaggcgcctggaacggcgagcccagcggtgagggcagccggtcagtcactccgtccgagggcgcgggccgccgcagccccgcgcgtccagccaccgagcgcatggccatcgaggctctgcaggcaccgcctgcgccgtcgcgggagccggaggtggcgctttaccagggctaccacagctatgctgtgcgcaccacgccgcccgagcccccaccctttgaggaccagcccgagcccgaggtctccgggtccgagtccgcgccctcgtccccggccaccgccccgctgcaggcccccacgctccgaggccccgagcctgcacgcgagacccccgccaagctggagcccaagcccatcatccccaaagccgagcccagggccaaggcccgcaagactgaggctcgagggctgaccaaggcgggggccaagaagaaggcgcggaaggaggccgcactggcggcagaggcggaggtggaggtggaagaggtccccaacaccatcctcatctgcatggtgatcctgctgaacatcggcctggccatcctctttgttcacctcctgacctgaccgtcgcttaccagagccagaagttcctgctgaggacatgaggacccgtctttttgcagtgccaggcagggtggccaaagaggactggactctggacctggagccccgtggtccagttcacattcaccccacaagagtttcaggaggcctcccacggtgcctgtgctgggtggcggtggtggtgccaagaggaatggaatgtcctgggctccttcaggagctctctacccaggggcaaggagagcccagagagaagcgccctggtctcttgagcttcctgatctgctcctgtcccccgctctcctccactcccttgcctttccctaggttgtcccctccctgggcttttgtgtgttttgggagatgtcacctaaccaggacattgatattcaatcccatcccccttcctcccaccctgccccactttgatttaatcctttggctgtgggctgaggcctcccagggaagctgggtggggtgggtgttgagaccccctcagaccagcacagagacctgtccttgtgcagtctgcaccctgcactccctcccttgcctgtagatgttctggatgacagtagaggaaatggacaaggtcagtttgaatatcccagaacacagtgctctgtctcctcccaccagtccagttagcttcccttctggaccaatagacgaggggagaccccatggatcctctggctgggaagccactgaccaggtggccagggggcagggtgggaagaggggttaaggtgcagtgatgatggcctgttttggagtgtgtctgagactgggattgcatttggggtttcccgtgtgcttgggatgctagagggtcacctgcaggaggcctggggccggcgagaaatctcctgtgatgccctgtgaaatggcttgtctcctcccccatcagggcccaccgaaagctcaggggagcacagaagcccatggaagcccagggagatgtccctggggcagacactaaggcaggtgttgaagacaagctgcttgtcaagaagcatttcccggcaagagaggggcaagtctggggctccaactgggtacagcctgggtgcagttataagcccctttggcttacttggtagaagatggctacttggatgtacctcacttaaagatgttttgtaccacactaggtctctgggcccttgtgcttcctgtgggtggggtgagggccaaaggctatggtttcctgcctccaggagaatggagagaaagggcttccaggcccctccaagcctggggaaggacgtggcatccaagctgagccagagggaactgctgctgtcctcccttcatttctgtggaccttggaggctttggctttgtggcagggcctccccaggcagctctgggacctaggagtttgcttctgatagggtcagctttcccatttcccttcaatgcttgggaaccttctcccttagcttcacacttgccgtttcaagccctgctgggaccttgtggcttggctggaatccaggactgtattttcatggagaagaacctgcagattcttccatcctcagctggccatggcccacagctctgcatctgcatctgagcttctcaagactcctggagcatgaggggaatggggcggggccactgctctgtgctgacgggctccgtctcggagattcttgtcctgttttttttctgttgtttttttttggctggtgctggggacaagcctgtgcctgccaaagctcccaggccaagtttgggggctggtgtttggggttgggtttggggttcaggatgctgcagtctgtgcaataataaacccgcatctgctcacgggc

SEQ ID NO: 144843 - DNA, 3985 bp, Homo sapiens
  Payload ID: 8627
  Gene Symbol: JPH3
  Gene Name: junctophilin 3
  Uniprot ID: Q8WXH2
  ENST ID: ENST00000284262
  CDS Start-End: 243-2489
agcgcgagacgctggtcaggctccgcggcgcagctcgaaaaggaataatcgcccccgattgactgaaattcctccggagccggcgccgcggccgcccgcgcccgagaccgcgctccggggccgcgtcctcctctcctccggaaaacgctcgcgacccagggccgccggcggccgcgactctgctgtgtcgatcgcctgagtccgttttcaccgtttgcgggatctggaaccgagttacatgcatgtccagtgggggcaggtttaattttgacgacggagggtcctactgtggaggctgggaggacggcaaggcgcacggccatggcgtctgcaccggccccaagggccaaggcgaatacaccggctcgtggagccacggcttcgaggtgctgggcgtctacacctggcccagcggcaacacgtaccagggcacctgggcgcagggcaagcgccacggcatcggcctggagagcaaggggaagtgggtgtacaagggcgagtggacgcacggattcaaggggcgctacggggtgcgggagtgcgcgggcaacggggccaaatacgaagggacctggagcaacgggctgcaggacggctacgggaccgagacctactcggacggagggacctaccagggccagtgggtcggtggcatgcgccagggctacggcgtccggcagagcgtcccgtatggcatggccgcggtcatccgctcacccctgaggacgtccatcaactccctgcgcagcgagcacaccaacggcacggcgctgcatcccgacgcctctccggcggtggccggcagcccggccgtgtcccgcgggggcttcgtgctcgtggcccacagtgactccgagatcctcaagagcaagaagaaggggctgtttcggcgctcgctgctgagtgggctgaagctgcgcaagtcggagtccaagagcagcctggccagccaacgcagcaagcagagctcctttcgcagcgaggcgggcatgagcaccgtcagctccacggccagcgacatccactccaccatcagcctgggcgaggctgaggccgagctggcggtcatcgaggacgacatcgacgccaccaccaccgagacctacgtgggcgagtggaagaacgacaaacgctccggcttcggcgtgagccagcgctcggacgggctcaagtacgagggcgagtgggccagcaaccggcgccatggctacggctgcatgaccttcccggacggcaccaaggaggagggcaagtacaagcagaacatcctcgtcggcggcaagcgcaagaacctcatccccctgcgggccagcaagatccgcgagaaggtggaccgcgccgttgaggccgctgagcgggccgccaccatcgccaagcagaaggctgagatcgcggcttccaggacctcccactctcgggcaaaggccgaggcagccctcacagcagctcagaaagcccaggaggaggcgcggatcgccaggatcactgccaaagagttctccccttccttccagcaccgggaaaacgggctggagtaccagaggccgaagcgtcagacctcctgtgacgacatcgaggtgctgtccaccgggacacccctgcagcaggagagccccgagctgtaccgcaagggcaccactccctccgacctgacccccgacgacagccccctgcagagcttccccaccagccccgcggccaccccgccgcccgcgcccgccgccaggaacaaggtcgcccacttctcgaggcaggtgtcggtggacgaggagcggggcggggacatccagatgctcctggagggccgggccggggactgcgcccgcagcagctggggcgaggagcaggccgggggctccaggggtgtccgcagcggtgccctgcgcggcggcctgctcgtggatgacttccgcacccgaggttcgggccgcaagcagcccgggaaccccaagccgcgggagcggcggacggagtcaccccccgtgttcacgtggacttcccaccaccgggccagcaaccacagccccggaggctccaggctgctggagctgcaggaggagaagctgagcaactaccggatggagatgaaacccttgctgaggatggagacgcatccccagaaaagacgctacagcaagggcggcgcctgccggggcttgggggacgaccaccgccccgaggaccggggcttcggggtgcagagactgcggtccaaggcccagaacaaggagaacttcaggccggcctcctccgcggagcccgccgtgcagaaactggcgagcctgcggctgggcggggccgagccccggttgctgcgttgggacttgaccttctccccgccccagaaatccttgcctgtcgctctagagtccgacgaggagaatggggatgagctcaagtccagtacgggctcagcgcctatcctggtggtcatggtgatcttgctcaacatcggagtcgccattctgtttattaactttttcatctgatgagatgtcgcggtagcaaaaatagagaaagggtagaaaaaagggacattaaaattaaaagcaaaaccacaagaagggaaagaccgcaactcggacagcccagcgacttccaagtcctctcacagaagaaccacacgattgggtatcactcacagtttgcctttttttctgggtaatgttttttggattttagccaaaattctttgcttgtataacactctgctgtgtggcatggcagaaggaggccagcacgcagcccctccagctccacgtggagacagaagggatcccggcacatcagtggtaacagcggacgttgtcctcgtggtcacacgtcccgtcttgggtgtggatggagggcagcccggggcagagcctcagccccgcggcccctgagtggcagggctgactcccgtcgacacgagcttagaaagtggattcactgctttctctgtctagaacagacgggtgacaagtatgggcaggaggcatggggcagggtggcccaccccagtgggcagtagcctggcctttttctgtgtgagatctgtgctgcacacctgagggagggggagggatcggccacctcctccctgtgagacggatgcaggtccttccctcttctcggcactgcccccggccttccatgagaagccgactccccacaccgagttttaaagcaaagcccttttcttctgctgcccactcactgtgggtcccattcggctgtttcccccaccagaccccagggaagccggggcccactccgatccgcctgggctcagctaagcacggaagccaagggggctgtgccgtggagctgggctcgcgccggggctctgggtgtgtgcgcttggcgtgcagggtggacgcgtggggttccgtgtccccagcagtgagggccctagaggacgccttctcccatggttactgatctccacgggttttcacatctctgtactgtgcctgcctcaacttcccctaacagatatgcatattccttccagatgcctcagtgctacaccacagtgggcctggtcccaggacaggaatgcggttcaaacccagtggcttgaaacttcctgagaaactgtagcatatccagccccctaaaatgtacaatgtaacttgttcagtccaacaaaaacaggttccttatgtttctgccttctccaccagggtcgctccatcacccaaacaaaagaacaaggtttgccaggatgtccgagtgccccctggccctggctctcgtgtgcatggacgtgcctgaggggtccgggcacggccatacgcaggacccctgtgcccggggaggcgctgcagggattccccatccggtcgtcttggggccagcccgtcttatggactctgccttgctttgcttatgtttagctgtttctctgctacctttcgagcagacttctttactacactgcactggattgctatatttttaaccagaaataaactaaagattagagcatgttccagttaaa

SEQ ID NO: 144844 - DNA, 4278 bp, Homo sapiens
  Payload ID: 8628
  Gene Symbol: JPH4
  Gene Name: junctophilin 4
  Uniprot ID: Q96JJ6
  ENST ID: ENST00000356300
  CDS Start-End: 793-2679
tgggggtctcagtgcatctccttctcctctctgcctgcctcctccctcaccgaagggttagcggacacccatccttttctgcttggggaccccaccaccacccgcaacactgccgctgtctcttcttcaccgtatccttctctacccaccctcttctctcttctcttctccctgcccctttaaatctgcctggcccagcctcccccgtgatgctgggatggagcaaacattgatttgtgctgggatggaatcggaattttgatttatttttcctctcccaaccataagaagaaaaaaataataaaaacaccccctcttgagagccccctccccctttgcatccagctcccagctcttcttccctatctccatccaaggcagattttttcccctacactattctcatcttcccccacccttgccactacctcgcccccccacccagcctgctcctccagctggggagagaggggactctccggactcccccacctttcctctctgggttggagcagtctctccggaaggggagggggcttggcttgtccgggcgaggtgggagtggaggtatcctgccatggatgctgtgccggggaggcagcctgagccccagcccacatgccactcaggatgagggtccggccctgcctgccctcgctggggcccccccgcccggccccggtctaactgcccccgccccgaggcctcgcccggctccaaggcccccagcaggctctccagtcccaggatgcgctgagccgccggggggctgaggccgcgccaactacatgcatgtcccccgggggcaagttcgactttgacgacgggggctgctacgtggggggctgggaggcggggcgggcacatggctacggcgtgtgcacgggccccggcgcccagggcgagtacagcggctgctgggcacacggcttcgagtcactgggcgtcttcacggggcccggcggacacagctaccagggccactggcagcagggcaagcgcgaagggctgggcgtggagcgcaagagccgctggacgtaccgcggcgagtggctgggcgggctgaaggggcgcagcggcgtgtgggaaagcgtgtccggcctgcgctacgccgggctctggaaggacggtttccaggacggctacggcactgagacctactccgacggaggcacctaccagggccagtggcaggccgggaagcgccacggctacggggtacgccagagtgtgccctaccatcaggcggcgctgctgcgctcgccccgccgcacctccctggattccggccacagcgaccccccgacgccacccccgcccctgcccttgccgggcgacgagggaggcagccccgcctcgggctcccggggcggcttcgtgctggccgggcccggggacgccgacggcgcgtcgtcccgaaagcgcactccggcggccggcggattctttcgccgttcgctgctgctcagcgggctccgagcgggcggacgtcgcagctccctgggcagcaagcgaggctccctgcgcagcgaggtgagcagcgaggtgggcagcaccggaccgcccggctcggaggccagcgggcccccggccgcagcgccgcccgccctcatcgagggctcggccacagaggtgtacgcgggcgagtggcgcgcagatcggcgcagcggcttcggcgtcagccagcgctccaacgggctgcgctacgagggcgagtggctgggcaaccggcggcacggctacgggcgcaccacccgccccgacggctcccgcgaggagggcaagtacaagcgcaaccggctggtgcacggcgggcgcgtccgcagtctcctgcctctggcccttcggcggggcaaggttaaggagaaggtggacagggctgtcgagggcgcccgtcgagccgtgagtgctgcccgtcagcgccaggagatcgccgctgccagggcagcagacgccctcctaaaggcagtggcagccagcagtgtcgctgagaaggccgtggaggcagctcgaatggccaaactgatagcccaggacctgcagcccatgctagaggccccaggccgcagacccaggcaggactcagaaggttccgacacggagcccctggatgaggacagccctggggtatatgagaacggactgaccccctcagagggatcccctgaactgcccagcagtcctgcctcctcccgccaaccctggcgaccccctgcctgccggagcccactgcctcctggaggggaccagggtcccttctccagccccaaagcttggcctgaggagtgggggggggcaggcgcacaggcagaggaactagctggctatgaggctgaggatgaggctgggatgcaagggccagggcccagagacggttccccactcctcggaggctgcagcgacagttcaggaagtcttcgagaggaggagggggaggatgaagagcccctgcccccgctgagggccccagcaggcacggagcctgagcccatcgccatgctggtcctgaggggctcgtcctcgaggggtcctgatgctgggtgcctgacagaagagctcggggagcccgctgcaaccgagaggcctgcccagccgggagctgccaaccccctggtggtgggagccgtggccctcctggacctcagcctggcattcctgttctcccagctcctcacctgaggctacttcctggcctggttctggctttggttgcgtgcctcttcacccctttgacctgccttttttctcttctcctcttcctggctgtgttttctcctatctttctttctcttcttcctttcttttctgtgctcctttgtttttttctctcgctttttctttccctgtcttctttcagattatctcatttcttctggatctgtctctgtattcctcactcccttccccatcccaaccccttctttctctagattgtttacatatgaagggcttttctctctcagagttgctgtcttctctgagacacacaaatctaagtcagaccattgctccacgccctcccaccttttctttagacctcaacttcgctgcgggtgggggtttggtgtcctaaggagactcctggaagctgaatggagaggaggaagaaaatgaagaaggagtgattgaatgtcgggcaaggcactggctgagctgctgtggctccctagcctaaggggcctgctgtccctctgaggcctagtgaaaaagctgcaggaggtgcatcctccacctctaatcttggaggctattatcttacctccaagcactgagctgggttactgcccaattccatccttccctgaaggagagaagggaagtgaaaagtagagtaactccccagcatttccctctttttctcctcatcggccagcccctcctccagccccctctggtggcatgccatgccaagagcaacgtgtaaaggaacagagaatatccaatgcagtcaagtccaccctgcccagactttgccactgacttctcccacccttctgtctcccccataatagtttatttggttggtctggactcacttgtggcctttgattaaattcctaaggggcctgaagaagacatttctactgcagagggttagaggcacttgagcaaggcccccacatcccaactctgggagttgtggtgggaggaggcacttctgggggataggaccagacaagataacaggagctcacatggaagcagaagctgtgacaagtttagtagtcccaaaatgggttatatcccttccccctttacatcagaatcttgtgaaatgggaaaacaacagaaggaggggatcaaagatagctgatctcacatgcttcccaggcagggcagaggtgggagtcaaacccgggtgacaggtgggtggagagccctgtttgaggttgtggctgatccctctctggtattagtttttcccctgggagcaggaagccctaggaagaggggactgcagggtccccaggggatctttcctccctcccctgcatgaggcagaggcaagctgcctgccaaccccctccctcaaggaatggccttgcccaggaatgcccaccacacataccctcttctttttttctagtcaaactcttgtttattccttggcttgcctccctccttcctcccctctcaacctttacttctgatttctatttcatggaatttgggattgaagttaaactacaacagtgccgccaacaccaagtcttgcaggaaaaaaatacaaagaaatttaacaaaaaaaatatattaataaaaaagttcaaaaaaggg

SEQ ID NO: 144845 - DNA, 4386 bp, Homo sapiens
  Payload ID: 8628
  Gene Symbol: JPH4
  Gene Name: junctophilin 4
  Uniprot ID: Q96JJ6
  ENST ID: ENST00000397118
  CDS Start-End: 904-2790
atctccttctcctctctgcctgcctcctccctcaccgaagggttagcggacacccatccttttctgcttggggaccccaccaccacccgcaacactgccgctgtctcttcttcaccgtatccttctctacccaccctcttctctcttctcttctccctgcccctttaaatctgcctggcccagcctcccccgtgatgctgggatggagcaaacattgatttgtgctgggatggaatcggaattttgatttatttttcctctcccaaccataagaagaaaaaaataataaaaacaccccctcttgagagccccctccccctttgcatccagctcccagctcttcttccctatctccatccaaggcagattttttcccctacactattctcatcttcccccacccttgccactacctcgcccccccacccagcctgctcctccagctggggagagaggggactctccggactcccccacctttcctctctgggttggagcagtctctccggaaggggagggggcttggcttgtccgggcgaggtgggagtggaggtatcctgccatggatgctgtgccggggaggcagcctgagccccagcccacatgagacgccgaagaaccggggcagaggggtcctgacagcagccagggaaacgggtgccctacgattctgcccagccccctctcaggacccccaaactgccatccacactcgacacttcggggttctagccactcaggatgagggtccggccctgcctgccctcgctggggcccccccgcccggccccggtctaactgcccccgccccgaggcctcgcccggctccaaggcccccagcaggctctccagtcccaggatgcgctgagccgccggggggctgaggccgcgccaactacatgcatgtcccccgggggcaagttcgactttgacgacgggggctgctacgtggggggctgggaggcggggcgggcacatggctacggcgtgtgcacgggccccggcgcccagggcgagtacagcggctgctgggcacacggcttcgagtcactgggcgtcttcacggggcccggcggacacagctaccagggccactggcagcagggcaagcgcgaagggctgggcgtggagcgcaagagccgctggacgtaccgcggcgagtggctgggcgggctgaaggggcgcagcggcgtgtgggaaagcgtgtccggcctgcgctacgccgggctctggaaggacggtttccaggacggctacggcactgagacctactccgacggaggcacctaccagggccagtggcaggccgggaagcgccacggctacggggtacgccagagtgtgccctaccatcaggcggcgctgctgcgctcgccccgccgcacctccctggattccggccacagcgaccccccgacgccacccccgcccctgcccttgccgggcgacgagggaggcagccccgcctcgggctcccggggcggcttcgtgctggccgggcccggggacgccgacggcgcgtcgtcccgaaagcgcactccggcggccggcggattctttcgccgttcgctgctgctcagcgggctccgagcgggcggacgtcgcagctccctgggcagcaagcgaggctccctgcgcagcgaggtgagcagcgaggtgggcagcaccggaccgcccggctcggaggccagcgggcccccggccgcagcgccgcccgccctcatcgagggctcggccacagaggtgtacgcgggcgagtggcgcgcagatcggcgcagcggcttcggcgtcagccagcgctccaacgggctgcgctacgagggcgagtggctgggcaaccggcggcacggctacgggcgcaccacccgccccgacggctcccgcgaggagggcaagtacaagcgcaaccggctggtgcacggcgggcgcgtccgcagtctcctgcctctggcccttcggcggggcaaggttaaggagaaggtggacagggctgtcgagggcgcccgtcgagccgtgagtgctgcccgtcagcgccaggagatcgccgctgccagggcagcagacgccctcctaaaggcagtggcagccagcagtgtcgctgagaaggccgtggaggcagctcgaatggccaaactgatagcccaggacctgcagcccatgctagaggccccaggccgcagacccaggcaggactcagaaggttccgacacggagcccctggatgaggacagccctggggtatatgagaacggactgaccccctcagagggatcccctgaactgcccagcagtcctgcctcctcccgccaaccctggcgaccccctgcctgccggagcccactgcctcctggaggggaccagggtcccttctccagccccaaagcttggcctgaggagtgggggggggcaggcgcacaggcagaggaactagctggctatgaggctgaggatgaggctgggatgcaagggccagggcccagagacggttccccactcctcggaggctgcagcgacagttcaggaagtcttcgagaggaggagggggaggatgaagagcccctgcccccgctgagggccccagcaggcacggagcctgagcccatcgccatgctggtcctgaggggctcgtcctcgaggggtcctgatgctgggtgcctgacagaagagctcggggagcccgctgcaaccgagaggcctgcccagccgggagctgccaaccccctggtggtgggagccgtggccctcctggacctcagcctggcattcctgttctcccagctcctcacctgaggctacttcctggcctggttctggctttggttgcgtgcctcttcacccctttgacctgccttttttctcttctcctcttcctggctgtgttttctcctatctttctttctcttcttcctttcttttctgtgctcctttgtttttttctctcgctttttctttccctgtcttctttcagattatctcatttcttctggatctgtctctgtattcctcactcccttccccatcccaaccccttctttctctagattgtttacatatgaagggcttttctctctcagagttgctgtcttctctgagacacacaaatctaagtcagaccattgctccacgccctcccaccttttctttagacctcaacttcgctgcgggtgggggtttggtgtcctaaggagactcctggaagctgaatggagaggaggaagaaaatgaagaaggagtgattgaatgtcgggcaaggcactggctgagctgctgtggctccctagcctaaggggcctgctgtccctctgaggcctagtgaaaaagctgcaggaggtgcatcctccacctctaatcttggaggctattatcttacctccaagcactgagctgggttactgcccaattccatccttccctgaaggagagaagggaagtgaaaagtagagtaactccccagcatttccctctttttctcctcatcggccagcccctcctccagccccctctggtggcatgccatgccaagagcaacgtgtaaaggaacagagaatatccaatgcagtcaagtccaccctgcccagactttgccactgacttctcccacccttctgtctcccccataatagtttatttggttggtctggactcacttgtggcctttgattaaattcctaaggggcctgaagaagacatttctactgcagagggttagaggcacttgagcaaggcccccacatcccaactctgggagttgtggtgggaggaggcacttctgggggataggaccagacaagataacaggagctcacatggaagcagaagctgtgacaagtttagtagtcccaaaatgggttatatcccttccccctttacatcagaatcttgtgaaatgggaaaacaacagaaggaggggatcaaagatagctgatctcacatgcttcccaggcagggcagaggtgggagtcaaacccgggtgacaggtgggtggagagccctgtttgaggttgtggctgatccctctctggtattagtttttcccctgggagcaggaagccctaggaagaggggactgcagggtccccaggggatctttcctccctcccctgcatgaggcagaggcaagctgcctgccaaccccctccctcaaggaatggccttgcccaggaatgcccaccacacataccctcttctttttttctagtcaaactcttgtttattccttggcttgcctccctccttcctcccctctcaacctttacttctgatttctatttcatggaatttgggattgaagttaaactacaacagtgccgccaacaccaagtcttgcaggaaaaaaatacaaagaaatttaacaaaaaaaatatattaataaaaaagttcaaaaaa

SEQ ID NO: 144846 - DNA, 1124 bp, Homo sapiens
  Payload ID: 8628
  Gene Symbol: JPH4
  Gene Name: junctophilin 4
  ENST ID: ENST00000544177
  CDS Start-End: 24-905
agaattacagaactcatttaaggatgacaaggcatctacgattaacagcagagggtgaaagggaagagaaaactgaggaagcatctgacatcacagggagaactgagaagcaacagtggggaaggactgatcagactcccaggctgcctgcacctaaggagcagggaagggcagcagacgccctcctaaaggcagtggcagccagcagtgtcgctgagaaggccgtggaggcagctcgaatggccaaactgatagcccaggacctgcagcccatgctagaggccccaggccgcagacccaggcaggactcagaaggttccgacacggagcccctggatgaggacagccctggggtatatgagaacggactgaccccctcagagggatcccctgaactgcccagcagtcctgcctcctcccgccaaccctggcgaccccctgcctgccggagcccactgcctcctggaggggaccagggtcccttctccagccccaaagcttggcctgaggagtgggggggggcaggcgcacaggcagaggaactagctggctatgaggctgaggatgaggctgggatgcaagggccagggcccagagacggttccccactcctcggaggctgcagcgacagttcaggaagtcttcgagaggaggagggggaggatgaagagcccctgcccccgctgagggccccagcaggcacggagcctgagcccatcgccatgctggtcctgaggggctcgtcctcgaggggtcctgatgctgggtgcctgacagaagagctcggggagcccgctgcaaccgagaggcctgcccagccgggagctgccaaccccctggtggtgggagccgtggccctcctggacctcagcctggcattcctgttctcccagctcctcacctgaggctacttcctggcctggttctggctttggttgcgtgcctcttcacccctttgacctgccttttttctcttctcctcttcctggctgtgttttctcctatctttctttctcttcttcctttcttttctgtgctcctttgtttttttctctcgctttttctttccctgtcttctttcagattatctcatttcttctggatctgtctctgtattcctcact

SEQ ID NO: 144847 - DNA, 3489 bp, Homo sapiens
  Payload ID: 8628
  Gene Symbol: JPH4
  Gene Name: junctophilin 4
  ENST ID: ENST00000622501
  CDS Start-End: 1-1890
atgcatgtcccccgggggaagttcgactttgacgacgggggctgctacgtggggggctgggaggcggggcgggcacatggctacggcgtgtgcacgggccccggcgcccagggcgagtacagcggctgctgggcacacggcttcgagtcactgggcgtcttcacggggcccggcggacacagctaccagggccactggcagcagggcaagcgcgaagggctgggcgtggagcgcaagagccgctggacgtaccgcggcgagtggctgggcgggctgaaggggcgcagcggcgtgtgggaaagcgtgtccggcctgcgctacgccgggctctggaaggacggtttccaggacggctacggcactgagacctactccgacggaggcacctaccagggccagtggcaggccgggaagcgccacggctacggggtacgccagagtgtgccctaccatcaggcggcgctgctgcgctcgccccgccgcacctccctggattccggccacagcgaccccccgacgccacccccgcccctgcccttgccgggcgacgagggaggcagccccgcctcgggctcccggggcggcttcgtgctggccgggcccggggacgccgacggcgcgtcgtcccgaaagcgcactccggcggccggcggattctttcgccgttcgctgctgctcagcgggctccgagcgggcggacgtcgcagctccctgggcagcaagcgaggctccctgcgcagcgaggtgagcagcgaggtgggcagcaccggaccgcccggctcggaggccagcgggcccccggccgcagcgccgcccgccctcatcgagggctcggccacagaggtgtacgcgggcgagtggcgcgcagatcggcgcagcggcttcggcgtcagccagcgctccaacgggctgcgctacgagggcgagtggctgggcaaccggcggcacggctacgggcgcaccacccgccccgacggctcccgcgaggagggcaagtacaagcgcaaccggctggtgcacggcgggcgcgtccgcagtctcctgcctctggcccttcggcggggcaaggttaaggagaaggtggacagggctgtcgagggcgcccgtcgagccgtgagtgctgcccgtcagcgccaggagatcgccgctgccagggcagcagacgccctcctaaaggcagtggcagccagcagtgtcgctgagaaggccgtggaggcagctcgaatggccaaactgatagcccaggacctgcagcccatgctagaggccccaggccgcagacccaggcaggactcagaaggttccgacacggagcccctggatgaggacagccctggggtatatgagaacggactgaccccctcagagggatcccctgaactgcccagcagtcctgcctcctcccgccaaccctggcgaccccctgcctgccggagcccactgcctcctggaggggaccagggtcccttctccagccccaaagcttggcctgaggagtgggggggggcaggcgcacaggcagaggaactagctggctatgaggctgaggatgaggctgggatgcaagggccagggcccagagacggttccccactcctcggaggctgcagcgacagttcaggaagtcttcgagaggaggagggggaggatgaagagcccctgcccccgctgagggccccagcaggcacggagcctgagcccatcgccatgctggtcctgaggggctcgtcctcgaggggtcctgatgctgggtgcctgacagaagagctcggggagcccgctgcaaccgagaggcctgcccagccgggagctgccaaccccctggtggtgggagccgtggccctcctggacctcagcctggcattcctgttctcccagctcctcacctgaggctacttcctggcctggttctggctttggttgcgtgcctcttcacccctttgacctgccttttttctcttctcctcttcctggctgtgttttctcctatctttctttctcttcttcctttcttttctgtgctcctttgtttttttctctcgctttttctttccctgtcttctttcagattatctcatttcttctggatctgtctctgtattcctcactcccttccccatcccaaccccttctttctctagattgtttacatatgaagggcttttctctctcagagttgctgtcttctctgagacacacaaatctaagtcagaccattgctccacgccctcccaccttttctttagacctcaacttcgctgcgggtgggggtttggtgtcctaaggagactcctggaagctgaatggagaggaggaagaaaatgaagaaggagtgattgaatgtcgggcaaggcactggctgagctgctgtggctccctagcctaaggggcctgctgtccctctgaggcctagtgaaaaagctgcaggaggtgcatcctccacctctaatcttggaggctattatcttacctccaagcactgagctgggttactgcccaattccatccttccctgaaggagagaagggaagtgaaaagtagagtaactccccagcatttccctctttttctcctcatcggccagcccctcctccagccccctctggtggcatgccatgccaagagcaacgtgtaaaggaacagagaatatccaatgcagtcaagtccaccctgcccagactttgccactgacttctcccacccttctgtctcccccataatagtttatttggttggtctggactcacttgtggcctttgattaaattcctaaggggcctgaagaagacatttctactgcagagggttagaggcacttgagcaaggcccccacatcccaactctgggagttgtggtgggaggaggcacttctgggggataggaccagacaagataacaggagctcacatggaagcagaagctgtgacaagtttagtagtcccaaaatgggttatatcccttccccctttacatcagaatcttgtgaaatgggaaaacaacagaaggaggggatcaaagatagctgatctcacatgcttcccaggcagggcagaggtgggagtcaaacccgggtgacaggtgggtggagagccctgtttgaggttgtggctgatccctctctggtattagtttttcccctgggagcaggaagccctaggaagaggggactgcagggtccccaggggatctttcctccctcccctgcatgaggcagaggcaagctgcctgccaaccccctccctcaaggaatggccttgcccaggaatgcccaccacacataccctcttctttttttctagtcaaactcttgtttattccttggcttgcctccctccttcctcccctctcaacctttacttctgatttctatttcatggaatttgggattgaagttaaactacaacagtgccgccaacaccaagtcttgcaggaaaaaaatacaaagaaatttaacaaaaaaaatatattaataaaaaagttcaaaaaaggg

SEQ ID NO: 144848 - DNA, 3109 bp, Homo sapiens
  Payload ID: 8629
  Gene Symbol: KAT2A
  Gene Name: K(lysine) acetyltransferase 2A
  Uniprot ID: Q92830
  ENST ID: ENST00000225916
  CDS Start-End: 55-2568
ccatgcggccctagggctgggagcgcggcgccgctctccgctgcgggggaggccatggcggaaccttcccaggccccgaccccggccccggctgcgcagccccggccccttcagtccccagcccctgccccaactccgactcctgcacccagcccggcttcagccccgattccgactcccaccccggcaccagcccctgccccagctgcagccccagccggcagcacagggactggggggcccggggtaggaagtgggggggccgggagcgggggggatccggctcgacctggcctgagccagcagcagcgcgccagtcagaggaaggcgcaagtccgggggctgccgcgcgccaagaagcttgagaagctaggggtcttctcggcttgcaaggccaatgaaacctgtaagtgtaatggctggaaaaaccccaagccccccactgcaccccgcatggatctgcagcagccagctgccaacctgagtgagctgtgccgcagttgtgagcaccccttggctgaccacgtatcccacttggagaatgtgtcagaggatgagataaaccgactgctggggatggtggtggatgtggagaatctcttcatgtctgttcacaaggaagaggacacagacaccaagcaggtctatttctacctcttcaagctactgcggaaatgcatcctgcagatgacccggcctgtggtggaggggtccctgggcagccctccatttgagaaacctaatattgagcagggtgtgctgaactttgtgcagtacaagtttagtcacctggctccccgggagcggcagacgatgttcgagctctcaaagatgttcttgctctgccttaactactggaagcttgagacacctgcccagtttcggcagaggtctcaggctgaggacgtggctacctacaaggtcaattacaccagatggctctgttactgccacgtgccccagagctgtgatagcctcccccgctacgaaaccactcatgtctttgggcgaagccttctccggtccattttcaccgttacccgccggcagctgctggaaaagttccgagtggagaaggacaaattggtgcccgagaagaggaccctcatcctcactcacttccccaaattcctgtccatgctggaggaggagatctatggggcaaactctccaatctgggagtcaggcttcaccatgccaccctcagaggggacacagctggttccccggccagcttcagtcagtgcagcggttgttcccagcacccccatcttcagccccagcatgggtgggggcagcaacagctccctgagtctggattctgcaggggccgagcctatgccaggcgagaagaggacgctcccagagaacctgaccctggaggatgccaagcggctccgtgtgatgggtgacatccccatggagctggtcaatgaggtcatgctgaccatcactgaccctgctgccatgctggggcctgagacgagcctgctttcggccaatgcggcccgggatgagacagcccgcctggaggagcgccgcggcatcatcgagttccatgtcatcggcaactcactgacgcccaaggccaaccggcgggtgttgctgtggctcgtggggctgcagaatgtcttttcccaccagctgccgcgcatgcctaaggagtatatcgcccgcctcgtctttgacccgaagcacaagactctggccttgatcaaggatgggcgggtcatcggtggcatctgcttccgcatgtttcccacccagggcttcacggagattgtcttctgtgctgtcacctcgaatgagcaggtcaagggttatgggacccacctgatgaaccacctgaaggagtatcacatcaagcacaacattctctacttcctcacctacgccgacgagtacgccatcggctacttcaaaaagcagggtttctccaaggacatcaaggtgcccaagagccgctacctgggctacatcaaggactacgagggagcgacgctgatggagtgtgagctgaatccccgcatcccctacacggagctgtcccacatcatcaagaagcagaaagagatcatcaagaagctgattgagcgcaaacaggcccagatccgcaaggtctacccggggctcagctgcttcaaggagggcgtgaggcagatccctgtggagagcgttcctggcattcgagagacaggctggaagccattggggaaggagaaggggaaggagctgaaggaccccgaccagctctacacaaccctcaaaaacctgctggcccaaatcaagtctcaccccagtgcctggcccttcatggagcctgtgaagaagtcggaggcccctgactactacgaggtcatccgcttccccattgacctgaagaccatgactgagcggctgcgaagccgctactacgtgacccggaagctctttgtggccgacctgcagcgggtcatcgccaactgtcgcgagtacaaccccccggacagcgagtactgccgctgtgccagcgccctggagaagttcttctacttcaagctcaaggagggaggcctcattgacaagtaggcccatctttgggccgcagccctgacctggaatgtctccacctcggattctgatctgatccttagggggtgccctggccccacggacccgactcagcttgagacactccagccaagggtcctccggacccgatcctgcagctctttctggaccttcaggcacccccaagcgtgcagctctgtcccagccttcactgtgtgtgagaggtctcctgggttggggcccagcccctctagagtagctggtggccagggatgaaccttgcccagccgtggtggcccccaggcctggtccccaagagctttggaggcttggattcctgggcctggcccaggtggctgtttccctgaggaccagaactgctcattttagcttgagtgatggcttcaggggttggaagttcagcccaaactgaagggggccatgccttgtccagcactgttctgtcagtctcccccaggggtggggggtatggggaccattcattccctggcattaatcccttagagggaataataaagctttttatttctctgtgtga

SEQ ID NO: 144849 - DNA, 404 bp, Homo sapiens
  Payload ID: 8629
  Gene Symbol: KAT2A
  Gene Name: K(lysine) acetyltransferase 2A
  ENST ID: ENST00000588759
  CDS Start-End: 1-213
ggttatgggacccacctgatgaaccacctgaaggagtatcacatcaagcacaacattctctacttcctcacctacgccgacgagtacgccatcggctacttcaaaaagcagggtttctccaaggacatcaaggtgcccaagagccgctacctgggctacatcaaggactacgagggagcgacgctgatggagtatcatcaagaagctgattgagcgcaaacaggcccagatccgcaaggtctacccggggctcagctgcttcaaggagggcgtgaggcagatccctgtggagagcgttcctggcattcgagagacaggctggaagccattggggaaggagaaggggaaggagctgaaggaccccgaccagctctacacaaccctcaaaaacctgctggcccaaa

SEQ ID NO: 144850 - DNA, 2990 bp, Homo sapiens
  Payload ID: 8629
  Gene Symbol: KAT2A
  Gene Name: K(lysine) acetyltransferase 2A
  ENST ID: ENST00000465682
  CDS Start-End: 1-831
cagcagcagcgcgccagtcagaggaaggcgcaagtccgggggctgccgcgcgccaagaagcttgagaagctaggggtcttctcggcttgcaaggccaatgaaacctgtaagtgtaatggctggaaaaaccccaagccccccactgcaccccgcatggatctgcagcagccagctgccaacctgagtgagctgtgccgcagttgtgagcaccccttggctgaccacgtatcccacttggagaatgtgtcagaggatgagataaaccgactgctggggatggtggtggatgtggagaatctcttcatgtctgttcacaaggaagaggacacagacaccaagcaggtctatttctacctcttcaagctactgcggaaatgcatcctgcagatgacccggcctgtggtggaggggtccctgggcagccctccatttgagaaacctaatattgagcagggtgtgctgaactttgtgcagtacaagtttagtcacctggctccccgggagcggcagacgatgttcgagctctcaaagatgttcttgctctgccttaactactggaagcttgagacacctgcccagtttcggcagaggtctcaggctgaggacgtggctacctacaaggtcaattacaccagatggctctgttactgccacgtgccccagagctgtgatagcctcccccgctacgaaaccactcatgtctttgggcgaagccttctccggtccattttcaccgttacccgccggcagctgctggaaaagttccgagtggagaaggacaaattggtgcccgagaagaggaccctcatcctcactcacttccccaagtaaggctccttctggcctaccaggatttggccccaagttcacatcctccctgttgtccccttttttccaggaaggcttcctggattggtccctcctctccctccatgggccttttgggatctgggcgtctacctggcagacttgcccatggcccagaagcaacttgctagtactagtctggggatggcagattcctgtccatgctggaggaggagatctatggggcaaactctccaatctgggagtcaggcttcaccatgccaccctcagaggggacacagctggttccccggccagcttcagtcagtgcagcggttgttcccagcacccccatcttcagccccagcatgggtgggggcagcaacagctccctgagtctggattctgcaggggccgagcctatgccaggcgagaagaggacgctcccagagaacctgaccctggaggatgccaagcggctccgtgtgatgggtgacatccccatggagctggtcaatgaggtcatgctgaccatcactgaccctgctgccatgctggggcctgagacgagcctgctttcggccaatgcggcccgggatgagacagcccgcctggaggagcgccgcggcatcatcgagttccatgtcatcggcaactcactgacgcccaaggccaaccggcgggtgttgctgtggctcgtggggctgcagaatgtcttttcccaccagctgccgcgcatgcctaaggagtatatcgcccgcctcgtctttgacccgaagcacaagactctggccttgatcaaggatgggcgggtcatcggtggcatctgcttccgcatgtttcccacccagggcttcacggagattgtcttctgtgctgtcacctcgaatgagcaggtcaagggttatgggacccacctgatgaaccacctgaaggagtatcacatcaagcacaacattctctacttcctcacctacgccgacgagtacgccatcggctacttcaaaaagcagggtttctccaaggacatcaaggtgcccaagagccgctacctgggctacatcaaggactacgagggagcgacgctgatggagtgtgagctgaatccccgcatcccctacacggagctgtcccacatcatcaagaagcagaaagagatcatcaagaagctgattgagcgcaaacaggcccagatccgcaaggtctacccggggctcagctgcttcaaggagggcgtgaggcagatccctgtggagagcgttcctggcattcgagagacaggctggaagccattggggaaggagaaggggaaggagctgaaggaccccgaccagctctacacaaccctcaaaaacctgctggcccaaatcaagtctcaccccagtgcctggcccttcatggagcctgtgaagaagtcggaggcccctgactactacgaggtcatccgcttccccattgacctgaagaccatgactgagcggctgcgaagccgctactacgtgacccggaagctctttgtggccgacctgcagcgggtcatcgccaactgtcgcgagtacaaccccccggacagcgagtactgccgctgtgccagcgccctggagaagttcttctacttcaagctcaaggagggaggcctcattgacaagtaggcccatctttgggccgcagccctgacctggaatgtctccacctcggattctgatctgatccttagggggtgccctggccccacggacccgactcagcttgagacactccagccaagggtcctccggacccgatcctgcagctctttctggaccttcaggcacccccaagcgtgcagctctgtcccagccttcactgtgtgtgagaggtctcctgggttggggcccagcccctctagagtagctggtggccagggatgaaccttgcccagccgtggtggcccccaggcctggtccccaagagctttggaggcttggattcctgggcctggcccaggtggctgtttccctgaggaccagaactgctcattttagcttgagtgatggcttcaggggttggaagttcagcccaaactgaagggggccatgccttgtccagcactgttctgtcagtctcccccaggggtggggggtatggggaccattcattccctggcattaatcccttagagggaataataaagctttttattt

SEQ ID NO: 144851 - DNA, 4833 bp, Homo sapiens
  Payload ID: 8630
  Gene Symbol: KAT2B
  Gene Name: K(lysine) acetyltransferase 2B
  Uniprot ID: Q92831
  ENST ID: ENST00000263754
  CDS Start-End: 456-2954
ccgcgggcagcggaaaagaggccgtggggggcctcccagcgctggcagacaccgtgaggctggcagccgccggcacgcacacctagtccgcagtcccgaggaacatgtccgcagccagggcgcggagcagagtcccgggcaggagaaccaagggagggcgtgtgctgtggcggcggcggcagcggcagcggagccgctagtcccctccctcctgggggagcagctgccgccgctgccgccgccgccaccaccatcagcgcgcggggcccggccagagcgagccgggcgagcggcgcgctagggggagggcgggggcggggaggggggtgggcgaagggggcgggagggcgtggggggagggtctcgctctcccgactaccagagcccgagagggagaccctggcggcggcggcggcgcctgacactcggcgcctcctgccgtgctccggggcggcatgtccgaggctggcggggccgggccgggcggctgcggggcaggagccggggcaggggccgggcccggggcgctgcccccgcagcctgcggcgcttccgcccgcgcccccgcagggctccccctgcgccgctgccgccgggggctcgggcgcctgcggtccggcgacggcagtggctgcagcgggcacggccgaaggaccgggaggcggtggctcggcccgaatcgccgtgaagaaagcgcaactacgctccgctccgcgggccaagaaactggagaaactcggagtgtactccgcctgcaaggccgaggagtcttgtaaatgtaatggctggaaaaaccctaacccctcacccactccccccagagccgacctgcagcaaataattgtcagtctaacagaatcctgtcggagttgtagccatgccctagctgctcatgtttcccacctggagaatgtgtcagaggaagaaatgaacagactcctgggaatagtattggatgtggaatatctctttacctgtgtccacaaggaagaagatgcagataccaaacaagtttatttctatctatttaagctcttgagaaagtctattttacaaagaggaaaacctgtggttgaaggctctttggaaaagaaacccccatttgaaaaacctagcattgaacagggtgtgaataactttgtgcagtacaaatttagtcacctgccagcaaaagaaaggcaaacaatagttgagttggcaaaaatgttcctaaaccgcatcaactattggcatctggaggcaccatctcaacgaagactgcgatctcccaatgatgatatttctggatacaaagagaactacacaaggtggctgtgttactgcaacgtgccacagttctgcgacagtctacctcggtacgaaaccacacaggtgtttgggagaacattgcttcgctcggtcttcactgttatgaggcgacaactcctggaacaagcaagacaggaaaaagataaactgcctcttgaaaaacgaactctaatcctcactcatttcccaaaatttctgtccatgctagaagaagaagtatatagtcaaaactctcccatctgggatcaggattttctctcagcctcttccagaaccagccagctaggcatccaaacagttatcaatccacctcctgtggctgggacaatttcatacaattcaacctcatcttcccttgagcagccaaacgcagggagcagcagtcctgcctgcaaagcctcttctggacttgaggcaaacccaggagaaaagaggaaaatgactgattctcatgttctggaggaggccaagaaaccccgagttatgggggatattccgatggaattaatcaacgaggttatgtctaccatcacggaccctgcagcaatgcttggaccagagaccaattttctgtcagcacactcggccagggatgaggcggcaaggttggaagagcgcaggggtgtaattgaatttcacgtggttggcaattccctcaaccagaaaccaaacaagaagatcctgatgtggctggttggcctacagaacgttttctcccaccagctgccccgaatgccaaaagaatacatcacacggctcgtctttgacccgaaacacaaaacccttgctttaattaaagatggccgtgttattggtggtatctgtttccgtatgttcccatctcaaggattcacagagattgtcttctgtgctgtaacctcaaatgagcaagtcaagggctatggaacacacctgatgaatcatttgaaagaatatcacataaagcatgacatcctgaacttcctcacatatgcagatgaatatgcaattggatactttaagaaacagggtttctccaaagaaattaaaatacctaaaaccaaatatgttggctatatcaaggattatgaaggagccactttaatgggatgtgagctaaatccacggatcccgtacacagaattttctgtcatcattaaaaagcagaaggagataattaaaaaactgattgaaagaaaacaggcacaaattcgaaaagtttaccctggactttcatgttttaaagatggagttcgacagattcctatagaaagcattcctggaattagagagacaggctggaaaccgagtggaaaagagaaaagtaaagagcccagagaccctgaccagctttacagcacgctcaagagcatcctccagcaggtgaagagccatcaaagcgcttggcccttcatggaacctgtgaagagaacagaagctccaggatattatgaagttataaggttccccatggatctgaaaaccatgagtgaacgcctcaagaataggtactacgtgtctaagaaattattcatggcagacttacagcgagtctttaccaattgcaaagagtacaacccccctgagagtgaatactacaaatgtgccaatatcctggagaaattcttcttcagtaaaattaaggaagctggattaattgacaagtgattttttttcccctctgcttcttagaaactcaccaagcagtgtgcctaaagcaaggtggtttagttttttacaaagaattggacatgatgtattgaagagacttgtaaatgtaataattagcacttttgaaaaaacaaaaaacctccttttagcttttcagatatgtatttaaattgaagtcataggacatttttattttatggaatagattttaatctatttactactattaaggtaaattttctatggcatgtccattagctatttcatgatagatgattaggggtttcctcaaaacctgtgtgtgaggaaattgcacacagtagcaaaatttggggaaatccataacattttcagaccatgaatgaatgtttccatttttttctaatggaatgtgagagtttacttttattttattctgaaggactttaaggaagggatacatgattttaaaaaagcctgtaagaggtgaaatatgtgatgtttgaagtctctttatagactttttatatatattttttaaaacactcatctagatgaggtgctttgagcagttctgaaaaatgcagttccaggaaagcaactgctttggttcctaaggaagaaattctaaataatgcaaacttttaaaataagcatctaggtttttgataattctgtctacttacaacaaacttgttagtacataaccactattttaataattattttctctacacaaatgtgtaatatcatatttgactttgcttatgcaggccataagttccaaaagataatttccctgcccacaaaggcataaacttgaaaacacatgagattgaatcaacatgctttaataggaaaagatgtatggtctatatatgtatcaatctggtgaatcctcgttctaataaaggttctttttcttttctatgatacacacagccacgctgataatatgcaaatgaacattttcctttatgtctctccagataatgtttattgtctgaggtaaattaaattcccaccagggtttgctgtcagtattttaacacccacattagtatatgcgtccagggtcataaccccctaaaatccatcatgcaaccttattaatctgtcttgggattccagtttagtgcttggatttatttcctgattacactacatagaaaagtgagacatctgccattcccaactctgggaaaaccaactaatatacaaccatataaatgaaggccatcttgatggtctcaacactaatttttatgatgcaaatttatacactgatttttgtaaaggacaaagttttaaaagcgtatttaacttgatgttttctatcagcataaataaaatggtcatgaatagtcattaaaaacagttgccagtgataatctgcatgaaggaaaaagaaccctgcaaatggctattgagttggaagtattgtttttgatatgtaagagatattcagaatgctcacactgaaaatgcctcaactttttaaagtgtaagaaaccaccatgagtggtgtctagatttctaatgaagaatcatgatacagtttggattaagtatcttggactggttttaaacagtgctttgtaccggatctgctgaagcatctgtccagctggtatcctgtgaaagtttgttattttctgagtagacattcttatagagtattgtctttaaaatcagattgtctcttctatattgaaagcatttttatgttttctaatttaaaaattaatattttcttatagatattgtgcaataaagctgaagtagaatgtgtggtttttgcaaatgctttaacagctgataaaaattttacatttgtaaaattaatatattgtactggtacaaaatagttttaaattatattttaaaaagcttccaa

SEQ ID NO: 144852 - DNA, 2296 bp, Homo sapiens
  Payload ID: 8631
  Gene Symbol: KAT5
  Gene Name: K(lysine) acetyltransferase 5
  Uniprot ID: Q92993
  ENST ID: ENST00000341318
  CDS Start-End: 235-1875
agaccgccactggctgtgcacgttatggggtttccacctagggctcggcctgaggcttgtaacactccgttttcccccgagtcacaggggcagtcttgcccctcgcagctgggtcgcggtgtctctcaaaggtccccctctacaggggcttcgtgaggcccgggcccacagggcgctcggtcccggaagtgacgtctcccagaggggccggaagtggcagtggagggagggaagatggcggaggtggtgagtccggtgcccggggcggggcggagggagccaggggaggtgggtagagcccgaggccccccagtagccgaccctggcgtcgcgctgtctccccagggggagataatcgagggctgccgcctacccgtgctgcggcggaaccaggacaacgaagatgagtggcccctggccgagatcctgagcgtgaaggacatcagtggccggaagcttttctacgtccattacattgacttcaacaaacgtctggatgaatgggtgacgcatgagcggctggacctaaagaagatccagttccccaagaaagaggccaagacccccactaagaacggacttcctgggtcccgtcctggctctccagagagagaggtgccggcctcggcgcaggccagcgggaagaccttgccaatcccggtccagatcacactccgcttcaacctgcccaaggagcgggaggccattcccggtggcgagcctgaccagccgctctcctccagctcctgcctgcagcccaaccaccgctcaacgaaacggaaggtggaggtggtttcaccagcaactccagtgcccagcgagacagccccggcctcggtttttccccagaatggagccgcccgtagggcagtggcagcccagccaggacggaagcgaaaatcgaattgtttgggcactgatgaggactcccaggacagctctgatggaataccgtcagcaccacgcatgactggcagcctggtgtctgatcgaagccacgacgacatcgtcacccggatgaagaacattgagtgcattgagctgggccggcaccgcctcaagccgtggtacttctccccgtacccacaggaactcaccacattgcctgtcctctacctgtgcgagttctgcctcaagtacggccgtagtctcaagtgtcttcagcgtcatttgaccaagtgtgacctacgacatcctccaggcaatgagatttaccgcaagggcaccatctccttctttgagattgatggacgtaagaacaagagttattcccagaacctgtgtcttttggccaagtgtttccttgaccataagacactgtactatgacacagaccctttcctcttctacgtcatgacagagtatgactgtaagggcttccacatcgtgggctacttctccaaggagaaagaatcaacggaagactacaatgtggcctgcatcctaaccctgcctccctaccagcgccggggctacggcaagctgctgatcgagttcagctatgaactctccaaagtggaagggaaaacagggacccctgagaagcccctctcagaccttggcctcctatcctatcgaagctactggtcccagaccatcctggagatcctgatggggctgaagtcggagagcggggagaggccacagatcaccatcaatgagattagtgaaatcaccagcatcaagaaggaggatgtcatctccactctgcagtacctcaatctcatcaactactacaagggccagtacatcctcacactgtcagaggacatcgtggatggccatgagcgggccatgctcaagcggctcctgcggatcgactccaagtgtctgcacttcactcccaaggactggagcaagagggggaagtggtgaccagacactgcccactgcagtgccaagacggcagcaggactggggctgatagcccaccccgcccccactgcagctcccacaaagcactctaagggagatggggctgaggacagctcaaaaaggagaggacaggcctggcaggggcccactggtgcccagcaccaaggcgagctccgggctcagaccaactccaaggtcagctggccacaggcccaggcctcctctgaagcagggaccagagggagccaggcagctgtgtacagtgagaagggatccggatgggggagctctgtacagagggctggtgattgtaaaaatttcttttgtaaagtagaagttgggggtggggtgggtgctggctgcaaaaatttctggcttctcttacccctattgcccccggcaataaattgtttctatatgc

SEQ ID NO: 144853 - DNA, 2059 bp, Homo sapiens
  Payload ID: 8631
  Gene Symbol: KAT5
  Gene Name: K(lysine) acetyltransferase 5
  Uniprot ID: Q92993
  ENST ID: ENST00000352980
  CDS Start-End: 251-1636
acgtgacggactcagtagaccgccactggctgtgcacgttatggggtttccacctagggctcggcctgaggcttgtaacactccgttttcccccgagtcacaggggcagtcttgcccctcgcagctgggtcgcggtgtctctcaaaggtccccctctacaggggcttcgtgaggcccgggcccacagggcgctcggtcccggaagtgacgtctcccagaggggccggaagtggcagtggagggagggaagatggcggaggtgggggagataatcgagggctgccgcctacccgtgctgcggcggaaccaggacaacgaagatgagtggcccctggccgagatcctgagcgtgaaggacatcagtggccggaagcttttctacgtccattacattgacttcaacaaacgtctggatgaatgggtgacgcatgagcggctggacctaaagaagatccagttccccaagaaagaggccaagacccccactaagaacggacttcctgggtcccgtcctggctctccagagagagaggtgaaacggaaggtggaggtggtttcaccagcaactccagtgcccagcgagacagccccggcctcggtttttccccagaatggagccgcccgtagggcagtggcagcccagccaggacggaagcgaaaatcgaattgtttgggcactgatgaggactcccaggacagctctgatggaataccgtcagcaccacgcatgactggcagcctggtgtctgatcgaagccacgacgacatcgtcacccggatgaagaacattgagtgcattgagctgggccggcaccgcctcaagccgtggtacttctccccgtacccacaggaactcaccacattgcctgtcctctacctgtgcgagttctgcctcaagtacggccgtagtctcaagtgtcttcagcgtcatttgaccaagtgtgacctacgacatcctccaggcaatgagatttaccgcaagggcaccatctccttctttgagattgatggacgtaagaacaagagttattcccagaacctgtgtcttttggccaagtgtttccttgaccataagacactgtactatgacacagaccctttcctcttctacgtcatgacagagtatgactgtaagggcttccacatcgtgggctacttctccaaggagaaagaatcaacggaagactacaatgtggcctgcatcctaaccctgcctccctaccagcgccggggctacggcaagctgctgatcgagttcagctatgaactctccaaagtggaagggaaaacagggacccctgagaagcccctctcagaccttggcctcctatcctatcgaagctactggtcccagaccatcctggagatcctgatggggctgaagtcggagagcggggagaggccacagatcaccatcaatgagattagtgaaatcaccagcatcaagaaggaggatgtcatctccactctgcagtacctcaatctcatcaactactacaagggccagtacatcctcacactgtcagaggacatcgtggatggccatgagcgggccatgctcaagcggctcctgcggatcgactccaagtgtctgcacttcactcccaaggactggagcaagagggggaagtggtgaccagacactgcccactgcagtgccaagacggcagcaggactggggctgatagcccaccccgcccccactgcagctcccacaaagcactctaagggagatggggctgaggacagctcaaaaaggagaggacaggcctggcaggggcccactggtgcccagcaccaaggcgagctccgggctcagaccaactccaaggtcagctggccacaggcccaggcctcctctgaagcagggaccagagggagccaggcagctgtgtacagtgagaagggatccggatgggggagctctgtacagagggctggtgattgtaaaaatttcttttgtaaagtagaagttgggggtggggtgggtgctggctgcaaaaatttctggcttctcttacccctattgcccccggcaataaattgtttctatatgcca

SEQ ID NO: 144854 - DNA, 2237 bp, Homo sapiens
  Payload ID: 8631
  Gene Symbol: KAT5
  Gene Name: K(lysine) acetyltransferase 5
  Uniprot ID: Q92993
  ENST ID: ENST00000377046
  CDS Start-End: 273-1814
agcttcgcacccggtgggcgtcacgtgacggactcagtagaccgccactggctgtgcacgttatggggtttccacctagggctcggcctgaggcttgtaacactccgttttcccccgagtcacaggggcagtcttgcccctcgcagctgggtcgcggtgtctctcaaaggtccccctctacaggggcttcgtgaggcccgggcccacagggcgctcggtcccggaagtgacgtctcccagaggggccggaagtggcagtggagggagggaagatggcggaggtgggggagataatcgagggctgccgcctacccgtgctgcggcggaaccaggacaacgaagatgagtggcccctggccgagatcctgagcgtgaaggacatcagtggccggaagcttttctacgtccattacattgacttcaacaaacgtctggatgaatgggtgacgcatgagcggctggacctaaagaagatccagttccccaagaaagaggccaagacccccactaagaacggacttcctgggtcccgtcctggctctccagagagagaggtgccggcctcggcgcaggccagcgggaagaccttgccaatcccggtccagatcacactccgcttcaacctgcccaaggagcgggaggccattcccggtggcgagcctgaccagccgctctcctccagctcctgcctgcagcccaaccaccgctcaacgaaacggaaggtggaggtggtttcaccagcaactccagtgcccagcgagacagccccggcctcggtttttccccagaatggagccgcccgtagggcagtggcagcccagccaggacggaagcgaaaatcgaattgtttgggcactgatgaggactcccaggacagctctgatggaataccgtcagcaccacgcatgactggcagcctggtgtctgatcgaagccacgacgacatcgtcacccggatgaagaacattgagtgcattgagctgggccggcaccgcctcaagccgtggtacttctccccgtacccacaggaactcaccacattgcctgtcctctacctgtgcgagttctgcctcaagtacggccgtagtctcaagtgtcttcagcgtcatttgaccaagtgtgacctacgacatcctccaggcaatgagatttaccgcaagggcaccatctccttctttgagattgatggacgtaagaacaagagttattcccagaacctgtgtcttttggccaagtgtttccttgaccataagacactgtactatgacacagaccctttcctcttctacgtcatgacagagtatgactgtaagggcttccacatcgtgggctacttctccaaggagaaagaatcaacggaagactacaatgtggcctgcatcctaaccctgcctccctaccagcgccggggctacggcaagctgctgatcgagttcagctatgaactctccaaagtggaagggaaaacagggacccctgagaagcccctctcagaccttggcctcctatcctatcgaagctactggtcccagaccatcctggagatcctgatggggctgaagtcggagagcggggagaggccacagatcaccatcaatgagattagtgaaatcaccagcatcaagaaggaggatgtcatctccactctgcagtacctcaatctcatcaactactacaagggccagtacatcctcacactgtcagaggacatcgtggatggccatgagcgggccatgctcaagcggctcctgcggatcgactccaagtgtctgcacttcactcccaaggactggagcaagagggggaagtggtgaccagacactgcccactgcagtgccaagacggcagcaggactggggctgatagcccaccccgcccccactgcagctcccacaaagcactctaagggagatggggctgaggacagctcaaaaaggagaggacaggcctggcaggggcccactggtgcccagcaccaaggcgagctccgggctcagaccaactccaaggtcagctggccacaggcccaggcctcctctgaagcagggaccagagggagccaggcagctgtgtacagtgagaagggatccggatgggggagctctgtacagagggctggtgattgtaaaaatttcttttgtaaagtagaagttgggggtggggtgggtgctggctgcaaaaatttctggcttctcttacccctattgcccccggcaataaattgtttctatatgcca

SEQ ID NO: 144855 - DNA, 1875 bp, Homo sapiens
  Payload ID: 8631
  Gene Symbol: KAT5
  Gene Name: K(lysine) acetyltransferase 5
  ENST ID: ENST00000534650
  CDS Start-End: 545-1453
gggtggcacttgtgactgaaggaggcttaggagagacctaagtgctggagcttagggatccggcctgggggtggagttcaggtcgtggaagggtggagtctcatagcctggcctgtctaaggcccctgtctatgctattctcatagccctggccgagatcctgagcgtgaaggacatcagtggccggaagcttttctacgtccattacattgacttcaacaaacgtctggatgaatgggtgacgcatgagcggctggacctaaagaagatccagttccccaagaaagaggccaagacccccactaagaacggacttcctgggtcccgtcctggctctccagagagagaggtgaaacggaaggtggaggtggtttcaccagcaactccagtgcccagcgagacagccccggcctcggtttttccccagaatggagccgcccgtagggcagtggcagcccagccaggacggaagcgaaaatcgaattgtttgggcactgatgaggactcccaggacagctctgatggaataccgtcagcaccacgcatgactggcagcctggtgtctgatcgaagccacgacgacatcgtcacccggatgaagaacattgagtgcattgagctgggccggcaccgcctcaagccgtggtacttctccccgtacccacaggaactcaccacattgcctgtcctctacctgtgcgagttctgcctcaagtacggccgtagtctcaagtgtcttcagcgtcatttgaccaagtgtgacctacgacatcctccaggcaatgagatttaccgcaagggcaccatctccttctttgagattgatggacgtaagaacaagagttattcccagaacctgtgtcttttggccaagtgtttccttgaccataagacactgtactatgacacagaccctttcctcttctacgtcatgacagagtatgactgtaagggcttccacatcgtgggctacttctccaaggagaaagaatcaacggaagactacaatgtggcctgcatcctaaccctgcctccctaccagcgccggggctacggcaagctgctgatcgagttcagctatgaactctccaaagtggaagggaaaacagggacccctgagaagcccctctcagaccttggcctcctatcctatcgaagctactggtcccagaccatcctggagatcctgatggggctgaagtcggagagcggggagaggccacagatcaccatcaatgagattagtgaaatcaccagcatcaagaaggaggatgtcatctccactctgcagtacctcaatctcatcaactactacaagggccagtacatcctcacactgtcagaggacatcgtggatggccatgagcgggccatgctcaagcggctcctgcggatcgactccaagtgtctgcacttcactcccaaggactggagcaagagggggaagtggtgaccagacactgcccactgcagtgccaagacggcagcaggactggggctgatagcccaccccgcccccactgcagctcccacaaagcactctaagggagatggggctgaggacagctcaaaaaggagaggacaggcctggcaggggcccactggtgcccagcaccaaggcgagctccgggctcagaccaactccaaggtcagctggccacaggcccaggcctcctctgaagcagggaccagagggagccaggcagctgtgtacagtgagaagggatccggatgggggagctctgtacagagggctggtgattgtaaaaatttcttttgtaaagtagaagttgggggtggggtgggtgctggctgcaaaaatttctggcttctcttacccctattgcccccggcaataaattgtttctatatgcc

SEQ ID NO: 144856 - DNA, 1697 bp, Homo sapiens
  Payload ID: 8631
  Gene Symbol: KAT5
  Gene Name: K(lysine) acetyltransferase 5
  Uniprot ID: Q92993
  ENST ID: ENST00000530446
  CDS Start-End: 30-1514
ggccggaagtggcagtggagggagggaagatggcggaggtggtgagtccggtgcccggggcggggcggagggagccaggggaggtgggtagagcccgaggccccccagtagccgaccctggcgtcgcgctgtctccccagggggagataatcgagggctgccgcctacccgtgctgcggcggaaccaggacaacgaagatgagtggcccctggccgagatcctgagcgtgaaggacatcagtggccggaagcttttctacgtccattacattgacttcaacaaacgtctggatgaatgggtgacgcatgagcggctggacctaaagaagatccagttccccaagaaagaggccaagacccccactaagaacggacttcctgggtcccgtcctggctctccagagagagaggtgaaacggaaggtggaggtggtttcaccagcaactccagtgcccagcgagacagccccggcctcggtttttccccagaatggagccgcccgtagggcagtggcagcccagccaggacggaagcgaaaatcgaattgtttgggcactgatgaggactcccaggacagctctgatggaataccgtcagcaccacgcatgactggcagcctggtgtctgatcgaagccacgacgacatcgtcacccggatgaagaacattgagtgcattgagctgggccggcaccgcctcaagccgtggtacttctccccgtacccacaggaactcaccacattgcctgtcctctacctgtgcgagttctgcctcaagtacggccgtagtctcaagtgtcttcagcgtcatttgaccaagtgtgacctacgacatcctccaggcaatgagatttaccgcaagggcaccatctccttctttgagattgatggacgtaagaacaagagttattcccagaacctgtgtcttttggccaagtgtttccttgaccataagacactgtactatgacacagaccctttcctcttctacgtcatgacagagtatgactgtaagggcttccacatcgtgggctacttctccaaggagaaagaatcaacggaagactacaatgtggcctgcatcctaaccctgcctccctaccagcgccggggctacggcaagctgctgatcgagttcagctatgaactctccaaagtggaagggaaaacagggacccctgagaagcccctctcagaccttggcctcctatcctatcgaagctactggtcccagaccatcctggagatcctgatggggctgaagtcggagagcggggagaggccacagatcaccatcaatgagattagtgaaatcaccagcatcaagaaggaggatgtcatctccactctgcagtacctcaatctcatcaactactacaagggccagtacatcctcacactgtcagaggacatcgtggatggccatgagcgggccatgctcaagcggctcctgcggatcgactccaagtgtctgcacttcactcccaaggactggagcaagagggggaagtggtgaccagacactgcccactgcagtgccaagacggcagcaggactggggctgatagcccaccccgcccccactgcagctcccacaaagcactctaagggagatggggctgaggacagctcaaaaaggagaggacaggcctggcaggggcccactggtgcccagcaccaaggcgagctccgggctcag

SEQ ID NO: 144857 - DNA, 583 bp, Homo sapiens
  Payload ID: 8631
  Gene Symbol: KAT5
  Gene Name: K(lysine) acetyltransferase 5
  ENST ID: ENST00000534681
  CDS Start-End: 447-583
ggaagcttttctacgtccattacattgactgtgagttctgggcctgaggtggggcatcagggtagggttgggggacagtctttggcattctgtcctgagccatccccactgctacagtcaacaaacgtctggatgaatgggtgacgcatgagcggctggacctaaagaagatccagttccccaagaaagaggccaagacccccactaagaacggacttcctgggtcccgtcctggctctccagagagagaggtgaaacggaaggtggaggtggtttcaccagcaactccagtgcccagcgagacagccccggcctcggtttttccccagaatggagccgcccgtagggcagtggcagcccagccaggacggaagcgaaaatcgaattgtttgggcactgatgaggactcccaggacagctctgatggaataccgtcagcaccacgcatgactggcagcctggtgtctgatcgaagccacgacgacatcgtcacccggatgaagaacattgagtgcattgagctgggccggcaccgcctcaagccgtggtacttctccccgtacccacaggaactcaccacatt

SEQ ID NO: 144858 - DNA, 709 bp, Homo sapiens
  Payload ID: 8631
  Gene Symbol: KAT5
  Gene Name: K(lysine) acetyltransferase 5
  ENST ID: ENST00000533596
  CDS Start-End: 1-287
gggctgaagtcggagagcggggagaggccacagatcaccatcaagtgagcctggcgctgtctacctggggtgagattagtgaaatcaccagcatcaagaaggaggatgtcatctccactctgcagtacctcaatctcatcaactactacaagggccagtacatcctcacactgtcagaggacatcgtggatggccatgagcgggccatgctcaagcggctcctgcggatcgactccaagtgtctgcacttcactcccaaggactggagcaagagggggaagtggtgaccagacactgcccactgcagtgccaagacggcagcaggactggggctgatagcccaccccgcccccactgcagctcccacaaagcactctaagggagatggggctgaggacagctcaaaaaggagaggacaggcctggcaggggcccactggtgcccagcaccaaggcgagctccgggctcagaccaactccaaggtcagctggccacaggcccaggcctcctctgaagcagggaccagagggagccaggcagctgtgtacagtgagaagggatccggatgggggagctctgtacagagggctggtgattgtaaaaatttcttttgtaaagtagaagttgggggtggggtgggtgctggctgcaaaaatttctggcttctcttacccctattgcccccggcaataaattgtttctatatgcc

SEQ ID NO: 144859 - DNA, 576 bp, Homo sapiens
  Payload ID: 8631
  Gene Symbol: KAT5
  Gene Name: K(lysine) acetyltransferase 5
  ENST ID: ENST00000534104
  CDS Start-End: 529-576
agtggcagtggagggagggaagatggcggaggtgccgaccctggcgtcgcgctgtctccccagggggagataatcgagggctgccgcctacccgtgctgcggcggaaccaggacaacgaagatgagtggcccctggccgagatcctgagcgtgaaggacatcagtggccggaagcttttctacgtccattacattgacttcaacaaacgtctggatgaatgggtgacgcatgagcggctggacctaaagaagatccagttccccaagaaagaggccaagacccccactaagaacggacttcctgggtcccgtcctggctctccagagagagaggtgaaacggaaggtggaggtggtttcaccagcaactccagtgcccagcgagacagccccggcctcggtttttccccagaatggagccgcccgtagggcagtggcagcccagccaggacggaagcgaaaatcgaattgtttgggcactgatgaggactcccaggacagctctgatggaataccgtcagcaccacgcatgactggcagcctggtgtctgatcgaagccacgacgacatcgtcacc

SEQ ID NO: 144860 - DNA, 609 bp, Homo sapiens
  Payload ID: 8631
  Gene Symbol: KAT5
  Gene Name: K(lysine) acetyltransferase 5
  ENST ID: ENST00000528198
  CDS Start-End: 42-609
agtcaactgaaatcccgggatggggaggggcgtctggaattatggggcgggcgaggcgcagatactttgatgaaggggcgtggctcttagctgctccgagagccctggccgagatcctgagcgtgaaggacatcagtggccggaagcttttctacgtccattacattgacttcaacaaacgtctggatgaatgggtgacgcatgagcggctggacctaaagaagatccagttccccaagaaagaggccaagacccccactaagaacggacttcctgggtcccgtcctggctctccagagagagaggtgaaacggaaggtggaggtggtttcaccagcaactccagtgcccagcgagacagccccggcctcggtttttccccagaatggagccgcccgtagggcagtggcagcccagccaggacggaagcgaaaatcgaattgtttgggcactgatgaggactcccaggacagctctgatggaataccgtcagcaccacgcatgactggcagcctggtgtctgatcgaagccacgacgacatcgtcacccggatgaagaacattgagtgcattgagctgggccggcaccgcctcaagccgtggtacttct

SEQ ID NO: 144861 - DNA, 845 bp, Homo sapiens
  Payload ID: 8631
  Gene Symbol: KAT5
  Gene Name: K(lysine) acetyltransferase 5
  ENST ID: ENST00000531880
  CDS Start-End: 38-845
aactgaaatcccgggatggggaggggcgtctggaattatggggcgggcgaggcgcagatactttgatgaaggggcgtggctcttagctgctccgagagccctggccgagatcctgagcgtgaaggacatcagtggccggaagcttttctacgtccattacattgacttcaacaaacgtctggatgaatgggtgacgcatgagcggctggacctaaagaagatccagttccccaagaaagaggccaagacccccactaagaacggacttcctgggtcccgtcctggctctccagagagagaggtgccggcctcggcgcaggccagcgggaagaccttgccaatcccggtccagatcacactccgcttcaacctgcccaaggagcgggaggccattcccggtggcgagcctgaccagccgctctcctccagctcctgcctgcagcccaaccaccgctcaacgaaacggaaggtggaggtggtttcaccagcaactccagtgcccagcgagacagccccggcctcggtttttccccagaatggagccgcccgtagggcagtggcagcccagccaggacggaagcgaaaatcgaattgtttgggcactgatgaggactcccaggacagctctgatggaataccgtcagcaccacgcatgactggcagcctggtgtctgatcgaagccacgacgacatcgtcacccggatgaagaacattgagtgcattgagctgggccggcaccgcctcaagccgtggtacttctccccgtacccacaggaactcaccacattgcctgtcctctacctgtgcgagttctgcctcaagtacggccgtagtctcaagtgtc

SEQ ID NO: 144862 - DNA, 499 bp, Homo sapiens
  Payload ID: 8631
  Gene Symbol: KAT5
  Gene Name: K(lysine) acetyltransferase 5
  ENST ID: ENST00000530605
  CDS Start-End: 1-499
gggggagataatcgagggctgccgcctacccgtgctgcggcggaaccaggacaacgaagatgagtggcccctggccgagatcctgagcgtgaaggacatcagtggccggaagcttttctacgtccattacattgacttcaacaaacgtctggatgaatgggtgacgcatgagcggctggacctaaagaagatccagttccccaagaaagaggccaagacccccactaagaacggacttcctgggtcccgtcctggctctccagagagagagccggcctcggcgcaggccagcgggaagaccttgccaatcccggtccagatcacactccgcttcaacctgcccaaggagcgggaggccattcccggtggcgagcctgaccagccgctctcctccagctcctgcctgcagcccaaccaccgctcaacgaaacggaaggtggaggtggtttcaccagcaactccagtgcccagcgagacagccccggcctcggtttttccc

SEQ ID NO: 144863 - DNA, 9153 bp, Homo sapiens
  Payload ID: 8632
  Gene Symbol: KAT6A
  Gene Name: K(lysine) acetyltransferase 6A
  Uniprot ID: Q92794
  ENST ID: ENST00000265713
  CDS Start-End: 413-6427
actgtctccaagatggcggccgtgtcagtttggggcatctccgcggtccggcccggggccccgggatctcggctgtccttcctcccggcataagatgcacatttttctgctctggagccgggaatgaaatattcttgagttcttacaactttatgacgagacccatgtgtggtgctattgagaaattcattgggaagttggaagacatttcaatcaacaggttgttttggtttctatagtacaattggggtggcattctgttttgtgaaaggaggaaggacttaggccagaaaactcatatgctatggttaactggttcccagcctccgagaatcttgttttccatggtgtaaaacttactcagcatcaggataagggataacgactctatggatatacagaatccttcaccatggtaaaactcgcaaacccgctttatactgagtggattttggaggccatcaaaaaagtgaaaaagcagaaacagcgtccttcagaagaaaggatatgcaatgctgtgtcttcatcccatggcttggatcgtaaaactgttttagaacaattggagttgagtgttaaagatggaacaattttaaaagtctcaaataaaggactcaattcctataaagatcctgataatcctgggcgaatagcacttcctaagcctcggaaccatggaaaattggataataaacaaaatgtggattggaataaactgataaagcgggcagttgagggcttggcagagtctggtggctcaactttgaaaagcattgaacgttttttgaaaggtcagaaggatgtgtctgcattattcggaggcagtgctgcctctggctttcaccagcagttacgattggctatcaaacgtgccattggccacggcagactccttaaagatggacctctttatcggctcaacactaaagcaaccaacgtggatgggaaagagagttgtgagtctctttcctgtttacctccagtgtcccttcttccacatgaaaaggataagccggttgctgaaccaatccccatctgtagtttctgtcttggtacaaaagaacaaaaccgagaaaagaagccagaggaactcatctcctgtgccgactgtggcaacagtggccatccatcctgtttaaagttttcccctgaactaacggttcgagtgaaggccttacggtggcagtgcatcgagtgtaaaacatgcagctcctgtcgagatcaaggcaaaaatgcggataacatgctcttttgtgattcatgtgaccgaggttttcacatggagtgttgtgatccgccactcacccgtatgccaaaaggcatgtggatatgtcaaatatgtcgacctaggaaaaaaggacgaaaacttctacaaaagaaggcagcacagataaaacggcgctatactaatccaataggacgtccaaaaaacaggttaaagaaacaaaacacggtatcaaaaggtcccttcagcaaagttcgaactggccctggaaggggtaggaaacgaaaaatcactctttccagccaatcagcatcatcatcatcagaagaaggatatttagagcggatagatggcttggacttctgcagagatagcaatgtctccttgaagttcaacaagaaaaccaaagggctcattgatggccttaccaaattttttaccccttcccctgatgggcggaaagctcggggggaagtggtggactactctgagcaatatcgaatcagaaagaggggcaacaggaaatcaagcacttcagattggcccacagacaatcaggatggctgggatggcaaacaagaaaatgaggagcgactttttgggagccaggaaatcatgactgagaaagatatggaattatttcgtgatatccaagaacaagcactgcagaaagttggagtgactggtccccctgatccacaagtccgctgtccctctgtcattgagtttgggaagtatgaaattcacacctggtactcctccccatatcctcaagaatactcaaggctgcccaaattgtatctttgtgaattttgtctaaaatatatgaaaagtagaactattctgcagcagcacatgaagaaatgtggttggttccatcctcctgccaatgagatttacagaaagaataatatttctgtctttgaggttgatgggaatgtgagtaccatttattgtcaaaacctgtgtcttttggcaaagttgtttcttgaccacaaaaccctctattacgatgtggagccatttcttttttatgtactaacacagaatgatgtcaagggctgccaccttgttggctacttttctaaggaaaagcactgccaacagaagtacaatgtttcctgtataatgattcttcctcaataccagcgtaagggctatggcaggtttctcatcgatttcagttatttgttatcaaagcgtgaaggccaagcagggtctccagagaaaccgttatctgatctgggtcgtctttcctacatggcatattggaaaagtgtaatattggagtgcctttatcaccaaaatgacaagcagatcagcattaagaagttaagcaagttgactggaatctgccctcaagacatcacttccacactccaccacctacgaatgctggacttccgtagtgaccaatttgtgattatccgccgggaaaaacttatccaggatcacatggcaaagcttcagctgaatttgcgacctgtagatgtagatccagaatgtttgcgctggactccagtcatagtgtccaactctgtggtctcagaggaggaagaagaggaggctgaggaaggagaaaacgaagagccacagtgccaggaaagagaattagagatcagtgtgggaaagtctgtgtctcatgagaacaaagaacaagattcttattcagtagaaagtgaaaagaaaccagaagttatggctccagtcagttctacacgtttgagcaaacaagtccttcctcatgatagtcttcctgcaaatagccagccatctcggaggggccgctgggggaggaagaacagaaaaacccaggaacgttttggtgataaagattctaaactgctcttggaagagacgtcttcagctcctcaggaacaatatggagaatgtggggagaaatcagaagccacccaggaacaatacactgaaagtgaagaacagctggtggcttctgaggagcagccaagccaggacgggaaacctgaccttcccaagagaagactcagtgagggggttgagccctggcgaggacagctcaagaaaagccctgaggctctgaagtgcagattaacagaaggaagtgagaggctgccccgtcgctacagtgagggtgacagggctgtcctcaggggcttcagtgagagcagcgaggaggaggaggagccggaaagccctcggtcaagctcgccaccaattctcacaaagcccacgctgaagcgaaagaaaccatttctccaccgaaggaggagagtccgaaagcgcaaacaccacaatagcagtgtagtcacagaaactatttctgagaccactgaagtgttagatgaaccttttgaagattctgactccgagaggccaatgccaagattagaacccacgtttgagatcgatgaagaagaggaggaagaggatgaaaatgaacttttccctagagaatacttccgtcgtttgtcttcgcaggatgtactcaggtgtcagtcctcttctaagaggaagtctaaagatgaagaagaagatgaagagtcagatgatgctgatgacactcctatcttaaagccagtatctcttttgcgaaaacgtgatgtgaagaattctcctcttgagccagatacatccacacctttgaaaaagaaaaagggatggcccaaaggcaagagccgcaaaccaatccactggaagaaaagacctggtcgaaaaccaggatttaagttgagtcgggaaatcatgccagtttctactcaagcatgcgtcattgagcccatcgtttccattcctaaagctggacgtaaacccaagatccaggagagtgaagaaactgttgagccaaaagaagacatgcccctacccgaggagaggaaggaggaggaggagatgcaagcagaggcagaagaggctgaagagggtgaggaagaggatgcagccagcagtgaagtcccagcagcctctccagcagacagcagcaatagtcctgagaccgaaaccaaggagcctgaggtggaggaggaagaagagaagccccgtgtctcagaggagcagaggcagtcagaggaggagcagcaggaattagaggagccagagccagaggaggaggaagatgcagctgcagagactgcccagaatgacgaccacgacgctgatgatgaggatgatggccacctggagtccacaaagaaaaaggagctagaggaacagcccacgagggaagatgtcaaggaggagcctggtgttcaagagtcttttttagatgctaatatgcagaagagtagggaaaagataaaggataaagaggaaaccgagctggattccgaagaggagcagccttcccatgacacgtccgtggtgtcagagcagatggctgggtctgaggacgaccacgaagaagactcccacactaaggaagagttaatcgaattaaaagaggaggaagagattcctcatagtgagctggatctggaaactgtacaggcagtgcagtctttgactcaagaagaaagcagtgagcatgagggcgcctaccaggactgtgaggaaactcttgcggcgtgtcagaccctgcagagttacacccaggctgacgaggaccctcagatgtccatggttgaagactgtcatgcgtcagaacataatagccctatctcctccgttcagtctcaccccagccagtcagtccgttcggtcagcagtcccaacgtgcctgcccttgagagtggctacacccagatcagcccagaacaaggatccctgtccgcaccctctatgcagaacatggagaccagccccatgatggatgtgccttccgtatcagaccactctcagcaggtggtggacagcggcttcagtgacctgggcagcattgagagcaccactgaaaactatgagaacccaagcagttacgactccacgatgggcggcagcatctgtgggaacagctcttcccagagcagctgctcctacggtgggctgtcgtcctccagcagcctcacccagagcagctgtgtggtcactcagcagatggccagcatgggcagcagctgcagcatgatgcagcagagcagcgtccagcctgctgccaactgcagcatcaagtcacctcagagctgcgtggtggagaggcctcccagtaaccagcagcagcagccgccaccaccgcctccacagcagccacagccgccgccgccacaaccacaaccagcaccacagcctccaccaccccagcagcagccgcaacagcagccgcagcctcagccccagcagcctccacccccaccccctccccagcagcagcccccgctgtcacagtgtagtatgaataacagtttcaccccagctcctatgatcatggagataccagaatctggaagcactgggaacataagtatctatgagaggattccaggggattttggtgccggcagctactctcaaccatcagccaccttcagcctagccaagctgcagcagctgaccaacaccattatggaccctcatgccatgccttatagccattctcctgctgtgacttcctatgcaaccagtgtttctctgtccaatacaggactggctcagctggctccatctcatcccttagctgggactcctcaagcacaagccaccatgacgccacccccaaacttggcatccactaccatgaacctcacatctcctctgcttcagtgcaacatgtctgccaccaacattggcattcctcacacgcagagattgcaagggcaaatgccagtgaaggggcacatttccatccgctccaagtctgcgccactgccctctgcggctgctcaccagcagcagctgtatggccgtagcccatcggcagttgccatgcaggctggccctcgcgcactggctgttcagcgtggcatgaacatgggggttaatctgatgcctactcccgcctataatgtcaattccatgaatatgaacaccttgaatgccatgaacagctatcgaatgacacagcccatgatgaacagcagttaccatagtaaccctgcctacatgaaccagacagcacagtatcctatgcagatgcagatgggaatgatggggagccaggcctatacccagcagcctatgcagcctaaccctcatgggaacatgatgtacacaggcccctcccatcacagctacatgaacgctgctggcgtgcccaagcagtcactcaacggaccttacatgagaagatgagcaagatgaacttgcaatcaaaaacttaaatatatataaataaaggaaccttttatactgacaaaccagagaaaaatggacctttttccagttaaaatattgctgtagatttagaggaatttttctttggtttattttattttttagaaaacctgatcttctctttttttgggttcattttgttctgggttttggttttcttcacaatcttgaacattttacagtagaactcatctaaaaatggatttggggatggggaaacatgcacaaaatcttttcataattaaaaagagccttactttctttacataccacatggacagaatttgtgtaaaagtgaattatctttattttaaaatgtatgtttcccctcactgtttgcagctcccaatgttgtcatttttaaatgttatatacatctcaagggttaaccagaccctttcctccaaacccaacctttcatttcctacttcattccagcaggaggcacttaggggagactcggatggggacatggagaacaacccaagctccttaaacttattattattgttaatattattattattattattaataaagtgaggcaggaaaatgcttctccttttaaaatcccctccactcctcacacacacacacctcttgaaacccttccccaagaatgtttctttatagacggacttcattgaaatctttgttgttcttgaatcaagtgtaatataatttttttcttcttttttaaaatattcccactcagcactcagagacacaaaaatactgtaagtctcaattaacagcagaatctcagagaaaagctgtttgcaatccaaatccagcctttggaggaatagagatggtcaattaacaatcaaaaagaggagattaacctcttgtttttttaccacctggtgaatcagccataacgcacacacacgccacccagcctcttgtttctagtatgtactttgaaatgctaactgagggtcttgatgcttgagcctttgactgataaaactcaaatagcagtccccagtgatttgcctcttaggttctttcttaaattgttggtggatgactgtacattttagtgatttgaaaaataactgacaaaccattgaaacagtttattttatgttggaagagatggcgcagatgtgtgtcagaagggagatcacggtgtgagtttcgtagctatttaagtgatacatacctctagtttttgtatgtcttttgagatcctgagttcatcccctgtgaatcagagtgcacaagcacctctcctgtgagtggctaatgagaagagggacagaccgaccaccagcacagtagggcagatctggacagcagaatgttataacgcaagttcatgtgttgctcccaactccattctcttttctctcgtgcaaccagtttgcccattctcttcctattacttgctccagggataggtaaaaaaaaaaaaaaaaaaaaaaaaaatatatatatatatatatacacacacacacacacacacacacacacatatatatatatatatattccatcattagaagatggaaactattataccacttggtatgtgcagtcaaatatccaaaagggggaagtactgcttagagaaatatctgtaagcattaaattctctcctttatttgtacattttatatagataaatttttaaagtactaattaggcattaacttttttcaaatgcacaggtttgttggtttttttaatacactttaattgactttctcaagcgtgctaggtagaaacgcagaattccacatcttcccgctctcagctctgagcatgtgcaaggctgtgtaggacccagtttctctgtatatactattccagttcccagtcatctatgtagaaagtgcactgtgctgccatcgccctacatcttcagctgtgtcattgcttcctggttggggtggggacggggtgggtcgggagggaggtatattgggaggagggtgggtcaaggcagaaggagaagctgttgaaatgagggccgtgaaatcagtttctgttggtttgcggttgtgtttggttttgtttgtttctttataaaaaattcaatcgggcagctcccttttccacaagcctctttgtgactgtagaactattgtagaaaaaaaaagttcttttctatattataaaagaaattatccaacacagtaatattggtacctgtcattttttcacttctgtttaaaaaaaatgtatttttagcaagataacttgggtaatcttctaaaaaagaaatttaaaaactcactgttagtgactttgatgccttttaaaataagagctttttcatttcattccatctttaaaattttttatctttgttgtagaatattaaaaactattttaagaaagataaattctctttaaagagatctctagcgtgtgtgaatagagctccagatgcctctaaaagccgcatgtacaaaggaagccacgtctatcctgtctgtttatatttgcttttcctgttttgtaacctctttgtactttgttcatggtgacttgtaagctaaggggaaggggtgcctagatgcctttgtatctctccatgtcacgcgctcctgggccagccggcctcccttcctctccttgtatgtaatacctttttttcccctttctagcaagtactttcaaaagaactctgtacattttaacataaaaaataaattatgttgagccattttgga

SEQ ID NO: 144864 - DNA, 9285 bp, Homo sapiens
  Payload ID: 8632
  Gene Symbol: KAT6A
  Gene Name: K(lysine) acetyltransferase 6A
  Uniprot ID: Q92794
  ENST ID: ENST00000396930
  CDS Start-End: 545-6559
actgtctccaagatggcggccgtgtcagtttggggcatctccgcggtccggcccggggccccgggatctcggctgtccttcctcccggattctttctactaatccagatacttgttgaagtgctgactagtttcttggggaaagatgtcaaggaagagttgaaattcctagactggtgagcagagattgcggagtacagaatagccatcacccactctggcataagatgcacatttttctgctctggagccgggaatgaaatattcttgagttcttacaactttatgacgagacccatgtgtggtgctattgagaaattcattgggaagttggaagacatttcaatcaacaggttgttttggtttctatagtacaattggggtggcattctgttttgtgaaaggaggaaggacttaggccagaaaactcatatgctatggttaactggttcccagcctccgagaatcttgttttccatggtgtaaaacttactcagcatcaggataagggataacgactctatggatatacagaatccttcaccatggtaaaactcgcaaacccgctttatactgagtggattttggaggccatcaaaaaagtgaaaaagcagaaacagcgtccttcagaagaaaggatatgcaatgctgtgtcttcatcccatggcttggatcgtaaaactgttttagaacaattggagttgagtgttaaagatggaacaattttaaaagtctcaaataaaggactcaattcctataaagatcctgataatcctgggcgaatagcacttcctaagcctcggaaccatggaaaattggataataaacaaaatgtggattggaataaactgataaagcgggcagttgagggcttggcagagtctggtggctcaactttgaaaagcattgaacgttttttgaaaggtcagaaggatgtgtctgcattattcggaggcagtgctgcctctggctttcaccagcagttacgattggctatcaaacgtgccattggccacggcagactccttaaagatggacctctttatcggctcaacactaaagcaaccaacgtggatgggaaagagagttgtgagtctctttcctgtttacctccagtgtcccttcttccacatgaaaaggataagccggttgctgaaccaatccccatctgtagtttctgtcttggtacaaaagaacaaaaccgagaaaagaagccagaggaactcatctcctgtgccgactgtggcaacagtggccatccatcctgtttaaagttttcccctgaactaacggttcgagtgaaggccttacggtggcagtgcatcgagtgtaaaacatgcagctcctgtcgagatcaaggcaaaaatgcggataacatgctcttttgtgattcatgtgaccgaggttttcacatggagtgttgtgatccgccactcacccgtatgccaaaaggcatgtggatatgtcaaatatgtcgacctaggaaaaaaggacgaaaacttctacaaaagaaggcagcacagataaaacggcgctatactaatccaataggacgtccaaaaaacaggttaaagaaacaaaacacggtatcaaaaggtcccttcagcaaagttcgaactggccctggaaggggtaggaaacgaaaaatcactctttccagccaatcagcatcatcatcatcagaagaaggatatttagagcggatagatggcttggacttctgcagagatagcaatgtctccttgaagttcaacaagaaaaccaaagggctcattgatggccttaccaaattttttaccccttcccctgatgggcggaaagctcggggggaagtggtggactactctgagcaatatcgaatcagaaagaggggcaacaggaaatcaagcacttcagattggcccacagacaatcaggatggctgggatggcaaacaagaaaatgaggagcgactttttgggagccaggaaatcatgactgagaaagatatggaattatttcgtgatatccaagaacaagcactgcagaaagttggagtgactggtccccctgatccacaagtccgctgtccctctgtcattgagtttgggaagtatgaaattcacacctggtactcctccccatatcctcaagaatactcaaggctgcccaaattgtatctttgtgaattttgtctaaaatatatgaaaagtagaactattctgcagcagcacatgaagaaatgtggttggttccatcctcctgccaatgagatttacagaaagaataatatttctgtctttgaggttgatgggaatgtgagtaccatttattgtcaaaacctgtgtcttttggcaaagttgtttcttgaccacaaaaccctctattacgatgtggagccatttcttttttatgtactaacacagaatgatgtcaagggctgccaccttgttggctacttttctaaggaaaagcactgccaacagaagtacaatgtttcctgtataatgattcttcctcaataccagcgtaagggctatggcaggtttctcatcgatttcagttatttgttatcaaagcgtgaaggccaagcagggtctccagagaaaccgttatctgatctgggtcgtctttcctacatggcatattggaaaagtgtaatattggagtgcctttatcaccaaaatgacaagcagatcagcattaagaagttaagcaagttgactggaatctgccctcaagacatcacttccacactccaccacctacgaatgctggacttccgtagtgaccaatttgtgattatccgccgggaaaaacttatccaggatcacatggcaaagcttcagctgaatttgcgacctgtagatgtagatccagaatgtttgcgctggactccagtcatagtgtccaactctgtggtctcagaggaggaagaagaggaggctgaggaaggagaaaacgaagagccacagtgccaggaaagagaattagagatcagtgtgggaaagtctgtgtctcatgagaacaaagaacaagattcttattcagtagaaagtgaaaagaaaccagaagttatggctccagtcagttctacacgtttgagcaaacaagtccttcctcatgatagtcttcctgcaaatagccagccatctcggaggggccgctgggggaggaagaacagaaaaacccaggaacgttttggtgataaagattctaaactgctcttggaagagacgtcttcagctcctcaggaacaatatggagaatgtggggagaaatcagaagccacccaggaacaatacactgaaagtgaagaacagctggtggcttctgaggagcagccaagccaggacgggaaacctgaccttcccaagagaagactcagtgagggggttgagccctggcgaggacagctcaagaaaagccctgaggctctgaagtgcagattaacagaaggaagtgagaggctgccccgtcgctacagtgagggtgacagggctgtcctcaggggcttcagtgagagcagcgaggaggaggaggagccggaaagccctcggtcaagctcgccaccaattctcacaaagcccacgctgaagcgaaagaaaccatttctccaccgaaggaggagagtccgaaagcgcaaacaccacaatagcagtgtagtcacagaaactatttctgagaccactgaagtgttagatgaaccttttgaagattctgactccgagaggccaatgccaagattagaacccacgtttgagatcgatgaagaagaggaggaagaggatgaaaatgaacttttccctagagaatacttccgtcgtttgtcttcgcaggatgtactcaggtgtcagtcctcttctaagaggaagtctaaagatgaagaagaagatgaagagtcagatgatgctgatgacactcctatcttaaagccagtatctcttttgcgaaaacgtgatgtgaagaattctcctcttgagccagatacatccacacctttgaaaaagaaaaagggatggcccaaaggcaagagccgcaaaccaatccactggaagaaaagacctggtcgaaaaccaggatttaagttgagtcgggaaatcatgccagtttctactcaagcatgcgtcattgagcccatcgtttccattcctaaagctggacgtaaacccaagatccaggagagtgaagaaactgttgagccaaaagaagacatgcccctacccgaggagaggaaggaggaggaggagatgcaagcagaggcagaagaggctgaagagggtgaggaagaggatgcagccagcagtgaagtcccagcagcctctccagcagacagcagcaatagtcctgagaccgaaaccaaggagcctgaggtggaggaggaagaagagaagccccgtgtctcagaggagcagaggcagtcagaggaggagcagcaggaattagaggagccagagccagaggaggaggaagatgcagctgcagagactgcccagaatgacgaccacgacgctgatgatgaggatgatggccacctggagtccacaaagaaaaaggagctagaggaacagcccacgagggaagatgtcaaggaggagcctggtgttcaagagtcttttttagatgctaatatgcagaagagtagggaaaagataaaggataaagaggaaaccgagctggattccgaagaggagcagccttcccatgacacgtccgtggtgtcagagcagatggctgggtctgaggacgaccacgaagaagactcccacactaaggaagagttaatcgaattaaaagaggaggaagagattcctcatagtgagctggatctggaaactgtacaggcagtgcagtctttgactcaagaagaaagcagtgagcatgagggcgcctaccaggactgtgaggaaactcttgcggcgtgtcagaccctgcagagttacacccaggctgacgaggaccctcagatgtccatggttgaagactgtcatgcgtcagaacataatagccctatctcctccgttcagtctcaccccagccagtcagtccgttcggtcagcagtcccaacgtgcctgcccttgagagtggctacacccagatcagcccagaacaaggatccctgtccgcaccctctatgcagaacatggagaccagccccatgatggatgtgccttccgtatcagaccactctcagcaggtggtggacagcggcttcagtgacctgggcagcattgagagcaccactgaaaactatgagaacccaagcagttacgactccacgatgggcggcagcatctgtgggaacagctcttcccagagcagctgctcctacggtgggctgtcgtcctccagcagcctcacccagagcagctgtgtggtcactcagcagatggccagcatgggcagcagctgcagcatgatgcagcagagcagcgtccagcctgctgccaactgcagcatcaagtcacctcagagctgcgtggtggagaggcctcccagtaaccagcagcagcagccgccaccaccgcctccacagcagccacagccgccgccgccacaaccacaaccagcaccacagcctccaccaccccagcagcagccgcaacagcagccgcagcctcagccccagcagcctccacccccaccccctccccagcagcagcccccgctgtcacagtgtagtatgaataacagtttcaccccagctcctatgatcatggagataccagaatctggaagcactgggaacataagtatctatgagaggattccaggggattttggtgccggcagctactctcaaccatcagccaccttcagcctagccaagctgcagcagctgaccaacaccattatggaccctcatgccatgccttatagccattctcctgctgtgacttcctatgcaaccagtgtttctctgtccaatacaggactggctcagctggctccatctcatcccttagctgggactcctcaagcacaagccaccatgacgccacccccaaacttggcatccactaccatgaacctcacatctcctctgcttcagtgcaacatgtctgccaccaacattggcattcctcacacgcagagattgcaagggcaaatgccagtgaaggggcacatttccatccgctccaagtctgcgccactgccctctgcggctgctcaccagcagcagctgtatggccgtagcccatcggcagttgccatgcaggctggccctcgcgcactggctgttcagcgtggcatgaacatgggggttaatctgatgcctactcccgcctataatgtcaattccatgaatatgaacaccttgaatgccatgaacagctatcgaatgacacagcccatgatgaacagcagttaccatagtaaccctgcctacatgaaccagacagcacagtatcctatgcagatgcagatgggaatgatggggagccaggcctatacccagcagcctatgcagcctaaccctcatgggaacatgatgtacacaggcccctcccatcacagctacatgaacgctgctggcgtgcccaagcagtcactcaacggaccttacatgagaagatgagcaagatgaacttgcaatcaaaaacttaaatatatataaataaaggaaccttttatactgacaaaccagagaaaaatggacctttttccagttaaaatattgctgtagatttagaggaatttttctttggtttattttattttttagaaaacctgatcttctctttttttgggttcattttgttctgggttttggttttcttcacaatcttgaacattttacagtagaactcatctaaaaatggatttggggatggggaaacatgcacaaaatcttttcataattaaaaagagccttactttctttacataccacatggacagaatttgtgtaaaagtgaattatctttattttaaaatgtatgtttcccctcactgtttgcagctcccaatgttgtcatttttaaatgttatatacatctcaagggttaaccagaccctttcctccaaacccaacctttcatttcctacttcattccagcaggaggcacttaggggagactcggatggggacatggagaacaacccaagctccttaaacttattattattgttaatattattattattattattaataaagtgaggcaggaaaatgcttctccttttaaaatcccctccactcctcacacacacacacctcttgaaacccttccccaagaatgtttctttatagacggacttcattgaaatctttgttgttcttgaatcaagtgtaatataatttttttcttcttttttaaaatattcccactcagcactcagagacacaaaaatactgtaagtctcaattaacagcagaatctcagagaaaagctgtttgcaatccaaatccagcctttggaggaatagagatggtcaattaacaatcaaaaagaggagattaacctcttgtttttttaccacctggtgaatcagccataacgcacacacacgccacccagcctcttgtttctagtatgtactttgaaatgctaactgagggtcttgatgcttgagcctttgactgataaaactcaaatagcagtccccagtgatttgcctcttaggttctttcttaaattgttggtggatgactgtacattttagtgatttgaaaaataactgacaaaccattgaaacagtttattttatgttggaagagatggcgcagatgtgtgtcagaagggagatcacggtgtgagtttcgtagctatttaagtgatacatacctctagtttttgtatgtcttttgagatcctgagttcatcccctgtgaatcagagtgcacaagcacctctcctgtgagtggctaatgagaagagggacagaccgaccaccagcacagtagggcagatctggacagcagaatgttataacgcaagttcatgtgttgctcccaactccattctcttttctctcgtgcaaccagtttgcccattctcttcctattacttgctccagggataggtaaaaaaaaaaaaaaaaaaaaaaaaaatatatatatatatatatacacacacacacacacacacacacacacatatatatatatatatattccatcattagaagatggaaactattataccacttggtatgtgcagtcaaatatccaaaagggggaagtactgcttagagaaatatctgtaagcattaaattctctcctttatttgtacattttatatagataaatttttaaagtactaattaggcattaacttttttcaaatgcacaggtttgttggtttttttaatacactttaattgactttctcaagcgtgctaggtagaaacgcagaattccacatcttcccgctctcagctctgagcatgtgcaaggctgtgtaggacccagtttctctgtatatactattccagttcccagtcatctatgtagaaagtgcactgtgctgccatcgccctacatcttcagctgtgtcattgcttcctggttggggtggggacggggtgggtcgggagggaggtatattgggaggagggtgggtcaaggcagaaggagaagctgttgaaatgagggccgtgaaatcagtttctgttggtttgcggttgtgtttggttttgtttgtttctttataaaaaattcaatcgggcagctcccttttccacaagcctctttgtgactgtagaactattgtagaaaaaaaaagttcttttctatattataaaagaaattatccaacacagtaatattggtacctgtcattttttcacttctgtttaaaaaaaatgtatttttagcaagataacttgggtaatcttctaaaaaagaaatttaaaaactcactgttagtgactttgatgccttttaaaataagagctttttcatttcattccatctttaaaattttttatctttgttgtagaatattaaaaactattttaagaaagataaattctctttaaagagatctctagcgtgtgtgaatagagctccagatgcctctaaaagccgcatgtacaaaggaagccacgtctatcctgtctgtttatatttgcttttcctgttttgtaacctctttgtactttgttcatggtgacttgtaagctaaggggaaggggtgcctagatgcctttgtatctctccatgtcacgcgctcctgggccagccggcctcccttcctctccttgtatgtaatacctttttttcccctttctagcaagtactttcaaaagaactctgtacattttaacataaaaaataaattatgttgagccattttgga

SEQ ID NO: 144865 - DNA, 9241 bp, Homo sapiens
  Payload ID: 8632
  Gene Symbol: KAT6A
  Gene Name: K(lysine) acetyltransferase 6A
  Uniprot ID: Q92794
  ENST ID: ENST00000406337
  CDS Start-End: 501-6515
actgtctccaagatggcggccgtgtcagtttggggcatctccgcggtccggcccggggccccgggatctcggctgtccttcctcccggattctttctactaatccagatacttgttgaagtgctgactagtttcttggggaaagatgtcaaggaagagttgaaattcctagactggcataagatgcacatttttctgctctggagccgggaatgaaatattcttgagttcttacaactttatgacgagacccatgtgtggtgctattgagaaattcattgggaagttggaagacatttcaatcaacaggttgttttggtttctatagtacaattggggtggcattctgttttgtgaaaggaggaaggacttaggccagaaaactcatatgctatggttaactggttcccagcctccgagaatcttgttttccatggtgtaaaacttactcagcatcaggataagggataacgactctatggatatacagaatccttcaccatggtaaaactcgcaaacccgctttatactgagtggattttggaggccatcaaaaaagtgaaaaagcagaaacagcgtccttcagaagaaaggatatgcaatgctgtgtcttcatcccatggcttggatcgtaaaactgttttagaacaattggagttgagtgttaaagatggaacaattttaaaagtctcaaataaaggactcaattcctataaagatcctgataatcctgggcgaatagcacttcctaagcctcggaaccatggaaaattggataataaacaaaatgtggattggaataaactgataaagcgggcagttgagggcttggcagagtctggtggctcaactttgaaaagcattgaacgttttttgaaaggtcagaaggatgtgtctgcattattcggaggcagtgctgcctctggctttcaccagcagttacgattggctatcaaacgtgccattggccacggcagactccttaaagatggacctctttatcggctcaacactaaagcaaccaacgtggatgggaaagagagttgtgagtctctttcctgtttacctccagtgtcccttcttccacatgaaaaggataagccggttgctgaaccaatccccatctgtagtttctgtcttggtacaaaagaacaaaaccgagaaaagaagccagaggaactcatctcctgtgccgactgtggcaacagtggccatccatcctgtttaaagttttcccctgaactaacggttcgagtgaaggccttacggtggcagtgcatcgagtgtaaaacatgcagctcctgtcgagatcaaggcaaaaatgcggataacatgctcttttgtgattcatgtgaccgaggttttcacatggagtgttgtgatccgccactcacccgtatgccaaaaggcatgtggatatgtcaaatatgtcgacctaggaaaaaaggacgaaaacttctacaaaagaaggcagcacagataaaacggcgctatactaatccaataggacgtccaaaaaacaggttaaagaaacaaaacacggtatcaaaaggtcccttcagcaaagttcgaactggccctggaaggggtaggaaacgaaaaatcactctttccagccaatcagcatcatcatcatcagaagaaggatatttagagcggatagatggcttggacttctgcagagatagcaatgtctccttgaagttcaacaagaaaaccaaagggctcattgatggccttaccaaattttttaccccttcccctgatgggcggaaagctcggggggaagtggtggactactctgagcaatatcgaatcagaaagaggggcaacaggaaatcaagcacttcagattggcccacagacaatcaggatggctgggatggcaaacaagaaaatgaggagcgactttttgggagccaggaaatcatgactgagaaagatatggaattatttcgtgatatccaagaacaagcactgcagaaagttggagtgactggtccccctgatccacaagtccgctgtccctctgtcattgagtttgggaagtatgaaattcacacctggtactcctccccatatcctcaagaatactcaaggctgcccaaattgtatctttgtgaattttgtctaaaatatatgaaaagtagaactattctgcagcagcacatgaagaaatgtggttggttccatcctcctgccaatgagatttacagaaagaataatatttctgtctttgaggttgatgggaatgtgagtaccatttattgtcaaaacctgtgtcttttggcaaagttgtttcttgaccacaaaaccctctattacgatgtggagccatttcttttttatgtactaacacagaatgatgtcaagggctgccaccttgttggctacttttctaaggaaaagcactgccaacagaagtacaatgtttcctgtataatgattcttcctcaataccagcgtaagggctatggcaggtttctcatcgatttcagttatttgttatcaaagcgtgaaggccaagcagggtctccagagaaaccgttatctgatctgggtcgtctttcctacatggcatattggaaaagtgtaatattggagtgcctttatcaccaaaatgacaagcagatcagcattaagaagttaagcaagttgactggaatctgccctcaagacatcacttccacactccaccacctacgaatgctggacttccgtagtgaccaatttgtgattatccgccgggaaaaacttatccaggatcacatggcaaagcttcagctgaatttgcgacctgtagatgtagatccagaatgtttgcgctggactccagtcatagtgtccaactctgtggtctcagaggaggaagaagaggaggctgaggaaggagaaaacgaagagccacagtgccaggaaagagaattagagatcagtgtgggaaagtctgtgtctcatgagaacaaagaacaagattcttattcagtagaaagtgaaaagaaaccagaagttatggctccagtcagttctacacgtttgagcaaacaagtccttcctcatgatagtcttcctgcaaatagccagccatctcggaggggccgctgggggaggaagaacagaaaaacccaggaacgttttggtgataaagattctaaactgctcttggaagagacgtcttcagctcctcaggaacaatatggagaatgtggggagaaatcagaagccacccaggaacaatacactgaaagtgaagaacagctggtggcttctgaggagcagccaagccaggacgggaaacctgaccttcccaagagaagactcagtgagggggttgagccctggcgaggacagctcaagaaaagccctgaggctctgaagtgcagattaacagaaggaagtgagaggctgccccgtcgctacagtgagggtgacagggctgtcctcaggggcttcagtgagagcagcgaggaggaggaggagccggaaagccctcggtcaagctcgccaccaattctcacaaagcccacgctgaagcgaaagaaaccatttctccaccgaaggaggagagtccgaaagcgcaaacaccacaatagcagtgtagtcacagaaactatttctgagaccactgaagtgttagatgaaccttttgaagattctgactccgagaggccaatgccaagattagaacccacgtttgagatcgatgaagaagaggaggaagaggatgaaaatgaacttttccctagagaatacttccgtcgtttgtcttcgcaggatgtactcaggtgtcagtcctcttctaagaggaagtctaaagatgaagaagaagatgaagagtcagatgatgctgatgacactcctatcttaaagccagtatctcttttgcgaaaacgtgatgtgaagaattctcctcttgagccagatacatccacacctttgaaaaagaaaaagggatggcccaaaggcaagagccgcaaaccaatccactggaagaaaagacctggtcgaaaaccaggatttaagttgagtcgggaaatcatgccagtttctactcaagcatgcgtcattgagcccatcgtttccattcctaaagctggacgtaaacccaagatccaggagagtgaagaaactgttgagccaaaagaagacatgcccctacccgaggagaggaaggaggaggaggagatgcaagcagaggcagaagaggctgaagagggtgaggaagaggatgcagccagcagtgaagtcccagcagcctctccagcagacagcagcaatagtcctgagaccgaaaccaaggagcctgaggtggaggaggaagaagagaagccccgtgtctcagaggagcagaggcagtcagaggaggagcagcaggaattagaggagccagagccagaggaggaggaagatgcagctgcagagactgcccagaatgacgaccacgacgctgatgatgaggatgatggccacctggagtccacaaagaaaaaggagctagaggaacagcccacgagggaagatgtcaaggaggagcctggtgttcaagagtcttttttagatgctaatatgcagaagagtagggaaaagataaaggataaagaggaaaccgagctggattccgaagaggagcagccttcccatgacacgtccgtggtgtcagagcagatggctgggtctgaggacgaccacgaagaagactcccacactaaggaagagttaatcgaattaaaagaggaggaagagattcctcatagtgagctggatctggaaactgtacaggcagtgcagtctttgactcaagaagaaagcagtgagcatgagggcgcctaccaggactgtgaggaaactcttgcggcgtgtcagaccctgcagagttacacccaggctgacgaggaccctcagatgtccatggttgaagactgtcatgcgtcagaacataatagccctatctcctccgttcagtctcaccccagccagtcagtccgttcggtcagcagtcccaacgtgcctgcccttgagagtggctacacccagatcagcccagaacaaggatccctgtccgcaccctctatgcagaacatggagaccagccccatgatggatgtgccttccgtatcagaccactctcagcaggtggtggacagcggcttcagtgacctgggcagcattgagagcaccactgaaaactatgagaacccaagcagttacgactccacgatgggcggcagcatctgtgggaacagctcttcccagagcagctgctcctacggtgggctgtcgtcctccagcagcctcacccagagcagctgtgtggtcactcagcagatggccagcatgggcagcagctgcagcatgatgcagcagagcagcgtccagcctgctgccaactgcagcatcaagtcacctcagagctgcgtggtggagaggcctcccagtaaccagcagcagcagccgccaccaccgcctccacagcagccacagccgccgccgccacaaccacaaccagcaccacagcctccaccaccccagcagcagccgcaacagcagccgcagcctcagccccagcagcctccacccccaccccctccccagcagcagcccccgctgtcacagtgtagtatgaataacagtttcaccccagctcctatgatcatggagataccagaatctggaagcactgggaacataagtatctatgagaggattccaggggattttggtgccggcagctactctcaaccatcagccaccttcagcctagccaagctgcagcagctgaccaacaccattatggaccctcatgccatgccttatagccattctcctgctgtgacttcctatgcaaccagtgtttctctgtccaatacaggactggctcagctggctccatctcatcccttagctgggactcctcaagcacaagccaccatgacgccacccccaaacttggcatccactaccatgaacctcacatctcctctgcttcagtgcaacatgtctgccaccaacattggcattcctcacacgcagagattgcaagggcaaatgccagtgaaggggcacatttccatccgctccaagtctgcgccactgccctctgcggctgctcaccagcagcagctgtatggccgtagcccatcggcagttgccatgcaggctggccctcgcgcactggctgttcagcgtggcatgaacatgggggttaatctgatgcctactcccgcctataatgtcaattccatgaatatgaacaccttgaatgccatgaacagctatcgaatgacacagcccatgatgaacagcagttaccatagtaaccctgcctacatgaaccagacagcacagtatcctatgcagatgcagatgggaatgatggggagccaggcctatacccagcagcctatgcagcctaaccctcatgggaacatgatgtacacaggcccctcccatcacagctacatgaacgctgctggcgtgcccaagcagtcactcaacggaccttacatgagaagatgagcaagatgaacttgcaatcaaaaacttaaatatatataaataaaggaaccttttatactgacaaaccagagaaaaatggacctttttccagttaaaatattgctgtagatttagaggaatttttctttggtttattttattttttagaaaacctgatcttctctttttttgggttcattttgttctgggttttggttttcttcacaatcttgaacattttacagtagaactcatctaaaaatggatttggggatggggaaacatgcacaaaatcttttcataattaaaaagagccttactttctttacataccacatggacagaatttgtgtaaaagtgaattatctttattttaaaatgtatgtttcccctcactgtttgcagctcccaatgttgtcatttttaaatgttatatacatctcaagggttaaccagaccctttcctccaaacccaacctttcatttcctacttcattccagcaggaggcacttaggggagactcggatggggacatggagaacaacccaagctccttaaacttattattattgttaatattattattattattattaataaagtgaggcaggaaaatgcttctccttttaaaatcccctccactcctcacacacacacacctcttgaaacccttccccaagaatgtttctttatagacggacttcattgaaatctttgttgttcttgaatcaagtgtaatataatttttttcttcttttttaaaatattcccactcagcactcagagacacaaaaatactgtaagtctcaattaacagcagaatctcagagaaaagctgtttgcaatccaaatccagcctttggaggaatagagatggtcaattaacaatcaaaaagaggagattaacctcttgtttttttaccacctggtgaatcagccataacgcacacacacgccacccagcctcttgtttctagtatgtactttgaaatgctaactgagggtcttgatgcttgagcctttgactgataaaactcaaatagcagtccccagtgatttgcctcttaggttctttcttaaattgttggtggatgactgtacattttagtgatttgaaaaataactgacaaaccattgaaacagtttattttatgttggaagagatggcgcagatgtgtgtcagaagggagatcacggtgtgagtttcgtagctatttaagtgatacatacctctagtttttgtatgtcttttgagatcctgagttcatcccctgtgaatcagagtgcacaagcacctctcctgtgagtggctaatgagaagagggacagaccgaccaccagcacagtagggcagatctggacagcagaatgttataacgcaagttcatgtgttgctcccaactccattctcttttctctcgtgcaaccagtttgcccattctcttcctattacttgctccagggataggtaaaaaaaaaaaaaaaaaaaaaaaaaatatatatatatatatatacacacacacacacacacacacacacacatatatatatatatatattccatcattagaagatggaaactattataccacttggtatgtgcagtcaaatatccaaaagggggaagtactgcttagagaaatatctgtaagcattaaattctctcctttatttgtacattttatatagataaatttttaaagtactaattaggcattaacttttttcaaatgcacaggtttgttggtttttttaatacactttaattgactttctcaagcgtgctaggtagaaacgcagaattccacatcttcccgctctcagctctgagcatgtgcaaggctgtgtaggacccagtttctctgtatatactattccagttcccagtcatctatgtagaaagtgcactgtgctgccatcgccctacatcttcagctgtgtcattgcttcctggttggggtggggacggggtgggtcgggagggaggtatattgggaggagggtgggtcaaggcagaaggagaagctgttgaaatgagggccgtgaaatcagtttctgttggtttgcggttgtgtttggttttgtttgtttctttataaaaaattcaatcgggcagctcccttttccacaagcctctttgtgactgtagaactattgtagaaaaaaaaagttcttttctatattataaaagaaattatccaacacagtaatattggtacctgtcattttttcacttctgtttaaaaaaaatgtatttttagcaagataacttgggtaatcttctaaaaaagaaatttaaaaactcactgttagtgactttgatgccttttaaaataagagctttttcatttcattccatctttaaaattttttatctttgttgtagaatattaaaaactattttaagaaagataaattctctttaaagagatctctagcgtgtgtgaatagagctccagatgcctctaaaagccgcatgtacaaaggaagccacgtctatcctgtctgtttatatttgcttttcctgttttgtaacctctttgtactttgttcatggtgacttgtaagctaaggggaaggggtgcctagatgcctttgtatctctccatgtcacgcgctcctgggccagccggcctcccttcctctccttgtatgtaatacctttttttcccctttctagcaagtactttcaaaagaactctgtacattttaacataaaaaataaattatgttgagccattttgga

SEQ ID NO: 144866 - DNA, 588 bp, Homo sapiens
  Payload ID: 8632
  Gene Symbol: KAT6A
  Gene Name: K(lysine) acetyltransferase 6A
  ENST ID: ENST00000426524
  CDS Start-End: 548-588
ctcactgtctccaagatggcggccgtgtcagtttggggcatctccgcggtccggcccggggccccgggatctcggctgtccttcctcccggattctttctactaatccagatacttgttgaagtgctgactagtttcttggggaaagatgtcaaggaagagttgaaattcctagactggtgagcagagattgcggagtacagaatagccatcacccactctggcataagatgcacatttttctgctctggagccgggaatgaaatattcttgagttcttacaactttatgacgagacccatgtgtggtgctattgagaaattcattgggaagttggaagacatttcaatcaacaggttgttttggtttctatagtacaattggggtggcattctgttttgtgaaaggaggaaggacttaggccagaaaactcatatgctatggttaactggttcccagcctccgagaatcttgttttccatggtgtaaaacttactcagcatcaggataagggataacgactctatggatatacagaatccttcaccatggtaaaactcgcaaacccgctttatactgagtggatttt

SEQ ID NO: 144867 - DNA, 3279 bp, Homo sapiens
  Payload ID: 8632
  Gene Symbol: KAT6A
  Gene Name: K(lysine) acetyltransferase 6A
  ENST ID: ENST00000418721
  CDS Start-End: 1094-3279
tttcatctgcagagtgggtatattgttttctactttgaaggatggattgtggggaccaaaggaggtaacgacataaggctcaggtcagagtctagcacaataggtgctccacgaacatgattttctctagtccttaaattcatgctctctctgttgtggagcatgtgaattcattctttcatacctctttcatcatgtaacttttaatccctaatgaatggaattacttactgtagtgtttctgtgggaaaatgttcaaatgccagaaagccatctcttctccccacattcccagcctcacactgataataaaggggtacctccctctctcctcaaaacattgcacccccttggggaatggagagggaagggcaagtgagagcgctccagtggacagatgggggaaggcagcagctctgtgtttacagaaattgttaaattatttacacaattttggtgtccctaccagatccagagttggggatactgcaagaatggccttttttatgttacaaactggaattagatgagtcatttaattgaagcttaagtttttgtagaagagtaatactcttttcatataaactggtggtaataaaagctttattatctagcagtaggcataaagttttcttttggtttagcccaattattagtgtatttaatccacccccttgctaccccctgttagttatcttagattaaaaggtcaattctagcctggaacatacgtcttcttttaaataatttggcatatttaaattaggaggacatgaagtggcagaatttgagttaaacatttaaatatattttgtgcccttgattatattagacacctgctgctttggaaagtcacatgtttagcgaaaacgtactttggttgaaatgttaaaataaaaagacctagcaaaggtaaccttgtagttcagatatgacagtttgattttggctaggactggaatgagtggtttctgtgtagccatttcttcctccctgtgtagagagccttgctgatttctaaatcttcgtaaaaggaaacacccttgctgtggaggcttgctcaggggagctgggagtggaggcgggctcacacatgagcgcatgtgcaggaacgtttcacggtgcaaaggttaaaggcgggtgtgggcagaggggaacctaccacaggtcccattctggacagacgtgcgcagttgtggtgatgtgcaaacagctgtactggaactggatatccactttcacatcgggcatccgcctagaagagcagcgggcagctgatgggaagaccctcaaacaacagacagtgccgcagcagaaagttggagtgactggtccccctgatccacaagtccgctgtccctctgtcattgagtttgggaagtatgaaattcacacctggtactcctccccatatcctcaagaatactcaaggctgcccaaattgtatctttgtgaattttgtctaaaatatatgaaaagtagaactattctgcagcagcacatgaagaaatgtggttggttccatcctcctgccaatgagatttacagaaagaataatatttctgtctttgaggttgatgggaatgtgagtaccatttattgtcaaaacctgtgtcttttggcaaagttgtttcttgaccacaaaaccctctattacgatgtggagccatttcttttttatgtactaacacagaatgatgtcaagggctgccaccttgttggctacttttctaaggaaaagcactgccaacagaagtacaatgtttcctgtataatgattcttcctcaataccagcgtaagggctatggcaggtttctcatcgatttcagttatttgttatcaaagcgtgaaggccaagcagggtctccagagaaaccgttatctgatctgggtcgtctttcctacatggcatattggaaaagtgtaatattggagtgcctttatcaccaaaatgacaagcagatcagcattaagaagttaagcaagttgactggaatctgccctcaagacatcacttccacactccaccacctacgaatgctggacttccgtagtgaccaatttgtgattatccgccgggaaaaacttatccaggatcacatggcaaagcttcagctgaatttgcgacctgtagatgtagatccagaatgtttgcgctggactccagtcatagtgtccaactctgtggtctcagaggaggaagaagaggaggctgaggaaggagaaaacgaagagccacagtgccaggaaagagaattagagatcagtgtgggaaagtctgtgtctcatgagaacaaagaacaagattcttattcagtagaaagtgaaaagaaaccagaagttatggctccagtcagttctacacgtttgagcaaacaagtccttcctcatgatagtcttcctgcaaatagccagccatctcggaggggccgctgggggaggaagaacagaaaaacccaggaacgttttggtgataaagattctaaactgctcttggaagagacgtcttcagctcctcaggaacaatatggagaatgtggggagaaatcagaagccacccaggaacaatacactgaaagtgaagaacagctggtggcttctgaggagcagccaagccaggacgggaaacctgaccttcccaagagaagactcagtgagggggttgagccctggcgaggacagctcaagaaaagccctgaggctctgaagtgcagattaacagaaggaagtgagaggctgccccgtcgctacagtgagggtgacagggctgtcctcaggggcttcagtgagagcagcgaggaggaggaggagccggaaagccctcggtcaagctcgccaccaattctcacaaagcccacgctgaagcgaaagaaaccatttctccaccgaaggaggagagtccgaaagcgcaaacaccacaatagcagtgtagtcacagaaactatttctgagaccactgaagtgttagatgaaccttttgaagattctgactccgagaggccaatgccaagattagaacccacgtttgagatcgatgaagaagaggaggaagaggatgaaaatgaacttttccctagagaatacttccgtcgtttgtcttcgcaggatgtactcaggtgtcagtcctcttctaagaggaagtctaaagatgaagaagaagatgaagagtcagatgatgctgatgacactcctatcttaaagccagtatctcttttgcgaaaacgtgatgtgaagaattctcctcttgagccagatacatccacacctttgaaaaagaa

SEQ ID NO: 144868 - DNA, 3592 bp, Homo sapiens
  Payload ID: 8632
  Gene Symbol: KAT6A
  Gene Name: K(lysine) acetyltransferase 6A
  ENST ID: ENST00000485568
  CDS Start-End: 413-2860
actgtctccaagatggcggccgtgtcagtttggggcatctccgcggtccggcccggggccccgggatctcggctgtccttcctcccggcataagatgcacatttttctgctctggagccgggaatgaaatattcttgagttcttacaactttatgacgagacccatgtgtggtgctattgagaaattcattgggaagttggaagacatttcaatcaacaggttgttttggtttctatagtacaattggggtggcattctgttttgtgaaaggaggaaggacttaggccagaaaactcatatgctatggttaactggttcccagcctccgagaatcttgttttccatggtgtaaaacttactcagcatcaggataagggataacgactctatggatatacagaatccttcaccatggtaaaactcgcaaacccgctttatactgagtggattttggaggccatcaaaaaagtgaaaaagcagaaacagcgtccttcagaagaaaggatatgcaatgctgtgtcttcatcccatggcttggatcgtaaaactgttttagaacaattggagttgagtgttaaagatggaacaattttaaaagtctcaaataaaggactcaattcctataaagatcctgataatcctgggcgaatagcacttcctaagcctcggaaccatggaaaattggataataaacaaaatgtggattggaataaactgataaagcgggcagttgagggcttggcagagtctggtggctcaactttgaaaagcattgaacgttttttgaaaggtcagaaggatgtgtctgcattattcggaggcagtgctgcctctggctttcaccagcagttacgattggctatcaaacgtgccattggccacggcagactccttaaagatggacctctttatcggctcaacactaaagcaaccaacgtggatgggaaagagagttgtgagtctctttcctgtttacctccagtgtcccttcttccacatgaaaaggataagccggttgctgaaccaatccccatctgtagtttctgtcttggtacaaaagaacaaaaccgagaaaagaagccagaggaactcatctcctgtgccgactgtggcaacagtggccatccatcctgtttaaagttttcccctgaactaacggttcgagtgaaggccttacggtggcagtgcatcgagtgtaaaacatgcagctcctgtcgagatcaaggcaaaaatgcggataacatgctcttttgtgattcatgtgaccgaggttttcacatggagtgttgtgatccgccactcacccgtatgccaaaaggcatgtggatatgtcaaatatgtcgacctaggaaaaaaggacgaaaacttctacaaaagaaggcagcacagataaaacggcgctatactaatccaataggacgtccaaaaaacaggttaaagaaacaaaacacggtatcaaaaggtcccttcagcaaagttcgaactggccctggaaggggtaggaaacgaaaaatcactctttccagccaatcagcatcatcatcatcagaagaaggatatttagagcggatagatggcttggacttctgcagagatagcaatgtctccttgaagttcaacaagaaaaccaaagggctcattgatggccttaccaaattttttaccccttcccctgatgggcggaaagctcggggggaagtggtggactactctgagcaatatcgaatcagaaagaggggcaacaggaaatcaagcacttcagattggcccacagacaatcaggatggctgggatggcaaacaagaaaatgaggagcgactttttgggagccaggaaatcatgactgagaaagatatggaattatttcgtgatatccaagaacaagcactgcagaaagttggagtgactggtccccctgatccacaagtccgctgtccctctgtcattgagtttgggaagtatgaaattcacacctggtactcctccccatatcctcaagaatactcaaggctgcccaaattgtatctttgtgaattttgtctaaaatatatgaaaagtagaactattctgcagcagcacatgaagaaatgtggttggttccatcctcctgccaatgagatttacagaaagaataatatttctgtctttgaggttgatgggaatgtgagtaccatttattgtcaaaacctgtgtcttttggcaaagttgtttcttgaccacaaaaccctctattacgatgtggagccatttcttttttatgtactaacacagaatgatgtcaagggctgccaccttgttggctacttttctaaggaaaagcactgccaacagaagtacaatgtttcctgtataatgattcttcctcaataccagcgtaagggctatggcaggtttctcatcgatttcagttatttgttatcaaagcgtgaaggccaagcagggtctccagagaaaccgttatctgatctgggtcgtctttcctacatggcatattggaaaagtgtaatattggagtgcctttatcaccaaaatgacaagcagatcagcattaagaagttaagcaagttgactggaatctgccctcaagacatcacttccacactccaccacctacgaatgctggacttccgtagtgaccaatttgtgattatccgccgggaaaaacttatccaggatcacatggcaaagcttcagctgaatttgcgacctgtagatgtagatccagaatgtttgcgctggactccagtcatagtgtccaactctgtggtctcagaggaggaagaagaggaggctgaggaaggagaaaacgaagagccacagtgccaggaaagagaattagagatcagtgtaagggcatgaatagtctctatttttgatgacagaagatatatttttgatttcatgagtatttataataatgtattatgatcatctttcacagaaaagtaaattcacattagaatgtcaagagttttatttcagtggtagagatttcaagaagactggacctggtttacttaagtatttttaagccttggacaattaggaggagaccatcaaatttcttataatgtgttacttgtgagaaaaatatttgttaccagggtgccaagaagcagctcagttttaagctggatagtagttgagaaatctgaattgaatccaaatctgacagtttttaaaaatgaaatggaggttgggtgtggtgtttcatgcctgtaatctcagcgctttaggaggcccaggcgggaggattgcttgagattaggagttcaggacaaccagggaaatatagtgagaccccatctctacaaaaaaaacccaacaacaaaatgaaatggagatacattttccttaaatagaatattaagtaactattgtaaacttgtgtatgttttctgatggggcaccaaaacatcctgtggacacacagatctctttagccgttaaagggttgctggtgaactgtagtgcatgtgtcattgtcagtatttttcttcatgtgatgcatacttttatagctcttttttttaagcagtgcttcatcctttcaacaccggtatcctcctttaataaacataaaaaatccca

SEQ ID NO: 144869 - DNA, 8287 bp, Homo sapiens
  Payload ID: 8633
  Gene Symbol: KAT6B
  Gene Name: K(lysine) acetyltransferase 6B
  Uniprot ID: Q8WYB5
  ENST ID: ENST00000287239
  CDS Start-End: 490-6711
gacaacaacagggggacacaaaatggcggcggcttagctcctacccctggcggcggcggcagcggtggcggaggcgacggcacctcctccaggcggcagccgcagtttctcaggcagcggcagcgcccccggcaggcgcggtggcggtggcgcgcagccagatttgcctgaagacctggataatctccatttttgtcatggactgttaaaacgtttgaagttccaattctggtcttgatttcccagttaaagatgttcttcacccgaatgcagtctttcctgttggtaaaataagacaaccatcaacattgcctgtttgtctgcttttgaatctcttaaggatggatgtttgtaagatgttgcttaatacagtctggaatactctgtccatttgttgaattgtaaatgactttcaaatgtgcaagttctgttaaatacaaagagaacctctatgggtaacttttgtgttgaagaagtcatttgtcaaccatggtaaaacttgcaaacccactttatacagagtggattcttgaagctatacagaaaataaaaaagcaaaagcaaaggccctctgaagagagaatctgccatgcggtcagtacttcccatgggttggataagaagacagtctctgaacagctggaactcagtgttcaggatggctcagttctcaaagtcaccaacaaaggccttgcctcctataaggacccagacaaccctgggcgcttttcatcagttaaaccaggcacttttcctaagtcagccaaggggtctagaggatcatgtaatgatctccgcaatgtggattggaataaacttttaaggagagcaattgaaggacttgaggagccgaatggctcctccctgaagaacatagagaagtatctcagaagtcaaagtgatctcacaagcaccaccaacaacccagcctttcagcagcggctgcgactgggggccaaacgcgctgtgaataatgggaggttactgaaagacggaccgcagtacagggtcaattatgggagcttagatggcaaaggggcacctcagtatcccagtgcattcccatcctcgctcccacctgtcagccttctaccccatgagaaagaccagccccgtgctgatcccattccaatatgtagcttctgtttggggactaaagaatcaaatcgtgaaaagaaaccagaagaactcctctcttgtgcagattgtggcagtagtggacacccatcctgtttgaaattttgtcctgaattaacaacaaatgtaaaggccttaaggtggcagtgcatcgaatgcaagacatgcagtgcctgtagagtccaaggcagaaatgctgataatatgcttttttgtgattcctgtgatagaggatttcatatggaatgctgtgacccaccactttccagaatgccaaaagggatgtggatttgccaagtctgcagaccaaagaaaaagggaagaaaactacttcatgagaaagctgcacaaataaaacgacgatatgcaaaacccattggacgaccgaaaaataaattaaagcaacgattgttgtctgtaaccagtgatgaaggatccatgaatgcattcacaggaagggggtcacctggtaggggtcaaaagactaaagtctgtaccacaccttcatctggtcatgctgcatctgggaaggactcaagcagcagattggctgttacagaccccactcggcctggtgccaccaccaaaatcaccaccacctccacctacatttctgcctctacacttaaagttaacaagaaaaccaaagggctcattgatggccttactaagttttttacaccatcacctgatggtcgcagatcacgaggtgaaattatagacttttcaaagcactatcgtccaaggaaaaaggtctctcagaaacagtcatgcacttctcatgtgttggctacaggtaccacacaaaagctaaaacctccaccttcttcacttccacccccaacccccatctccggtcagagccccagttcacaaaagtccagcacggccacttcttctccctctccccagagttcttccagccagtgcagtgtgccctccctgagcagccttaccactaacagccagctgaaggcactctttgatgggctttctcatatctataccactcagggacagtctcgcaaaaagggacacccgagttatgcaccacccaaacgtatgcgtcgtaaaactgaattatcttccacggcaaaatctaaagcccacttctttggcaaaagagatattagaagtcggtttatttctcactcctcctcctctagctgggggatggctagaggaagtatttttaaagcaattgctcacttcaagcgaacaactttccttaaaaagcacaggatgctaggcagattaaaatataaagtgacccctcagatggggaccccctcaccagggaaggggagcttgacagacggaaggattaaacctgatcaggatgatgatactgaaataaaaataaacatcaaacaagaaagtgcagatgtaaatgtgattggaaacaaggatgtcgttactgaagaggatttggatgtttttaagcaggcccaggaactttcttgggagaaaatagagtgtgagagtggggtggaagactgtggccggtacccttctgtgattgaatttggtaaatatgaaatccaaacctggtactcctcgccttacccacaggaatatgcaagattaccaaagctttacctgtgtgaattctgtcttaaatatatgaaaagtaaaaatattttgctaagacactccaagaagtgtggatggtttcatcctccagcaaatgaaatttaccgaaggaaagacctttcagtatttgaggttgatgggaatatgagcaaaatttattgccaaaacctttgcttgttagccaagctcttcctggaccacaaaacgttgtattatgatgtcgagccattccttttttatgtccttacaaaaaatgatgaaaagggctgtcatctggttggatacttctctaaggaaaagctttgccagcagaagtataatgtctcctgcataatgatcatgccccagcaccaaaggcaaggatttggacggtttctcattgatttcagctatttgctttctagaagagaaggccaagcagggtctcctgaaaagcctctctccgatctgggccgtctctcctacctggcatattggaagagcgtcatcttggagtatctctaccaccaccatgagaggcacatcagcatcaaggcaattagcagagcgacgggcatgtgcccacatgacattgccaccactctgcagcacctccacatgatcgacaagagagatggcagatttgtcatcattagacgggaaaagttgatattgagccacatggaaaagctgaaaacctgttccagagccaatgaacttgatccagacagtctgaggtggaccccaattttaatttctaatgctgcagtgtctgaagaagagcgagaagctgagaaagaggctgagcggctaatggaacaagctagctgctgggagaaggaggaacaagaaatcctgtcaactagagctaacagtaggcaatcacctgcaaaagtacaatcgaaaaataaatatttgcattccccggagagccggccagtcacaggggagcgagggcagctgctggagctgtctaaagagagcagtgaagaagaagaggaggaggaggacgaggaggaggaagaagaggaggaagaagaggaagaggatgaagaggaggaagaagaggaagaagaagaagaagaagaagaaaatattcaaagctctcccccaagattgacgaaaccacagtcagttgccataaagagaaagaggccttttgtactaaagaagaaaaggggtcgtaaacgcaggaggatcaacagcagtgtaacaacagagaccatttcagagacgacagaagtactgaatgagccctttgacaactcagatgaagagaggccaatgccacagctggagcctacctgtgagattgaagtggaggaagatggcaggaagccagtcctgagaaaagcattccagcatcagcctgggaagaaaagacaaacagaggaagaggaaggaaaagacaatcattgcttcaagaatgctgacccttgtagaaacaatatgaatgatgattcaagtaacttgaaagaaggcagtaaagacaatcccgaacctctaaagtgcaaacaagtgtggccaaaaggaacaaagcgcggtctatctaagtggaggcaaaacaaagagaggaagaccggatttaaactgaatttgtacaccccgccagaaacacccatggagcctgacgagcaggtaacagtggaagaacagaaggagacttcagaaggaaaaaccagccccagtcccatcaggattgaggaggaggtcaaggaaactggggaagccctgttgcctcaagaggaaaacagaagggaagaaacatgtgcccctgtaagtccaaacacatcaccaggtgaaaaaccagaagatgatctcatcaaacctgaggaagaggaagaggaggaggaggaggaagaggaagaagaggaagaagaggaaggggaagaagaagaaggaggaggaaatgtagaaaaagatccagatggtgctaaaagccaagaaaaagaggaaccagaaatctccacggaaaaagaagactctgcacgtttggatgatcacgaagaggaggaggaagaggatgaagagccatcccacaacgaggaccatgatgccgatgacgaggatgacagccacatggagtctgccgaagtggagaaggaagagctgcccagagaaagcttcaaagaagtactggaaaaccaggagacttttttagaccttaatgtgcagcctggtcactcgaacccagaggtcttaatggactgtggcgtcgacctgacagcttcttgtaacagtgagcccaaggagcttgctggggaccctgaagctgtacccgaatctgacgaggagccacccccaggagaacaggcacagaagcaggaccaaaagaacagcaaggaagtcgatacagagttcaaagagggaaacccagcaaccatggaaatcgactctgagactgtccaggccgttcagtctttgacccaggagagcagcgaacaggacgacacctttcaggattgtgccgagactcaagaggcctgtagaagcctacagaactacacccgtgcagaccaaagtccacagattgccaccacgctcgacgattgccaacagtcggaccacagtagcccagtttcatccgtccactcccatcctggccagtccgtacgttctgtcaacagcccaagtgtccctgctctggaaaacagctacgcccaaatcagcccagatcaaagtgccatctcagtgccatctctgcagaacatggaaaccagtcccatgatggatgtcccatcagtttcagatcattcacagcaagtcgtagacagtggatttagtgacctgggcagtatcgagagcacaactgagaactacgaaaacccaagcagctacgattctactatgggaggcagcatctgtggaaacggctcttcacagaacagctgctcctatagcaacctcacctccagcagtctgacacagagcagctgtgctgtcacccagcagatgtccaacatcagcgggagctgcagcatgctgcagcaaaccagcatcagctcccctccgacctgcagcgtcaagtctcctcaaggctgtgtggtggagaggcctccgagcagcagccagcagctggctcagtgcagcatggctgctaacttcaccccacccatgcagctggctgaaatccccgagacgagcaacgccaacattggcttatacgagcgaatgggtcagagtgattttggggctgggcattacccgcagccgtcagccaccttcagccttgccaaactgcagcagttaactaatacacttattgatcattcattgccttacagccattccgctgctgtgacttcctatgcaaacagtgcctctttgtccacaccattaagtaacacagggcttgttcaactttctcagtctccacactccgtccctgggggaccccaagcacaagctaccatgaccccaccccccaacctgactcctcctccaatgaatctgccgccgcctcttttgcaacggaacatggctgcatcaaatattggcatctctcacagccaaagactgcaaacccagattgccagcaagggccacatctccatgagaaccaagtcagcgtctctgtcaccagccgctgccacccatcagtcacaaatctatgggcgctcccagactgtagccatgcagggtcctgcacggactttaacgatgcaaagaggcatgaacatgagtgtgaacctgatgccagcgccagcctacaatgtcaactctgtgaacatgaacatgaacactctcaacgccatgaatgggtacagcatgtcccagccaatgatgaacagtggctaccacagcaatcatggctatatgaatcaaacgccccaataccctatgcagatgcagatgggcatgatgggcacccagccatatgcccagcagccaatgcagaccccaccccacggtaacatgatgtacacggcccccggacatcacggctacatgaacacaggcatgtccaaacagtctctcaatggctcctacatgagaaggtagacaacgtgggcagtccacaaaacctacggggcatcactattggattgatctgcacaaatacctttgaagagtacgatttcaaaaccagcaattggtgtgaatgcaaaaacatttgttggcaccatttatttaaaaaaaaaaaaagctgtatgcagcagaaagccttatacaagttgtttttctttttttcctttttcttttttttggtaccttcatttctgttacttttatataaaattctctgcaaaggaaggcctctctttggactacaatttggaggcagccacttgttgtgcctgcttctgttaaacaatgtggatatcaagcccccccaaattatctgttttaatattgaacctagagctttttttttcccttccctgtccactccatgtaaatgcctttagcatttcagttattgtatattttgtttaaggtgacacttcagcatgccgctaatgtctttgttagtgacagtgcattttgtagtactgtacaagtgttgtgctaacagtaagccatttcttaagttttttgccttgattagggtgccctaatttgagggttttaaaaaaaactatatttttgttaattataaaactgtaaagagctataaaagctattcccatttggttagtcaaaagggttttattgctaaatgtttggtgtaaagttgagacccttttccattttggtgacagatttctttggggaaaaaaggcagctttctgttttataaatgcagacttctgtttattgaatgaagcatatctcagtgtttatctgtcaggttttgaaacatttcatatatgtccaaatacttggcaggatttaaaaaaaaatagtgaatttggtgtaaagttgctattttatggaaatgcctctaactttacattttcattccatctgtagatttttctatctttataaaatattggagttattttttaaggaaaaatagaaaagtagcttgtgaatagctcaaactaagcttacaaatcgcatgtaaaaaagcaaaaaagttatttgtgtctgtttatattgcttccttttttgtagcctttgtacctgtacagggtgacagtaagggccaagcaggagaggcgtaatccttgtataaaataggatccagcgacactcttgtatttatctgttctctttttagtcagtcacttcaaaaaaacaaaaaacaaacaaaaaaaagctgtacattttaacataaaataaattatgatgagccatttttagcctcttgtgtcctgtcatattatgattgatagagaatgaccaatggaactgtatcatgtgtcacgcctcagaacacatacacattttgggaaaataaattatttagtgtaaattggagttatgggattttctgatttgttttgactttgggggaggggttggcaataaataagagtaatatctaataaaaccatcacatataccaaatacctatttaataaattaatttataatggattttaatgcttttcatgaaagtttattttatgcgagtgcataccttctgtatgccaatcattgtctttaaaataaagtgaaattgtttttt

SEQ ID NO: 144870 - DNA, 7560 bp, Homo sapiens
  Payload ID: 8633
  Gene Symbol: KAT6B
  Gene Name: K(lysine) acetyltransferase 6B
  Uniprot ID: Q8WYB5
  ENST ID: ENST00000372711
  CDS Start-End: 312-5984
gataatctccatttttgtcatggactgttaaaacgtttgaagttccaattctggtcttgatttcccagttaaagatgttcttcacccgaatgcagtctttcctgttggtaaaataagacaaccatcaacattgcctgtttgtctgcttttgaatctcttaaggatggatgtttgtaagatgttgcttaatacagtctggaatactctgtccatttgttgaattgtaaatgactttcaaatgtgcaagttctgttaaatacaaagagaacctctatgggtaacttttgtgttgaagaagtcatttgtcaaccatggtaaaacttgcaaacccactttatacagagtggattcttgaagctatacagaaaataaaaaagcaaaagcaaaggccctctgaagagagaatctgccatgcggtcagtacttcccatgggttggataagaagacagtctctgaacagctggaactcagtgttcaggatggctcagttctcaaagtcaccaacaaaggccttgcctcctataaggacccagacaaccctgggcgcttttcatcagttaaaccaggcacttttcctaagtcagccaaggggtctagaggatcatgtaatgatctccgcaatgtggattggaataaacttttaaggagagcaattgaaggacttgaggagccgaatggctcctccctgaagaacatagagaagtatctcagaagtcaaagtgatctcacaagcaccaccaacaacccagcctttcagcagcggctgcgactgggggccaaacgcgctgtgaataatgggaggttactgaaagacggaccgcagtacagggtcaattatgggagcttagatggcaaaggggcacctcagtatcccagtgcattcccatcctcgctcccacctgtcagccttctaccccatgagaaagaccagccccgtgctgatcccattccaatatgtagcttctgtttggggactaaagaatcaaatcgtgaaaagaaaccagaagaactcctctcttgtgcagattgtggcagtagtggacacccatcctgtttgaaattttgtcctgaattaacaacaaatgtaaaggccttaaggtggcagtgcatcgaatgcaagacatgcagtgcctgtagagtccaaggcagaaatgctgataatatgcttttttgtgattcctgtgatagaggatttcatatggaatgctgtgacccaccactttccagaatgccaaaagggatgtggatttgccaagtctgcagaccaaagaaaaagggaagaaaactacttcatgagaaagctgcacaaataaaacgacgatatgcaaaacccattggacgaccgaaaaataaattaaagcaacgattgttgtctgtaaccagtgatgaaggatccatgaatgcattcacaggaagggggtcacctggtaggggtcaaaagactaaagtctgtaccacaccttcatctggtcatgctgcatctgggaaggactcaagcagcagattggctgttacagaccccactcggcctggtgccaccaccaaaatcaccaccacctccacctacatttctgcctctacacttaaagttaacaagaaaaccaaagggctcattgatggccttactaagttttttacaccatcacctgatggtcgcagatcacgaggtgaaattatagacttttcaaagcactatcgtccaaggaaaaaggtctctcagaaacagtcatgcacttctcatgtgttggctacagatactgaaataaaaataaacatcaaacaagaaagtgcagatgtaaatgtgattggaaacaaggatgtcgttactgaagaggatttggatgtttttaagcaggcccaggaactttcttgggagaaaatagagtgtgagagtggggtggaagactgtggccggtacccttctgtgattgaatttggtaaatatgaaatccaaacctggtactcctcgccttacccacaggaatatgcaagattaccaaagctttacctgtgtgaattctgtcttaaatatatgaaaagtaaaaatattttgctaagacactccaagaagtgtggatggtttcatcctccagcaaatgaaatttaccgaaggaaagacctttcagtatttgaggttgatgggaatatgagcaaaatttattgccaaaacctttgcttgttagccaagctcttcctggaccacaaaacgttgtattatgatgtcgagccattccttttttatgtccttacaaaaaatgatgaaaagggctgtcatctggttggatacttctctaaggaaaagctttgccagcagaagtataatgtctcctgcataatgatcatgccccagcaccaaaggcaaggatttggacggtttctcattgatttcagctatttgctttctagaagagaaggccaagcagggtctcctgaaaagcctctctccgatctgggccgtctctcctacctggcatattggaagagcgtcatcttggagtatctctaccaccaccatgagaggcacatcagcatcaaggcaattagcagagcgacgggcatgtgcccacatgacattgccaccactctgcagcacctccacatgatcgacaagagagatggcagatttgtcatcattagacgggaaaagttgatattgagccacatggaaaagctgaaaacctgttccagagccaatgaacttgatccagacagtctgaggtggaccccaattttaatttctaatgctgcagtgtctgaagaagagcgagaagctgagaaagaggctgagcggctaatggaacaagctagctgctgggagaaggaggaacaagaaatcctgtcaactagagctaacagtaggcaatcacctgcaaaagtacaatcgaaaaataaatatttgcattccccggagagccggccagtcacaggggagcgagggcagctgctggagctgtctaaagagagcagtgaagaagaagaggaggaggaggacgaggaggaggaagaagaggaggaagaagaggaagaggatgaagaggaggaagaagaggaagaagaagaagaagaagaagaaaatattcaaagctctcccccaagattgacgaaaccacagtcagttgccataaagagaaagaggccttttgtactaaagaagaaaaggggtcgtaaacgcaggaggatcaacagcagtgtaacaacagagaccatttcagagacgacagaagtactgaatgagccctttgacaactcagatgaagagaggccaatgccacagctggagcctacctgtgagattgaagtggaggaagatggcaggaagccagtcctgagaaaagcattccagcatcagcctgggaagaaaagacaaacagaggaagaggaaggaaaagacaatcattgcttcaagaatgctgacccttgtagaaacaatatgaatgatgattcaagtaacttgaaagaaggcagtaaagacaatcccgaacctctaaagtgcaaacaagtgtggccaaaaggaacaaagcgcggtctatctaagtggaggcaaaacaaagagaggaagaccggatttaaactgaatttgtacaccccgccagaaacacccatggagcctgacgagcaggtaacagtggaagaacagaaggagacttcagaaggaaaaaccagccccagtcccatcaggattgaggaggaggtcaaggaaactggggaagccctgttgcctcaagaggaaaacagaagggaagaaacatgtgcccctgtaagtccaaacacatcaccaggtgaaaaaccagaagatgatctcatcaaacctgaggaagaggaagaggaggaggaggaggaagaggaagaagaggaagaagaggaaggggaagaagaagaaggaggaggaaatgtagaaaaagatccagatggtgctaaaagccaagaaaaagaggaaccagaaatctccacggaaaaagaagactctgcacgtttggatgatcacgaagaggaggaggaagaggatgaagagccatcccacaacgaggaccatgatgccgatgacgaggatgacagccacatggagtctgccgaagtggagaaggaagagctgcccagagaaagcttcaaagaagtactggaaaaccaggagacttttttagaccttaatgtgcagcctggtcactcgaacccagaggtcttaatggactgtggcgtcgacctgacagcttcttgtaacagtgagcccaaggagcttgctggggaccctgaagctgtacccgaatctgacgaggagccacccccaggagaacaggcacagaagcaggaccaaaagaacagcaaggaagtcgatacagagttcaaagagggaaacccagcaaccatggaaatcgactctgagactgtccaggccgttcagtctttgacccaggagagcagcgaacaggacgacacctttcaggattgtgccgagactcaagaggcctgtagaagcctacagaactacacccgtgcagaccaaagtccacagattgccaccacgctcgacgattgccaacagtcggaccacagtagcccagtttcatccgtccactcccatcctggccagtccgtacgttctgtcaacagcccaagtgtccctgctctggaaaacagctacgcccaaatcagcccagatcaaagtgccatctcagtgccatctctgcagaacatggaaaccagtcccatgatggatgtcccatcagtttcagatcattcacagcaagtcgtagacagtggatttagtgacctgggcagtatcgagagcacaactgagaactacgaaaacccaagcagctacgattctactatgggaggcagcatctgtggaaacggctcttcacagaacagctgctcctatagcaacctcacctccagcagtctgacacagagcagctgtgctgtcacccagcagatgtccaacatcagcgggagctgcagcatgctgcagcaaaccagcatcagctcccctccgacctgcagcgtcaagtctcctcaaggctgtgtggtggagaggcctccgagcagcagccagcagctggctcagtgcagcatggctgctaacttcaccccacccatgcagctggctgaaatccccgagacgagcaacgccaacattggcttatacgagcgaatgggtcagagtgattttggggctgggcattacccgcagccgtcagccaccttcagccttgccaaactgcagcagttaactaatacacttattgatcattcattgccttacagccattccgctgctgtgacttcctatgcaaacagtgcctctttgtccacaccattaagtaacacagggcttgttcaactttctcagtctccacactccgtccctgggggaccccaagcacaagctaccatgaccccaccccccaacctgactcctcctccaatgaatctgccgccgcctcttttgcaacggaacatggctgcatcaaatattggcatctctcacagccaaagactgcaaacccagattgccagcaagggccacatctccatgagaaccaagtcagcgtctctgtcaccagccgctgccacccatcagtcacaaatctatgggcgctcccagactgtagccatgcagggtcctgcacggactttaacgatgcaaagaggcatgaacatgagtgtgaacctgatgccagcgccagcctacaatgtcaactctgtgaacatgaacatgaacactctcaacgccatgaatgggtacagcatgtcccagccaatgatgaacagtggctaccacagcaatcatggctatatgaatcaaacgccccaataccctatgcagatgcagatgggcatgatgggcacccagccatatgcccagcagccaatgcagaccccaccccacggtaacatgatgtacacggcccccggacatcacggctacatgaacacaggcatgtccaaacagtctctcaatggctcctacatgagaaggtagacaacgtgggcagtccacaaaacctacggggcatcactattggattgatctgcacaaatacctttgaagagtacgatttcaaaaccagcaattggtgtgaatgcaaaaacatttgttggcaccatttatttaaaaaaaaaaaaagctgtatgcagcagaaagccttatacaagttgtttttctttttttcctttttcttttttttggtaccttcatttctgttacttttatataaaattctctgcaaaggaaggcctctctttggactacaatttggaggcagccacttgttgtgcctgcttctgttaaacaatgtggatatcaagcccccccaaattatctgttttaatattgaacctagagctttttttttcccttccctgtccactccatgtaaatgcctttagcatttcagttattgtatattttgtttaaggtgacacttcagcatgccgctaatgtctttgttagtgacagtgcattttgtagtactgtacaagtgttgtgctaacagtaagccatttcttaagttttttgccttgattagggtgccctaatttgagggttttaaaaaaaactatatttttgttaattataaaactgtaaagagctataaaagctattcccatttggttagtcaaaagggttttattgctaaatgtttggtgtaaagttgagacccttttccattttggtgacagatttctttggggaaaaaaggcagctttctgttttataaatgcagacttctgtttattgaatgaagcatatctcagtgtttatctgtcaggttttgaaacatttcatatatgtccaaatacttggcaggatttaaaaaaaaatagtgaatttggtgtaaagttgctattttatggaaatgcctctaactttacattttcattccatctgtagatttttctatctttataaaatattggagttattttttaaggaaaaatagaaaagtagcttgtgaatagctcaaactaagcttacaaatcgcatgtaaaaaagcaaaaaagttatttgtgtctgtttatattgcttccttttttgtagcctttgtacctgtacagggtgacagtaagggccaagcaggagaggcgtaatccttgtataaaataggatccagcgacactcttgtatttatctgttctctttttagtcagtcacttcaaaaaaacaaaaaacaaacaaaaaaaagctgtacattttaacataaaataaattatgatgagccatttttagcctcttgtgtcctgtcatattatgattgatagagaatgaccaatggaactgtatcatgtgtcacgcctcagaacacatacacattttgggaaaataaattatttagtgtaaattggagttatgggattttctgatttgttttgactttgggggaggggttggcaataaataagagtaatatctaataaaaccatcacatataccaaatacctatttaataaattaatttataatggattttaatgcttttcatgaaagtttattttatgcgagtgcataccttctgtatgccaatcattgtctttaaaataaagtgaaattgtttttt

SEQ ID NO: 144871 - DNA, 5892 bp, Homo sapiens
  Payload ID: 8633
  Gene Symbol: KAT6B
  Gene Name: K(lysine) acetyltransferase 6B
  Uniprot ID: Q8WYB5
  ENST ID: ENST00000372714
  CDS Start-End: 403-5748
acaaaatggcggcggcttagctcctacccctggcggcggcggcagcggtggcggaggcgacggcacctcctccaggcggcagccgcagtttctcaggcagcggcagcgcccccggcaggcgcggtggcggtggcgcgcagccaggtcttgatttcccagttaaagatgttcttcacccgaatgcagtctttcctgttggtaaaataagacaaccatcaacattgcctgtttgtctgcttttgaatctcttaaggatggatgtttgtaagatgttgcttaatacagtctggaatactctgtccatttgttgaattgtaaatgactttcaaatgtgcaagttctgttaaatacaaagagaacctctatgggtaacttttgtgttgaagaagtcatttgtcaaccatggtaaaacttgcaaacccactttatacagagtggattcttgaagctatacagaaaataaaaaagcaaaagcaaaggccctctgaagagagaatctgccatgcggtcagtacttcccatgggttggataagaagacagtctctgaacagctggaactcagtgttcaggatggctcagttctcaaagtcaccaacaaaggccttgcctcctataaggacccagacaaccctgggcgcttttcatcagttaaaccaggcacttttcctaagtcagccaaggggtctagaggatcatgtaatgatctccgcaatgtggattggaataaacttttaaggagagcaattgaaggacttgaggagccgaatggctcctccctgaagaacatagagaagtatctcagaagtcaaagtgatctcacaagcaccaccaacaacccagcctttcagcagcggctgcgactgggggccaaacgcgctgtgaataatgggaggttactgaaagacggaccgcagtacagggtcaattatgggagcttagatggcaaaggggcacctcagtatcccagtgcattcccatcctcgctcccacctgtcagccttctaccccatgagaaagaccagccccgtgctgatcccattccaatatgtagcttctgtttggggactaaagaatcaaatcgtgaaaagaaaccagaagaactcctctcttgtgcagattgtggcagtagtggacacccatcctgtttgaaattttgtcctgaattaacaacaaatgtaaaggccttaaggtggcagtgcatcgaatgcaagacatgcagtgcctgtagagtccaaggcagaaatgctgataatatgcttttttgtgattcctgtgatagaggatttcatatggaatgctgtgacccaccactttccagaatgccaaaagggatgtggatttgccaagtctgcagaccaaagaaaaagggaagaaaactacttcatgagaaagctgcacaaataaaacgacgatatgcaaaacccattggacgaccgaaaaataaattaaagcaacgattgttgtctgtaaccagtgatgaaggatccatgaatgcattcacaggaagggggtcacctgatactgaaataaaaataaacatcaaacaagaaagtgcagatgtaaatgtgattggaaacaaggatgtcgttactgaagaggatttggatgtttttaagcaggcccaggaactttcttgggagaaaatagagtgtgagagtggggtggaagactgtggccggtacccttctgtgattgaatttggtaaatatgaaatccaaacctggtactcctcgccttacccacaggaatatgcaagattaccaaagctttacctgtgtgaattctgtcttaaatatatgaaaagtaaaaatattttgctaagacactccaagaagtgtggatggtttcatcctccagcaaatgaaatttaccgaaggaaagacctttcagtatttgaggttgatgggaatatgagcaaaatttattgccaaaacctttgcttgttagccaagctcttcctggaccacaaaacgttgtattatgatgtcgagccattccttttttatgtccttacaaaaaatgatgaaaagggctgtcatctggttggatacttctctaaggaaaagctttgccagcagaagtataatgtctcctgcataatgatcatgccccagcaccaaaggcaaggatttggacggtttctcattgatttcagctatttgctttctagaagagaaggccaagcagggtctcctgaaaagcctctctccgatctgggccgtctctcctacctggcatattggaagagcgtcatcttggagtatctctaccaccaccatgagaggcacatcagcatcaaggcaattagcagagcgacgggcatgtgcccacatgacattgccaccactctgcagcacctccacatgatcgacaagagagatggcagatttgtcatcattagacgggaaaagttgatattgagccacatggaaaagctgaaaacctgttccagagccaatgaacttgatccagacagtctgaggtggaccccaattttaatttctaatgctgcagtgtctgaagaagagcgagaagctgagaaagaggctgagcggctaatggaacaagctagctgctgggagaaggaggaacaagaaatcctgtcaactagagctaacagtaggcaatcacctgcaaaagtacaatcgaaaaataaatatttgcattccccggagagccggccagtcacaggggagcgagggcagctgctggagctgtctaaagagagcagtgaagaagaagaggaggaggaggacgaggaggaggaagaagaggaggaagaagaggaagaggatgaagaggaggaagaagaggaagaagaagaagaagaagaagaaaatattcaaagctctcccccaagattgacgaaaccacagtcagttgccataaagagaaagaggccttttgtactaaagaagaaaaggggtcgtaaacgcaggaggatcaacagcagtgtaacaacagagaccatttcagagacgacagaagtactgaatgagccctttgacaactcagatgaagagaggccaatgccacagctggagcctacctgtgagattgaagtggaggaagatggcaggaagccagtcctgagaaaagcattccagcatcagcctgggaagaaaagacaaacagaggaagaggaaggaaaagacaatcattgcttcaagaatgctgacccttgtagaaacaatatgaatgatgattcaagtaacttgaaagaaggcagtaaagacaatcccgaacctctaaagtgcaaacaagtgtggccaaaaggaacaaagcgcggtctatctaagtggaggcaaaacaaagagaggaagaccggatttaaactgaatttgtacaccccgccagaaacacccatggagcctgacgagcaggtaacagtggaagaacagaaggagacttcagaaggaaaaaccagccccagtcccatcaggattgaggaggaggtcaaggaaactggggaagccctgttgcctcaagaggaaaacagaagggaagaaacatgtgcccctgtaagtccaaacacatcaccaggtgaaaaaccagaagatgatctcatcaaacctgaggaagaggaagaggaggaggaggaggaagaggaagaagaggaagaagaggaaggggaagaagaagaaggaggaggaaatgtagaaaaagatccagatggtgctaaaagccaagaaaaagaggaaccagaaatctccacggaaaaagaagactctgcacgtttggatgatcacgaagaggaggaggaagaggatgaagagccatcccacaacgaggaccatgatgccgatgacgaggatgacagccacatggagtctgccgaagtggagaaggaagagctgcccagagaaagcttcaaagaagtactggaaaaccaggagacttttttagaccttaatgtgcagcctggtcactcgaacccagaggtcttaatggactgtggcgtcgacctgacagcttcttgtaacagtgagcccaaggagcttgctggggaccctgaagctgtacccgaatctgacgaggagccacccccaggagaacaggcacagaagcaggaccaaaagaacagcaaggaagtcgatacagagttcaaagagggaaacccagcaaccatggaaatcgactctgagactgtccaggccgttcagtctttgacccaggagagcagcgaacaggacgacacctttcaggattgtgccgagactcaagaggcctgtagaagcctacagaactacacccgtgcagaccaaagtccacagattgccaccacgctcgacgattgccaacagtcggaccacagtagcccagtttcatccgtccactcccatcctggccagtccgtacgttctgtcaacagcccaagtgtccctgctctggaaaacagctacgcccaaatcagcccagatcaaagtgccatctcagtgccatctctgcagaacatggaaaccagtcccatgatggatgtcccatcagtttcagatcattcacagcaagtcgtagacagtggatttagtgacctgggcagtatcgagagcacaactgagaactacgaaaacccaagcagctacgattctactatgggaggcagcatctgtggaaacggctcttcacagaacagctgctcctatagcaacctcacctccagcagtctgacacagagcagctgtgctgtcacccagcagatgtccaacatcagcgggagctgcagcatgctgcagcaaaccagcatcagctcccctccgacctgcagcgtcaagtctcctcaaggctgtgtggtggagaggcctccgagcagcagccagcagctggctcagtgcagcatggctgctaacttcaccccacccatgcagctggctgaaatccccgagacgagcaacgccaacattggcttatacgagcgaatgggtcagagtgattttggggctgggcattacccgcagccgtcagccaccttcagccttgccaaactgcagcagttaactaatacacttattgatcattcattgccttacagccattccgctgctgtgacttcctatgcaaacagtgcctctttgtccacaccattaagtaacacagggcttgttcaactttctcagtctccacactccgtccctgggggaccccaagcacaagctaccatgaccccaccccccaacctgactcctcctccaatgaatctgccgccgcctcttttgcaacggaacatggctgcatcaaatattggcatctctcacagccaaagactgcaaacccagattgccagcaagggccacatctccatgagaaccaagtcagcgtctctgtcaccagccgctgccacccatcagtcacaaatctatgggcgctcccagactgtagccatgcagggtcctgcacggactttaacgatgcaaagaggcatgaacatgagtgtgaacctgatgccagcgccagcctacaatgtcaactctgtgaacatgaacatgaacactctcaacgccatgaatgggtacagcatgtcccagccaatgatgaacagtggctaccacagcaatcatggctatatgaatcaaacgccccaataccctatgcagatgcagatgggcatgatgggcacccagccatatgcccagcagccaatgcagaccccaccccacggtaacatgatgtacacggcccccggacatcacggctacatgaacacaggcatgtccaaacagtctctcaatggctcctacatgagaaggtagacaacgtgggcagtccacaaaacctacggggcatcactattggattgatctgcacaaatacctttgaagagtacgatttcaaaaccagcaattggtgtgaatgcaaaaacatttgttggcaccatttatttaaaaaaaaaaaaa

SEQ ID NO: 144872 - DNA, 7106 bp, Homo sapiens
  Payload ID: 8633
  Gene Symbol: KAT6B
  Gene Name: K(lysine) acetyltransferase 6B
  Uniprot ID: Q8WYB5
  ENST ID: ENST00000372724
  CDS Start-End: 515-5860
agtgtcatgtcggattcatgtcaacgacaacaacagggggacacaaaatggcggcggcttagctcctacccctggcggcggcggcagcggtggcggaggcgacggcacctcctccaggcggcagccgcagtttctcaggcagcggcagcgcccccggcaggcgcggtggcggtggcgcgcagccagatttgcctgaagacctggataatctccatttttgtcatggactgttaaaacgtttgaagttccaattctggtcttgatttcccagttaaagatgttcttcacccgaatgcagtctttcctgttggtaaaataagacaaccatcaacattgcctgtttgtctgcttttgaatctcttaaggatggatgtttgtaagatgttgcttaatacagtctggaatactctgtccatttgttgaattgtaaatgactttcaaatgtgcaagttctgttaaatacaaagagaacctctatgggtaacttttgtgttgaagaagtcatttgtcaaccatggtaaaacttgcaaacccactttatacagagtggattcttgaagctatacagaaaataaaaaagcaaaagcaaaggccctctgaagagagaatctgccatgcggtcagtacttcccatgggttggataagaagacagtctctgaacagctggaactcagtgttcaggatggctcagttctcaaagtcaccaacaaaggccttgcctcctataaggacccagacaaccctgggcgcttttcatcagttaaaccaggcacttttcctaagtcagccaaggggtctagaggatcatgtaatgatctccgcaatgtggattggaataaacttttaaggagagcaattgaaggacttgaggagccgaatggctcctccctgaagaacatagagaagtatctcagaagtcaaagtgatctcacaagcaccaccaacaacccagcctttcagcagcggctgcgactgggggccaaacgcgctgtgaataatgggaggttactgaaagacggaccgcagtacagggtcaattatgggagcttagatggcaaaggggcacctcagtatcccagtgcattcccatcctcgctcccacctgtcagccttctaccccatgagaaagaccagccccgtgctgatcccattccaatatgtagcttctgtttggggactaaagaatcaaatcgtgaaaagaaaccagaagaactcctctcttgtgcagattgtggcagtagtggacacccatcctgtttgaaattttgtcctgaattaacaacaaatgtaaaggccttaaggtggcagtgcatcgaatgcaagacatgcagtgcctgtagagtccaaggcagaaatgctgataatatgcttttttgtgattcctgtgatagaggatttcatatggaatgctgtgacccaccactttccagaatgccaaaagggatgtggatttgccaagtctgcagaccaaagaaaaagggaagaaaactacttcatgagaaagctgcacaaataaaacgacgatatgcaaaacccattggacgaccgaaaaataaattaaagcaacgattgttgtctgtaaccagtgatgaaggatccatgaatgcattcacaggaagggggtcacctgatactgaaataaaaataaacatcaaacaagaaagtgcagatgtaaatgtgattggaaacaaggatgtcgttactgaagaggatttggatgtttttaagcaggcccaggaactttcttgggagaaaatagagtgtgagagtggggtggaagactgtggccggtacccttctgtgattgaatttggtaaatatgaaatccaaacctggtactcctcgccttacccacaggaatatgcaagattaccaaagctttacctgtgtgaattctgtcttaaatatatgaaaagtaaaaatattttgctaagacactccaagaagtgtggatggtttcatcctccagcaaatgaaatttaccgaaggaaagacctttcagtatttgaggttgatgggaatatgagcaaaatttattgccaaaacctttgcttgttagccaagctcttcctggaccacaaaacgttgtattatgatgtcgagccattccttttttatgtccttacaaaaaatgatgaaaagggctgtcatctggttggatacttctctaaggaaaagctttgccagcagaagtataatgtctcctgcataatgatcatgccccagcaccaaaggcaaggatttggacggtttctcattgatttcagctatttgctttctagaagagaaggccaagcagggtctcctgaaaagcctctctccgatctgggccgtctctcctacctggcatattggaagagcgtcatcttggagtatctctaccaccaccatgagaggcacatcagcatcaaggcaattagcagagcgacgggcatgtgcccacatgacattgccaccactctgcagcacctccacatgatcgacaagagagatggcagatttgtcatcattagacgggaaaagttgatattgagccacatggaaaagctgaaaacctgttccagagccaatgaacttgatccagacagtctgaggtggaccccaattttaatttctaatgctgcagtgtctgaagaagagcgagaagctgagaaagaggctgagcggctaatggaacaagctagctgctgggagaaggaggaacaagaaatcctgtcaactagagctaacagtaggcaatcacctgcaaaagtacaatcgaaaaataaatatttgcattccccggagagccggccagtcacaggggagcgagggcagctgctggagctgtctaaagagagcagtgaagaagaagaggaggaggaggacgaggaggaggaagaagaggaggaagaagaggaagaggatgaagaggaggaagaagaggaagaagaagaagaagaagaagaaaatattcaaagctctcccccaagattgacgaaaccacagtcagttgccataaagagaaagaggccttttgtactaaagaagaaaaggggtcgtaaacgcaggaggatcaacagcagtgtaacaacagagaccatttcagagacgacagaagtactgaatgagccctttgacaactcagatgaagagaggccaatgccacagctggagcctacctgtgagattgaagtggaggaagatggcaggaagccagtcctgagaaaagcattccagcatcagcctgggaagaaaagacaaacagaggaagaggaaggaaaagacaatcattgcttcaagaatgctgacccttgtagaaacaatatgaatgatgattcaagtaacttgaaagaaggcagtaaagacaatcccgaacctctaaagtgcaaacaagtgtggccaaaaggaacaaagcgcggtctatctaagtggaggcaaaacaaagagaggaagaccggatttaaactgaatttgtacaccccgccagaaacacccatggagcctgacgagcaggtaacagtggaagaacagaaggagacttcagaaggaaaaaccagccccagtcccatcaggattgaggaggaggtcaaggaaactggggaagccctgttgcctcaagaggaaaacagaagggaagaaacatgtgcccctgtaagtccaaacacatcaccaggtgaaaaaccagaagatgatctcatcaaacctgaggaagaggaagaggaggaggaggaggaagaggaagaagaggaagaagaggaaggggaagaagaagaaggaggaggaaatgtagaaaaagatccagatggtgctaaaagccaagaaaaagaggaaccagaaatctccacggaaaaagaagactctgcacgtttggatgatcacgaagaggaggaggaagaggatgaagagccatcccacaacgaggaccatgatgccgatgacgaggatgacagccacatggagtctgccgaagtggagaaggaagagctgcccagagaaagcttcaaagaagtactggaaaaccaggagacttttttagaccttaatgtgcagcctggtcactcgaacccagaggtcttaatggactgtggcgtcgacctgacagcttcttgtaacagtgagcccaaggagcttgctggggaccctgaagctgtacccgaatctgacgaggagccacccccaggagaacaggcacagaagcaggaccaaaagaacagcaaggaagtcgatacagagttcaaagagggaaacccagcaaccatggaaatcgactctgagactgtccaggccgttcagtctttgacccaggagagcagcgaacaggacgacacctttcaggattgtgccgagactcaagaggcctgtagaagcctacagaactacacccgtgcagaccaaagtccacagattgccaccacgctcgacgattgccaacagtcggaccacagtagcccagtttcatccgtccactcccatcctggccagtccgtacgttctgtcaacagcccaagtgtccctgctctggaaaacagctacgcccaaatcagcccagatcaaagtgccatctcagtgccatctctgcagaacatggaaaccagtcccatgatggatgtcccatcagtttcagatcattcacagcaagtcgtagacagtggatttagtgacctgggcagtatcgagagcacaactgagaactacgaaaacccaagcagctacgattctactatgggaggcagcatctgtggaaacggctcttcacagaacagctgctcctatagcaacctcacctccagcagtctgacacagagcagctgtgctgtcacccagcagatgtccaacatcagcgggagctgcagcatgctgcagcaaaccagcatcagctcccctccgacctgcagcgtcaagtctcctcaaggctgtgtggtggagaggcctccgagcagcagccagcagctggctcagtgcagcatggctgctaacttcaccccacccatgcagctggctgaaatccccgagacgagcaacgccaacattggcttatacgagcgaatgggtcagagtgattttggggctgggcattacccgcagccgtcagccaccttcagccttgccaaactgcagcagttaactaatacacttattgatcattcattgccttacagccattccgctgctgtgacttcctatgcaaacagtgcctctttgtccacaccattaagtaacacagggcttgttcaactttctcagtctccacactccgtccctgggggaccccaagcacaagctaccatgaccccaccccccaacctgactcctcctccaatgaatctgccgccgcctcttttgcaacggaacatggctgcatcaaatattggcatctctcacagccaaagactgcaaacccagattgccagcaagggccacatctccatgagaaccaagtcagcgtctctgtcaccagccgctgccacccatcagtcacaaatctatgggcgctcccagactgtagccatgcagggtcctgcacggactttaacgatgcaaagaggcatgaacatgagtgtgaacctgatgccagcgccagcctacaatgtcaactctgtgaacatgaacatgaacactctcaacgccatgaatgggtacagcatgtcccagccaatgatgaacagtggctaccacagcaatcatggctatatgaatcaaacgccccaataccctatgcagatgcagatgggcatgatgggcacccagccatatgcccagcagccaatgcagaccccaccccacggtaacatgatgtacacggcccccggacatcacggctacatgaacacaggcatgtccaaacagtctctcaatggctcctacatgagaaggtagacaacgtgggcagtccacaaaacctacggggcatcactattggattgatctgcacaaatacctttgaagagtacgatttcaaaaccagcaattggtgtgaatgcaaaaacatttgttggcaccatttatttaaaaaaaaaaaaagctgtatgcagcagaaagccttatacaagttgtttttctttttttcctttttcttttttttggtaccttcatttctgttacttttatataaaattctctgcaaaggaaggcctctctttggactacaatttggaggcagccacttgttgtgcctgcttctgttaaacaatgtggatatcaagcccccccaaattatctgttttaatattgaacctagagctttttttttcccttccctgtccactccatgtaaatgcctttagcatttcagttattgtatattttgtttaaggtgacacttcagcatgccgctaatgtctttgttagtgacagtgcattttgtagtactgtacaagtgttgtgctaacagtaagccatttcttaagttttttgccttgattagggtgccctaatttgagggttttaaaaaaaactatatttttgttaattataaaactgtaaagagctataaaagctattcccatttggttagtcaaaagggttttattgctaaatgtttggtgtaaagttgagacccttttccattttggtgacagatttctttggggaaaaaaggcagctttctgttttataaatgcagacttctgtttattgaatgaagcatatctcagtgtttatctgtcaggttttgaaacatttcatatatgtccaaatacttggcaggatttaaaaaaaaatagtgaatttggtgtaaagttgctattttatggaaatgcctctaactttacattttcattccatctgtagatttttctatctttataaaatattggagttattttttaaggaaaaatagaaaagtagcttgtgaatagctcaaactaagcttacaaatcgcatgtaaaaaagcaaaaaagttatttgtgtctgtttatattgcttccttttttgtagcctttgtacctgtacagggtgacagtaagggccaagcaggagaggcgtaatccttgtataaaataggatccagcgacactcttgtatttatctgttctctttttagtcagtcacttcaaaaaaacaaaaaacaaacaaaaaaaagctgtacattttaacataaaataaattatgatgagccattttt

SEQ ID NO: 144873 - DNA, 6944 bp, Homo sapiens
  Payload ID: 8633
  Gene Symbol: KAT6B
  Gene Name: K(lysine) acetyltransferase 6B
  Uniprot ID: Q8WYB5
  ENST ID: ENST00000372725
  CDS Start-End: 352-5697
ggcaaaggacgaggcggaggctgaggaaggcagcggggagacccaggctgcagcaacaaagggcagcgagcgattggccgggctgcaggcgaggtcttgatttcccagttaaagatgttcttcacccgaatgcagtctttcctgttggtaaaataagacaaccatcaacattgcctgtttgtctgcttttgaatctcttaaggatggatgtttgtaagatgttgcttaatacagtctggaatactctgtccatttgttgaattgtaaatgactttcaaatgtgcaagttctgttaaatacaaagagaacctctatgggtaacttttgtgttgaagaagtcatttgtcaaccatggtaaaacttgcaaacccactttatacagagtggattcttgaagctatacagaaaataaaaaagcaaaagcaaaggccctctgaagagagaatctgccatgcggtcagtacttcccatgggttggataagaagacagtctctgaacagctggaactcagtgttcaggatggctcagttctcaaagtcaccaacaaaggccttgcctcctataaggacccagacaaccctgggcgcttttcatcagttaaaccaggcacttttcctaagtcagccaaggggtctagaggatcatgtaatgatctccgcaatgtggattggaataaacttttaaggagagcaattgaaggacttgaggagccgaatggctcctccctgaagaacatagagaagtatctcagaagtcaaagtgatctcacaagcaccaccaacaacccagcctttcagcagcggctgcgactgggggccaaacgcgctgtgaataatgggaggttactgaaagacggaccgcagtacagggtcaattatgggagcttagatggcaaaggggcacctcagtatcccagtgcattcccatcctcgctcccacctgtcagccttctaccccatgagaaagaccagccccgtgctgatcccattccaatatgtagcttctgtttggggactaaagaatcaaatcgtgaaaagaaaccagaagaactcctctcttgtgcagattgtggcagtagtggacacccatcctgtttgaaattttgtcctgaattaacaacaaatgtaaaggccttaaggtggcagtgcatcgaatgcaagacatgcagtgcctgtagagtccaaggcagaaatgctgataatatgcttttttgtgattcctgtgatagaggatttcatatggaatgctgtgacccaccactttccagaatgccaaaagggatgtggatttgccaagtctgcagaccaaagaaaaagggaagaaaactacttcatgagaaagctgcacaaataaaacgacgatatgcaaaacccattggacgaccgaaaaataaattaaagcaacgattgttgtctgtaaccagtgatgaaggatccatgaatgcattcacaggaagggggtcacctgatactgaaataaaaataaacatcaaacaagaaagtgcagatgtaaatgtgattggaaacaaggatgtcgttactgaagaggatttggatgtttttaagcaggcccaggaactttcttgggagaaaatagagtgtgagagtggggtggaagactgtggccggtacccttctgtgattgaatttggtaaatatgaaatccaaacctggtactcctcgccttacccacaggaatatgcaagattaccaaagctttacctgtgtgaattctgtcttaaatatatgaaaagtaaaaatattttgctaagacactccaagaagtgtggatggtttcatcctccagcaaatgaaatttaccgaaggaaagacctttcagtatttgaggttgatgggaatatgagcaaaatttattgccaaaacctttgcttgttagccaagctcttcctggaccacaaaacgttgtattatgatgtcgagccattccttttttatgtccttacaaaaaatgatgaaaagggctgtcatctggttggatacttctctaaggaaaagctttgccagcagaagtataatgtctcctgcataatgatcatgccccagcaccaaaggcaaggatttggacggtttctcattgatttcagctatttgctttctagaagagaaggccaagcagggtctcctgaaaagcctctctccgatctgggccgtctctcctacctggcatattggaagagcgtcatcttggagtatctctaccaccaccatgagaggcacatcagcatcaaggcaattagcagagcgacgggcatgtgcccacatgacattgccaccactctgcagcacctccacatgatcgacaagagagatggcagatttgtcatcattagacgggaaaagttgatattgagccacatggaaaagctgaaaacctgttccagagccaatgaacttgatccagacagtctgaggtggaccccaattttaatttctaatgctgcagtgtctgaagaagagcgagaagctgagaaagaggctgagcggctaatggaacaagctagctgctgggagaaggaggaacaagaaatcctgtcaactagagctaacagtaggcaatcacctgcaaaagtacaatcgaaaaataaatatttgcattccccggagagccggccagtcacaggggagcgagggcagctgctggagctgtctaaagagagcagtgaagaagaagaggaggaggaggacgaggaggaggaagaagaggaggaagaagaggaagaggatgaagaggaggaagaagaggaagaagaagaagaagaagaagaaaatattcaaagctctcccccaagattgacgaaaccacagtcagttgccataaagagaaagaggccttttgtactaaagaagaaaaggggtcgtaaacgcaggaggatcaacagcagtgtaacaacagagaccatttcagagacgacagaagtactgaatgagccctttgacaactcagatgaagagaggccaatgccacagctggagcctacctgtgagattgaagtggaggaagatggcaggaagccagtcctgagaaaagcattccagcatcagcctgggaagaaaagacaaacagaggaagaggaaggaaaagacaatcattgcttcaagaatgctgacccttgtagaaacaatatgaatgatgattcaagtaacttgaaagaaggcagtaaagacaatcccgaacctctaaagtgcaaacaagtgtggccaaaaggaacaaagcgcggtctatctaagtggaggcaaaacaaagagaggaagaccggatttaaactgaatttgtacaccccgccagaaacacccatggagcctgacgagcaggtaacagtggaagaacagaaggagacttcagaaggaaaaaccagccccagtcccatcaggattgaggaggaggtcaaggaaactggggaagccctgttgcctcaagaggaaaacagaagggaagaaacatgtgcccctgtaagtccaaacacatcaccaggtgaaaaaccagaagatgatctcatcaaacctgaggaagaggaagaggaggaggaggaggaagaggaagaagaggaagaagaggaaggggaagaagaagaaggaggaggaaatgtagaaaaagatccagatggtgctaaaagccaagaaaaagaggaaccagaaatctccacggaaaaagaagactctgcacgtttggatgatcacgaagaggaggaggaagaggatgaagagccatcccacaacgaggaccatgatgccgatgacgaggatgacagccacatggagtctgccgaagtggagaaggaagagctgcccagagaaagcttcaaagaagtactggaaaaccaggagacttttttagaccttaatgtgcagcctggtcactcgaacccagaggtcttaatggactgtggcgtcgacctgacagcttcttgtaacagtgagcccaaggagcttgctggggaccctgaagctgtacccgaatctgacgaggagccacccccaggagaacaggcacagaagcaggaccaaaagaacagcaaggaagtcgatacagagttcaaagagggaaacccagcaaccatggaaatcgactctgagactgtccaggccgttcagtctttgacccaggagagcagcgaacaggacgacacctttcaggattgtgccgagactcaagaggcctgtagaagcctacagaactacacccgtgcagaccaaagtccacagattgccaccacgctcgacgattgccaacagtcggaccacagtagcccagtttcatccgtccactcccatcctggccagtccgtacgttctgtcaacagcccaagtgtccctgctctggaaaacagctacgcccaaatcagcccagatcaaagtgccatctcagtgccatctctgcagaacatggaaaccagtcccatgatggatgtcccatcagtttcagatcattcacagcaagtcgtagacagtggatttagtgacctgggcagtatcgagagcacaactgagaactacgaaaacccaagcagctacgattctactatgggaggcagcatctgtggaaacggctcttcacagaacagctgctcctatagcaacctcacctccagcagtctgacacagagcagctgtgctgtcacccagcagatgtccaacatcagcgggagctgcagcatgctgcagcaaaccagcatcagctcccctccgacctgcagcgtcaagtctcctcaaggctgtgtggtggagaggcctccgagcagcagccagcagctggctcagtgcagcatggctgctaacttcaccccacccatgcagctggctgaaatccccgagacgagcaacgccaacattggcttatacgagcgaatgggtcagagtgattttggggctgggcattacccgcagccgtcagccaccttcagccttgccaaactgcagcagttaactaatacacttattgatcattcattgccttacagccattccgctgctgtgacttcctatgcaaacagtgcctctttgtccacaccattaagtaacacagggcttgttcaactttctcagtctccacactccgtccctgggggaccccaagcacaagctaccatgaccccaccccccaacctgactcctcctccaatgaatctgccgccgcctcttttgcaacggaacatggctgcatcaaatattggcatctctcacagccaaagactgcaaacccagattgccagcaagggccacatctccatgagaaccaagtcagcgtctctgtcaccagccgctgccacccatcagtcacaaatctatgggcgctcccagactgtagccatgcagggtcctgcacggactttaacgatgcaaagaggcatgaacatgagtgtgaacctgatgccagcgccagcctacaatgtcaactctgtgaacatgaacatgaacactctcaacgccatgaatgggtacagcatgtcccagccaatgatgaacagtggctaccacagcaatcatggctatatgaatcaaacgccccaataccctatgcagatgcagatgggcatgatgggcacccagccatatgcccagcagccaatgcagaccccaccccacggtaacatgatgtacacggcccccggacatcacggctacatgaacacaggcatgtccaaacagtctctcaatggctcctacatgagaaggtagacaacgtgggcagtccacaaaacctacggggcatcactattggattgatctgcacaaatacctttgaagagtacgatttcaaaaccagcaattggtgtgaatgcaaaaacatttgttggcaccatttatttaaaaaaaaaaaaagctgtatgcagcagaaagccttatacaagttgtttttctttttttcctttttcttttttttggtaccttcatttctgttacttttatataaaattctctgcaaaggaaggcctctctttggactacaatttggaggcagccacttgttgtgcctgcttctgttaaacaatgtggatatcaagcccccccaaattatctgttttaatattgaacctagagctttttttttcccttccctgtccactccatgtaaatgcctttagcatttcagttattgtatattttgtttaaggtgacacttcagcatgccgctaatgtctttgttagtgacagtgcattttgtagtactgtacaagtgttgtgctaacagtaagccatttcttaagttttttgccttgattagggtgccctaatttgagggttttaaaaaaaactatatttttgttaattataaaactgtaaagagctataaaagctattcccatttggttagtcaaaagggttttattgctaaatgtttggtgtaaagttgagacccttttccattttggtgacagatttctttggggaaaaaaggcagctttctgttttataaatgcagacttctgtttattgaatgaagcatatctcagtgtttatctgtcaggttttgaaacatttcatatatgtccaaatacttggcaggatttaaaaaaaaatagtgaatttggtgtaaagttgctattttatggaaatgcctctaactttacattttcattccatctgtagatttttctatctttataaaatattggagttattttttaaggaaaaatagaaaagtagcttgtgaatagctcaaactaagcttacaaatcgcatgtaaaaaagcaaaaaagttatttgtgtctgtttatattgcttccttttttgtagcctttgtacctgtacagggtgacagtaagggccaagcaggagaggcgtaatccttgtataaaataggatccagcgacactcttgtatttatctgttctctttttagtcagtcacttcaaaaaaacaaaaaacaaacaaaaaaaagctgtacattttaacataaaataaattatgatgagccattttta

SEQ ID NO: 144874 - DNA, 5892 bp, Homo sapiens; identical to SEQ ID NO: 144871
  Payload ID: 8633
  Gene Symbol: KAT6B
  Gene Name: K(lysine) acetyltransferase 6B
  ENST ID: ENST00000628038
  CDS Start-End: 403-5748

SEQ ID NO: 144875 - DNA, 8287 bp, Homo sapiens; identical to SEQ ID NO: 144869
  Payload ID: 8633
  Gene Symbol: KAT6B
  Gene Name: K(lysine) acetyltransferase 6B
  ENST ID: ENST00000630001
  CDS Start-End: 490-6711

SEQ ID NO: 144876 - DNA, 7560 bp, Homo sapiens; identical to SEQ ID NO: 144870
  Payload ID: 8633
  Gene Symbol: KAT6B
  Gene Name: K(lysine) acetyltransferase 6B
  ENST ID: ENST00000629879
  CDS Start-End: 312-5984

SEQ ID NO: 144877 - DNA, 6944 bp, Homo sapiens; identical to SEQ ID NO: 144873
  Payload ID: 8633
  Gene Symbol: KAT6B
  Gene Name: K(lysine) acetyltransferase 6B
  ENST ID: ENST00000629233
  CDS Start-End: 352-5697

SEQ ID NO: 144878 - DNA, 7106 bp, Homo sapiens; identical to SEQ ID NO: 144872
  Payload ID: 8633
  Gene Symbol: KAT6B
  Gene Name: K(lysine) acetyltransferase 6B
  ENST ID: ENST00000628523
  CDS Start-End: 515-5860

SEQ ID NO: 144879 - DNA, 9644 bp, Homo sapiens
  Payload ID: 8634
  Gene Symbol: KAT7
  Gene Name: K(lysine) acetyltransferase 7
  Uniprot ID: O95251
  ENST ID: ENST00000259021
  CDS Start-End: 281-2116
aaaatggcgcccactagcttcaccaaaaggatcgaacttcccagcaccctctctggcccgtaacgtcaggtgacgcgagacccagccggaagtgaaggaaaaagcgcttcagcccgcggcgcctgcgcagaacgctccagacgctgagaggcaggaggcactagggatcgtccgcaggattgggactgatacagaggccgccacggagcccgccggagccaccgttcctgctgctgccgccgctgcccgaatcggaaccgtcgggccgcagccgccggcaatgccgcgaaggaagaggaatgcaggcagtagttcagatggaaccgaagattccgatttttctacagatctcgagcacacagacagttcagaaagtgatggcacatcccgacgatctgctcgagtcacccgctcctcagccaggctaagccagagttctcaagattccagtcctgttcgaaatctgcagtcttttggcactgaggagcctgcttactctaccagaagagtgacccgtagtcagcagcagcctaccccagtgacaccgaaaaaataccctcttcggcagactcgttcatctggttcagaaactgagcaagtggttgatttttcagatagagaaactaaaaatacagctgatcatgatgagtcaccgcctcgaactccaactggaaatgcgccttcttctgagtctgacatagacatctccagccccaatgtatctcacgatgagagcattgccaaggacatgtccctgaaggactcaggcagtgatctctctcatcgccccaagcgccgtcgcttccatgaaagctacaacttcaatatgaagtgtcctacaccaggctgtaactctctaggacaccttacaggaaaacatgagagacatttctccatctcaggatgcccactgtatcataacctctcagctgacgaatgcaaggtgagagcacagagccgggataagcagatagaagaaaggatgctgtctcacaggcaagatgacaacaacaggcatgcaaccaggcaccaggcaccaacggagagacagcttcgatataaggaaaaagtggctgaactcaggaagaaaagaaattctggactgagcaaagaacagaaagagaaatatatggaacacagacagacctatgggaacacacgggaacctcttttagaaaacctgacaagcgagtatgacttggatcttttccgaagagcacaagcccgggcttcagaggatttggagaagttaaggctgcaaggccaaatcacagagggaagcaacatgattaaaacaattgcttttggccgctatgagcttgatacctggtatcattctccatatcctgaagaatatgcacggctgggacgtctctatatgtgtgaattctgtttaaaatatatgaagagccaaacgatactccgccggcacatggccaaatgtgtgtggaaacacccacctggtgatgagatatatcgcaaaggttcaatctctgtgtttgaagtggatggcaagaaaaacaagatctactgccaaaacctgtgcctgttggccaaactttttctggaccacaagacattatattatgatgtggagcccttcctgttctatgttatgacagaggcggacaacactggctgtcacctgattggatatttttctaaggaaaagaattcattcctcaactacaacgtctcctgtatccttactatgcctcagtacatgagacagggctatggcaagatgcttattgatttcagttatttgctttccaaagtcgaagaaaaagttggctccccagaacgtccactctcagatctggggcttataagctatcgcagttactggaaagaagtacttctccgctacctgcataattttcaaggcaaagagatttctatcaaagaaatcagtcaggagacggctgtgaatcctgtggacattgtcagcactctgcaagcccttcagatgctcaaatactggaagggaaaacacctagttttaaagagacaggacctgattgatgagtggatagccaaagaggccaaaaggtccaactccaataaaaccatggatcccagctgcttaaaatggacccctcccaagggcacttaaagtgacctgtcattccgagccagcgaaccccagcagtaggaatccgtaccctagggatctgtctgtcatttctctgttgctcttgtgattggcaagtacagtatcctttgggaaggccatccccctcaggactgtcctggctccgacctttgtgtacactgcagacgctggttctgaggaactgttgtttcggcctcagtgaggttgcctggatgggatctgtattagacttgagtgcaggtctctcagcactgacccaaggagttctgttatggtactgtacctgtccagtcactggttctctcctcatgtcctctcgccccatgaggttgtgttgtgtcttctaagcgtggtactagtgcttgccacctggtcaccagacctccaaatatggctgccaccaccaggacctttccagttactccttatatgtgtgttctatggaggggcagggaaaaggtggcacttgtgagtgtgtgtggattggcagggggtccattcactttgggttccatcttgctttaaatttcttcattttgattaagagacctctttttgatctgtattgggctaaccagagccaaatacttttgaagagtttcccagggactagtcatggtaatagcatataattgatctgaatgagatggagagaagaatgaaggggtggtggttctgggtttgatttgagttcacctgtgggcagtgggcagtgggcagtgtcttggtgaaagggaacggatactactttttgcctcaccgtaaagtactcactagtaaatatttccttctctctttactcccactttttacgtttgcaggtgccaaagtaatgtccacttttccctttcatgctgcatattaactggttaattatactgcagaaaccttttcacctccactagtctgatacagtacatctgtacttccatataccttgcactgattttgtctgagtgccctgggagaagtagaaaatgattgaaagtgacttccgtatctcagcccatgactcagcaaggcagaatggccacccctgccaaagtttgcttctcttttcaacagtgcctcaccctccctctaggattaaagtgcttctgcccttccacgaactcctcctccatttcctttttgggatttgtcaccatccttctattctctggtcttctatttttggtgttgttcaagtgaaggaagagatgttccctctaatttctctctagcccattataacctgctatcttggggcaacttttgatgtatgacatgtcacccttcccaacttggtctcctccaacatgctgtcttcatgtggagccctcaccacaatccctgactccggtcatttgtgcctttctcttgtcatctctgtacactacttatattcactgtgggttgggggagctaattttaagcatgttcagtggcagctcccctccagtttcagtgtcactgttaaaatttatcaaaaagcaacttcactaggggttttcttaagggataaaggccttttacagaagctaaacccttccccacatgtggtagaatgtgctcttctatatctactcctcaataaagcatgttctctgctcaagtctgtttcatctgggggctctcatttatatatgaaaatgatgcacacgatctgctactaatagtaaatgcacttgggatttgctttccctagcagtaaactgttgagggatgtggtttgtggctatggaatgtttttccctgtgatacaggctgtctgtaaagatcaagggagtgctcactctgaacttctctagatggtggcacaaatttgatctgcctcactttggttccagctaatcagtatacgtagcaatgattagtcagtattacccattctttcactaagtgccattttccactgattttaggggcaaaggaaccaataggaaattaggatatatgggggtacagttgatgcctgtaggagatgggaacagacattccttctcatctccaagctcattcaccagtattgagcagtgtcacctctaattattgactctctcgcaggttgaaattattctttttgaaaatagctgcattttcatgtaagatatacccagcacaggaaaagggtggctgagcactaacctccgtatggtggaaaggaggaggctgggaattgtatgtgctggaatggtttcactcactgtgaccagtagtggtgagaacccatacagttgaagttttttgcacagtcctgatcccaggtctccactcgctttgccatcccactttactccctaaaaataaaaggatttattatctcatttaaacccccacaggtgtggaaacagagtttcacttgccttggcaactttgcatgagactatcccatttcattccgtttttttttttttgagtcagagtctggctctgttgcccaggttggagtgcagtggcgcagttttggctcacaacctctgcctcccgggttcaagtgattcttctgtctcagccttccgaatagctgggattacaggtgcctgtcaccatgcccagctaatttttgtatttttagtagagacagggtttcgtcatgttggtcaggctgatctcgaactcctgacctcaggtgatccgcccaccttggcctcccaaagtgctgggattacaggcgtgagccactgcacccgacctatttttttttttttttttttttttttttttaaaaaaagacagtctcactctatcatccagtccggaatgcagtggcatgatctcagctcactgcaatgtctgcctcctggattccagtgattctcctgcctcagcctctcaagtagctgggattacaggtgcaggccacctggctaatttttgtatgtttagtagagacagggttttgccatgttggccaggccagtctcaaactcttgacctcaagtgatcacccgcctcatcctcccaaagtgctgggattacagccgtgagcctctgcacccagcttttaactccctcttatctgcataacagaagcttagctgcttaagctcctttattagaagagcaaaagtctgaaattattcctgaaacctgctcaatggaagtacctactctattggttgcttcccatatggttgtcactgtaccttcatactgcctcatttgaccctcatattagccctgtacagtagatgggtacactggtttgccaaaggagacctggaatccaaggtggaagtaagcagcaaagccagaaacttcaattctggtctgtctaccttgatagcctgcaccctcccctctaccgttttcttccactatttttgattccttaatgatgaatcatcctctcccttctagttggatttgtttctaatggcttccattacaaggataataatgaaactggtgaaaactttcaggcaaaaggattttctttttatattttttcttattattttttaattattaaccaaattaactcattacagtaaaaaggactgatttttaagccagctgtgatagctctgtaatagtctgtaatctcagcactttgggaggccaaggcgggcagatcgcttgagtccaggaattcgagactagcctgggcagcatggtgaaaccccagctctacaaaaaatagaaaaatcagacgtgggcacatgcctgtagtctcagctacttgggaggctgaggcacgagaatcgcctgaacctgggaggcagaagttgcaatgagctgagatgatgccactgcactccagcctgggtgacagagtgagaccctgtctcaaaaacaaaaaacagaattgattgatgttagttggctttagaagcagcaagtttagggggctacagagctaaaccaggaagcaaaagatgtgcctcattctggcattgtttctgatttaggaataaactgttcagtaagcactgtccctttacttccatggttttcttcattcctcaccacagcacagtaaggtggatattatagtcttcttctagatgaaaaattgaggctcatagtggtcttgctgctgtgtcatagcaatagaatgagagagccttgcttccctgagtccaaatcccatacttttggcattgttatgaggtctggtcacctgatgcttccatgctattttcccatttcttatctggggataatgagtcatattaagtaatttttttttttgagacggagtttcgttctgtcacccaggctggagtgcagtggtgcgatcttggctcactgcaagctctgcctcccgggttcatgccattcttctgcttcagtctcccgagtagctgggactacaggtgcccaccaccacgcccagctaattttttgtatttttagtagaatgaggtttcaccgtgttagccaggatgatctcgatctcctgacctcgtgatccactcgcctcagcctcccaaagtgctgggattacaggcgtgagccattgcacccagccattttttttttttttaagacgacgtctcactctgtcacctatgctggagtgcagtggcgtgatctaggctcattgcaacctctgcctcccaggttcaagcgattttcctgcctcagcctcccaagtagctgggattacaggtgcccaccacctcgcctggctaatttttgtatttttagtagagatgaggttttgccctgttggctaggttggtcttgaactcctgacctcaggtgatccactcacctcagcctcccaaagtgctgggattacaggcaggagccactgcgcccagccaagtaacttttaacagtgtggtataacctttaaatgacaaggtgatgcttttgacttgtcctcaactttgatttgtactgatttgtccctatagttctgggtggggtgggtcaaaacaaagtctcgagctgtaccaggatcaagcagcacagctcagccatgatccttttaccacttttttcttctgtccttgagactctaattaaagcactggatttttaaaaatcacccttgtaaatatgcacacatttgtctatagttgaggaaattgtgccgttgaagtccattcttggacatggagttaagaaaccctggtttgagaaaaagccccagtgagacagcaggaatccttttaccatacaaccctcaactagtttagtgtgctcaagctcaaataaccaatcccatcaagtgaaaagaatggcagcagggagaaggcctggctcactgaggctctcagcattagtttcctctacctcttgtgtctcacaggtgcacatatgtacagcatatcaaagtgttgaatgtcatgagaataaaatatgaaaactactttgctgaatgatagtatgtgatgtgtgctaggacttctagaagccaccctttgctttgctgttcattgggatcatggaatcggacctcagctggttttgcctcagcactttctttcacaaaattatgtgtgactgcctcctccagactgtttcctgctgataggggcagtttaatagccttcttcctgtgtggtatctgcaacaaaatcccaatgaatgtcaccaagaaggaaacaaaggattgcccagcgatgagaaatgtccctggtgccaaaacatcagtttgcccctaacctcttgtgcaatacctttaagtccaggtcatgttgttaccatttgggggtttgcggatttgtttacttgtgcccaagaatggagaaaataacctgtactattgtacaactctggctccatggctcctcacaaatgttccatgtgagatataaacatctttatcctcgacaagtcatgttcattccaagaaaccagtctttgttcttaattggacatttgtttctgcaaacagcttaccatacattcaattccaaagttatcagaaacctacactcttatctcacaaatttagaggtgtggtagatcatctccaaagatggccaccaacagttgctctcatcctctgtgcacgtgctatttccaataaggtctatttttttctacagtgagggctgaacttgtgacttgttttgactaataggatatggaagtgatattttggcagcttccacttttgctcttgaaaataagctgacacgtttccaaacgagaagcttgggctaaattactgaatggtgagagacgatgcataggagaaccaaggtgctctagtcacagcactaaaagcccagacttgtgtctcttgaaggtttcaaccccgccagactcccagctgaacgcaccctcatgagtggcccttgctggtaccacatgacactaaagacatctagctgagtcctgttaacccagagaattatgagaatactgttttaaccacacgttttggaatggtttgatacatggcaatggagaagtgaaacaaggggacttcggaaactaaagggctggaattcagtttgccttgtaggttgattggaagccagatgtgcctagaggaaggctaccaccttgtgcaattccaggggacactgtttatgttccgtgtaaatggcagcctcagttcacctcatttggttatttatcgtgtcttcgctgtcagtcaaattgcttctgagataactggctggccttggaattcttagccacctccttaagcggatcaggaaaactgaagaatatccttctgtatgtatgtatgtatttattgattgatcgatttatgagacagggtctccttctgtcacccaggctggagtgcagtggtacgatcacggctcactgctgcgtcgccttcccaggctccagctatcctcccacctcaacctccagagtagttgagaccacaggcgtgcactaccacgcccggctacctttttgtattttcagtagagacgaggtttcgccgtgttgcccaggctggttcaagcggagctcaagcaatcagcctgcctcggcctcccaaagtgttgggattacaggcatgagccgctgcgcccaaccttcttctgctgtcgagatactgctcatcacctgcctgctccagaattcatgtggcttctcattgctcaatggattaagttcatgtttatcctggctttcaagtctttccgtaagctgactcaacctacatagctttcatcattcccttacacataacctcaacgtgcaacaggattagtctattattccctttcttgtgtttactgagaaagcctccacttcaacgttccatgaagtgtgttccattaaataccaaagtataggcaaaaagttctgtggtcaaataaatttggaaaacacagagtgtttccaaagttagtatcaggccaggcatggtgggaggatcacttgagcccaggagttcgagaccagcctgggcaacatagggagacccaatccctacaaaaaaattagttgggcatggtggtgtgcacccgtagtgccagctactcaggaggctgaggtaggaggatcacctgagcccaggaagtcaaggctgtggtcagctgagatcccaccagtgtgctccagcctgggtgacagagcaagaccctgtctcaaaaaataaaaaaataaagataatacc

SEQ ID NO: 144880 - DNA, 3469 bp, Homo sapiens
  Payload ID: 8634
  Gene Symbol: KAT7
  Gene Name: K(lysine) acetyltransferase 7
  Uniprot ID: O95251
  ENST ID: ENST00000424009
  CDS Start-End: 130-1875
caggaggcactagggatcgtccgcaggattgggactgatacagaggccgccacggagcccgccggagccaccgttcctgctgctgccgccgctgcccgaatcggaaccgtcgggccgcagccgccggcaatgccgcgaaggaagaggaatgcaggcagtagttcagatggaaccgaagattccgatttttctacagatctcgagcacacagacagttcagaaagtgatggcacatcccgacgatctgctcgagtcacccgctcctcagccaggctaagccagagttctcaagattccagtcctgttcgaaatctgcagtcttttggcactgaggagcctgcttactctaccagaagagtgacccgtagtcagcagcagcctaccccagtgacaccgaaaaaataccctcttcggcagactcgttcatctggttcagaaactgagcaagtggttgatttttcagatagagaaactaaaaatacagctgatcatgatgagtcaccgcctcgaactccaactggaaatgcgccttcttctgagtctgacatagacatctccagccccaatgtatctcacgatgagagcattgccaaggacatgtccctgaaggactcaggcagtgatctctctcatcgccccaagcgccgtcgcttccatgaaagctacaacttcaatatgaagtgtcctacaccaggctgtaactctctaggacaccttacaggaaaacatgagagacatttctccatctcaggatgcccactgtatcataacctctcagctgacgaatgcaaggcaccaacggagagacagcttcgatataaggaaaaagtggctgaactcaggaagaaaagaaattctggactgagcaaagaacagaaagagaaatatatggaacacagacagacctatgggaacacacgggaacctcttttagaaaacctgacaagcgagtatgacttggatcttttccgaagagcacaagcccgggcttcagaggatttggagaagttaaggctgcaaggccaaatcacagagggaagcaacatgattaaaacaattgcttttggccgctatgagcttgatacctggtatcattctccatatcctgaagaatatgcacggctgggacgtctctatatgtgtgaattctgtttaaaatatatgaagagccaaacgatactccgccggcacatggccaaatgtgtgtggaaacacccacctggtgatgagatatatcgcaaaggttcaatctctgtgtttgaagtggatggcaagaaaaacaagatctactgccaaaacctgtgcctgttggccaaactttttctggaccacaagacattatattatgatgtggagcccttcctgttctatgttatgacagaggcggacaacactggctgtcacctgattggatatttttctaaggaaaagaattcattcctcaactacaacgtctcctgtatccttactatgcctcagtacatgagacagggctatggcaagatgcttattgatttcagttatttgctttccaaagtcgaagaaaaagttggctccccagaacgtccactctcagatctggggcttataagctatcgcagttactggaaagaagtacttctccgctacctgcataattttcaaggcaaagagatttctatcaaagaaatcagtcaggagacggctgtgaatcctgtggacattgtcagcactctgcaagcccttcagatgctcaaatactggaagggaaaacacctagttttaaagagacaggacctgattgatgagtggatagccaaagaggccaaaaggtccaactccaataaaaccatggatcccagctgcttaaaatggacccctcccaagggcacttaaagtgacctgtcattccgagccagcgaaccccagcagtaggaatccgtaccctagggatctgtctgtcatttctctgttgctcttgtgattggcaagtacagtatcctttgggaaggccatccccctcaggactgtcctggctccgacctttgtgtacactgcagacgctggttctgaggaactgttgtttcggcctcagtgaggttgcctggatgggatctgtattagacttgagtgcaggtctctcagcactgacccaaggagttctgttatggtactgtacctgtccagtcactggttctctcctcatgtcctctcgccccatgaggttgtgttgtgtcttctaagcgtggtactagtgcttgccacctggtcaccagacctccaaatatggctgccaccaccaggacctttccagttactccttatatgtgtgttctatggaggggcagggaaaaggtggcacttgtgagtgtgtgtggattggcagggggtccattcactttgggttccatcttgctttaaatttcttcattttgattaagagacctctttttgatctgtattgggctaaccagagccaaatacttttgaagagtttcccagggactagtcatggtaatagcatataattgatctgaatgagatggagagaagaatgaaggggtggtggttctgggtttgatttgagttcacctgtgggcagtgggcagtgggcagtgtcttggtgaaagggaacggatactactttttgcctcaccgtaaagtactcactagtaaatatttccttctctctttactcccactttttacgtttgcaggtgccaaagtaatgtccacttttccctttcatgctgcatattaactggttaattatactgcagaaaccttttcacctccactagtctgatacagtacatctgtacttccatataccttgcactgattttgtctgagtgccctgggagaagtagaaaatgattgaaagtgacttccgtatctcagcccatgactcagcaaggcagaatggccacccctgccaaagtttgcttctcttttcaacagtgcctcaccctccctctaggattaaagtgcttctgcccttccacgaactcctcctccatttcctttttgggatttgtcaccatccttctattctctggtcttctatttttggtgttgttcaagtgaaggaagagatgttccctctaatttctctctagcccattataacctgctatcttggggcaacttttgatgtatgacatgtcacccttcccaacttggtctcctccaacatgctgtcttcatgtggagccctcaccacaatccctgactccggtcatttgtgcctttctcttgtcatctctgtacactacttatattcactgtgggttgggggagctaattttaagcatgttcagtggcagctcccctccagtttcagtgtcactgttaaaatttatcaaaaagcaacttcactaggggttttcttaagggataaaggccttttacagaagctaaacccttccccacatgtggtagaatgtgctcttctatatctactcctcaataaagcatgttctctgctcaa

SEQ ID NO: 144881 - DNA, 3638 bp, Homo sapiens
  Payload ID: 8634
  Gene Symbol: KAT7
  Gene Name: K(lysine) acetyltransferase 7
  ENST ID: ENST00000435742
  CDS Start-End: 767-2044
tcaattcaacaaatgtctattgactactttctgcgcggtggttgctgtggattcagaaattaattagatgtgatccctggcttaagggtgtcacagcccgataggagaaaacagacatgaataatcttagaaggatctagtaagttctcagcttggaggtgtatacaaggtgttgctggaaggaagtgaaggagcagttaagtctgccctggagtacaatgggagatatattggtaaaagccacagagaagagctgagttccaggatcaagccaggaaggaataagtctcacgtcaaggctttaaatatctcgaggaatgcaggcagtagttcagatggaaccgaagattccgatttttctacagatctcgagcacacagacagttcagaaagtgatggcacatcccgacgatctgctcgagtcacccgctcctcagccaggctaagccagagttctcaagattccagtcctgttcgaaatctgcagtcttttggcactgaggagcctgcttactctaccagaagagtgacccgtagtcagcagcagcctaccccagtgacaccgaaaaaataccctcttcggcagactcgttcatctggttcagaaactgagcaagtggttgatttttcagatagagaaactaaaaatacagctgatcatgatgagtcaccgcctcgaactccaactggaaatgcgccttcttctgagtctgacatagacatctccagccccaatgtatctcacgatgagagcattgccaaggacatgtccctgaaggactcaggcagtgatctctctcatcgccccaagcgccgtcgcttccatgaaagctacaacttcaatatgaagtgtcctacaccaggctgtaactctctaggacaccttacaggaaaacatgagagacatttctccatctcaggatgcccactgtatcataacctctcagctgacgaatgcaaggcaccaacggagagacagcttcgatataaggaaaaagtggctgaactcaggaagaaaagaaattctggactgagcaaagaacagaaagagaaatatatggaacacagacagacctatgggaacacacgggaacctcttttagaaaacctgacaagcgagtatgacttggatcttttccgaagagcacaagcccgggcttcagaggatttggagaagttaaggctgcaaggccaaatcacagagggaagcaacatgattaaaacaattgcttttggccgctatgagcttgatacctggtatcattctccatatcctgaagaatatgcacggctgggacgtctctatatgtgtgaattctgtttaaaatatatgaagagccaaacgatactccgccggcacatggccaaatgtgtgtggaaacacccacctggtgatgagatatatcgcaaaggttcaatctctgtgtttgaagtggatggcaagaaaaacaagatctactgccaaaacctgtgcctgttggccaaactttttctggaccacaagacattatattatgatgtggagcccttcctgttctatgttatgacagaggcggacaacactggctgtcacctgattggatatttttctaaggaaaagaattcattcctcaactacaacgtctcctgtatccttactatgcctcagtacatgagacagggctatggcaagatgcttattgatttcagttatttgctttccaaagtcgaagaaaaagttggctccccagaacgtccactctcagatctggggcttataagctatcgcagttactggaaagaagtacttctccgctacctgcataattttcaaggcaaagagatttctatcaaagaaatcagtcaggagacggctgtgaatcctgtggacattgtcagcactctgcaagcccttcagatgctcaaatactggaagggaaaacacctagttttaaagagacaggacctgattgatgagtggatagccaaagaggccaaaaggtccaactccaataaaaccatggatcccagctgcttaaaatggacccctcccaagggcacttaaagtgacctgtcattccgagccagcgaaccccagcagtaggaatccgtaccctagggatctgtctgtcatttctctgttgctcttgtgattggcaagtacagtatcctttgggaaggccatccccctcaggactgtcctggctccgacctttgtgtacactgcagacgctggttctgaggaactgttgtttcggcctcagtgaggttgcctggatgggatctgtattagacttgagtgcaggtctctcagcactgacccaaggagttctgttatggtactgtacctgtccagtcactggttctctcctcatgtcctctcgccccatgaggttgtgttgtgtcttctaagcgtggtactagtgcttgccacctggtcaccagacctccaaatatggctgccaccaccaggacctttccagttactccttatatgtgtgttctatggaggggcagggaaaaggtggcacttgtgagtgtgtgtggattggcagggggtccattcactttgggttccatcttgctttaaatttcttcattttgattaagagacctctttttgatctgtattgggctaaccagagccaaatacttttgaagagtttcccagggactagtcatggtaatagcatataattgatctgaatgagatggagagaagaatgaaggggtggtggttctgggtttgatttgagttcacctgtgggcagtgggcagtgggcagtgtcttggtgaaagggaacggatactactttttgcctcaccgtaaagtactcactagtaaatatttccttctctctttactcccactttttacgtttgcaggtgccaaagtaatgtccacttttccctttcatgctgcatattaactggttaattatactgcagaaaccttttcacctccactagtctgatacagtacatctgtacttccatataccttgcactgattttgtctgagtgccctgggagaagtagaaaatgattgaaagtgacttccgtatctcagcccatgactcagcaaggcagaatggccacccctgccaaagtttgcttctcttttcaacagtgcctcaccctccctctaggattaaagtgcttctgcccttccacgaactcctcctccatttcctttttgggatttgtcaccatccttctattctctggtcttctatttttggtgttgttcaagtgaaggaagagatgttccctctaatttctctctagcccattataacctgctatcttggggcaacttttgatgtatgacatgtcacccttcccaacttggtctcctccaacatgctgtcttcatgtggagccctcaccacaatccctgactccggtcatttgtgcctttctcttgtcatctctgtacactacttatattcactgtgggttgggggagctaattttaagcatgttcagtggcagctcccctccagtttcagtgtcactgttaaaatttatcaaaaagcaacttcactaggggttttcttaagggataaaggccttttacagaagctaaacccttccccacatgtggtagaatgtgctcttctatatctactcctcaataaagcatgttctctgctcaa

SEQ ID NO: 144882 - DNA, 1774 bp, Homo sapiens
  Payload ID: 8634
  Gene Symbol: KAT7
  Gene Name: K(lysine) acetyltransferase 7
  Uniprot ID: O95251
  ENST ID: ENST00000454930
  CDS Start-End: 155-1573
gcagaacgctccagacgctgagaggcaggaggcactagggatcgtccgcaggattgggactgatacagaggccgccacggagcccgccggagccaccgttcctgctgctgccgccgctgcccgaatcggaaccgtcgggccgcagccgccggcaatgccgcgaaggaagaggaatgcaggcagtagttcagatggaaccgaagattccgatttttctacagatctcgagcacacagacagttcagaaagtgatggcacatcccgacgatctgctcgagtcacccgctcctcagccaggctaagccagagttctcaaggacaccttacaggaaaacatgagagacatttctccatctcaggatgcccactgtatcataacctctcagctgacgaatgcaaggtgagagcacagagccgggataagcagatagaagaaaggatgctgtctcacaggcaagatgacaacaacaggcatgcaaccaggcaccaggcaccaacggagagacagcttcgatataaggaaaaagtggctgaactcaggaagaaaagaaattctggactgagcaaagaacagaaagagaaatatatggaacacagacagacctatgggaacacacgggaacctcttttagaaaacctgacaagcgagtatgacttggatcttttccgaagagcacaagcccgggcttcagaggatttggagaagttaaggctgcaaggccaaatcacagagggaagcaacatgattaaaacaattgcttttggccgctatgagcttgatacctggtatcattctccatatcctgaagaatatgcacggctgggacgtctctatatgtgtgaattctgtttaaaatatatgaagagccaaacgatactccgccggcacatggccaaatgtgtgtggaaacacccacctggtgatgagatatatcgcaaaggttcaatctctgtgtttgaagtggatggcaagaaaaacaagatctactgccaaaacctgtgcctgttggccaaactttttctggaccacaagacattatattatgatgtggagcccttcctgttctatgttatgacagaggcggacaacactggctgtcacctgattggatatttttctaaggaaaagaattcattcctcaactacaacgtctcctgtatccttactatgcctcagtacatgagacagggctatggcaagatgcttattgatttcagttatttgctttccaaagtcgaagaaaaagttggctccccagaacgtccactctcagatctggggcttataagctatcgcagttactggaaagaagtacttctccgctacctgcataattttcaaggcaaagagatttctatcaaagaaatcagtcaggagacggctgtgaatcctgtggacattgtcagcactctgcaagcccttcagatgctcaaatactggaagggaaaacacctagttttaaagagacaggacctgattgatgagtggatagccaaagaggccaaaaggtccaactccaataaaaccatggatcccagctgcttaaaatggacccctcccaagggcacttaaagtgacctgtcattccgagccagcgaaccccagcagtaggaatccgtaccctagggatctgtctgtcatttctctgttgctcttgtgattggcaagtacagtatcctttgggaaggccatccccctcaggactgtcctggctccgacctttgtgtacactgcagacgctggttctgaggaactgttgtttcggcctcagtg

SEQ ID NO: 144883 - DNA, 563 bp, Homo sapiens
  Payload ID: 8634
  Gene Symbol: KAT7
  Gene Name: K(lysine) acetyltransferase 7
  ENST ID: ENST00000506533
  CDS Start-End: 516-563
tttccgagcggggacgctgataggtgcagaggcggggttttggaggcctcgttaccttccagaggaatgcaggcagtagttcagatggaaccgaagattccgatttttctacagatctcgagcacacagacagttcagaaagtgatggcacatcccgacgatctgctcgagtcacccgctcctcagccaggctaagccagagttctcaagattccagtcctgttcgaaatctgcagtcttttggcactgaggagcctgcttactctaccagaagagtgacccgtagtcagcagcagcctaccccagtgacaccgaaaaaataccctcttcggcagactcgttcatctggttcagaaactgagcaagtggttgatttttcagatagagaaactaaaaatacagctgatcatgatgagtcaccgcctcgaactccaactggaaatgcgccttcttctgagtctgacatagacatctccagccccaatgtatctcacgatgagagcattgccaaggacatgtccctgaaggactcaggcagtgatctctctcatcgccccaagcgc

SEQ ID NO: 144884 - DNA, 1769 bp, Homo sapiens
  Payload ID: 8634
  Gene Symbol: KAT7
  Gene Name: K(lysine) acetyltransferase 7
  Uniprot ID: O95251
  ENST ID: ENST00000510819
  CDS Start-End: 143-1471
agacgctgagaggcaggaggcactagggatcgtccgcaggattgggactgatacagaggccgccacggagcccgccggagccaccgttcctgctgctgccgccgctgcccgaatcggaaccgtcgggccgcagccgccggcaatgccgcgaaggaagaggaatgcaggcagtagttcagatggaaccgaagattccgatttttctacagatctcgagcacacagacagttcagaaagtgatggcacatcccgacgatctgctcgagtcacccgctcctcagccaggctaagccagagttctcaaggacaccttacaggaaaacatgagagacatttctccatctcaggatgcccactgtatcataacctctcagctgacgaatgcaaggcaccaacggagagacagcttcgatataaggaaaaagtggctgaactcaggaagaaaagaaattctggactgagcaaagaacagaaagagaaatatatggaacacagacagacctatgggaacacacgggaacctcttttagaaaacctgacaagcgagtatgacttggatcttttccgaagagcacaagcccgggcttcagaggatttggagaagttaaggctgcaaggccaaatcacagagggaagcaacatgattaaaacaattgcttttggccgctatgagcttgatacctggtatcattctccatatcctgaagaatatgcacggctgggacgtctctatatgtgtgaattctgtttaaaatatatgaagagccaaacgatactccgccggcacatggccaaatgtgtgtggaaacacccacctggtgatgagatatatcgcaaaggttcaatctctgtgtttgaagtggatggcaagaaaaacaagatctactgccaaaacctgtgcctgttggccaaactttttctggaccacaagacattatattatgatgtggagcccttcctgttctatgttatgacagaggcggacaacactggctgtcacctgattggatatttttctaaggaaaagaattcattcctcaactacaacgtctcctgtatccttactatgcctcagtacatgagacagggctatggcaagatgcttattgatttcagttatttgctttccaaagtcgaagaaaaagttggctccccagaacgtccactctcagatctggggcttataagctatcgcagttactggaaagaagtacttctccgctacctgcataattttcaaggcaaagagatttctatcaaagaaatcagtcaggagacggctgtgaatcctgtggacattgtcagcactctgcaagcccttcagatgctcaaatactggaagggaaaacacctagttttaaagagacaggacctgattgatgagtggatagccaaagaggccaaaaggtccaactccaataaaaccatggatcccagctgcttaaaatggacccctcccaagggcacttaaagtgacctgtcattccgagccagcgaaccccagcagtaggaatccgtaccctagggatctgtctgtcatttctctgttgctcttgtgattggcaagtacagtatcctttgggaaggccatccccctcaggactgtcctggctccgacctttgtgtacactgcagacgctggttctgaggaactgttgtttcggcctcagtgaggttgcctggatgggatctgtattagacttgagtgcaggtctctcagcactgacccaaggagttctgttatggtactgtacctgtccagtcactgg

SEQ ID NO: 144885 - DNA, 1774 bp, Homo sapiens
  Payload ID: 8634
  Gene Symbol: KAT7
  Gene Name: K(lysine) acetyltransferase 7
  Uniprot ID: O95251
  ENST ID: ENST00000509773
  CDS Start-End: 154-1659
cagaacgctccagacgctgagaggcaggaggcactagggatcgtccgcaggattgggactgatacagaggccgccacggagcccgccggagccaccgttcctgctgctgccgccgctgcccgaatcggaaccgtcgggccgcagccgccggcaatgccgcgaaggaagaggaatgcaggcagtagttcagatggaaccgaagattccgatttttctacagatctcgagcacacagacagttcagaaagtgatggcacatcccgacgatctgctcgagtcacccgctcctcagccaggctaagccagagttctcaagattccagtcctgttcgaaatctgcagtcttttggcactgaggagcctgcttactctaccagaagagtgacccgtagtcagcagcagcctaccccagtgacaccgaaaaaataccctcttcggcagactcgttcatctggttcagaaactgagcaagtggttgatttttcagatagaggacaccttacaggaaaacatgagagacatttctccatctcaggatgcccactgtatcataacctctcagctgacgaatgcaaggcaccaacggagagacagcttcgatataaggaaaaagtggctgaactcaggaagaaaagaaattctggactgagcaaagaacagaaagagaaatatatggaacacagacagacctatgggaacacacgggaacctcttttagaaaacctgacaagcgagtatgacttggatcttttccgaagagcacaagcccgggcttcagaggatttggagaagttaaggctgcaaggccaaatcacagagggaagcaacatgattaaaacaattgcttttggccgctatgagcttgatacctggtatcattctccatatcctgaagaatatgcacggctgggacgtctctatatgtgtgaattctgtttaaaatatatgaagagccaaacgatactccgccggcacatggccaaatgtgtgtggaaacacccacctggtgatgagatatatcgcaaaggttcaatctctgtgtttgaagtggatggcaagaaaaacaagatctactgccaaaacctgtgcctgttggccaaactttttctggaccacaagacattatattatgatgtggagcccttcctgttctatgttatgacagaggcggacaacactggctgtcacctgattggatatttttctaaggaaaagaattcattcctcaactacaacgtctcctgtatccttactatgcctcagtacatgagacagggctatggcaagatgcttattgatttcagttatttgctttccaaagtcgaagaaaaagttggctccccagaacgtccactctcagatctggggcttataagctatcgcagttactggaaagaagtacttctccgctacctgcataattttcaaggcaaagagatttctatcaaagaaatcagtcaggagacggctgtgaatcctgtggacattgtcagcactctgcaagcccttcagatgctcaaatactggaagggaaaacacctagttttaaagagacaggacctgattgatgagtggatagccaaagaggccaaaaggtccaactccaataaaaccatggatcccagctgcttaaaatggacccctcccaagggcacttaaagtgacctgtcattccgagccagcgaaccccagcagtaggaatccgtaccctagggatctgtctgtcatttctctgttgctcttgtgattggcaagtacagtatcctttgggaag

SEQ ID NO: 144886 - DNA, 1525 bp, Homo sapiens
  Payload ID: 8635
  Gene Symbol: KAT8
  Gene Name: K(lysine) acetyltransferase 8
  Uniprot ID: Q9H7Z6
  ENST ID: ENST00000219797
  CDS Start-End: 19-1395
gtcacttcccttcccgcgatggcggcacagggagctgctgcggcggttgcggcggggacttcaggggtcgcgggggagggcgagcccgggcccggggagaatgcggccgctgaggggaccgccccatccccgggccgcgtctctccgccgaccccggcgcgcggcgagccggaagtcacggtggagatcggagaaacgtacctgtgccggcgaccggatagcacctggcattctgctgaagtgatccagtctcgagtgaacgaccaggagggccgagaggaattctatgtacactacgtgggctttaaccggcggctggacgagtgggtagacaagaaccggctggcgctgaccaagacagtgaaggatgctgtacagaagaactcagagaagtacctgagcgagctcgcagagcagcctgagcgcaagatcactcgcaaccaaaagcgcaagcatgatgagatcaaccatgtgcagaagacttatgcagagatggaccccaccacagcagccttggagaaggagcatgaggcgatcaccaaggtgaagtatgtggacaagatccacatcgggaactacgaaattgatgcctggtatttctcaccattccccgaagactatgggaaacagcccaagctctggctctgcgagtactgcctcaagtacatgaaatatgagaagagctaccgcttccacttgggtcagtgccagtggcggcagccccccgggaaagagatctaccgcaagagcaacatctccgtgtacgaagttgatggcaaagaccataagatttactgtcagaacctgtgtctgctggccaagcttttcctggaccataagacactgtactttgacgtggagccgttcgtcttttacatcctgactgaggtggaccggcagggggcccacattgttggctacttctccaaggagaaggagtccccggatggaaacaatgtggcctgcatcctgaccttgcccccctaccaacgccgcggctacgggaagttcctcatcgctttcagttatgagctctccaagctggagagcacagtcggctccccggagaagccactgtctgacctgggcaagctcagctaccgcagctactggtcctgggtgctgctagagatcctgcgggacttccggggcacactgtccatcaaggacctcagccagatgaccagtatcacccaaaatgacatcatcagtaccctgcaatccctcaatatggtcaagtactggaagggccagcacgtgatctgtgtcacacccaagctggtggaggagcacctcaaaagtgcccagtataagaaaccacccatcacagtggactccgtctgcctcaagtgggcaccccccaagcacaagcaagtcaagctctccaagaagtgagcagcctggcccctgctgtcggacctgagcctcctggctcccagcctgtaaatatgtatagacctgttttgtcatttttttaataaagtcagttctggtggccctggactttggaggggaaggggaggcc

SEQ ID NO: 144887 - DNA, 1789 bp, Homo sapiens
  Payload ID: 8635
  Gene Symbol: KAT8
  Gene Name: K(lysine) acetyltransferase 8
  Uniprot ID: Q9H7Z6
  ENST ID: ENST00000448516
  CDS Start-End: 19-1422
gtcacttcccttcccgcgatggcggcacagggagctgctgcggcggttgcggcggggacttcaggggtcgcgggggagggcgagcccgggcccggggagaatgcggccgctgaggggaccgccccatccccgggccgcgtctctccgccgaccccggcgcgcggcgagccggaagtcacggtggagatcggagaaacgtacctgtgccggcgaccggatagcacctggcattctgctgaagtgatccagtctcgagtgaacgaccaggagggccgagaggaattctatgtacactacgtgggctttaaccggcggctggacgagtgggtagacaagaaccggctggcgctgaccaagacagtgaaggatgctgtacagaagaactcagagaagtacctgagcgagctcgcagagcagcctgagcgcaagatcactcgcaaccaaaagcgcaagcatgatgagatcaaccatgtgcagaagacttatgcagagatggaccccaccacagcagccttggagaaggagcatgaggcgatcaccaaggtgaagtatgtggacaagatccacatcgggaactacgaaattgatgcctggtatttctcaccattccccgaagactatgggaaacagcccaagctctggctctgcgagtactgcctcaagtacatgaaatatgagaagagctaccgcttccacttgggtcagtgccagtggcggcagccccccgggaaagagatctaccgcaagagcaacatctccgtgtacgaagttgatggcaaagaccataagatttactgtcagaacctgtgtctgctggccaagcttttcctggaccataagacactgtactttgacgtggagccgttcgtcttttacatcctgactgaggtggaccggcagggggcccacattgttggctacttctccaaggagaaggagtccccggatggaaacaatgtggcctgcatcctgaccttgcccccctaccaacgccgcggctacgggaagttcctcatcgctttcagttatgagctctccaagctggagagcacagtcggctccccggagaagccactgtctgacctgggcaagctcagctaccgcagctactggtcctgggtgctgctagagatcctgcgggacttccggggcacactgtccatcaaggacctcagccagatgaccagtatcacccaaaatgacatcatcagtaccctgcaatccctcaatatggtcaagtactggaagggccagcacgtgatctgtgtcacacccaagctggtggaggagcacctcaaaagtgcccagtataagaaaccacccatcacaggtgggtggggggctgctgtgtgtcgggggcggtgggggagtgtcagtatatggactggtaggagtcaaggcctccttattgctgtcacatgatcccaaaccagtcagaccagctcccaggatggagcccggggcaggcctctcattcctgggcttccctacccctccccagcacagcctgcccttttgttctcacctggaggaggtgaaactggcctgagcccagaggagggcagccaggtgtgagctggcctggcccaggcccagccctgcctcccgccccttctccccacagtggactccgtctgcctcaagtgggcaccccccaagcacaagcaagtcaagctctccaagaagtgagcagcctggcccctgctgtcggacctgagcctcctggctcccagcctgtaaatatgtatagacctgttttgtcatttttttaataaagtcagttctggtg

SEQ ID NO: 144888 - DNA, 1345 bp, Homo sapiens
  Payload ID: 8635
  Gene Symbol: KAT8
  Gene Name: K(lysine) acetyltransferase 8
  ENST ID: ENST00000537402
  CDS Start-End: 1-562
ctatgggaaacagcccaagctctggctctgcgagtactgcctcaagtacatgaaatatgagaagagctaccgcttccacttgggtcagtgccagtggcggcagccccccgggaaagagatctaccgcaagagcaacatctccgtgtacgaagttgatggcaaagaccataagatttactgtcagaacctgtgtctgctggccaagcttttcctggaccataagacactgtactttgacgtggagccgttcgtcttttacatcctgactgaggtggaccggcagggggcccacattgttggctacttctccaaggagaaggagtccccggatggaaacaatgtggcctgcatcctgaccttgcccccctaccaacgccgcggctacgggaagttcctcatcgctttcagttatgagctctccaagctggagagcacagtcggctccccggagaagccactgtctgacctgggcaagctcagctaccgcagctactggtcctgggtgctgctagagatcctgcgggacttccggggcacactgtccatcaaggacctcaggtgagggggcctcccgggccctgggggcaggacttgccctgagatgggccacgatcctgcttcctcataccctgtcaccatcctggccagatcccacaagggcaccaggtctggcatttgctctcatccctttttgcagccagatgaccagtatcacccaaaatgacatcatcagtaccctgcaatccctcaatatggtcaagtactggaagggccagcacgtgatctgtgtcacacccaagctggtggaggagcacctcaaaagtgcccagtataagaaaccacccatcacaggtgggtggggggctgctgtgtgtcgggggcggtgggggagtgtcagtatatggactggtaggagtcaaggcctccttattgctgtcacatgatcccaaaccagtcagaccagctcccaggatggagcccggggcaggcctctcattcctgggcttccctacccctccccagcacagcctgcccttttgttctcacctggaggaggtgaaactggcctgagcccagaggagggcagccaggtgtgagctggcctggcccaggcccagccctgcctcccgccccttctccccacagtggactccgtctgcctcaagtgggcaccccccaagcacaagcaagtcaagctctccaagaagtgagcagcctggcccctgctgtcggacctgagcctcctggctcccagcctgtaaatatgtatagacctgttttgtcatttttttaataaagtcagttctggtggccctggactttggaggggaaggggaggccaaga

SEQ ID NO: 144889 - DNA, 1846 bp, Homo sapiens
  Payload ID: 8635
  Gene Symbol: KAT8
  Gene Name: K(lysine) acetyltransferase 8
  Uniprot ID: Q9H7Z6
  ENST ID: ENST00000543774
  CDS Start-End: 336-1712
gaactcctggcctgaagcgatcctcctgcttggattcctgaagtgcgagattacaggtgtgagccaccatacctcaacactgtattttcaacccgctcttcgttcaatctccaaaggctgcagccacaggtccgcacggaaaaccaggagctccaagactgccgcacactcaacatccaactcgcggggccgcggggacggccacagaagccaatcggctcctgctacatcacagaccccgccctcaaaccttgaggagcccgccccacgcactgctgacccggagccaaaagaactgcgtggcgtccgattctggcgtcacttcccttcccgcgatggcggcacagggagctgctgcggcggttgcggcggggacttcaggggtcgcgggggagggcgagcccgggcccggggagaatgcggccgctgaggggaccgccccatccccgggccgcgtctctccgccgaccccggcgcgcggcgagccggaagtcacggtggagatcggagaaacgtacctgtgccggcgaccggatagcacctggcattctgctgaagtgatccagtctcgagtgaacgaccaggagggccgagaggaattctatgtacactacgtgggctttaaccggcggctggacgagtgggtagacaagaaccggctggcgctgaccaagacagtgaaggatgctgtacagaagaactcagagaagtacctgagcgagctcgcagagcagcctgagcgcaagatcactcgcaaccaaaagcgcaagcatgatgagatcaaccatgtgcagaagacttatgcagagatggaccccaccacagcagccttggagaaggagcatgaggcgatcaccaaggtgaagtatgtggacaagatccacatcgggaactacgaaattgatgcctggtatttctcaccattccccgaagactatgggaaacagcccaagctctggctctgcgagtactgcctcaagtacatgaaatatgagaagagctaccgcttccacttgggtcagtgccagtggcggcagccccccgggaaagagatctaccgcaagagcaacatctccgtgtacgaagttgatggcaaagaccataagatttactgtcagaacctgtgtctgctggccaagcttttcctggaccataagacactgtactttgacgtggagccgttcgtcttttacatcctgactgaggtggaccggcagggggcccacattgttggctacttctccaaggagaaggagtccccggatggaaacaatgtggcctgcatcctgaccttgcccccctaccaacgccgcggctacgggaagttcctcatcgctttcagttatgagctctccaagctggagagcacagtcggctccccggagaagccactgtctgacctgggcaagctcagctaccgcagctactggtcctgggtgctgctagagatcctgcgggacttccggggcacactgtccatcaaggacctcagccagatgaccagtatcacccaaaatgacatcatcagtaccctgcaatccctcaatatggtcaagtactggaagggccagcacgtgatctgtgtcacacccaagctggtggaggagcacctcaaaagtgcccagtataagaaaccacccatcacagtggactccgtctgcctcaagtgggcaccccccaagcacaagcaagtcaagctctccaagaagtgagcagcctggcccctgctgtcggacctgagcctcctggctcccagcctgtaaatatgtatagacctgttttgtcatttttttaataaagtcagttctggtggccctggactttggaggggaaggggaggccaaga

SEQ ID NO: 144890 - DNA, 6537 bp, Homo sapiens
  Payload ID: 8636
  Gene Symbol: KALRN
  Gene Name: kalirin, RhoGEF kinase
  Uniprot ID: O60229
  ENST ID: ENST00000240874
  CDS Start-End: 158-5149
gtgtgggaggactggtggctgtctttgcaggcaggcatttgcttagagcaggctgtgtgcgagcccagcgtcaagtgattccggcctcctcgagtcagcggtggtgggatgaggctctgccgaggggactggctgtgaaggatgagttcagggtgggatgacggaccgcttctgggaccagtggtatctctggtatctccgcttgctccggctgctggatcgagggtcttttcggaatgatggtttgaaagcttctgatgtccttcctatcctaaaggaaaaggtggccttcgtgtctgggggtcgtgataagcgaggcggacccatcctgaccttccctgctcgcagcaatcatgacagaataagacaggaagacctgcggaaactcgtgacgtatttggccagcgtgccaagtgaggacgtgtgcaaacgtggcttcactgtcatcatcgacatgcggggctccaagtgggacctcatcaagcccctcctcaaaacgctgcaggaagcctttccagctgagatccatgtggccctcatcattaaacccgacaacttctggcagaaacagaagaccaactttggcagctccaaattcatctttgagacgagcatggtatctgtggagggcctcacaaagctggtggacccctcccagctgacggaggagtttgatggctccctggactacaaccatgaggagtggatcgaactgcggctctccctggaggagttcttcaacagcgccgtgcacctgctctcgcgcctcgaggacctccaggagatgctagcccggaaggagtttcctgtggatgtggagggctctcggcggctcattgacgaacacacacagctcaagaaaaaggtgctgaaggcccctgtggaggagctggaccgggaggggcagcggctgctgcagtgcatccgctgcagcgacggcttctcaggacgcaactgcatcccgggcagtgctgacttccagagcctggtgcccaagatcaccagtctcctggacaagctgcactccacccggcagcacctgcaccagatgtggcatgtgcgcaagctcaagctggaccagtgctttcagctgcggctcttcgagcaggatgctgagaagatgtttgactggataagccacaacaaggagttattcctccagagccacacggagatcggagtcagctaccagtacgcccttgacctccagacgcagcacaatcactttgccatgaactccatgaatgcctatgtcaacatcaaccgcatcatgtccgtggcttcccgcctctctgaggccggtcattatgcctcacaacaaatcaagcagatctccacccagctggaccaggagtggaagagcttcgctgctgccctggatgaacgcagcaccatcctcgccatgtctgctgtgttccaccagaaggctgagcagttcctgtcgggagtggatgcctggtgcaagatgtgcagtgaaggtggtctgccatccgagatgcaagacctagagctggcaatccaccaccaccagaccttgtatgagcaggtgacccaagcctacacagaggtcagccaggatggcaaagcactacttgatgtgctgcagcggcccctgagccctgggaactccgaatccctcacggccacagccaactactccaaggcagtgcaccaggtgctggacgtggtgcatgaggtgttacatcaccagcgacggctggagagcatctggcagcaccgcaaggtgcggctccaccagcggctgcagctctgcgtcttccagcaggatgtacagcaggtgttggactggattgaaaaccatggtgaggcctttctcagcaaacacactggagttgggaagtccctacatcgagcccgggccctgcagaagaggcatgatgactttgaagaggtggctcagaatacgtacaccaatgcggacaagctcctagaagcagcagagcagttggctcagacgggggaatgtgaccccgaggagatctacaaggcagctcgacacctggaggtgcgcatccaagacttcgtgcgcagggtggagcagcggaagcttctcctggacatgtctgtttccttccacacacacaccaaagagttgtggacatggatggaagaccttcagaaggagatgttggaggatgtctgtgcagattctgtggatgcagtccaggaactgatcaagcagttccagcagcagcagaccgccactctagatgccacactcaatgtcatcaaggaaggcgaagaccttatccagcagctcaggtcagcgcctccctccctcggggagcccagcgaggccagggactcggctgtgtccaacaacaaaacaccccacagcagctccatcagccacatcgagtcggtcctgcagcagcttgatgatgcccaggtgcagatggaggagctgttccacgagcggaagatcaagctggacatcttcctgcaactgcgcatctttgagcagtacaccatcgaggtgacagcagagctagacgcctggaatgaagacttgcttcggcagatgaatgacttcaacacagaggacctaaccctggcagaacagcggctgcagcgccacacagaacggaagctagccatgaacaacatgacctttgaggttatccagcagggacaggatctgcaccagtacatcacggaggtccaggcatcaggaattgagttgatctgtgaaaaagacattgatctggcagcccaggtgcaagagttattggaatttctccatgagaagcagcatgaattggagctcaatgcagagcagactcataagcggctagagcagtgcctccaattacgtcacctccaggctgaagtcaaacaggttctgggatggatccgcaatggagagtcaatgctcaacgccagcctggtcaatgccagctctttgtcggaagcagagcagctgcagcgggagcacgagcagttccaactggccatcgagtccctctttcatgccacttccttgcagaagacgcaccagagtgccctgcaggtacagcagaaagccgaggtgctgctccaggccggccactacgatgccgatgccatccgggaatgtgctgagaaggtggccctccactggcagcagctcatgctgaagatggaagaccggctaaaattggtcaatgcctctgtggccttttacaaaacttctgaacaggtgtgtagtgtcctggagagcttagagcaagaataccggagagatgaggactggtgtggtggacgagataagctggggccagcagcagagatcgaccatgtcattcccctcatcagcaaacatttggaacaaaaggaggcctttcttaaggcctgcaccctggctcggcggaatgctgaggtgtttctcaagtacatccacaggaacaacgtcagcatgcccagtgtcgccagccacactcggggacccgagcaacaagtgaaagccatcctgagtgagctcctgcagagggagaatcgcgtgctgcatttctggaccttgaagaagcggcggttagaccaatgccagcaatatgtggtgttcgagcgcagcgctaagcaggcgcttgactggatccaagaaacaggtgaattttacctctcaacacatacctccactggagagaccacagaggagactcaggaactgctgaaagaatatggggaattcagggtgcctgccaagcaaacaaaggagaaggtgaagcttctgattcagctggccgatagctttgtggaaaaaggccacattcatgccacggagataaggaaatgggtgaccacggtggacaagcactacagagatttctccctgaggatgggaaagtaccgatactcactggagaaagccctaggagtcaacacagaggataataaggacctggagctggatattatcccagcaagcctttcggatcgggaggtcaagctgcgggacgccaaccacgaagtcaatgaagagaagcggaagtcagcccggaagaaagaatttattatggctgaactactccagacagagaaggcttatgtaagggatttgcatgagtgcttagagacctacctgtgggaaatgaccagtggtgtggaggagatcccccctgggatcctcaataaagagcatatcatctttggcaacatccaagagatctacgatttccataacaacatcttcctcaaagagctggagaagtacgagcaactgcctgaggatgtgggacactgctttgttacctgggcagacaaatttcagatgtatgtcacctactgtaaaaacaagcctgattccaaccagcttatcctggagcatgcgggcaccttctttgatgagatacaacagcggcatggtctggccaactccatctcttcctacctaattaagcctgtccaaaggatcaccaaatatcaactgctcctgaaggaacttttaacttgctgtgaagaagggaaaggggagctcaaggatggcctggaggtgatgctcagtgtcccaaagaaagccaatgatgccatgcatgtcagcatgctggaagggttcgacgagaacctggatgtgcagggggagttgattctccaggatgcctttcaagtgtgggacccgaagtcgctgatccggaaggggcgggagcggcacttgttcctctttgagatctccttggtttttagcaaggagatcaaagattcttcaggacacacgaaatatgtttacaagaacaagctactgacctcagagctgggtgtgaccgagcacgtggagggcgatccctgcaaattcgccttgtggtctgggcgcaccccatcctcagacaataaaacagtgctgaaagcctccaacattgaaaccaagcaggagtggatcaagaacattcgagaagtgattcaagaaaggatcattcacctgaaaggagctttaaaggagccacttcagctccccaaaacaccagccaaacagaggaacaatagtaagagggatggagtggaggatattgacagccagggggatgggagcagccaaccagacaccatctccattgcttctaggacctctcagaacacagtggacagtgacaaggatggcaaccttgttcctcggtggcacctgggacctggagatcctttctccacttacgtttagcgcgcatcctgggacttgtccctgcagctcaccgggttagccgtggcaccgttgggacctcccaccaggactccaatcacccacctctcttgagacttctctggcagggctggtgtggggtgcagcctttgctcagagggcaacatgttccaagcaaaatctccccgcctgggccatgggctcaccctcggggctcccttcttctctactgggtgcaattcgaggttgctgagcttctctccaaagtctaaaatggtggggcagtagggacctgtgagaggcccaatggcccaatgtacttcccccagatcccactcagaacagcaggtacgcccaggctcctgctgccctagaggtctgcaacatgagtgaagaggttaattagagggacacacttatctctgaagtttttctccaggctgaacatttctattatcagtggcccctaatctggaaaaacccatcattctaatctagcttgtatccccacatcatgagaaagagggaagaagaagaagggatgatgtgtggtagagaagatgagggttaactttagcctttcccaaacactggcaacaaccacttcctcaacaatttttctatttgcttcagcctactcagattttttcaggtttttctagctcctccataacctcactccctcccgaggtctctggttcaaagaccaccctaccagcccctatttgcttcaggttatcctgttgagggtgggtgggaagagtgagaagatataaatgaaaaactggccacatgttgataattgttgaaactagatgatggtacgtggacattcattataccattctccccacttctgtatttgtttgcaatttttcataataaaaaagttttaaaagtcctccagtttccaacacactcaagagagagccccaaccccaaacacagagtttcatggaaaccccacaccaaggcaagaggcagagatgatgattccatttcatatatacactcattttctaactttttttaaaggcccactgctttattttcaatagattaaacctgatttctgagaggtcctgaagttgggcttatttccctggctgggttatgggggagggcagggtaaagggatccttaaaaaagtttacacttctatgtatctcacaatcttattgtgaggatgtgacttgttcagtgttctgaacttttcgaaggaatcgtgctctcaatgcaaagtgtcattctctggaattgcacctggctcaggaaaggactgtctttgtacttgaatttaaatccaatggagaactttaacacgggcatttgcatgactgagaattgctgctgtcttttttccgtatgtcactttcttgaatgtgttctaataaaatgattctaaagca

SEQ ID NO: 144891 - DNA, 10888 bp, Homo sapiens
  Payload ID: 8636
  Gene Symbol: KALRN
  Gene Name: kalirin, RhoGEF kinase
  Uniprot ID: O60229
  ENST ID: ENST00000291478
  CDS Start-End: 164-4033
gtggctcccagtaagtcagagctgcggccgcggtgcggggagagcacagcggggagggcgggagccggctctcgggcggcggcgctgaagtttccttcccgccgcgctctcaccccgggctggcgccccgtgccatgcgggagcgctggggcggcggggcaacatgaagggcggcgacagggcttacacccgaggtccctctttggggtggctctttgctaagtgctgctgttgcttcccgtgtagagatgcatactctcattcctcaagcgagaatggaggcaagtccgagtccgtggccaacctgcaggcccagccctccctgaactccatccacagttccccgggtcccaagcgctccaccaacactcttaagaagtggctgacgagtcctgtgcgtcggcttaacagcgggaaggcagatggaaacatcaaaaagcagaagaaagttcgcgatggtcggaagagctttgacctgggatctcccaagcctggggatgaaacaacccctcagggagacagcgctgatgagaagagcaagaaaggttggggtgaagatgagccggatgaagagtcacacacacccctcccaccacctatgaagatttttgacaacgaccctacacaggatgaaatgtcctcctctttgctagcagcccggcaggcttccactgaagtacctactgctgcagaccttgtcaatgcaatagaaaagttggtcaaaaacaagctgagtctagaaggaagctcataccgggggagcttgaaagaccctgcaggctgcctgaatgaggggatggccccacccacacctcctaaaaacccagaagaagaacagaaagccaaggccctgagaggcaggatgtttgtcctgaatgagctggtacagacagagaaagactatgtcaaggatctgggcattgtggtggagggcttcatgaagagaatagaagaaaagggtgtccctgaggatatgcgaggaaaggacaaaatcgtgtttggaaatattcatcagatttatgactggcataaggattttttcctggcggaactggaaaagtgtatccaggagcaagacagattggcacagctctttattaagcacgagcggaagctgcacatctacgtgtggtattgtcagaataagccgcgctcagagtacatcgttgctgagtatgacgcctactttgaggaggtaaaacaggagataaatcagaggctgacactgagtgacttcctcatcaagcccattcagagaataacaaaataccagttgctcctcaaggacttcctgagatacagtgagaaggctggtttggagtgttcagatattgagaaagcagtggagttaatgtgccttgttcccaaacgctgcaatgacatgatgaatctaggacgtctgcagggctttgagggcactctgactgctcaggggaagctgctgcagcaggacacattctatgtgatcgagctggatgcaggcatgcagtcccggaccaaagagaggcgcgtgttcctcttcgagcagattgtcatcttcagtgaactgctcaggaagggatccctcacccctggctacatgttcaaaaggagcatcaagatgaattacttggtcctggaggagaatgtggacaatgatccctgcaagtttgcactcatgaacagagagacttctgagagggttgttctgcaagccgccaacgctgacatccagcaggcctgggtgcaggacatcaatcaagtcttagaaacacagcgagactttttgaatgcactgcaatcgcccattgagtatcaacggaaagaaaggagcacagctgtgatgaggtctcaacctgccaggcttccccaagccagccccaggccctactcctctgttcctgcgggctcagagaagcccccaaagggctccagctataacccacctctgcctcccctgaagatatctacctccaatggcagtccagggtttgaataccaccagcctggggacaagttcgaagccagcaagcagaacgacctgggaggctgcaatgggacctcgtccatggccgtgatcaaagattactatgcactgaaggagaatgaaatctgtgtgagccaaggtgaggtggtccaggtcctcgccgtcaaccagcagaacatgtgtctggtgtaccagcctgccagcgaccattcccccgccgccgagggctgggtcccaggcagcatcctggcgcccctcaccaaagccacagcagcagaaagtagtgacgggagcatcaagaagtcatgttcatggcatactctacgcatgagaaagcgggcggaagtggagaacacgggtaaaaatgaagccacagggcctcgtaaacccaaggatattctgggcaacaaagtctctgttaaagagacgaacagttccgaggaatcagagtgtgatgatcttgaccctaatactagcatggagatcttaaatccaaatttcatccaagaagtggccccagaattccttgtgcccttggtggatgtgacctgcttgcttggggacacagtgatactgcagtgcaaagtctgtgggcggccaaagcccaccatcacttggaagggtccagaccagaacatccttgacactgataacagctcagccacatacacggtctcctcttgtgattctggagaaatcaccctgaagatctgtaatctgatgccccaagacagtgggatttatacctgcatagcaacaaatgaccacgggaccacatcaacgtctgcaacagtcaaagtgcaaggtgttccagcagcccctaaccgccccattgcccaggagagaagctgcacctccgtgattctccgctggctgcccccctccagcacaggaaactgcactatttctggttacactgtggagtacagagaggaaggttctcagatctggcagcagtcagtggcttcgaccttggacacttacctcgtcatcgaagaccttagtcccgggtgtccttatcagttcagagtcagtgccagtaacccctggggaatcagccttcccagcgagccctcggagtttgtgcgacttccagaatatgatgctgctgctgatggtgccaccatttcttggaaggaaaattttgactcagcttacactgagctgaatgaaattggaagaggccgtttctctatagtaaagaaatgcattcacaaagctacccgcaaagatgtggctgtgaaatttgttagcaaaaaaatgaagaagaaagaacaggctgcccacgaggctgccctgcttcagcacctacagcacccccagtacatcactctccatgacacctatgagtcccccacatcctacatcctgatcttggaactgatggatgatggccggctcttagactaccttatgaatcatgatgaactgatggaggaaaaagtagctttctatatccgagacatcatggaggctctgcagtaccttcacaactgcagggttgcacatttggacataaagcctgaaaacctgctcattgacctacggattccagtgcctcgagtgaagctcattgacttggaggatgctgtccagatctcgggtcacttccacattcaccacctgctggggaaccctgagtttgctgccccagaagtcattcaaggcatccccgtctccctggggacagacatctggagcatcggggttctgacatatgtcatgctgagtggggtctcccccttcttggatgagagcaaagaggagacatgtatcaacgtatgcagggtggatttcagcttcccccatgaatacttctgtggtgtgagcaatgctgccagagatttcatcaatgtgatcttacaggaagattttcggaggcggcccacagcagccacatgcttgcagcatccatggctgcagccccataatggcagctactctaagatccccctggacacctcccgcctagcatgcttcatagaacgtcgcaagcaccagaatgatgtgcggcctattcccaatgtcaagagctacattgtcaaccgggtgaaccaagggacgtagccatctcccagcccctatggtttcacatagacgtgcagtgtgaaccaaagcaagactgaatgtgactgtaaataattctgttcatcatttcactccgtgcagttctctgaattgagagatgtacctcttaaacctcgtcagtggttattcagggtctgagcagcagtaaaagtcaccctaaatcaaggggcttttcagaaggtcattctgaagaaataaagaggcaaagggtcacagaagtgttcagaagaagggcaaagataagaacaatattagctgttacgaaattttaactgtatcttccaaaatgagtggttaactgggcaaaccttaagctcacaagagtataaaagatctctggctttgctgaaattttaagcaagaagttctatttaatggagatgtcatgtatatcaactattctggtttagataacttagatatagtttcttaataggatagatacccacatacagtataatatatcccattcaggtttcagagttttctaatatagagatatatatattaaatcaatcacaagtaattttgagtgctccagttaagacagtaatttatttaccgaatcattacattgttttgactaagcacaattagatgacaagtttttttagagcattttatagatcttgtatagaaatcttttaccagaacctgtgcattaagagaaagcaatgttgcccttttgaatgagaaaattttttctgtcaatcgcaggttatttgattaagataggttctttctgtatatgaaacgctccccgcaaattcactggcagctcagaattattctggaaagaaagcctgccaggaaataaattcaaatacagtatgagctgcggggatatttttgtgtctacaccaggtttgaaataagtaaacaaatacaagaggttcatataaaagggcaaatgaaaacctttcctacagttcctatgaacaacgtaccaacactttctgatttcttctacagctgtagaataccatctttcagaaagttggctggctttatttctaactccttattgaagctaaggggtgcttactaaaaggaggcagccatataggccttttaaaggcctggttctaagtcctttttaaagccatggaacaaaacctgatacatcaccctaacagagcattaagttgtaactgagattgcaatacctgtcaccatgcagccgctgatagttctctgaactaaaaggactaattgtactttgaggccaatgctgctttctggtgtatattctccatacaagattattattaactgctctttttccctctggtggaaaaaaaattaaacctgggcatttcatgggttttctttctttatttttgttcatttgttttggagggagggagcttgttttttgtgtttgtacatgatccacccttagttttctagaatgtgtgttgaaaattgcgattatacaagtaagattttaaaaatgtaactcaagtgtttgttcaaatcaggtttaatggtgttgcttctctcctataatgggatagagaaaattaaaatcacgtagtacagaagtgcaagaagagaatttatgaaggatgaatagaactacaaacctatctaaatgaaaaagaaatggtggaaactaagcctgaactttaacatataaaaaacacttattcccacagagaaaatgtaaaattaaaaatcatcatctttttttttccattggtttcaaagacaacttcctcattcgccctccacctcatcccatccaagattatagattgataaattaatggaaagtataagcaataagactagatagcacttagtatttttgggattaaccaaatatatggaaaccgactccgactgtatttgtttcttaattttcaaatggccctgggtcataaagcctcactccctcagaggtctctcgactaacccctatagtcttcatttggacctttatgtatttacaaacactctatgatacaatacataaaaatttaaaacatacattaaacatggttactaaaatttttcaaaatgtaaaacatatttagtaaaaaaattttagtaaacatgttttcattgtgtttaaaaaatttaaaacatatttactaaaaatccttttagtaaacagtttactaaaaccctttcaataaacatgtcttcattatggtatacagcataaaagaggaaagcctgagccgggcgcggcggctcacgcctgtgatcccagcactttgggaggccgaggcgggtggatcacaaggtcagcagttcgagaccagcctgactaacatggtgaaaccctgtctccactaaaaatacaaaaaaatcatctgggcgtagtggcgggcactcgtaatcccagcgacttgggaggctgaggcaggagaatcgcttgaaaccggaaggcggaggttgccgtgagccgagattgcaccactgcactctagcctgggcaataagagcaaaattctgtctcgaaaaaaaaggaaagcctggcccatagggtttgtcatgggacaaactgtaggctctgaggattcccaatatccataaagtccagcttggcaagttctgttctgtccactgtggatgacctgaatcaagatccccctgctgagccattctgagtttttataacaagttgagtttctgcttgagaaggccagggcccagaacaatggtgtgcagaccacggcaggtgggggacaaggagggtatttttgaaattatgttatgggggcagttgacagaatgttagacagaccccaagctttcatatcagcttttacaacagagttgggaggatccagatgtggggttgcatggaattcccccaagtacacatatttgggaagtgagaagacaggaaaggagggacctagaaatgaaaagtaggatgattttgttaactggagccaaggtacaatcattagactagaatgaacttaatagaggccccaagagaaagggggtatattttatatagtttgataacggagggaaactaacagggaggctccctgtctgcaaagctcctggtccctcccaacagagataagagagtagtcttggttcaagagttctccacagcaagttggaaataacaaggaatcccagatgatgatgatcctggggaatgtactttaggttgctctgagggcaaccgtgcttagggaaaaaggatcaggggccactcttgttcctgttttggcggagagatttattacttggtagtaaagaagagaggagagaagagaaaatggtccatttctatcattatgatggtagttcacagtgggagtgaactttcagctgaaatgggaaaaacaaacaatggtcaaggtcacaagtttcttgcttggcttttattcattgcatagggttttgagctttttgttttgttttgttttgtaagggtgggatacagaaagaatgaaaagatcagggacaacccataataacttttaagaagtattaatataatgatttcctacatcttttacatttgtttcaaattaaatagatatatatccacttacagctgaatgtggtaaaatttttaagaaaaaaatggtaatgttggagatatccttcaggtctctctcagccataaacaatgtaagggggagtagaggaagcagaggagaaagctagcttcactgctttgtggtccacaaagcctttataaatagtagtgcctttcagaggggaggatgggagataaagaagttcattgcatttagatgtactgatattgcagcattttttctttactttaaaatatcttgtaaatgaaaacatctgaatataggggtgggaccaggaatgtttgagtttcaatctcagctattcctgattcatcttttcttacagaaagtctttgtttttccttccccaaatgtccccattggtaaaatgggagttgggggatggggaaggagggaggacattaatcttacaggaatgttgagaaataaccttggtggggacatctataaaatactttgatttttttaagtgctacacactgccagtgctaagaattttattgatagtaactttgaacattccaggttttcaatattcacgtctttagataccaattataaactcatgagattaaattctgtaaattgttttcagttggaagtatcaggtgctctttgtctaaatgttatttggtcttagcctataatttcgatcatttaagagcttgtctaccgaaaagggttaggagagctgatgaagtcttatgtccataagttgttttctccagtatttcttatggcagatgcgaagagtaaaatgcccttgaaagcaactgctaccttccttctcaagctttatgctctggaaaaaaggacagagaagaacccaacaaccactttcttcacttgggagggcagaagtgagaagaaaatatcttctcataccacaatttatttttcacagcctcacaggaatctaagagacaaattaaatgcacaggcaaattaaatgcatagaaatgaattggactgctcatttttggaggacaaaccttgaatctttttttttttttttaggtggttaggtcttttaggagttgcatatttgctatcccataacctccatgattagagcccacgagttaggcattacttttttcttgcctctgtggaagagcatggcaatttagatttgtgagaatatgagggagcaaatatgatataaactaaattttgcattaactaaaactttgtcccatgcatttaatacaggaggaaattattttgtacgtaagaggtctttgtagtagggcaaagttcaaactcaccatgtccttattcagtatggtcaatgaattgtgctggatgagtttcgaggaatgtagaccttcttcctttctctcctgggtcgcacctctgtggagtctgggttagacaaatgcaatatgtgacctttcagtgaatttatttataaaactgcaccttgatttttcctcactatttaaagcctagggatgatttgatgatgaatgattaaacccatggtgggcttagagacgacagagctcacacacgctccatcaagaaaaggaaagctactatgttaatatttattttctaaaaatattaaggctctcagttgtttcattaattctaaagggttaaaaagggctgaaatttgtttatagcactaaatgtttttaataggaaatttactcacataaaaaatttaagcagaagtagtagaatacagattatcataaaacatattttctatgaaaggcatttcttcctcatcttcaataaatatgaagaagttagaggagaggaaaaagcaatcactctaagacaacttttcgtctttgagggacattatgataagcctgaaattaatacgcacaggctattgcatttttctgtgagaaatgtgcccctttgctgtgagattctaaaatgtgttcagatttagtttttattcaaatgatcaagataacgcattagttagataactgctatttcagatagtgaggttagctgagaaaaggaagcatggtagaagaaatgcaaataacaattcttggaatgccaactcctgaggcttagtttaaccaagctaatttgttggcccagggatggccatcatatgagtttccatcaatacctgacttccatcaacaactgaatccatgttctggagtattacagagactgttactatgacctcaaagactgtggctacgaatctgaagttaacaagacatacatcttctcttactaacttaagccatatctgtcaactctatgtttgatttttctgaccctggtgcttttacttctgtttctgccaaacttcagcctactctatggggaaggtgagtaaaactagtagttagaacaaatatgaagactgaaaaaaactaaacatactcttcataatgagatcctgttcagagaacagtagtgatcaaagtgcaaactgttggaaaatatggatatatgtacatctgtacatgtatatagtgtataatatgtatgtatatgttattgctcatatgcagaaatctatccatttgcagacagcccaggtgggtcaatgtttctaatggaaaaccatttagggccattcaaaaccattagggctaatttgtggagacgaattctactcattctggaattaatttgctgtcttttgacatccacaaagccaaactaacaaagtgtgaaacataaaggggccatcatttagtttattctgtttatctggacttataactatctttacatttgaactattaatagttgatttgcaaactgtattggcatctcttggttttgagtgacccctgcccccctcaagtcttttgagaatttggagtgggcttcactggccattcagacaaagggccttattcataagtggacaggtttccccatagggaccatcgcacatatacatataagtacatacttccatcaggcttgtaacaattgatttaaaatcactccacagtattgataaatagctctatattttcaaggtgcagaagaattccacagccttaattatttcagtgtcttgctggtctgccttaagtgtatcttctgggtttttggttattttattatttttaaatttttctgctgttgttcattttgtatgcacacaatgtcgttttgtaaaggtaggttgtaaatattttatttgtaagtcaaaatcactcatgtgtaatgttgtaaagtgatgacctgctgtcttgttactgctacagtaaatgttataagttatggatgaaacttcaaaatgtacatctcacatgttatgcattcctataaatatactatactaaagatacta

SEQ ID NO: 144892 - DNA, 10586 bp, Homo sapiens
  Payload ID: 8636
  Gene Symbol: KALRN
  Gene Name: kalirin, RhoGEF kinase
  ENST ID: ENST00000354186
  CDS Start-End: 1-8867
ggtcttttcggaatgatggtttgaaagcttctgatgtccttcctatcctaaaggaaaaggtggccttcgtgtctgggggtcgtgataagcgaggcggacccatcctgaccttccctgctcgcagcaatcatgacagaataagacaggaagacctgcggaaactcgtgacgtatttggccagcgtgccaagtgaggacgtgtgcaaacgtggcttcactgtcatcatcgacatgcggggctccaagtgggacctcatcaagcccctcctcaaaacgctgcaggaagcctttccagctgagatccatgtggccctcatcattaaacccgacaacttctggcagaaacagaagaccaactttggcagctccaaattcatctttgagacgagcatggtatctgtggagggcctcacaaagctggtggacccctcccagctgacggaggagtttgatggctccctggactacaaccatgaggagtggatcgaactgcggctctccctggaggagttcttcaacagcgccgtgcacctgctctcgcgcctcgaggacctccaggagatgctagcccggaaggagtttcctgtggatgtggagggctctcggcggctcattgacgaacacacacagctcaagaaaaaggtgctgaaggcccctgtggaggagctggaccgggaggggcagcggctgctgcagtgcatccgctgcagcgacggcttctcaggacgcaactgcatcccgggcagtgctgacttccagagcctggtgcccaagatcaccagtctcctggacaagctgcactccacccggcagcacctgcaccagatgtggcatgtgcgcaagctcaagctggaccagtgctttcagctgcggctcttcgagcaggatgctgagaagatgtttgactggataagccacaacaaggagttattcctccagagccacacggagatcggagtcagctaccagtacgcccttgacctccagacgcagcacaatcactttgccatgaactccatgaatgcctatgtcaacatcaaccgcatcatgtccgtggcttcccgcctctctgaggccggtcattatgcctcacaacaaatcaagcagatctccacccagctggaccaggagtggaagagcttcgctgctgccctggatgaacgcagcaccatcctcgccatgtctgctgtgttccaccagaaggctgagcagttcctgtcgggagtggatgcctggtgcaagatgtgcagtgaaggtggtctgccatccgagatgcaagacctagagctggcaatccaccaccaccagaccttgtatgagcaggtgacccaagcctacacagaggtcagccaggatggcaaagcactacttgatgtgctgcagcggcccctgagccctgggaactccgaatccctcacggccacagccaactactccaaggcagtgcaccaggtgctggacgtggtgcatgaggtgttacatcaccagcgacggctggagagcatctggcagcaccgcaaggtgcggctccaccagcggctgcagctctgcgtcttccagcaggatgtacagcaggtgttggactggattgaaaaccatggtgaggcctttctcagcaaacacactggagttgggaagtccctacatcgagcccgggccctgcagaagaggcatgatgactttgaagaggtggctcagaatacgtacaccaatgcggacaagctcctagaagcagcagagcagttggctcagacgggggaatgtgaccccgaggagatctacaaggcagctcgacacctggaggtgcgcatccaagacttcgtgcgcagggtggagcagcggaagcttctcctggacatgtctgtttccttccacacacacaccaaagagttgtggacatggatggaagaccttcagaaggagatgttggaggatgtctgtgcagattctgtggatgcagtccaggaactgatcaagcagttccagcagcagcagaccgccactctagatgccacactcaatgtcatcaaggaaggcgaagaccttatccagcagctcaggtcagcgcctccctccctcggggagcccagcgaggccagggactcggctgtgtccaacaacaaaacaccccacagcagctccatcagccacatcgagtcggtcctgcagcagcttgatgatgcccaggtgcagatggaggagctgttccacgagcggaagatcaagctggacatcttcctgcaactgcgcatctttgagcagtacaccatcgaggtgacagcagagctagacgcctggaatgaagacttgcttcggcagatgaatgacttcaacacagaggacctaaccctggcagaacagcggctgcagcgccacacagaacggaagctagccatgaacaacatgacctttgaggttatccagcagggacaggatctgcaccagtacatcacggaggtccaggcatcaggaattgagttgatctgtgaaaaagacattgatctggcagcccaggtgcaagagttattggaatttctccatgagaagcagcatgaattggagctcaatgcagagcagactcataagcggctagagcagtgcctccaattacgtcacctccaggctgaagtcaaacaggttctgggatggatccgcaatggagagtcaatgctcaacgccagcctggtcaatgccagctctttgtcggaagcagagcagctgcagcgggagcacgagcagttccaactggccatcgagaagacgcaccagagtgccctgcaggtacagcagaaagccgaggtgctgctccaggccggccactacgatgccgatgccatccgggaatgtgctgagaaggtggccctccactggcagcagctcatgctgaagatggaagaccggctaaaattggtcaatgcctctgtggccttttacaaaacttctgaacaggtgtgtagtgtcctggagagcttagagcaagaataccggagagatgaggactggtgtggtggacgagataagctggggccagcagcagagatcgaccatgtcattcccctcatcagcaaacatttggaacaaaaggaggcctttcttaaggcctgcaccctggctcggcggaatgctgaggtgtttctcaagtacatccacaggaacaacgtcagcatgcccagtgtcgccagccacactcggggacccgagcaacaagtgaaagccatcctgagtgagctcctgcagagggagaatcgcgtgctgcatttctggaccttgaagaagcggcggttagaccaatgccagcaatatgtggtgttcgagcgcagcgctaagcaggcgcttgactggatccaagaaacaggtgaattttacctctcaacacatacctccactggagagaccacagaggagactcaggaactgctgaaagaatatggggaattcagggtgcctgccaagcaaacaaaggagaaggtgaagcttctgattcagctggccgatagctttgtggaaaaaggccacattcatgccacggagataaggaaatgggtgaccacggtggacaagcactacagagatttctccctgaggatgggaaagtaccgatactcactggagaaagccctaggagtcaacacagaggataataaggacctggagctggatattatcccagcaagcctttcggatcgggaggtcaagctgcgggacgccaaccacgaagtcaatgaagagaagcggaagtcagcccggaagaaagaatttattatggctgaactactccagacagagaaggcttatgtaagggatttgcatgagtgcttagagacctacctgtgggaaatgaccagtggtgtggaggagatcccccctgggatcctcaataaagagcatatcatctttggcaacatccaagagatctacgatttccataacaacatcttcctcaaagagctggagaagtacgagcaactgcctgaggatgtgggacactgctttgttacctgggcagacaaatttcagatgtatgtcacctactgtaaaaacaagcctgattccaaccagcttatcctggagcatgcgggcaccttctttgatgagatacaacagcggcatggtctggccaactccatctcttcctacctaattaagcctgtccaaaggatcaccaaatatcaactgctcctgaaggaacttttaacttgctgtgaagaagggaaaggggagctcaaggatggcctggaggtgatgctcagtgtcccaaagaaagccaatgatgccatgcatgtcagcatgctggaagggttcgacgagaacctggatgtgcagggggagttgattctccaggatgcctttcaagtgtgggacccgaagtcgctgatccggaaggggcgggagcggcacttgttcctctttgagatctccttggtttttagcaaggagatcaaagattcttcaggacacacgaaatatgtttacaagaacaagctactgacctcagagctgggtgtgaccgagcacgtggagggcgatccctgcaaattcgccttgtggtctgggcgcaccccatcctcagacaataaaacagtgctgaaagcctccaacattgaaaccaagcaggagtggatcaagaacattcgagaagtgattcaagaaaggatcattcacctgaaaggagctttaaaggagccacttcagctccccaaaacaccagccaaacagaggaacaatagtaagagggatggagtggaggatattgacagccagggggatgggagcagccaaccagacaccatctccattgcttctaggacctctcagaacacagtggacagtgacaagctctctggtggatgtgagctgacagtggtcctccaggacttcagtgcgggccacagcagtgagctgaccatccaggtggggcagacggtagagctgctggagcggcccagcgagcggcctggttggtgtctggtccgtaccaccgaacggagcccgcccttggagggtctggtccccagcagcgccctgtgcatctcacactcccgaagcagcgtggagatggactgcttcttccccttggtgaaagatgcatactctcattcctcaagcgagaatggaggcaagtccgagtccgtggccaacctgcaggcccagccctccctgaactccatccacagttccccgggtcccaagcgctccaccaacactcttaagaagtggctgacgagtcctgtgcgtcggcttaacagcgggaaggcagatggaaacatcaaaaagcagaagaaagttcgcgatggtcggaagagctttgacctgggatctcccaagcctggggatgaaacaacccctcagggagacagcgctgatgagaagagcaagaaaggttggggtgaagatgagccggatgaagagtcacacacacccctcccaccacctatgaagatttttgacaacgaccctacacaggatgaaatgtcctcctctttgctagcagcccggcaggcttccactgaagtacctactgctgcagaccttgtcaatgcaatagaaaagttggtcaaaaacaagctgagtctagaaggaagctcataccgggggagcttgaaagaccctgcaggctgcctgaatgaggggatggccccacccacacctcctaaaaacccagaagaagaacagaaagccaaggccctgagaggcaggatgtttgtcctgaatgagctggtacagacagagaaagactatgtcaaggatctgggcattgtggtggagggcttcatgaagagaatagaagaaaagggtgtccctgaggatatgcgaggaaaggacaaaatcgtgtttggaaatattcatcagatttatgactggcataaggattttttcctggcggaactggaaaagtgtatccaggagcaagacagattggcacagctctttattaagcacgagcggaagctgcacatctacgtgtggtattgtcagaataagccgcgctcagagtacatcgttgctgagtatgacgcctactttgaggaggtaaaacaggagataaatcagaggctgacactgagtgacttcctcatcaagcccattcagagaataacaaaataccagttgctcctcaaggacttcctgagatacagtgagaaggctggtttggagtgttcagatattgagaaagcagtggagttaatgtgccttgttcccaaacgctgcaatgacatgatgaatctaggacgtctgcagggctttgagggcactctgactgctcaggggaagctgctgcagcaggacacattctatgtgatcgagctggatgcaggcatgcagtcccggaccaaagagaggcgcgtgttcctcttcgagcagattgtcatcttcagtgaactgctcaggaagggatccctcacccctggctacatgttcaaaaggagcatcaagatgaattacttggtcctggaggagaatgtggacaatgatccctgcaagtttgcactcatgaacagagagacttctgagagggttgttctgcaagccgccaacgctgacatccagcaggcctgggtgcaggacatcaatcaagtcttagaaacacagcgagactttttgaatgcactgcaatcgcccattgagtatcaacggaaagaaaggagcacagctgtgatgaggtctcaacctgccaggcttccccaagccagccccaggccctactcctctgttcctgcgggctcagagaagcccccaaagggctccagctataacccacctctgcctcccctgaagatatctacctccaatggcagtccagggtttgaataccaccagcctggggacaagttcgaagccagcaagcagaacgacctgggaggctgcaatgggacctcgtccatggccgtgatcaaagattactatgcactgaaggagaatgaaatctgtgtgagccaaggtgaggtggtccaggtcctcgccgtcaaccagcagaacatgtgtctggtgtaccagcctgccagcgaccattcccccgccgccgagggctgggtcccaggcagcatcctggcgcccctcaccaaagccacagcagcagaaagtagtgacgggagcatcaagaagtcatgttcatggcatactctacgcatgagaaagcgggcggaagtggagaacacgggtaaaaatgaagccacagggcctcgtaaacccaaggatattctgggcaacaaagtctctgttaaagagacgaacagttccgaggaatcagagtgtgatgatcttgaccctaatactagcatggagatcttaaatccaaatttcatccaagaagtggccccagaattccttgtgcccttggtggatgtgacctgcttgcttggggacacagtgatactgcagtgcaaagtctgtgggcggccaaagcccaccatcacttggaagggtccagaccagaacatccttgacactgataacagctcagccacatacacggtctcctcttgtgattctggagaaatcaccctgaagatctgtaatctgatgccccaagacagtgggatttatacctgcatagcaacaaatgaccacgggaccacatcaacgtctgcaacagtcaaagtgcaaggtgttccagcagcccctaaccgccccattgcccaggagagaagctgcacctccgtgattctccgctggctgcccccctccagcacaggaaactgcactatttctggttacactgtggagtacagagaggaaggttctcagatctggcagcagtcagtggcttcgaccttggacacttacctcgtcatcgaagaccttagtcccgggtgtccttatcagttcagagtcagtgccagtaacccctggggaatcagccttcccagcgagccctcggagtttgtgcgacttccagaatatgatgctgctgctgatggtgccaccatttcttggaaggaaaattttgactcagcttacactgagctgaatgaaattggaagaggccgtttctctatagtaaagaaatgcattcacaaagctacccgcaaagatgtggctgtgaaatttgttagcaaaaaaatgaagaagaaagaacaggctgcccacgaggctgccctgcttcagcacctacagcacccccagtacatcactctccatgacacctatgagtcccccacatcctacatcctgatcttggaactgatggatgatggccggctcttagactaccttatgaatcatgatgaactgatggaggaaaaagtagctttctatatccgagacatcatggaggctctgcagtaccttcacaactgcagggttgcacatttggacataaagcctgaaaacctgctcattgacctacggattccagtgcctcgagtgaagctcattgacttggaggatgctgtccagatctcgggtcacttccacattcaccacctgctggggaaccctgagtttgctgccccagaagtcattcaaggcatccccgtctccctggggacagacatctggagcatcggggttctgacatatgtcatgctgagtggggtctcccccttcttggatgagagcaaagaggagacatgtatcaacgtatgcagggtggatttcagcttcccccatgaatacttctgtggtgtgagcaatgctgccagagatttcatcaatgtgatcttacaggaagattttcggaggcggcccacagcagccacatgcttgcagcatccatggctgcagccccataatggcagctactctaagatccccctggacacctcccgcctagcatgcttcatagaacgtcgcaagcaccagaatgatgtgcggcctattcccaatgtcaagagctacattgtcaaccgggtgaaccaagggacgtagccatctcccagcccctatggtttcacatagacgtgcagtgtgaaccaaagcaagactgaatgtgactgtaaataattctgttcatcatttcactccgtgcagttctctgaattgagagatgtacctcttaaacctcgtcagtggttattcagggtctgagcagcagtaaaagtcaccctaaatcaaggggcttttcagaaggtcattctgaagaaataaagaggcaaagggtcacagaagtgttcagaagaagggcaaagataagaacaatattagctgttacgaaattttaactgtatcttccaaaatgagtggttaactgggcaaaccttaagctcacaagagtataaaagatctctggctttgctgaaattttaagcaagaagttctatttaatggagatgtcatgtatatcaactattctggtttagataacttagatatagtttcttaataggatagatacccacatacagtataatatatcccattcaggtttcagagttttctaatatagagatatatatattaaatcaatcacaagtaattttgagtgctccagttaagacagtaatttatttaccgaatcattacattgttttgactaagcacaattagatgacaagtttttttagagcattttatagatcttgtatagaaatcttttaccagaacctgtgcattaagagaaagcaatgttgcccttttgaatgagaaaattttttctgtcaatcgcaggttatttgattaagataggttctttctgtatatgaaacgctccccgcaaattcactggcagctcagaattattctggaaagaaagcctgccaggaaataaattcaaatacagtatgagctgcggggatatttttgtgtctacaccaggtttgaaataagtaaacaaatacaagaggttcatataaaagggcaaatgaaaacctttcctacagttcctatgaacaacgtaccaacactttctgatttcttctacagctgtagaataccatctttcagaaagttggctggctttatttctaactccttattgaagctaaggggtgcttactaaaaggaggcagccatataggccttttaaaggcctggttctaagtcctttttaaagccatggaacaaaacctgatacatcaccctaacagagcattaagttgtaactgagattgcaatacctgtcaccatgcagccgctgatagttctctgaactaaaaggactaattgtactttgaggccaatgctgctttctggtgtatattctccatacaagattattattaactgctctttttccctctggtggaaaaaaaattaaacctgggcatttcatgggttttctttctttatttttgttcatttgttttggagggagggagcttgttttttgtgtttgtacatgatccacccttagttttctagaatgtgtgttgaaaattgcgattatacaagtaagattttaaaaatgtaactcaagtgtttgttcaaatcaggtttaatggtgttgcttctctcctataatgggatagagaaaattaaaatcacgtagtacagaagtgcaagaagagaatttatgaaggatgaatagaactacaaacctatctaaatgaaaaagaaatggtggaaactaagcctgaactttaacatataaaaaacacttattcccacagagaaaatgtaaaattaaaaatcatcatctttttttttcca

SEQ ID NO: 144893 - DNA, 10806 bp, Homo sapiens
  Payload ID: 8636
  Gene Symbol: KALRN
  Gene Name: kalirin, RhoGEF kinase
  ENST ID: ENST00000360013
  CDS Start-End: 128-9088
gcaggcatttgcttagagcaggctgtgtgcgagcccagcgtcaagtgattccggcctcctcgagtcagcggtggtgggatgaggctctgccgaggggactggctgtgaaggatgagttcagggtgggatgacggaccgcttctgggaccagtggtatctctggtatctccgcttgctccggctgctggatcgagggtcttttcggaatgatggtttgaaagcttctgatgtccttcctatcctaaaggaaaaggtggccttcgtgtctgggggtcgtgataagcgaggcggacccatcctgaccttccctgctcgcagcaatcatgacagaataagacaggaagacctgcggaaactcgtgacgtatttggccagcgtgccaagtgaggacgtgtgcaaacgtggcttcactgtcatcatcgacatgcggggctccaagtgggacctcatcaagcccctcctcaaaacgctgcaggaagcctttccagctgagatccatgtggccctcatcattaaacccgacaacttctggcagaaacagaagaccaactttggcagctccaaattcatctttgagacgagcatggtatctgtggagggcctcacaaagctggtggacccctcccagctgacggaggagtttgatggctccctggactacaaccatgaggagtggatcgaactgcggctctccctggaggagttcttcaacagcgccgtgcacctgctctcgcgcctcgaggacctccaggagatgctagcccggaaggagtttcctgtggatgtggagggctctcggcggctcattgacgaacacacacagctcaagaaaaaggtgctgaaggcccctgtggaggagctggaccgggaggggcagcggctgctgcagtgcatccgctgcagcgacggcttctcaggacgcaactgcatcccgggcagtgctgacttccagagcctggtgcccaagatcaccagtctcctggacaagctgcactccacccggcagcacctgcaccagatgtggcatgtgcgcaagctcaagctggaccagtgctttcagctgcggctcttcgagcaggatgctgagaagatgtttgactggataagccacaacaaggagttattcctccagagccacacggagatcggagtcagctaccagtacgcccttgacctccagacgcagcacaatcactttgccatgaactccatgaatgcctatgtcaacatcaaccgcatcatgtccgtggcttcccgcctctctgaggccggtcattatgcctcacaacaaatcaagcagatctccacccagctggaccaggagtggaagagcttcgctgctgccctggatgaacgcagcaccatcctcgccatgtctgctgtgttccaccagaaggctgagcagttcctgtcgggagtggatgcctggtgcaagatgtgcagtgaaggtggtctgccatccgagatgcaagacctagagctggcaatccaccaccaccagaccttgtatgagcaggtgacccaagcctacacagaggtcagccaggatggcaaagcactacttgatgtgctgcagcggcccctgagccctgggaactccgaatccctcacggccacagccaactactccaaggcagtgcaccaggtgctggacgtggtgcatgaggtgttacatcaccagcgacggctggagagcatctggcagcaccgcaaggtgcggctccaccagcggctgcagctctgcgtcttccagcaggatgtacagcaggtgttggactggattgaaaaccatggtgaggcctttctcagcaaacacactggagttgggaagtccctacatcgagcccgggccctgcagaagaggcatgatgactttgaagaggtggctcagaatacgtacaccaatgcggacaagctcctagaagcagcagagcagttggctcagacgggggaatgtgaccccgaggagatctacaaggcagctcgacacctggaggtgcgcatccaagacttcgtgcgcagggtggagcagcggaagcttctcctggacatgtctgtttccttccacacacacaccaaagagttgtggacatggatggaagaccttcagaaggagatgttggaggatgtctgtgcagattctgtggatgcagtccaggaactgatcaagcagttccagcagcagcagaccgccactctagatgccacactcaatgtcatcaaggaaggcgaagaccttatccagcagctcaggtcagcgcctccctccctcggggagcccagcgaggccagggactcggctgtgtccaacaacaaaacaccccacagcagctccatcagccacatcgagtcggtcctgcagcagcttgatgatgcccaggtgcagatggaggagctgttccacgagcggaagatcaagctggacatcttcctgcaactgcgcatctttgagcagtacaccatcgaggtgacagcagagctagacgcctggaatgaagacttgcttcggcagatgaatgacttcaacacagaggacctaaccctggcagaacagcggctgcagcgccacacagaacggaagctagccatgaacaacatgacctttgaggttatccagcagggacaggatctgcaccagtacatcacggaggtccaggcatcaggaattgagttgatctgtgaaaaagacattgatctggcagcccaggtgcaagagttattggaatttctccatgagaagcagcatgaattggagctcaatgcagagcagactcataagcggctagagcagtgcctccaattacgtcacctccaggctgaagtcaaacaggttctgggatggatccgcaatggagagtcaatgctcaacgccagcctggtcaatgccagctctttgtcggaagcagagcagctgcagcgggagcacgagcagttccaactggccatcgagtccctctttcatgccacttccttgcagaagacgcaccagagtgccctgcaggtacagcagaaagccgaggtgctgctccaggccggccactacgatgccgatgccatccgggaatgtgctgagaaggtggccctccactggcagcagctcatgctgaagatggaagaccggctaaaattggtcaatgcctctgtggccttttacaaaacttctgaacaggtgtgtagtgtcctggagagcttagagcaagaataccggagagatgaggactggtgtggtggacgagataagctggggccagcagcagagatcgaccatgtcattcccctcatcagcaaacatttggaacaaaaggaggcctttcttaaggcctgcaccctggctcggcggaatgctgaggtgtttctcaagtacatccacaggaacaacgtcagcatgcccagtgtcgccagccacactcggggacccgagcaacaagtgaaagccatcctgagtgagctcctgcagagggagaatcgcgtgctgcatttctggaccttgaagaagcggcggttagaccaatgccagcaatatgtggtgttcgagcgcagcgctaagcaggcgcttgactggatccaagaaacaggtgaattttacctctcaacacatacctccactggagagaccacagaggagactcaggaactgctgaaagaatatggggaattcagggtgcctgccaagcaaacaaaggagaaggtgaagcttctgattcagctggccgatagctttgtggaaaaaggccacattcatgccacggagataaggaaatgggtgaccacggtggacaagcactacagagatttctccctgaggatgggaaagtaccgatactcactggagaaagccctaggagtcaacacagaggataataaggacctggagctggatattatcccagcaagcctttcggatcgggaggtcaagctgcgggacgccaaccacgaagtcaatgaagagaagcggaagtcagcccggaagaaagaatttattatggctgaactactccagacagagaaggcttatgtaagggatttgcatgagtgcttagagacctacctgtgggaaatgaccagtggtgtggaggagatcccccctgggatcctcaataaagagcatatcatctttggcaacatccaagagatctacgatttccataacaacatcttcctcaaagagctggagaagtacgagcaactgcctgaggatgtgggacactgctttgttacctgggcagacaaatttcagatgtatgtcacctactgtaaaaacaagcctgattccaaccagcttatcctggagcatgcgggcaccttctttgatgagatacaacagcggcatggtctggccaactccatctcttcctacctaattaagcctgtccaaaggatcaccaaatatcaactgctcctgaaggaacttttaacttgctgtgaagaagggaaaggggagctcaaggatggcctggaggtgatgctcagtgtcccaaagaaagccaatgatgccatgcatgtcagcatgctggaagggttcgacgagaacctggatgtgcagggggagttgattctccaggatgcctttcaagtgtgggacccgaagtcgctgatccggaaggggcgggagcggcacttgttcctctttgagatctccttggtttttagcaaggagatcaaagattcttcaggacacacgaaatatgtttacaagaacaagctactgacctcagagctgggtgtgaccgagcacgtggagggcgatccctgcaaattcgccttgtggtctgggcgcaccccatcctcagacaataaaacagtgctgaaagcctccaacattgaaaccaagcaggagtggatcaagaacattcgagaagtgattcaagaaaggatcattcacctgaaaggagctttaaaggagccacttcagctccccaaaacaccagccaaacagaggaacaatagtaagagggatggagtggaggatattgacagccagggggatgggagcagccaaccagacaccatctccattgcttctaggacctctcagaacacagtggacagtgacaagctctctggtggatgtgagctgacagtggtcctccaggacttcagtgcgggccacagcagtgagctgaccatccaggtggggcagacggtagagctgctggagcggcccagcgagcggcctggttggtgtctggtccgtaccaccgaacggagcccgcccttggagggtctggtccccagcagcgccctgtgcatctcacactcccgaagcagcgtggagatggactgcttcttccccttggtgaaagatgcatactctcattcctcaagcgagaatggaggcaagtccgagtccgtggccaacctgcaggcccagccctccctgaactccatccacagttccccgggtcccaagcgctccaccaacactcttaagaagtggctgacgagtcctgtgcgtcggcttaacagcgggaaggcagatggaaacatcaaaaagcagaagaaagttcgcgatggtcggaagagctttgacctgggatctcccaagcctggggatgaaacaacccctcagggagacagcgctgatgagaagagcaagaaaggttggggtgaagatgagccggatgaagagtcacacacacccctcccaccacctatgaagatttttgacaacgaccctacacaggatgaaatgtcctcctctttgctagcagcccggcaggcttccactgaagtacctactgctgcagaccttgtcaatgcaatagaaaagttggtcaaaaacaagctgagtctagaaggaagctcataccgggggagcttgaaagaccctgcaggctgcctgaatgaggggatggccccacccacacctcctaaaaacccagaagaagaacagaaagccaaggccctgagaggcaggatgtttgtcctgaatgagctggtacagacagagaaagactatgtcaaggatctgggcattgtggtggagggcttcatgaagagaatagaagaaaagggtgtccctgaggatatgcgaggaaaggacaaaatcgtgtttggaaatattcatcagatttatgactggcataaggattttttcctggcggaactggaaaagtgtatccaggagcaagacagattggcacagctctttattaagcacgagcggaagctgcacatctacgtgtggtattgtcagaataagccgcgctcagagtacatcgttgctgagtatgacgcctactttgaggaggtaaaacaggagataaatcagaggctgacactgagtgacttcctcatcaagcccattcagagaataacaaaataccagttgctcctcaaggacttcctgagatacagtgagaaggctggtttggagtgttcagatattgagaaagcagtggagttaatgtgccttgttcccaaacgctgcaatgacatgatgaatctaggacgtctgcagggctttgagggcactctgactgctcaggggaagctgctgcagcaggacacattctatgtgatcgagctggatgcaggcatgcagtcccggaccaaagagaggcgcgtgttcctcttcgagcagattgtcatcttcagtgaactgctcaggaagggatccctcacccctggctacatgttcaaaaggagcatcaagatgaattacttggtcctggaggagaatgtggacaatgatccctgcaagtttgcactcatgaacagagagacttctgagagggttgttctgcaagccgccaacgctgacatccagcaggcctgggtgcaggacatcaatcaagtcttagaaacacagcgagactttttgaatgcactgcaatcgcccattgagtatcaacggaaagaaaggagcacagctgtgatgaggtctcaacctgccaggcttccccaagccagccccaggccctactcctctgttcctgcgggctcagagaagcccccaaagggctccagctataacccacctctgcctcccctgaagatatctacctccaatggcagtccagggtttgaataccaccagcctggggacaagttcgaagccagcaagcagaacgacctgggaggctgcaatgggacctcgtccatggccgtgatcaaagattactatgcactgaaggagaatgaaatctgtgtgagccaaggtgaggtggtccaggtcctcgccgtcaaccagcagaacatgtgtctggtgtaccagcctgccagcgaccattcccccgccgccgagggctgggtcccaggcagcatcctggcgcccctcaccaaagccacagcagcagaaagtagtgacgggagcatcaagaagtcatgttcatggcatactctacgcatgagaaagcgggcggaagtggagaacacgggtaaaaatgaagccacagggcctcgtaaacccaaggatattctgggcaacaaagtctctgttaaagagacgaacagttccgaggaatcagagtgtgatgatcttgaccctaatactagcatggagatcttaaatccaaatttcatccaagaagtggccccagaattccttgtgcccttggtggatgtgacctgcttgcttggggacacagtgatactgcagtgcaaagtctgtgggcggccaaagcccaccatcacttggaagggtccagaccagaacatccttgacactgataacagctcagccacatacacggtctcctcttgtgattctggagaaatcaccctgaagatctgtaatctgatgccccaagacagtgggatttatacctgcatagcaacaaatgaccacgggaccacatcaacgtctgcaacagtcaaagtgcaaggtgttccagcagcccctaaccgccccattgcccaggagagaagctgcacctccgtgattctccgctggctgcccccctccagcacaggaaactgcactatttctggttacactgtggagtacagagaggaaggttctcagatctggcagcagtcagtggcttcgaccttggacacttacctcgtcatcgaagaccttagtcccgggtgtccttatcagttcagagtcagtgccagtaacccctggggaatcagccttcccagcgagccctcggagtttgtgcgacttccagaatatgatgctgctgctgatggtgccaccatttcttggaaggaaaattttgactcagcttacactgagctgaatgaaattggaagaggccgtttctctatagtaaagaaatgcattcacaaagctacccgcaaagatgtggctgtgaaatttgttagcaaaaaaatgaagaagaaagaacaggctgcccacgaggctgccctgcttcagcacctacagcacccccagtacatcactctccatgacacctatgagtcccccacatcctacatcctgatcttggaactgatggatgatggccggctcttagactaccttatgaatcatgatgaactgatggaggaaaaagtagctttctatatccgagacatcatggaggctctgcagtaccttcacaactgcagggttgcacatttggacataaagcctgaaaacctgctcattgacctacggattccagtgcctcgagtgaagctcattgacttggaggatgctgtccagatctcgggtcacttccacattcaccacctgctggggaaccctgagtttgctgccccagaagtcattcaaggcatccccgtctccctggggacagacatctggagcatcggggttctgacatatgtcatgctgagtggggtctcccccttcttggatgagagcaaagaggagacatgtatcaacgtatgcagggtggatttcagcttcccccatgaatacttctgtggtgtgagcaatgctgccagagatttcatcaatgtgatcttacaggaagattttcggaggcggcccacagcagccacatgcttgcagcatccatggctgcagccccataatggcagctactctaagatccccctggacacctcccgcctagcatgcttcatagaacgtcgcaagcaccagaatgatgtgcggcctattcccaatgtcaagagctacattgtcaaccgggtgaaccaagggacgtagccatctcccagcccctatggtttcacatagacgtgcagtgtgaaccaaagcaagactgaatgtgactgtaaataattctgttcatcatttcactccgtgcagttctctgaattgagagatgtacctcttaaacctcgtcagtggttattcagggtctgagcagcagtaaaagtcaccctaaatcaaggggcttttcagaaggtcattctgaagaaataaagaggcaaagggtcacagaagtgttcagaagaagggcaaagataagaacaatattagctgttacgaaattttaactgtatcttccaaaatgagtggttaactgggcaaaccttaagctcacaagagtataaaagatctctggctttgctgaaattttaagcaagaagttctatttaatggagatgtcatgtatatcaactattctggtttagataacttagatatagtttcttaataggatagatacccacatacagtataatatatcccattcaggtttcagagttttctaatatagagatatatatattaaatcaatcacaagtaattttgagtgctccagttaagacagtaatttatttaccgaatcattacattgttttgactaagcacaattagatgacaagtttttttagagcattttatagatcttgtatagaaatcttttaccagaacctgtgcattaagagaaagcaatgttgcccttttgaatgagaaaattttttctgtcaatcgcaggttatttgattaagataggttctttctgtatatgaaacgctccccgcaaattcactggcagctcagaattattctggaaagaaagcctgccaggaaataaattcaaatacagtatgagctgcggggatatttttgtgtctacaccaggtttgaaataagtaaacaaatacaagaggttcatataaaagggcaaatgaaaacctttcctacagttcctatgaacaacgtaccaacactttctgatttcttctacagctgtagaataccatctttcagaaagttggctggctttatttctaactccttattgaagctaaggggtgcttactaaaaggaggcagccatataggccttttaaaggcctggttctaagtcctttttaaagccatggaacaaaacctgatacatcaccctaacagagcattaagttgtaactgagattgcaatacctgtcaccatgcagccgctgatagttctctgaactaaaaggactaattgtactttgaggccaatgctgctttctggtgtatattctccatacaagattattattaactgctctttttccctctggtggaaaaaaaattaaacctgggcatttcatgggttttctttctttatttttgttcatttgttttggagggagggagcttgttttttgtgtttgtacatgatccacccttagttttctagaatgtgtgttgaaaattgcgattatacaagtaagattttaaaaatgtaactcaagtgtttgttcaaatcaggtttaatggtgttgcttctctcctataatgggatagagaaaattaaaatcacgtagtacagaagtgcaagaagagaatttatgaaggatgaatagaactacaaacctatctaaatgaaaaagaaatggtggaaactaagcctgaactttaacatataaaaaacacttattcccacagagaaaatgtaaaattaaaaatcatcatctttttttttcc

SEQ ID NO: 144894 - DNA, 804 bp, Homo sapiens
  Payload ID: 8636
  Gene Symbol: KALRN
  Gene Name: kalirin, RhoGEF kinase
  ENST ID: ENST00000448253
  CDS Start-End: 1-804
gttgcattctatgttgccagtgttcctgctgccagaattggatccaacccattgttccagacaagatcagggcaactagtatggaaaacataacctcaagtatctttgatgtaatctccaagggaaaagttgctccaactttttcttactggtcttttcggaatgatggtttgaaagcttctgatgtccttcctatcctaaaggaaaaggtggccttcgtgtctgggggtcgtgataagcgaggcggacccatcctgaccttccctgctcgcagcaatcatgacagaataagacaggaagacctgcggaaactcgtgacgtatttggccagcgtgccaagtgaggacgtgtgcaaacgtggcttcactgtcatcatcgacatgcggggctccaagtgggacctcatcaagcccctcctcaaaacgctgcaggaagcctttccagctgagatccatgtggccctcatcattaaacccgacaacttctggcagaaacagaagaccaactttggcagctccaaattcatctttgagacgagcatggtatctgtggagggcctcacaaagctggtggacccctcccagctgacggaggagtttgatggctccctggactacaaccatgaggagtggatcgaactgcggctctccctggaggagttcttcaacagcgccgtgcacctgctctcgcgcctcgaggacctccaggagatgctagcccggaaggagtttcctgtggatgtggagggctctcggcggctcattgacgaacacacacagctcaagaaaaaggtgctgaaggccc

SEQ ID NO: 144895 - DNA, 722 bp, Homo sapiens
  Payload ID: 8636
  Gene Symbol: KALRN
  Gene Name: kalirin, RhoGEF kinase
  ENST ID: ENST00000454902
  CDS Start-End: 141-722
gcggccgcggtgcggggagagcacagcggggagggcgggagccggctctcgggcggcggcgctgaagtttccttcccgccgcgctctcaccccgggctggcgccccgtgccatgcgggagcgctggggcggcggggcaacatgaagggcggcgacagggcttacacccgaggtccctctttggggtggctctttgctaagtgctgctgttgcttcccgtgtagagatgcatactctcattcctcaagcgagaatggaggcaagtccgagtccgtggccaacctgcaggcccagccctccctgaactccatccacagttccccgggtcccaagcgctccaccaacactcttaagaagtggctgacgagtcctgtgcgtcggcttaacagcgggaaggcagatggaaacatcaaaaagcagaagaaagttcgcgatggtcggaagagctttgacctgggatctcccaagcctggggatgaaacaacccctcagggagacagcgctgatgagaagagcaagaaaggttggggtgaagatgagccggatgaagagtcacacacacccctcccaccacctatgaagatttttgacaacgaccctacacaggatgaaatgagtctagaaggaagctcataccgggggagcttgaaagaccctgcaggctgcctgaatgaggggatggccccacccacacctcctaaaaacccagaagaagaacagaaa

SEQ ID NO: 144896 - DNA, 810 bp, Homo sapiens
  Payload ID: 8636
  Gene Symbol: KALRN
  Gene Name: kalirin, RhoGEF kinase
  ENST ID: ENST00000439170
  CDS Start-End: 1-648
tggcagcaccgcaaggtgcggctccaccagcggctgcagctctgcgtcttccagcaggatgtacagcaggtgttggactggattgaaaaccatggtgaggcctttctcagcaaacacactggagttgggaagtccctacatcgagcccgggccctgcagaagaggcatgatgactttgaagaggtggctcagaatacgtacaccaatgcggacaagctcctagaagcagcagagcagttggctcagacgggggaatgtgaccccgaggagatctacaaggcagctcgacacctggaggtgcgcatccaagacttcgtgcgcagggtggagcagcggaagcttctcctggacatgtctgtttccttccacacacacaccaaagagttgtggacatggatggaagaccttcagaaggagatgttggaggatgtctgtgcagattctgtggatgcagtccaggaactgatcaagcagttccagcagcagcagaccgccactctagatgccacactcaatgtcatcaaggaaggcgaagaccttatccagcagctcaggtcagcgcctccctccctcggggagcccagcgaggccaggtcagcatgggcagagctttccagtgggaaatgcctcgggctagacgtgagataagtcctgtcccagtcttgactcagcaaaatcttgctttgtggtcttgtgtgagcttcggtttctttatctgtaagatgtaaaaatgcctgcaccatactcaacttgaatctagaataaaatagtaaatggaaaagctttaatgtttcaaagaattatttatca

SEQ ID NO: 144897 - DNA, 6509 bp, Homo sapiens
  Payload ID: 8636
  Gene Symbol: KALRN
  Gene Name: kalirin, RhoGEF kinase
  ENST ID: ENST00000460856
  CDS Start-End: 158-5122
gtgtgggaggactggtggctgtctttgcaggcaggcatttgcttagagcaggctgtgtgcgagcccagcgtcaagtgattccggcctcctcgagtcagcggtggtgggatgaggctctgccgaggggactggctgtgaaggatgagttcagggtgggatgacggaccgcttctgggaccagtggtatctctggtatctccgcttgctccggctgctggatcgagggtcttttcggaatgatggtttgaaagcttctgatgtccttcctatcctaaaggaaaaggtggccttcgtgtctgggggtcgtgataagcgaggcggacccatcctgaccttccctgctcgcagcaatcatgacagaataagacaggaagacctgcggaaactcgtgacgtatttggccagcgtgccaagtgaggacgtgtgcaaacgtggcttcactgtcatcatcgacatgcggggctccaagtgggacctcatcaagcccctcctcaaaacgctgcaggaagcctttccagctgagatccatgtggccctcatcattaaacccgacaacttctggcagaaacagaagaccaactttggcagctccaaattcatctttgagacgagcatggtatctgtggagggcctcacaaagctggtggacccctcccagctgacggaggagtttgatggctccctggactacaaccatgaggagtggatcgaactgcggctctccctggaggagttcttcaacagcgccgtgcacctgctctcgcgcctcgaggacctccaggagatgctagcccggaaggagtttcctgtggatgtggagggctctcggcggctcattgacgaacacacacagctcaagaaaaaggtgctgaaggcccctgtggaggagctggaccgggaggggcagcggctgctgcagtgcatccgctgcagcgacggcttctcaggacgcaactgcatcccgggcagtgctgacttccagagcctggtgcccaagatcaccagtctcctggacaagctgcactccacccggcagcacctgcaccagatgtggcatgtgcgcaagctcaagctggaccagtgctttcagctgcggctcttcgagcaggatgctgagaagatgtttgactggataagccacaacaaggagttattcctccagagccacacggagatcggagtcagctaccagtacgcccttgacctccagacgcagcacaatcactttgccatgaactccatgaatgcctatgtcaacatcaaccgcatcatgtccgtggcttcccgcctctctgaggccggtcattatgcctcacaacaaatcaagcagatctccacccagctggaccaggagtggaagagcttcgctgctgccctggatgaacgcagcaccatcctcgccatgtctgctgtgttccaccagaaggctgagcagttcctgtcgggagtggatgcctggtgcaagatgtgcagtgaaggtggtctgccatccgagatgcaagacctagagctggcaatccaccaccaccagaccttgtatgagcaggtgacccaagcctacacagaggtcagccaggatggcaaagcactacttgatgtgctgcagcggcccctgagccctgggaactccgaatccctcacggccacagccaactactccaaggcagtgcaccaggtgctggacgtggtgcatgaggtgttacatcaccagcgacggctggagagcatctggcagcaccgcaaggtgcggctccaccagcggctgcagctctgcgtcttccagcaggatgtacagcaggtgttggactggattgaaaaccatggtgaggcctttctcagcaaacacactggagttgggaagtccctacatcgagcccgggccctgcagaagaggcatgatgactttgaagaggtggctcagaatacgtacaccaatgcggacaagctcctagaagcagcagagcagttggctcagacgggggaatgtgaccccgaggagatctacaaggcagctcgacacctggaggtgcgcatccaagacttcgtgcgcagggtggagcagcggaagcttctcctggacatgtctgtttccttccacacacacaccaaagagttgtggacatggatggaagaccttcagaaggagatgttggaggatgtctgtgcagattctgtggatgcagtccaggaactgatcaagcagttccagcagcagcagaccgccactctagatgccacactcaatgtcatcaaggaaggcgaagaccttatccagcagctcaggtcagcgcctccctccctcggggagcccagcgaggccagggactcggctgtgtccaacaacaaaacaccccacagcagctccatcagccacatcgagtcggtcctgcagcagcttgatgatgcccaggtgcagatggaggagctgttccacgagcggaagatcaagctggacatcttcctgcaactgcgcatctttgagcagtacaccatcgaggtgacagcagagctagacgcctggaatgaagacttgcttcggcagatgaatgacttcaacacagaggacctaaccctggcagaacagcggctgcagcgccacacagaacggaagctagccatgaacaacatgacctttgaggttatccagcagggacaggatctgcaccagtacatcacggaggtccaggcatcaggaattgagttgatctgtgaaaaagacattgatctggcagcccaggtgcaagagttattggaatttctccatgagaagcagcatgaattggagctcaatgcagagcagactcataagcggctagagcagtgcctccaattacgtcacctccaggctgaagtcaaacaggttctgggatggatccgcaatggagagtcaatgctcaacgccagcctggtcaatgccagctctttgtcggaagcagagcagctgcagcgggagcacgagcagttccaactggccatcgagaagacgcaccagagtgccctgcaggtacagcagaaagccgaggtgctgctccaggccggccactacgatgccgatgccatccgggaatgtgctgagaaggtggccctccactggcagcagctcatgctgaagatggaagaccggctaaaattggtcaatgcctctgtggccttttacaaaacttctgaacaggtgtgtagtgtcctggagagcttagagcaagaataccggagagatgaggactggtgtggtggacgagataagctggggccagcagcagagatcgaccatgtcattcccctcatcagcaaacatttggaacaaaaggaggcctttcttaaggcctgcaccctggctcggcggaatgctgaggtgtttctcaagtacatccacaggaacaacgtcagcatgcccagtgtcgccagccacactcggggacccgagcaacaagtgaaagccatcctgagtgagctcctgcagagggagaatcgcgtgctgcatttctggaccttgaagaagcggcggttagaccaatgccagcaatatgtggtgttcgagcgcagcgctaagcaggcgcttgactggatccaagaaacaggtgaattttacctctcaacacatacctccactggagagaccacagaggagactcaggaactgctgaaagaatatggggaattcagggtgcctgccaagcaaacaaaggagaaggtgaagcttctgattcagctggccgatagctttgtggaaaaaggccacattcatgccacggagataaggaaatgggtgaccacggtggacaagcactacagagatttctccctgaggatgggaaagtaccgatactcactggagaaagccctaggagtcaacacagaggataataaggacctggagctggatattatcccagcaagcctttcggatcgggaggtcaagctgcgggacgccaaccacgaagtcaatgaagagaagcggaagtcagcccggaagaaagaatttattatggctgaactactccagacagagaaggcttatgtaagggatttgcatgagtgcttagagacctacctgtgggaaatgaccagtggtgtggaggagatcccccctgggatcctcaataaagagcatatcatctttggcaacatccaagagatctacgatttccataacaacatcttcctcaaagagctggagaagtacgagcaactgcctgaggatgtgggacactgctttgttacctgggcagacaaatttcagatgtatgtcacctactgtaaaaacaagcctgattccaaccagcttatcctggagcatgcgggcaccttctttgatgagatacaacagcggcatggtctggccaactccatctcttcctacctaattaagcctgtccaaaggatcaccaaatatcaactgctcctgaaggaacttttaacttgctgtgaagaagggaaaggggagctcaaggatggcctggaggtgatgctcagtgtcccaaagaaagccaatgatgccatgcatgtcagcatgctggaagggttcgacgagaacctggatgtgcagggggagttgattctccaggatgcctttcaagtgtgggacccgaagtcgctgatccggaaggggcgggagcggcacttgttcctctttgagatctccttggtttttagcaaggagatcaaagattcttcaggacacacgaaatatgtttacaagaacaagctactgacctcagagctgggtgtgaccgagcacgtggagggcgatccctgcaaattcgccttgtggtctgggcgcaccccatcctcagacaataaaacagtgctgaaagcctccaacattgaaaccaagcaggagtggatcaagaacattcgagaagtgattcaagaaaggatcattcacctgaaaggagctttaaaggagccacttcagctccccaaaacaccagccaaacagaggaacaatagtaagagggatggagtggaggatattgacagccagggggatgggagcagccaaccagacaccatctccattgcttctaggacctctcagaacacagtggacagtgacaaggatggcaaccttgttcctcggtggcacctgggacctggagatcctttctccacttacgtttagcgcgcatcctgggacttgtccctgcagctcaccgggttagccgtggcaccgttgggacctcccaccaggactccaatcacccacctctcttgagacttctctggcagggctggtgtggggtgcagcctttgctcagagggcaacatgttccaagcaaaatctccccgcctgggccatgggctcaccctcggggctcccttcttctctactgggtgcaattcgaggttgctgagcttctctccaaagtctaaaatggtggggcagtagggacctgtgagaggcccaatggcccaatgtacttcccccagatcccactcagaacagcaggtacgcccaggctcctgctgccctagaggtctgcaacatgagtgaagaggttaattagagggacacacttatctctgaagtttttctccaggctgaacatttctattatcagtggcccctaatctggaaaaacccatcattctaatctagcttgtatccccacatcatgagaaagagggaagaagaagaagggatgatgtgtggtagagaagatgagggttaactttagcctttcccaaacactggcaacaaccacttcctcaacaatttttctatttgcttcagcctactcagattttttcaggtttttctagctcctccataacctcactccctcccgaggtctctggttcaaagaccaccctaccagcccctatttgcttcaggttatcctgttgagggtgggtgggaagagtgagaagatataaatgaaaaactggccacatgttgataattgttgaaactagatgatggtacgtggacattcattataccattctccccacttctgtatttgtttgcaatttttcataataaaaaagttttaaaagtcctccagtttccaacacactcaagagagagccccaaccccaaacacagagtttcatggaaaccccacaccaaggcaagaggcagagatgatgattccatttcatatatacactcattttctaactttttttaaaggcccactgctttattttcaatagattaaacctgatttctgagaggtcctgaagttgggcttatttccctggctgggttatgggggagggcagggtaaagggatccttaaaaaagtttacacttctatgtatctcacaatcttattgtgaggatgtgacttgttcagtgttctgaacttttcgaaggaatcgtgctctcaatgcaaagtgtcattctctggaattgcacctggctcaggaaaggactgtctttgtacttgaatttaaatccaatggagaactttaacacgggcatttgcatgactgagaattgctgctgtcttttttccgtatgtcactttcttgaatgtgttctaataaaatgattctaaagc

SEQ ID NO: 144898 - DNA, 2620 bp, Homo sapiens
  Payload ID: 8636
  Gene Symbol: KALRN
  Gene Name: kalirin, RhoGEF kinase
  ENST ID: ENST00000483658
  CDS Start-End: 86-247
aagtgattccggcctcctcgagtcagcggtggtgggatgaggctctgccgaggggactggctgtgaaggatgagttcagggtgggatgacggaccgcttctgggaccagtggtatctctggtatctccgcttgctccggctgctggatcgagttccatctatgttgctgcaaatgacaggatttcctttttataggttgtctcttcactctgttgattgtttcccttgctgtgcagaagctttttagtttcaacaagggtgccaagaacatatattgggaaaaggacatccttttcaataagtggtgctgggaaaatgggatatctatattcagaagaatgaaattagacccctatctctcaccctatacaaaaatcagctcaaaatggattaaagacttacgtgttagaagacaggtcccagtcttcctaatgaggcattgaaagtctaggtggaatagatgcttgctggagcctgtggatattataaaagaaagagctcactgccttaatgtggtcaggagaggcaggagtgagagccagtgtgaaggtgtgggagttggaaggaacttggaactcaacttcttttggcccctcaacttgagattcacaaagaaaaaaagcaatgtctcctcgctgaaagcaaaatggaagctcctccttgcacagtgcagccccttcctcactgtaggttattccaagtgagaagagtaaacatgacttctaaatgccatctaacgatatatgcatatctaaaggagacaaggatgactgaatgcatcttcatgtgtaggaagtgaagtgtctgttgacattaagtacttcttcatgagtgagaggaggcccatgatggagatgacaccagtacctccttctagcactctgaattcccaatgtttactactgctgtctctgaaactgcagcatcctcaccaggaccacacagggaacaaaggcaagacacctgaaatccctttagccatattcacaacacttacttcatagataagatgatgtttgaaatatgagaaggattttttttttaaaagagcactctattctcttggtatcctagtatgagtgcctgaaagtgcacattggctagaaggtttcatgtgagcatcagccccagggtccagaagacactcttggcaagcctggagagtgagtatgttgaacaggcaatggaagcatccatgaaaggcaggcaactgcgcacgactttccaacagatggctggtcagttgcacagagggaaggagccatggattccatgataatgacacttgtgccagcttttgtgtttccagaagttttgaagatataagggaaccaccacatgtagagtatgtgaagtcttacagagacgaggtcctaaggtatttattttgacaaatcacgttgcaagtaatgtgaaagcagtttgaagaaaaaatgtccccatctaatgctgcattatggcatgcatttctttagcctaaatctgtcagtgacatgaaaatacatgttttgctggacacataataggttgaacacataataggttctaacatggatctgcataaagaagaaagaagaaaggctataaaggtagaagaataaatgtataaatattacaacaggacactgagctgagtggctctttaccatagaccttgctcatagttctcactacaggcttgctctgagccaacttccaagttctctccttctccttccaaacttccctgtatgtcatcttgctcctgggccacctgactgatgtttaatgcctggatatttgctttcacctctgcatgaccaagccttggccaagtcactgttgactcagttgcaacatctgtcccctgctgagggctgttgtagctttcatagctcacagtccagcttgaatctaaccttttctgtggtcattcagagtagcaagaagcattgtgttttggatttactgcagaactcacacacttaactgtacacagtcagtttttatagctatcactgcatccagattggacagtgaccttggctgagacatcctttacctctgtttcagattaatttaggcggcatataaaatctctgtgcactgccaggggaaagtaaagacttcatgaagaaatggagaagagccgaatagttgaccattgttgctgtataaatcttggatccagggctaaaaggtggcagtataaatgcagatggtgctgctgccatattttcctggcacacctttaagcagcacatttcaagccttcagggttggaatggcatttccaaatatagactcaaaaaatcctcagatgtttgattctagaatagagctgggaattctgtcctgcaaatgccttctgcagcatgggagcaaacccactcttctgtgtctgttgcttcaaactctctattttctggaaactggagaaagatgtgggtctacattttgaaatatatgccttgaacaagaattatgcacctatagaaaacttgtcatacattgaataaactctcagtttacagaaatctatggaaatatcaaaataaaacatcagaaggagcagtaactatagaggttattaactaaggggataacctgaaaaataaagttatatttgctaaaaactgta

SEQ ID NO: 144899 - DNA, 866 bp, Homo sapiens
  Payload ID: 8637
  Gene Symbol: KLK1
  Gene Name: kallikrein 1
  Uniprot ID: P06870
  ENST ID: ENST00000301420
  CDS Start-End: 37-825
tcctccacctgctggcccctggacacctctgtcaccatgtggttcctggttctgtgcctcgccctgtccctgggggggactggtgctgcgcccccgattcagtcccggattgtgggaggctgggagtgtgagcagcattcccagccctggcaggcggctctgtaccatttcagcactttccagtgtgggggcatcctggtgcaccgccagtgggtgctcacagctgctcattgcatcagcgacaattaccagctctggctgggtcgccacaacttgtttgacgacgaaaacacagcccagtttgttcatgtcagtgagagcttcccacaccctggcttcaacatgagcctcctggagaaccacacccgccaagcagacgaggactacagccacgacctcatgctgctccgcctgacagagcctgctgataccatcacagatgctgtgaaggtcgtggagttgcccaccgaggaacccgaagtggggagcacctgtttggcttccggctggggcagcatcgaaccagagaatttctcatttccagatgatctccagtgtgtggacctcaaaatcctgcctaatgatgagtgcaaaaaagcccacgtccagaaggtgacagacttcatgctgtgtgtcggacacctggaaggtggcaaagacacctgtgtgggtgattcagggggcccgctgatgtgtgatggtgtgctccaaggtgtcacatcatggggctacgtcccttgtggcacccccaataagccttctgtcgccgtcagagtgctgtcttatgtgaagtggatcgaggacaccatagcggagaactcctgaacgcccagccctgtcccctacccccagtaaaatcaaatgtg

SEQ ID NO: 144900 - DNA, 1854 bp, Homo sapiens
  Payload ID: 8637
  Gene Symbol: KLK1
  Gene Name: kallikrein 1
  ENST ID: ENST00000593325
  CDS Start-End: 40-210
agttcctccacctgctggcccctggacacctctgtcaccatgtggttcctggttctgtgcctcgccctgtccctgggggggactgctctggttttctggaaccccaccccaaggatcctgaatgccttctcagccagcgcttctgccctggcctcccccaagattgcctccaagaggaccccatatccttccagtaccctcagaccatgaaccccatccccatgagaaacgaagatcccatccttcaccctgtccgagaaggactgccactcacgcctccctcctcctgagccccgtcccagtcctgaccgcaactgtgttctcagggccccaacctcccctcagattgccattcctggttcacaggaaggaccccaaaacctctcggaagcccacctctagccttaaccatagccctttcttttaccctttaaccaggaagccctgaaatctaactgtcccagccaagctggccccttccaaccccaatgtagggaccccaagtcacccccaaactcttcagtccagatgctcttctttacctctcagacctggttccctaaagctgcatcctttcctgaacctcaaaagcccaacccaggtcctgtttccctagcctaggagccccttagccctccagattcttcctcagtgagcctctgatcctgtcccacccttggcgccttgatccctggtttccagaatccctttccactcccctaacccaccacctcccatcccccagccccagaccccaaatgacctgacgcccagatgcagtgtctgctccagacactgtctcctgtctcctaccctgatccctggaggctgctctactgtcagagcacaaaatctccccaccaggtccagccaccactccaaaagcccagggaacagtccagagtcccaccccttcccaacaccccttgcccatgtccccaacctccagccctggtcctctacccgcaatgtcccttcagacccacagcccagctccctctcctagccttgtccctggcctctcctgccaaccctgcccttcctgacccagcaccgcctctgcaggtgctgcgcccccgattcagtcccggattgtgggaggctgggagtgtgagcagcattcccagccctggcaggcggctctgtaccatttcagcactttccagtgtgggggcatcctggtgcaccgccagtgggtgctcacagctgctcattgcatcagcgacaattaccagctctggctgggtcgccacaacttgtttgacgacgaaaacacagcccagtttgttcatgtcagtgagagcttcccacaccctggcttcaacatgagcctcctggagaaccacacccgccaagcagacgaggactacagccacgacctcatgctgctccgcctgacagagcctgctgataccatcacagatgctgtgaaggtcgtggagttgcccaccgaggaacccgaagtggggagcacctgtttggcttccggctggggcagcatcgaaccagagaatttctcatttccagatgatctccagtgtgtggacctcaaaatcctgcctaatgatgagtgcaaaaaagcccacgtccagaaggtgacagacttcatgctgtgtgtcggacacctggaaggtggcaaagacacctgtgtgggtgattcagggggcccgctgatgtgtgatggtgtgctccaaggtgtcacatcatggggctacgtcccttgtggcacccccaataagccttctgtcgccgtcagagtgctgtcttatgtgaagtggatcgaggacaccatagcggagaactcctgaacgcccagccctgtcccctacccccagtaaaatcaaatgtgcatcc

SEQ ID NO: 144901 - DNA, 2363 bp, Homo sapiens
  Payload ID: 8638
  Gene Symbol: KLKB1
  Gene Name: kallikrein B, plasma (Fletcher factor) 1
  Uniprot ID: P03952
  ENST ID: ENST00000264690
  CDS Start-End: 188-2104
ctgaacacggataggatgttcatggaatatgttgacaggacaaaaagttgaaactgttggcagaaacccaaagtcaatattgaagccaagcaaaatattgcctgcagtgccacattagaacagcttgaagaccgttcatttttaagtgacaagagactcacctccaagaagcaattgtgttttcagaatgattttattcaagcaagcaacttatttcatttccttgtttgctacagtttcctgtggatgtctgactcaactctatgaaaacgccttcttcagaggtggggatgtagcttccatgtacaccccaaatgcccaatactgccagatgaggtgcacattccacccaaggtgtttgctattcagttttcttccagcaagttcaatcaatgacatggagaaaaggtttggttgcttcttgaaagatagtgttacaggaaccctgccaaaagtacatcgaacaggtgcagtttctggacattccttgaagcaatgtggtcatcaaataagtgcttgccatcgagacatttataaaggagttgatatgagaggagtcaattttaatgtgtctaaggttagcagtgttgaagaatgccaaaaaaggtgcaccagtaacattcgctgccagtttttttcatatgccacgcaaacatttcacaaggcagagtaccggaacaattgcctattaaagtacagtcccggaggaacacctaccgctataaaggtgctgagtaacgtggaatctggattctcactgaagccctgtgccctttcagaaattggttgccacatgaacatcttccagcatcttgcgttctcagatgtggatgttgccagggttctcactccagatgcttttgtgtgtcggaccatctgcacctatcaccccaactgcctcttctttacattctatacaaatgtatggaaaatcgagtcacaaagaaatgtttgtcttcttaaaacatctgaaagtggcacaccaagttcctctactcctcaagaaaacaccatatctggatatagccttttaacctgcaaaagaactttacctgaaccctgccattctaaaatttacccgggagttgactttggaggagaagaattgaatgtgacttttgttaaaggagtgaatgtttgccaagagacttgcacaaagatgattcgctgtcagtttttcacttattctttactcccagaagactgtaaggaagagaagtgtaagtgtttcttaagattatctatggatggttctccaactaggattgcgtatgggacacaagggagctctggttactctttgagattgtgtaacactggggacaactctgtctgcacaacaaaaacaagcacacgcattgttggaggaacaaactcttcttggggagagtggccctggcaggtgagcctgcaggtgaagctgacagctcagaggcacctgtgtggagggtcactcataggacaccagtgggtcctcactgctgcccactgctttgatgggcttcccctgcaggatgtttggcgcatctatagtggcattttaaatctgtcagacattacaaaagatacacctttctcacaaataaaagagattattattcaccaaaactataaagtctcagaagggaatcatgatatcgccttgataaaactccaggctcctttgaattacactgaattccaaaaaccaatatgcctaccttccaaaggtgacacaagcacaatttataccaactgttgggtaaccggatggggcttctcgaaggagaaaggtgaaatccaaaatattctacaaaaggtaaatattcctttggtaacaaatgaagaatgccagaaaagatatcaagattataaaataacccaacggatggtctgtgctggctataaagaagggggaaaagatgcttgtaagggagattcaggtggtcccttagtttgcaaacacaatggaatgtggcgtttggtgggcatcaccagctggggtgaaggctgtgcccgcagggagcaacctggtgtctacaccaaagtcgctgagtacatggactggattttagagaaaacacagagcagtgatggaaaagctcagatgcagtcaccagcatgagaagcagtccagagtctaggcaatttttacaacctgagttcaagtcaaattctgagcctggggggtcctcatctgcaaagcatggagagtggcatcttctttgcatcctaaggacgaaaaacacagtgcactcagagctgctgaggacaatgtctggctgaagcccgctttcagcacgccgtaaccaggggctgacaatgcgaggtcgcaactgagatctccatgactgtgtgttgtgaaataaaatggtgaaagatca

SEQ ID NO: 144902 - DNA, 645 bp, Homo sapiens
  Payload ID: 8638
  Gene Symbol: KLKB1
  Gene Name: kallikrein B, plasma (Fletcher factor) 1
  ENST ID: ENST00000428196
  CDS Start-End: 202-645
tggtgggctgtctgttggggtctatgcacaggatttctgctggagttctaaggacaaaaagttgaaactgttggcagaaacccaaagtcaatattgaagccaagcaaaatattgcctgcagtgccacattagaacagcttgaagaccgttcatttttaagtgacaagagactcacctccaagaagcaattgtgttttcagaatgattttattcaagcaagcaacttatttcatttccttgtttgctacagtttcctgtggatgtctgactcaactctatgaaaacgccttcttcagaggtggggatgtagcttccatgtacaccccaaatgcccaatactgccagatgaggtgcacattccacccaaggtgtttgctattcagttttcttccagcaagttcaatcaatgacatggagaaaaggtttggttgcttcttgaaagatagtgttacaggaaccctgccaaaagtacatcgaacaggtgcagtttctggacattccttgaagcaatgtggtcatcaaataagtgcttgccatcgagacatttataaaggagttgatatgagaggagtcaattttaatgtgtctaaggttagcagtgttgaagaatgccaaaaaaggtgcaccagtaacattcgctgccag

SEQ ID NO: 144903 - DNA, 569 bp, Homo sapiens
  Payload ID: 8638
  Gene Symbol: KLKB1
  Gene Name: kallikrein B, plasma (Fletcher factor) 1
  ENST ID: ENST00000446598
  CDS Start-End: 147-569
agtgccacattagaacagcttgaagaccgttcatttttaagtgacaagagactcacctccaagaagcaattgtgttttcagtttcctgtggatgtctgactcaactctatgaaaacgccttcttcagaggtggggatgtagcttccatgtacaccccaaatgcccaatactgccagatgaggtgcacattccacccaaggtgtttgctattcagttttcttccagcaagttcaatcaatgacatggagaaaaggtttggttgcttcttgaaagatagtgttacaggaaccctgccaaaagtacatcgaacaggtgcagtttctggacattccttgaagcaatgtggtcatcaaataagtgcttgccatcgagacatttataaaggagttgatatgagaggagtcaattttaatgtgtctaaggttagcagtgttgaagaatgccaaaaaaggtgcaccagtaacattcgctgccagtttttttcatatgccacgcaaacatttcacaaggcagagtaccggaacaattgcctattaaagtacagtcccggaggaacacctaccgctata

SEQ ID NO: 144904 - DNA, 2175 bp, Homo sapiens
  Payload ID: 8638
  Gene Symbol: KLKB1
  Gene Name: kallikrein B, plasma (Fletcher factor) 1
  ENST ID: ENST00000513864
  CDS Start-End: 255-1799
agaacagcttgaagaccgttcatttttaagtgacaagagactcacctccaagaagcaattgtgttttcagtttcctgtgagggagttttctctgtgtccccacaaggcatgattctgggtctatggtgacttaagagggccacacaacaatgagtatttaattttcctcagatgtatggctacaataaacatctataggatgtctgactcaactctatgaaaacgccttcttcagaggtggggatgtagcttccatgtacaccccaaatgcccaatactgccagatgaggtgcacattccacccaaggtgtttgctattcagttttcttccagcaagttcaatcaatgacatggagaaaaggtttggttgcttcttgaaagatagtgttacaggaaccctgccaaaagtacatcgaacaggtgcagtttctggacattccttgaagcaatgtggtcatcaaataagtgcttgccatcgagacatttataaaggagttgatatgagaggagtcaattttaatgtgtctaaggttagcagtgttgaagaatgccaaaaaaggtgcaccagtaacattcgctgccagtttttttcatatgccacgcaaacatttcacaaggcagagtaccggaacaattgcctattaaagtacagtcccggaggaacacctaccgctataaaggtgctgagtaacgtggaatctggattctcactgaagccctgtgccctttcagaaattggttgccacatgaacatcttccagcatcttgcgttctcagatgtggatgttgccagggttctcactccagatgcttttgtgtgtcggaccatctgcacctatcaccccaactgcctcttctttacattctatacaaatgtatggaaaatcgagtcacaaagaaatgtttgtcttcttaaaacatctgaaagtggcacaccaagttcctctactcctcaagaaaacaccatatctggatatagccttttaacctgcaaaagaactttacctgaaccctgccattctaaaatttacccgggagttgactttggaggagaagaattgaatgtgacttttgttaaaggagtgaatgtttgccaagagacttgcacaaagatgattcgctgtcagtttttcacttattctttactcccagaagactgtaaggaagagaagtgtaagtgtttcttaagattatctatggatggttctccaactaggattgcgtatgggacacaagggagctctggttactctttgagattgtgtaacactggggacaactctgtctgcacaacaaaaacaagcacacgcattgttggaggaacaaactcttcttggggagagtggccctggcaggtgagcctgcaggtgaagctgacagctcagaggcacctgtgtggagggtcactcataggacaccagtgggtcctcactgctgcccactgctttgatgggcttcccctgcaggatgtttggcgcatctatagtggcattttaaatctgtcagacattacaaaagatacacctttctcacaaataaaagagattattattcaccaaaactataaagtctcagaagggaatcatgatatcgccttgataaaactccaggctcctttgaattacactgaattccaaaaaccaatatgcctaccttccaaaggtgacacaagcacaatttataccaactgttgggtaaccggatggggcttctcgaaggagaaagggagattcaggtggtcccttagtttgcaaacacaatggaatgtggcgtttggtgggcatcaccagctggggtgaaggctgtgcccgcagggagcaacctggtgtctacaccaaagtcgctgagtacatggactggattttagagaaaacacagagcagtgatggaaaagctcagatgcagtcaccagcatgagaagcagtccagagtctaggcaatttttacaacctgagttcaagtcaaattctgagcctggggggtcctcatctgcaaagcatggagagtggcatcttctttgcatcctaaggacgaaaaacacagtgcactcagagctgctgaggacaatgtctggctgaagcccgctttcagcacgccgtaaccaggggctgacaatgcgaggtcgcaactgagatctccatgactgtgtgttgtgaaataaaatggtgaaagatc

SEQ ID NO: 144905 - DNA, 2317 bp, Homo sapiens
  Payload ID: 8638
  Gene Symbol: KLKB1
  Gene Name: kallikrein B, plasma (Fletcher factor) 1
  ENST ID: ENST00000511608
  CDS Start-End: 1-2060
ttagtgaagattgtgaagtggcaggttacagagttctaaaaggcactgaagccgtcatcattccctatgcattgcacagagatccgagatacttccccaaccccgaggagttccagcctgagcggttcttccccgagaatgcacaagggcgccatccatatgcctacgtgcccttctctgctggccccaggaactgtataggatgtctgactcaactctatgaaaacgccttcttcagaggtggggatgtagcttccatgtacaccccaaatgcccaatactgccagatgaggtgcacattccacccaaggtgtttgctattcagttttcttccagcaagttcaatcaatgacatggagaaaaggtttggttgcttcttgaaagatagtgttacaggaaccctgccaaaagtacatcgaacaggtgcagtttctggacattccttgaagcaatgtggtcatcaaataagtgcttgccatcgagacatttataaaggagttgatatgagaggagtcaattttaatgtgtctaaggttagcagtgttgaagaatgccaaaaaaggtgcaccagtaacattcgctgccagtttttttcatatgccacgcaaacatttcacaaggcagagtaccggaacaattgcctattaaagtacagtcccggaggaacacctaccgctataaaggtgctgagtaacgtggaatctggattctcactgaagccctgtgccctttcagaaattggttgccacatgaacatcttccagcatcttgcgttctcagatgtggatgttgccagggttctcactccagatgcttttgtgtgtcggaccatctgcacctatcaccccaactgcctcttctttacattctatacaaatgtatggaaaatcgagtcacaaagaaatgtttgtcttcttaaaacatctgaaagtggcacaccaagttcctctactcctcaagaaaacaccatatctggatatagccttttaacctgcaaaagaactttacctgaaccctgccattctaaaatttacccgggagttgactttggaggagaagaattgaatgtgacttttgttaaaggagtgaatgtttgccaagagacttgcacaaagatgattcgctgtcagtttttcacttattctttactcccagaagactgtaaggaagagaagtgtaagtgtttcttaagattatctatggatggttctccaactaggattgcgtatgggacacaagggagctctggttactctttgagattgtgtaacactggggacaactctgtctgcacaacaaaaacaagcacacgcattgttggaggaacaaactcttcttggggagagtggccctggcaggtgagcctgcaggtgaagctgacagctcagaggcacctgtgtggagggtcactcataggacaccagtgggtcctcactgctgcccactgctttgatgggcttcccctgcaggatgtttggcgcatctatagtggcattttaaatctgtcagacattacaaaagatacacctttctcacaaataaaagagattattattcaccaaaactataaagtctcagaagggaatcatgatatcgccttgataaaactccaggctcctttgaattacactgaattccaaaaaccaatatgcctaccttccaaaggtgacacaagcacaatttataccaactgttgggtaaccggatggggcttctcgaaggagaaaggtgaaatccaaaatattctacaaaaggtaaatattcctttggtaacaaatgaagaatgccagaaaagatatcaagattataaaataacccaacggatggtctgtgctggctataaagaagggggaaaagatgcttgtaagggagattcaggtggtcccttagtttgcaaacacaatggaatgtggcgtttggtgggcatcaccagctggggtgaaggctgtgcccgcagggagcaacctggtgtctacaccaaagtcgctgagtacatggactggattttagagaaaacacagagcagtgatggaaaagctcagatgcagtcaccagcatgagaagcagtccagagtctaggcaatttttacaacctgagttcaagtcaaattctgagcctggggggtcctcatctgcaaagcatggagagtggcatcttctttgcatcctaaggacgaaaaacacagtgcactcagagctgctgaggacaatgtctggctgaagcccgctttcagcacgccgtaaccaggggctgacaatgcgaggtcgcaactgagatctccatgactgtgtgttgtgaaataaaatggtgaaagat

SEQ ID NO: 144906 - DNA, 1602 bp, Homo sapiens
  Payload ID: 8639
  Gene Symbol:
  Gene Name: Kallikrein-9  [Source:UniProtKB/Swiss-Prot
  Acc:Q9UKQ9]
  Uniprot ID: Q9UKQ9
  ENST ID: ENST00000250366
  CDS Start-End: 35-787
ggtgcacgttccaggatccaggtgcccaggggtcatgaagctgggactcctctgtgctctgctctctctgctggcagggcatggctgggcagacacccgtgccatcggggccgaggaatgtcgccccaactcccagccttggcaggccggcctcttccaccttactcggctcttctgtggggcgaccctcatcagtgaccgctggctgctcacagctgcccactgccgcaagccgtatctgtgggtccgccttggagagcaccacctctggaaatgggagggtccggagcagctgttccgggttacggacttcttcccccaccctggcttcaacaaggacctcagcgccaatgaccacaatgatgacatcatgctgatccgcctgcccaggcaggcacgtctgagtcctgctgtgcagcccctcaacctcagccagacctgtgtctccccaggcatgcagtgtctcatctcaggctggggggccgtgtccagccccaaggcgctgtttccagtcacactgcagtgtgccaacatcagcatcctggagaacaaactctgtcactgggcataccctggacacatctcggacagcatgctctgtgcgggcctgtgggaggggggccgaggttcctgccagggtgactctgggggccccctggtttgcaatggaaccttggcaggcgtggtgtctgggggtgctgagccctgctccagaccccggcgccccgcagtctacaccagcgtatgccactaccttgactggatccaagaaatcatggagaactgagcccgcgcgccacgggggcaccttggaagaccaagagaggccgaagggcacggggtagggggttctcgtagggtcccagcctcaatggttcccgccctggacctccagctgccctgactcccctctggacactaagactccgcccctgaggctccgccccctcacgaggtcaagcaagacacagtcgcgccccctcggaacggagcagggacacgcccttcagagcccgtctctatgacgtcaccgacagccatcacctccttcttggaacagcacagcctgtggctccgccccaaggaaccacttacacaaaatagctccgcccctcggaactttgcccagtgggacttcccctcgggactccaccccttgtggccccgcctccttcaccagagatctcgcccctcgtgatgtcaggggcgcagtagctccgcccacgtggagctcgggcggtgtagagctcagccccttgtggccccgtcctgggcgtgtgctgggtttgaatcctggcggagacctggggggaaattgagggagggtctggatacctttagagccaatgcaacggatgatttttcagtaaacgcgggaaacctcaccttctttctgcctgagctgtgagatgagtggagagcaaacgggtgggcggtgaagggcagatgagggaaccggtaccgccttgcaactcccccttaaacccctaacctcaccatgggacgcccccgacctcgtgcggccaagacgtggatgttcctgctcttgctggggggagcctgggcaggacactccagggcacaggaggacaaggtgctggg

SEQ ID NO: 144907 - DNA, 1388 bp, Homo sapiens
  Payload ID: 8639
  Gene Symbol:
  Gene Name: Kallikrein-9  [Source:UniProtKB/Swiss-Prot
  Acc:Q9UKQ9]
  ENST ID: ENST00000599166
  CDS Start-End: 1-276
gtcacactgcagtgtgccaacatcagcatcctggagaacaaactctgtcactgggcataccctggacacatctcggacagcatgctctgtgcgggcctgtgggaggggggccgaggttcctgccagggtgactctgggggccccctggtttgcaatggaaccttggcaggcgtggtgtctgggggtgctgagccctgctccagaccccggcgccccgcagtctacaccagcgtatgccactaccttgactggatccaagaaatcatggagaactgagcccgcgcgccacgggggcaccttggaagaccaagagaggccgaagggcacggggtagggggttctcgtagggtcccagcctcaatggttcccgccctggacctccagctgccctgactcccctctggacactaagactccgcccctgaggctccgccccctcacgaggtcaagcaagacacagtcgcgccccctcggaacggagcagggacacgcccttcagagcccgtctctatgacgtcaccgacagccatcacctccttcttggaacagcacagcctgtggctccgccccaaggaaccacttacacaaaatagctccgcccctcggaactttgcccagtgggacttcccctcgggactccaccccttgtggccccgcctccttcaccagagatctcgcccctcgtgatgtcaggggcgcagtagctccgcccacgtggagctcgggcggtgtagagctcagccccttgtggccccgtcctgggcgtgtgctgggtttgaatcctggcggagacctggggggaaattgagggagggtctggatacctttagagccaatgcaacggatgatttttcagtaaacgcgggaaacctcaccttctttctgcctgagctgtgagatgagtggagagcaaacgggtgggcggtgaagggcagatgagggaaccggtaccgccttgcaactcccccttaaacccctaacctcaccatgggacgcccccgacctcgtgcggccaagacgtggatgttcctgctcttgctggggggagcctgggcagagaattttcctgacactctcaactgtgcagaagtaaaaatctttccccagaagaagtgtgaggatgcttacccggggcagatcacagatggcatggtctgtgcaggcagcagcaaaggggctgacacgtgccagggcgattctggaggccccctggtgtgtgatggtgcactccagggcatcacatcctggggctcagacccctgtgggaggtccgacaaacctggcgtctataccaacatctgccgctacctggactggatcaagaagatcataggcagcaagggctgattctaggataagcactagatctcccttaataaactcacaac

SEQ ID NO: 144908 - DNA, 3111 bp, Homo sapiens
  Payload ID: 8640
  Gene Symbol: KLK10
  Gene Name: kallikrein-related peptidase 10
  Uniprot ID: O43240
  ENST ID: ENST00000309958
  CDS Start-End: 220-1050
catcctgccacccctagccttgctggggacgtgaaccctctccccgcgcctgggaagccttcttggcaccgggacccggagaatccccacggaagccagttccaaaagggatgaaaagggggcgtttcgggcactgggagaagcctgtattccagggcccctcccagagcaggaatctgggacccaggagtgccagcctcacccacgcagatcctggccatgagagctccgcacctccacctctccgccgcctctggcgcccgggctctggcgaagctgctgccgctgctgatggcgcaactctgggccgcagaggcggcgctgctcccccaaaacgacacgcgcttggaccccgaagcctatggctccccgtgcgcgcgcggctcgcagccctggcaggtctcgctcttcaacggcctctcgttccactgcgcgggtgtcctggtggaccagagttgggtgctgacggccgcgcactgcggaaacaagccactgtgggctcgagtaggggatgaccacctgctgcttcttcagggagagcagctccgccggaccactcgctctgttgtccatcccaagtaccaccagggctcaggccccatcctgccaaggcgaacggatgagcacgatctcatgttgctgaagctggccaggcccgtagtgctggggccccgcgtccgggccctgcagcttccctaccgctgtgctcagcccggagaccagtgccaggttgctggctggggcaccacggccgcccggagagtgaagtacaacaagggcctgacctgctccagcatcactatcctgagccctaaagagtgtgaggtcttctaccctggcgtggtcaccaacaacatgatatgtgctggactggaccggggccaggacccttgccagagtgactctggaggccccctggtctgtgacgagaccctccaaggcatcctctcgtggggtgtttacccctgtggctctgcccagcatccagctgtctacacccagatctgcaaatacatgtcctggatcaataaagtcatacgctccaactgatccagatgctacgctccagctgatccagatgttatgctcctgctgatccagatgcccagaggctccatcgtccatcctcttcctccccagtcggctgaactctccccttgtctgcactgttcaaacctctgccgccctccacacctctaaacatctcccctctcacctcattcccccacctatccccattctctgcctgtactgaagctgaaatgcaggaagtggtggcaaaggtttattccagagaagccaggaagccggtcatcacccagcctctgagagcagttactggggtcacccaacctgacttcctctgccactccctgctgtgtgactttgggcaagccaagtgccctctctgaacctcagtttcctcatctgcaaaatgggaacaatgacgtgcctacctcttagacatgttgtgaggagactatgatataacatgtgtatgtaaatcttcatggtgattgtcatgtaaggcttaacacagtgggtggtgagttctgactaaaggttacctgttgtcgtgatctgaccacgtcccggtgaaagcgtgtgtccagggaagaagtgcacagggtagcccccagtcccaaccttccatccccaacccttagggatgatggaagaatcattttcctcaccctagttccaagtcccaggaaacaccttttaaccacttccttctcatctcccactgtttcccacttctggttccacccaacaccagttcctccgagctaggctggccctgagtcattagcaccttctctgccttcatgaggccactgaactcaagggacctcaccttgcttctatcccagcctctaagaccagagggccgagggggtagtgaagattgggaaacccttgccacctcaactgcccagcttgtgccaagaaacctccctctgacatttaggggaaaatctttggtttgtctgttattaattggctgtgagattttcgtcctgaaaacttgggaggaggaattgtttgattctccctgaaattgggggagggaaggggagttaatacacagaatccaggtaaggctaatagaagcttcagtgtccgctgggtgtggtggctcacgcctgtaatcctagcactttgggaggccgaggaaagcagatcatctgaggtcaggtgttcgagaccagtctggccaaaatggtgaaatcccatctctactgaaaatacaaaaactagccaggcatggtggcaggcacctataatcccatctacttgggaggctgaggcagaagaatcacttgaacccggggggcagaggttgcagtgagccaagattgcaccattgcactccatccagcctggacaaaagagcaaaactccatctcaaaaaaagaagaagtttgagtgtctcagcttatcctgaactttgaagcagtaacataagctagctgaatataggcacaacagaaatttcccattaagcacggggtttttgtttgtttgtttgtcctttcagttaccaatttatggagcatctattatgtgccaggcccagtgctgggtgctggggacatacgtaggggtgatcacaaggtcccccaccctgcagagcccacaggaggttgatgtacaaggtctgagcacacagctcccttccgtggcctctttcccattctgcccccattagcacacgcaggaaatgtcagacaggcgtatcagctgggtttgtcatccaaagaccagaagcgaggtcggtggaaacttgaaaactcgattcattattaaaggcaactcacccgtccctttagtcactccacaatgtttatcgagccacgtcttatgccaggcctcaaagatgaatcagaccaggcactaccctcaaggagctgctagttaggtcagggagacaggccagtcttacattcctgtcattcaggtctccactcaaaagtcacctcctccgggaggccttcctgaattgcccaggctataggagtccacttttggtcatccagtcccgatgctctgttttttgtttgtttgtttttttttttaatagcacctattatacctgaaattatctca

SEQ ID NO: 144909 - DNA, 1508 bp, Homo sapiens
  Payload ID: 8640
  Gene Symbol: KLK10
  Gene Name: kallikrein-related peptidase 10
  Uniprot ID: O43240
  ENST ID: ENST00000358789
  CDS Start-End: 148-978
ggagaagcttccggactccttggggttaaaagggaaggtcccgccaggggtccctgggcagaggataccagcggcagaccacaggcagggcagaggcacgtctgggtcccctccctccttcctatcggcgactcccagatcctggccatgagagctccgcacctccacctctccgccgcctctggcgcccgggctctggcgaagctgctgccgctgctgatggcgcaactctgggccgcagaggcggcgctgctcccccaaaacgacacgcgcttggaccccgaagcctatggctccccgtgcgcgcgcggctcgcagccctggcaggtctcgctcttcaacggcctctcgttccactgcgcgggtgtcctggtggaccagagttgggtgctgacggccgcgcactgcggaaacaagccactgtgggctcgagtaggggatgaccacctgctgcttcttcagggagagcagctccgccggaccactcgctctgttgtccatcccaagtaccaccagggctcaggccccatcctgccaaggcgaacggatgagcacgatctcatgttgctgaagctggccaggcccgtagtgctggggccccgcgtccgggccctgcagcttccctaccgctgtgctcagcccggagaccagtgccaggttgctggctggggcaccacggccgcccggagagtgaagtacaacaagggcctgacctgctccagcatcactatcctgagccctaaagagtgtgaggtcttctaccctggcgtggtcaccaacaacatgatatgtgctggactggaccggggccaggacccttgccagagtgactctggaggccccctggtctgtgacgagaccctccaaggcatcctctcgtggggtgtttacccctgtggctctgcccagcatccagctgtctacacccagatctgcaaatacatgtcctggatcaataaagtcatacgctccaactgatccagatgctacgctccagctgatccagatgttatgctcctgctgatccagatgcccagaggctccatcgtccatcctcttcctccccagtcggctgaactctccccttgtctgcactgttcaaacctctgccgccctccacacctctaaacatctcccctctcacctcattcccccacctatccccattctctgcctgtactgaagctgaaatgcaggaagtggtggcaaaggtttattccagagaagccaggaagccggtcatcacccagcctctgagagcagttactggggtcacccaacctgacttcctctgccactccctgctgtgtgactttgggcaagccaagtgccctctctgaacctcagtttcctcatctgcaaaatgggaacaatgacgtgcctacctcttagacatgttgtgaggagactatgatataacatgtgtatgtaaatcttcatggtgattgtcatgtaaggcttaacacagtgggtggtgagttctgactaaaggttacctgttgtcgtga

SEQ ID NO: 144910 - DNA, 3006 bp, Homo sapiens
  Payload ID: 8640
  Gene Symbol: KLK10
  Gene Name: kallikrein-related peptidase 10
  Uniprot ID: O43240
  ENST ID: ENST00000391805
  CDS Start-End: 121-951
acaatctcccttttcaagccagcctctgtccctcctactcaacctgctttatctctaggccttcctccttcctcttccacagtctggcttctcacattgtcactctagcagatcctggccatgagagctccgcacctccacctctccgccgcctctggcgcccgggctctggcgaagctgctgccgctgctgatggcgcaactctgggccgcagaggcggcgctgctcccccaaaacgacacgcgcttggaccccgaagcctatggctccccgtgcgcgcgcggctcgcagccctggcaggtctcgctcttcaacggcctctcgttccactgcgcgggtgtcctggtggaccagagttgggtgctgacggccgcgcactgcggaaacaagccactgtgggctcgagtaggggatgaccacctgctgcttcttcagggagagcagctccgccggaccactcgctctgttgtccatcccaagtaccaccagggctcaggccccatcctgccaaggcgaacggatgagcacgatctcatgttgctgaagctggccaggcccgtagtgctggggccccgcgtccgggccctgcagcttccctaccgctgtgctcagcccggagaccagtgccaggttgctggctggggcaccacggccgcccggagagtgaagtacaacaagggcctgacctgctccagcatcactatcctgagccctaaagagtgtgaggtcttctaccctggcgtggtcaccaacaacatgatatgtgctggactggaccggggccaggacccttgccagagtgactctggaggccccctggtctgtgacgagaccctccaaggcatcctctcgtggggtgtttacccctgtggctctgcccagcatccagctgtctacacccagatctgcaaatacatgtcctggatcaataaagtcatacgctccaactgatccagatgctacgctccagctgatccagatgttatgctcctgctgatccagatgcccagaggctccatcgtccatcctcttcctccccagtcggctgaactctccccttgtctgcactgttcaaacctctgccgccctccacacctctaaacatctcccctctcacctcattcccccacctatccccattctctgcctgtactgaagctgaaatgcaggaagtggtggcaaaggtttattccagagaagccaggaagccggtcatcacccagcctctgagagcagttactggggtcacccaacctgacttcctctgccactccctgctgtgtgactttgggcaagccaagtgccctctctgaacctcagtttcctcatctgcaaaatgggaacaatgacgtgcctacctcttagacatgttgtgaggagactatgatataacatgtgtatgtaaatcttcatggtgattgtcatgtaaggcttaacacagtgggtggtgagttctgactaaaggttacctgttgtcgtgatctgaccacgtcccggtgaaagcgtgtgtccagggaagaagtgcacagggtagcccccagtcccaaccttccatccccaacccttagggatgatggaagaatcattttcctcaccctagttccaagtcccaggaaacaccttttaaccacttccttctcatctcccactgtttcccacttctggttccacccaacaccagttcctccgagctaggctggccctgagtcattagcaccttctctgccttcatgaggccactgaactcaagggacctcaccttgcttctatcccagcctctaagaccagagggccgagggggtagtgaagattgggaaacccttgccacctcaactgcccagcttgtgccaagaaacctccctctgacatttaggggaaaatctttggtttgtctgttattaattggctgtgagattttcgtcctgaaaacttgggaggaggaattgtttgattctccctgaaattgggggagggaaggggagttaatacacagaatccaggtaaggctaatagaagcttcagtgtccgctgggtgtggtggctcacgcctgtaatcctagcactttgggaggccgaggaaagcagatcatctgaggtcaggtgttcgagaccagtctggccaaaatggtgaaatcccatctctactgaaaatacaaaaactagccaggcatggtggcaggcacctataatcccatctacttgggaggctgaggcagaagaatcacttgaacccggggggcagaggttgcagtgagccaagattgcaccattgcactccatccagcctggacaaaagagcaaaactccatctcaaaaaaagaagaagtttgagtgtctcagcttatcctgaactttgaagcagtaacataagctagctgaatataggcacaacagaaatttcccattaagcacggggtttttgtttgtttgtttgtcctttcagttaccaatttatggagcatctattatgtgccaggcccagtgctgggtgctggggacatacgtaggggtgatcacaaggtcccccaccctgcagagcccacaggaggttgatgtacaaggtctgagcacacagctcccttccgtggcctctttcccattctgcccccattagcacacgcaggaaatgtcagacaggcgtatcagctgggtttgtcatccaaagaccagaagcgaggtcggtggaaacttgaaaactcgattcattattaaaggcaactcacccgtccctttagtcactccacaatgtttatcgagccacgtcttatgccaggcctcaaagatgaatcagaccaggcactaccctcaaggagctgctagttaggtcagggagacaggccagtcttacattcctgtcattcaggtctccactcaaaagtcacctcctccgggaggccttcctgaattgcccaggctataggagtccacttttggtcatccagtcccgatgctctgttttttgtttgtttgtttttttttttaatagcacctattatacctgaaatt

SEQ ID NO: 144911 - DNA, 549 bp, Homo sapiens
  Payload ID: 8640
  Gene Symbol: KLK10
  Gene Name: kallikrein-related peptidase 10
  ENST ID: ENST00000599077
  CDS Start-End: 121-549
acaatctcccttttcaagccagcctctgtccctcctactcaacctgctttatctctaggccttcctccttcctcttccacagtctggcttctcacattgtcactctagcagatcctggccatgagagctccgcacctccacctctccgccgcctctggcgcccgggctctggcgaagctgctgccgctgctgatggcgcaactctgggccgcagaggcggcgctgctcccccaaaacgacacgcgcttggaccccgaagcctatggctccccgtgcgcgcgcggctcgcagccctggcaggtctcgctcttcaacggcctctcgttccactgcgcgggtgtcctggtggaccagagttgggtgctgacggccgcgcactgcggaaacaagccactgtgggctcgagtaggggatgaccacctgctgcttcttcagggagagcagctccgccggaccactcgctctgttgtccatcccaagtaccaccagggctcaggccccatcctgccaaggcgaacggatgagcacgatctcatgttgctgaagctg

SEQ ID NO: 144912 - DNA, 1428 bp, Homo sapiens
  Payload ID: 8640
  Gene Symbol: KLK10
  Gene Name: kallikrein-related peptidase 10
  ENST ID: ENST00000601467
  CDS Start-End: 600-731
actcaggccctgtccgatttctgccacccggatcctcgctcttccgtggactcttcgccgcgttctttctcctcctcttacgccgccccatcccggccccgctccattttacactaccgtgttttgttttgtttgtttgtttgtttgagacggagtctcgctctgtcgcccaggctggagtgcagtgacgcgatctcggctcactgcaagctccgcctcccgggttcacaccattctcctgcctcagcctcccgagtagctgggactacaggcgcccgccaccaagcccggctagttttttgtatttttagtagagatgggatttcaccgtggtctcgatctcctggcctcgtgatccgcctgcctcggcctcccaaagtgctgggattacaagcccgcagaggcggcgctgctcccccaaaacgacacgcgcttggaccccgaagcctatggctccccgtgcgcgcgcggctcgcagccctggcaggtctcgctcttcaacggcctctcgttccactgcgcgggtgtcctggtggaccagagttgggtgctgacggccgcgcactgcggaaacaagccactgtgggctcgagtaggggatgaccacctgctgcttcttcagggagagcagctccgccggaccactcgctctgttgtccatcccaagtaccaccagggctcaggccccatcctgccaaggcgaacggatgagcacgatctcatgttgctgaagctggccaggcccgtagtgctggggccccgcgtccgggccctgcagcttccctaccgctgtgctcagcccggagaccagtgccaggttgctggctggggcaccacggccgcccggagagtgaagtacaacaagggcctgacctgctccagcatcactatcctgagccctaaagagtgtgaggtcttctaccctggcgtggtcaccaacaacatgatatgtgctggactggaccggggccaggacccttgccagagtgactctggaggccccctggtctgtgacgagaccctccaaggcatcctctcgtggggtgtttacccctgtggctctgcccagcatccagctgtctacacccagatctgcaaatacatgtcctggatcaataaagtcatacgctccaactgatccagatgctacgctccagctgatccagatgttatgctcctgctgatccagatgcccagaggctccatcgtccatcctcttcctccccagtcggctgaactctccccttgtctgcactgttcaaacctctgccgccctccacacctctaaacatctcccctctcacctcattcccccacctatccccattctctgcctgtactgaagctgaaatgcaggaagtggtggcaaaggtttattccagagaagccaggaagccggtcatcacccagcctctgagagcagttact

SEQ ID NO: 144913 - DNA, 1198 bp, Homo sapiens
  Payload ID: 8641
  Gene Symbol: KLK11
  Gene Name: kallikrein-related peptidase 11
  Uniprot ID: Q9UBX7
  ENST ID: ENST00000319720
  CDS Start-End: 132-884
agggtggagtgcaggcttggaaagcaggagagctcagcctacgtctttaatcctcctgcccaccccttggattctgtctccactgggactcaagagaggaacctggggcccgctcctcccccctccaggccatgaggattctgcagttaatcctgcttgctctggcaacagggcttgtagggggagagaccaggatcatcaaggggttcgagtgcaagcctcactcccagccctggcaggcagccctgttcgagaagacgcggctactctgtggggcgacgctcatcgcccccagatggctcctgacagcagcccactgcctcaagccccgctacatagttcacctggggcagcacaacctccagaaggaggagggctgtgagcagacccggacagccactgagtccttcccccaccccggcttcaacaacagcctccccaacaaagaccaccgcaatgacatcatgctggtgaagatggcatcgccagtctccatcacctgggctgtgcgacccctcaccctctcctcacgctgtgtcactgctggcaccagctgcctcatttccggctggggcagcacgtccagcccccagttacgcctgcctcacaccttgcgatgcgccaacatcaccatcattgagcaccagaagtgtgagaacgcctaccccggcaacatcacagacaccatggtgtgtgccagcgtgcaggaagggggcaaggactcctgccagggtgactccgggggccctctggtctgtaaccagtctcttcaaggcattatctcctggggccaggatccgtgtgcgatcacccgaaagcctggtgtctacacgaaagtctgcaaatatgtggactggatccaggagacgatgaagaacaattagactggacccacccaccacagcccatcaccctccatttccacttggtgtttggttcctgttcactctgttaataagaaaccctaagccaagaccctctacgaacattctttgggcctcctggactacaggagatgctgtcacttaataatcaacctggggttcgaaatcagtgagacctggattcaaattctgccttgaaatattgtgactctgggaatgacaacacctggtttgttctctgttgtatccccagccccaaagacagctcctggccatatatcaaggtttcaataaatatttgctaaatgagtgaa

SEQ ID NO: 144914 - DNA, 1268 bp, Homo sapiens
  Payload ID: 8641
  Gene Symbol: KLK11
  Gene Name: kallikrein-related peptidase 11
  ENST ID: ENST00000319756
  CDS Start-End: 107-457
tgctccacacctggtcaggggagagaggggaggaaagccaagggaagggacctaactgaaaacaaacaagctgggagaagcaggaatctgcgctcgggttccgcagatgcagaggttgaggtggctgcgggactggaagtcatcgggcagaggtctcacagcagccaaggaacctggggcccgctcctcccccctccaggccatgaggattctgcagttaatcctgcttgctctggcaacagggcttgtagggggagagaccaggatcatcaaggggttcgagtgcaagcctcactcccagccctggcaggcagccctgttcgagaagacgcggctactctgtggggcgacgctcatcgcccccagatggctcctgacagcagcccactgcctcaagccgtggccgctacatagttcacctggggcagcacaacctccagaaggaggagggctgtgagcagacccggacagccactgagtccttcccccaccccggcttcaacaacagcctccccaacaaagaccaccgcaatgacatcatgctggtgaagatggcatcgccagtctccatcacctgggctgtgcgacccctcaccctctcctcacgctgtgtcactgctggcaccagctgcctcatttccggctggggcagcacgtccagcccccagttacgcctgcctcacaccttgcgatgcgccaacatcaccatcattgagcaccagaagtgtgagaacgcctaccccggcaacatcacagacaccatggtgtgtgccagcgtgcaggaagggggcaaggactcctgccagggtgactccgggggccctctggtctgtaaccagtctcttcaaggcattatctcctggggccaggatccgtgtgcgatcacccgaaagcctggtgtctacacgaaagtctgcaaatatgtggactggatccaggagacgatgaagaacaattagactggacccacccaccacagcccatcaccctccatttccacttggtgtttggttcctgttcactctgttaataagaaaccctaagccaagaccctctacgaacattctttgggcctcctggactacaggagatgctgtcacttaataatcaacctggggttcgaaatcagtgagacctggattcaaattctgccttgaaatattgtgactctgggaatgacaacacctggtttgttctctgttgtatccccagccccaaagacagctcctggccatatatcaaggtttcaataaatatttgctaaatga

SEQ ID NO: 144915 - DNA, 930 bp, Homo sapiens
  Payload ID: 8641
  Gene Symbol: KLK11
  Gene Name: kallikrein-related peptidase 11
  Uniprot ID: Q9UBX7
  ENST ID: ENST00000391804
  CDS Start-End: 47-874
ggactcaagagaggaacctggggcccgctcctcccccctccaggccatgaggattctgcagttaatcctgcttgctctggcaacagggcttgtagggggagagaccaggatcatcaaggggttcgagtgcaagcctcactcccagccctggcaggcagccctgttcgagaagacgcggctactctgtggggcgacgctcatcgcccccagatggctcctgacagcagcccactgcctcaagccgtgggtgtcactcacctctcccacccatgtctcccccgacctttcctcctccaactactgtctctcccacctcagccgctacatagttcacctggggcagcacaacctccagaaggaggagggctgtgagcagacccggacagccactgagtccttcccccaccccggcttcaacaacagcctccccaacaaagaccaccgcaatgacatcatgctggtgaagatggcatcgccagtctccatcacctgggctgtgcgacccctcaccctctcctcacgctgtgtcactgctggcaccagctgcctcatttccggctggggcagcacgtccagcccccagttacgcctgcctcacaccttgcgatgcgccaacatcaccatcattgagcaccagaagtgtgagaacgcctaccccggcaacatcacagacaccatggtgtgtgccagcgtgcaggaagggggcaaggactcctgccagggtgactccgggggccctctggtctgtaaccagtctcttcaaggcattatctcctggggccaggatccgtgtgcgatcacccgaaagcctggtgtctacacgaaagtctgcaaatatgtggactggatccaggagacgatgaagaacaattagactggacccacccaccacagcccatcaccctccatttccacttggtgtttggttcc

SEQ ID NO: 144916 - DNA, 1174 bp, Homo sapiens
  Payload ID: 8641
  Gene Symbol: KLK11
  Gene Name: kallikrein-related peptidase 11
  Uniprot ID: Q9UBX7
  ENST ID: ENST00000453757
  CDS Start-End: 113-865
cccagcctacctgctgtagctgccgccactgccgtctccgccgccactgggcccccagagccccagccccagagcctaggaacctggggcccgctcctcccccctccaggccatgaggattctgcagttaatcctgcttgctctggcaacagggcttgtagggggagagaccaggatcatcaaggggttcgagtgcaagcctcactcccagccctggcaggcagccctgttcgagaagacgcggctactctgtggggcgacgctcatcgcccccagatggctcctgacagcagcccactgcctcaagccccgctacatagttcacctggggcagcacaacctccagaaggaggagggctgtgagcagacccggacagccactgagtccttcccccaccccggcttcaacaacagcctccccaacaaagaccaccgcaatgacatcatgctggtgaagatggcatcgccagtctccatcacctgggctgtgcgacccctcaccctctcctcacgctgtgtcactgctggcaccagctgcctcatttccggctggggcagcacgtccagcccccagttacgcctgcctcacaccttgcgatgcgccaacatcaccatcattgagcaccagaagtgtgagaacgcctaccccggcaacatcacagacaccatggtgtgtgccagcgtgcaggaagggggcaaggactcctgccagggtgactccgggggccctctggtctgtaaccagtctcttcaaggcattatctcctggggccaggatccgtgtgcgatcacccgaaagcctggtgtctacacgaaagtctgcaaatatgtggactggatccaggagacgatgaagaacaattagactggacccacccaccacagcccatcaccctccatttccacttggtgtttggttcctgttcactctgttaataagaaaccctaagccaagaccctctacgaacattctttgggcctcctggactacaggagatgctgtcacttaataatcaacctggggttcgaaatcagtgagacctggattcaaattctgccttgaaatattgtgactctgggaatgacaacacctggtttgttctctgttgtatccccagccccaaagacagctcctggccatatatcaaggtttcaataaatatttgctaaatga

SEQ ID NO: 144917 - DNA, 733 bp, Homo sapiens
  Payload ID: 8641
  Gene Symbol: KLK11
  Gene Name: kallikrein-related peptidase 11
  ENST ID: ENST00000593681
  CDS Start-End: 1-424
caacagcctccccaacaaagaccaccgcaatgacatcatgctggtgaagatggcatcgccagtctccatcacctgggctgtgcgacccctcaccctctcctcacgctgtgtcactgctggcaccagctgcctcatttccggctggggcagcacgtccagcccccagttacgcctgcctcacaccttgcgatgcgccaacatcaccatcattgagcaccagaagtgtgagaacgcctaccccggcaacatcacagacaccatggtgtgtgccagcgtgcaggaagggggcaaggactcctgccagtctcttcaaggcattatctcctggggccaggatccgtgtgcgatcacccgaaagcctggtgtctacacgaaagtctgcaaatatgtggactggatccaggagacgatgaagaacaattagactggacccacccaccacagcccatcaccctccatttccacttggtgtttggttcctgttcactctgttaataagaaaccctaagccaagaccctctacgaacattctttgggcctcctggactacaggagatgctgtcacttaataatcaacctggggttcgaaatcagtgagacctggattcaaattctgccttgaaatattgtgactctgggaatgacaacacctggtttgttctctgttgtatccccagccccaaagacagctcctggccatatatcaaggtttcaataaatatttgctaaatga

SEQ ID NO: 144918 - DNA, 608 bp, Homo sapiens
  Payload ID: 8641
  Gene Symbol: KLK11
  Gene Name: kallikrein-related peptidase 11
  ENST ID: ENST00000598799
  CDS Start-End: 97-608
gtgctgtgagaaacaggggatttccccaaccttgtttctcccaagtggggagcgggagcagaggaacctggggcccgctcctcccccctccaggccatgaggattctgcagttaatcctgcttgctctggcaacagggcttgtagggggagagaccaggatcatcaaggggttcgagtgcaagcctcactcccagccctggcaggcagccctgttcgagaagacgcggctactctgtggggcgacgctcatcgcccccagatggctcctgacagcagcccactgcctcaagccccgctacatagttcacctggggcagcacaacctccagaaggaggagggctgtgagcagacccggacagccactgagtccttcccccaccccggcttcaacaacagcctccccaacaaagaccaccgcaatgacatcatgctggtgaagatggcatcgccagtctccatcacctgggctgtgcgacccctcaccctctcctcacgctgtgtcactgctggcaccagctgcctcatttccggctggggcagcacgtccagcccccagttacgcctgcctcacaccttgcgatgcgccaacatcaccatcattgagca

SEQ ID NO: 144919 - DNA, 351 bp, Homo sapiens
  Payload ID: 8641
  Gene Symbol: KLK11
  Gene Name: kallikrein-related peptidase 11
  ENST ID: ENST00000601671
  CDS Start-End: 147-351
aacccagcctacctgctgtagctgccgccactgccgtctccgccgccactgggcccccagagccccagccccagagccttgatgcggccccatgtccctccttgttcccagaggaacctggggcccgctcctcccccctccaggccatgaggattctgcagttaatcctgcttgctctggcaacagggcttgtagggggagagaccaggatcatcaaggggttcgagtgcaagcctcactcccagccctggcaggcagccctgttcgagaagacgcggctactctgtggggcgacgctcatcgcccccagatggctcctgacagcagcccactgcctcaagccccgctaca

SEQ ID NO: 144920 - DNA, 759 bp, Homo sapiens
  Payload ID: 8641
  Gene Symbol: KLK11
  Gene Name: kallikrein-related peptidase 11
  ENST ID: ENST00000600362
  CDS Start-End: 101-430
gctgtagctgccgccactgccgtctccgccgccactgggcccccagagccccagccccagagcctaggaacctggggcccgctcctcccccctccaggccatgaggattctgcagttaatcctgcttgctctggcaacagtacgcctgcctcacaccttgcgatgcgccaacatcaccatcattgagcaccagaagtgtgagaacgcctaccccggcaacatcacagacaccatggtgtgtgccagcgtgcaggaagggggcaaggactcctgccagggtgactccgggggccctctggtctgtaaccagtctcttcaaggcattatctcctggggccaggatccgtgtgcgatcacccgaaagcctggtgtctacacgaaagtctgcaaatatgtggactggatccaggagacgatgaagaacaattagactggacccacccaccacagcccatcaccctccatttccacttggtgtttggttcctgttcactctgttaataagaaaccctaagccaagaccctctacgaacattctttgggcctcctggactacaggagatgctgtcacttaataatcaacctggggttcgaaatcagtgagacctggattcaaattctgccttgaaatattgtgactctgggaatgacaacacctggtttgttctctgttgtatccccagccccaaagacagctcctggccatatatcaaggtttcaataaatatttgctaaatgagtgaatctactgagtgctta

SEQ ID NO: 144921 - DNA, 1347 bp, Homo sapiens
  Payload ID: 8641
  Gene Symbol: KLK11
  Gene Name: kallikrein-related peptidase 11
  Uniprot ID: Q9UBX7
  ENST ID: ENST00000594768
  CDS Start-End: 187-1035
agtcatagtagtaggaagaggaagcacctaggtttgaggccagggctggctgctgtcagaacctaggccctcccctgccttgctccacacctggtcaggggagagaggggaggaaagccaagggaagggacctaactgaaaacaaacaagctgggagaagcaggaatctgcgctcgggttccgcagatgcagaggttgaggtggctgcgggactggaagtcatcgggcagaggtctcacagcagccaaggaacctggggcccgctcctcccccctccaggccatgaggattctgcagttaatcctgcttgctctggcaacagggcttgtagggggagagaccaggatcatcaaggggttcgagtgcaagcctcactcccagccctggcaggcagccctgttcgagaagacgcggctactctgtggggcgacgctcatcgcccccagatggctcctgacagcagcccactgcctcaagccccgctacatagttcacctggggcagcacaacctccagaaggaggagggctgtgagcagacccggacagccactgagtccttcccccaccccggcttcaacaacagcctccccaacaaagaccaccgcaatgacatcatgctggtgaagatggcatcgccagtctccatcacctgggctgtgcgacccctcaccctctcctcacgctgtgtcactgctggcaccagctgcctcatttccggctggggcagcacgtccagcccccagttacgcctgcctcacaccttgcgatgcgccaacatcaccatcattgagcaccagaagtgtgagaacgcctaccccggcaacatcacagacaccatggtgtgtgccagcgtgcaggaagggggcaaggactcctgccagggtgactccgggggccctctggtctgtaaccagtctcttcaaggcattatctcctggggccaggatccgtgtgcgatcacccgaaagcctggtgtctacacgaaagtctgcaaatatgtggactggatccaggagacgatgaagaacaattagactggacccacccaccacagcccatcaccctccatttccacttggtgtttggttcctgttcactctgttaataagaaaccctaagccaagaccctctacgaacattctttgggcctcctggactacaggagatgctgtcacttaataatcaacctggggttcgaaatcagtgagacctggattcaaattctgccttgaaatattgtgactctgggaatgacaacacctggtttgttctctgttgtatccccagccccaaagacagctcctggccatatatcaaggtttcaataaatatttgctaaatgagtg

SEQ ID NO: 144922 - DNA, 882 bp, Homo sapiens
  Payload ID: 8642
  Gene Symbol: KLK12
  Gene Name: kallikrein-related peptidase 12
  Uniprot ID: Q9UKR0
  ENST ID: ENST00000250351
  CDS Start-End: 118-882
gcaggtaggtggacggagagatagcagcgacgaggacaggccaaacagtgacagccacgtagaggatctggcagacaaagagacaaggtgagaaggagactttggaagtgacccaccatggggctcagcatctttttgctcctgtgtgttcttgggctcagccaggcagccacaccgaagattttcaatggcactgagtgtgggcgtaactcacagccgtggcaggtggggctgtttgagggcaccagcctgcgctgcgggggtgtccttattgaccacaggtgggtcctcacagcggctcactgcagcggcagcaggtactgggtgcgcctgggggaacacagcctcagccagctcgactggaccgagcagatccggcacagcggcttctctgtgacccatcccggctacctgggagcctcgacgagccacgagcacgacctccggctgctgcggctgcgcctgcccgtccgcgtaaccagcagcgttcaacccctgcccctgcccaatgactgtgcaaccgctggcaccgagtgccacgtctcaggctggggcatcaccaaccacccacggaacccattcccggatctgctccagtgcctcaacctctccatcgtctcccatgccacctgccatggtgtgtatcccgggagaatcacgagcaacatggtgtgtgcaggcggcgtcccggggcaggatgcctgccagggtgattctgggggccccctggtgtgtgggggagtccttcaaggtctggtgtcctgggggtctgtggggccctgtggacaagatggcatccctggagtctacacctatatttgcaactccactcttgttggcctgggaacttcttggaactttaactcctgccagcccttctaa

SEQ ID NO: 144923 - DNA, 1074 bp, Homo sapiens
  Payload ID: 8642
  Gene Symbol: KLK12
  Gene Name: kallikrein-related peptidase 12
  Uniprot ID: Q9UKR0
  ENST ID: ENST00000319590
  CDS Start-End: 118-864
gcaggtaggtggacggagagatagcagcgacgaggacaggccaaacagtgacagccacgtagaggatctggcagacaaagagacaaggtgagaaggagactttggaagtgacccaccatggggctcagcatctttttgctcctgtgtgttcttgggctcagccaggcagccacaccgaagattttcaatggcactgagtgtgggcgtaactcacagccgtggcaggtggggctgtttgagggcaccagcctgcgctgcgggggtgtccttattgaccacaggtgggtcctcacagcggctcactgcagcggcagcaggtactgggtgcgcctgggggaacacagcctcagccagctcgactggaccgagcagatccggcacagcggcttctctgtgacccatcccggctacctgggagcctcgacgagccacgagcacgacctccggctgctgcggctgcgcctgcccgtccgcgtaaccagcagcgttcaacccctgcccctgcccaatgactgtgcaaccgctggcaccgagtgccacgtctcaggctggggcatcaccaaccacccacggaacccattcccggatctgctccagtgcctcaacctctccatcgtctcccatgccacctgccatggtgtgtatcccgggagaatcacgagcaacatggtgtgtgcaggcggcgtcccggggcaggatgcctgccagggtgattctgggggccccctggtgtgtgggggagtccttcaaggtctggtgtcctgggggtctgtggggccctgtggacaagatggcatccctggagtctacacctatatttgcaagtatgtggactggatccggatgatcatgaggaacaactgacctgtttcctccacctccacccccaccccttaacttgggtacccctctggccctcagagcaccaatatctcctccatcacttcccctagctccactcttgttggcctgggaacttcttggaactttaactcctgccagcccttctaagacccacgagcggggtgagagaagtgtgcaatagtctggaataaatataaatgaaggaggggc

SEQ ID NO: 144924 - DNA, 735 bp, Homo sapiens
  Payload ID: 8642
  Gene Symbol: KLK12
  Gene Name: kallikrein-related peptidase 12
  Uniprot ID: Q9UKR0
  ENST ID: ENST00000529888
  CDS Start-End: 77-412
cgaggacaggccaaacagtgacagccacgtagaggatctggcagacaaagagacaagactttggaagtgacccaccatggggctcagcatctttttgctcctgtgtgttcttgggctcagccaggcagccacaccgaagattttcaatggcactgagtgtgggcgtaactcacagccgtggcaggtggggctgtttgagggcaccagcctgcgctgcgggggtgtccttattgaccacaggtgggtcctcacagcggctcactgcagcggcagacccattcccggatctgctccagtgcctcaacctctccatcgtctcccatgccacctgccatggtgtgtatcccgggagaatcacgagcaacatggtgtgtgcaggcggcgtcccggggcaggatgcctgccagggtgattctgggggccccctggtgtgtgggggagtccttcaaggtctggtgtcctgggggtctgtggggccctgtggacaagatggcatccctggagtctacacctatatttgcaagtatgtggactggatccggatgatcatgaggaacaactgacctgtttcctccacctccacccccaccccttaacttgggtacccctctggccctcagagcaccaatatctcctccatcacttcccctagctccactcttgttggcctgggaacttcttggaactttaactcctgccagcccttctaagacccacgagcggggtgagagaagt

SEQ ID NO: 144925 - DNA, 931 bp, Homo sapiens
  Payload ID: 8642
  Gene Symbol: KLK12
  Gene Name: kallikrein-related peptidase 12
  ENST ID: ENST00000530943
  CDS Start-End: 77-316
cgaggacaggccaaacagtgacagccacgtagaggatctggcagacaaagagacaagactttggaagtgacccaccatggggctcagcatctttttgctcctgtgtgttcttggtgagttctcccggagcagggagagggcaggactgcgactggatcccttcacccccatgaggaggccccaccaccctccccatctcagctctggcccccagcctggtggtgaggaggagaggggctttctctgtgcctccatttacctgcagctctcaggggctcagccaggcagccacaccgaagattttcaatggcactgagtgtgggcgtaactcacagccgtggcaggtggggctgtttgagggcaccagcctgcgctgcgggggtgtccttattgaccacaggtgggtcctcacagcggctcactgcagcggcagacccattcccggatctgctccagtgcctcaacctctccatcgtctcccatgccacctgccatggtgtgtatcccgggagaatcacgagcaacatggtgtgtgcaggcggcgtcccggggcaggatgcctgccagggtgattctgggggccccctggtgtgtgggggagtccttcaaggtctggtgtcctgggggtctgtggggccctgtggacaagatggcatccctggagtctacacctatatttgcaagtatgtggactggatccggatgatcatgaggaacaactgacctgtttcctccacctccacccccaccccttaacttgggtacccctctggccctcagagcaccaatatctcctccatcacttcccctagctccactcttgttggcctgggaacttcttggaactttaactcctgccagcccttctaagacccacgagcggggtgagagaagtgtgcaatagtctggaataaatataaatgaaggaggg

SEQ ID NO: 144926 - DNA, 1170 bp, Homo sapiens
  Payload ID: 8642
  Gene Symbol: KLK12
  Gene Name: kallikrein-related peptidase 12
  ENST ID: ENST00000526824
  CDS Start-End: 445-684
gggcttgcagaggagagagggagtggggctgggtcttcccaccctgggtcctttcctccttccccactccgtttagctgtaaagctcaattaagtgtgattagctgagaagagtttctgcagaattagagcacgccccacccctgtcttcgtggtccccttcccttaacccggaaactggatgggccaggacaaagagagttaagagctttgtcagtggtctgtctggagcgacagatggaaggaaagggaccggttgagcaacatgacaggtggctgaggagccaggtgcagagtggtagagttggctggcggagtggccagcacatgagaagacaggcaggtaggtggacggagagatagcagcgacgaggacaggccaaacagtgacagccacgtagaggatctggcagacaaagagacaagactttggaagtgacccaccatggggctcagcatctttttgctcctgtgtgttcttggtgagttctcccggagcagggagagggcaggactgcgactggatcccttcacccccatgaggaggccccaccaccctccccatctcagctctggcccccagcctggtggtgaggaggagaggggctttctctgtgcctccatttacctgcagctctcaggggctcagccaggcagccacaccgaagattttcaatggcactgagtgtgggcgtaactcacagccgtggcaggtggggctgtttgagggcaccagcctgcgctgcgggggtgtccttattgaccacaggtgggtcctcacagcggctcactgcagcggcagacccattcccggatctgctccagtgcctcaacctctccatcgtctcccatgccacctgccatggtgtgtatcccgggagaatcacgagcaacatggtgtgtgcaggcggcgtcccggggcaggatgcctgccagggtgattctgggggccccctggtgtgtgggggagtccttcaaggtctggtgtcctgggggtctgtggggccctgtggacaagatggcatccctggagtctacacctatatttgcaactccactcttgttggcctgggaacttcttggaactttaactcctgccagcccttctaagacccacgagcggggtgagagaagtgtgcaatagtctggaataaatataaatgaaggaggg

SEQ ID NO: 144927 - DNA, 962 bp, Homo sapiens
  Payload ID: 8642
  Gene Symbol: KLK12
  Gene Name: kallikrein-related peptidase 12
  ENST ID: ENST00000531374
  CDS Start-End: 77-610
cgaggacaggccaaacagtgacagccacgtagaggatctggcagacaaagagacaagactttggaagtgacccaccatggggctcagcatctttttgctcctgtgtgttcttgggctcagccaggcagccacaccgaagattttcaatggcactgagtgtgggcgtaactcacagccgtggcaggtggggctgtttgagggcaccagcctgcgctgcgggggtgtccttattgaccacaggtgggtcctcacagcggctcactgcagcggcagcaggtactgggtgcgcctgggggaacacagcctcagccagctcgactggaccgagcagatccggcacagcggcttctctgtgacccatcccggctacctgggagcctcgacgagccacgagcacgacctccggctgctgcggctgcgcctgcccgtccgcgtaaccagcagcgttcaacccctgcccctgcccaatgactgtgcaaccgctggcaccgagtgccacgtctcaggctggggcatcaccaaccacccacggagtaaggggcccagggccaggggtcaggggtcaggatgggtacaagtctgggatgcagggcgagaggtcgaatcatgacacctcagaggaaggatggacccattcccggatctgctccagtgcctcaacctctccatcgtctcccatgccacctgccatggtgtgtatcccgggagaatcacgagcaacatggtgtgtgcaggcggcgtcccggggcaggatgcctgccagggtgattctgggggccccctggtgtgtgggggagtccttcaaggtctggtgtcctgggggtctgtggggccctgtggacaagatggcatccctggagtctacacctatatttgcaactccactcttgttggcctgggaacttcttggaactttaactcctgccagcccttctaagacccacgagcggggtgagagaagt

SEQ ID NO: 144928 - DNA, 1077 bp, Homo sapiens
  Payload ID: 8642
  Gene Symbol: KLK12
  Gene Name: kallikrein-related peptidase 12
  Uniprot ID: Q9UKR0
  ENST ID: ENST00000525263
  CDS Start-End: 121-867
caagcaggtcatccccttggtgaccttcaaagagaagcagagagggcagaggtggggggcacagggaaagggtgacctctgagattccccttttcccccagactttggaagtgacccaccatggggctcagcatctttttgctcctgtgtgttcttgggctcagccaggcagccacaccgaagattttcaatggcactgagtgtgggcgtaactcacagccgtggcaggtggggctgtttgagggcaccagcctgcgctgcgggggtgtccttattgaccacaggtgggtcctcacagcggctcactgcagcggcagcaggtactgggtgcgcctgggggaacacagcctcagccagctcgactggaccgagcagatccggcacagcggcttctctgtgacccatcccggctacctgggagcctcgacgagccacgagcacgacctccggctgctgcggctgcgcctgcccgtccgcgtaaccagcagcgttcaacccctgcccctgcccaatgactgtgcaaccgctggcaccgagtgccacgtctcaggctggggcatcaccaaccacccacggaacccattcccggatctgctccagtgcctcaacctctccatcgtctcccatgccacctgccatggtgtgtatcccgggagaatcacgagcaacatggtgtgtgcaggcggcgtcccggggcaggatgcctgccagggtgattctgggggccccctggtgtgtgggggagtccttcaaggtctggtgtcctgggggtctgtggggccctgtggacaagatggcatccctggagtctacacctatatttgcaagtatgtggactggatccggatgatcatgaggaacaactgacctgtttcctccacctccacccccaccccttaacttgggtacccctctggccctcagagcaccaatatctcctccatcacttcccctagctccactcttgttggcctgggaacttcttggaactttaactcctgccagcccttctaagacccacgagcggggtgagagaagtgtgcaatagtctggaataaatataaatgaaggaggggc

SEQ ID NO: 144929 - DNA, 1047 bp, Homo sapiens
  Payload ID: 8643
  Gene Symbol: KLK13
  Gene Name: kallikrein-related peptidase 13
  ENST ID: ENST00000156476
  CDS Start-End: 44-343
tcaggccccgcccgccctgccctcccctcccgatcccggagccatgtggcccctggccctagtgatcgcctccctgaccttggccttgtcaggaggtgtctcccaggagtcttccaaggttctcaacaccaatgggaccagtgggtttctcccaggtggctacacctgcttcccccactctcagccctggcaggctgccctactagtgcaagggcggctactctgtgggggagtcctggtccaccccaaatgggtcctcactgccgcacactgtctaaaggaggggctcaaagtttacctaggcaagcacgccctagggcgtgtggaagctggtgagcagtgaattaccccaaaactctacaatgtgccaacatccaacttcgctcagatgaggagtgtcgtcaagtctacccaggaaagatcactgacaacatgttgtgtgccggcacaaaagagggtggcaaagactcctgtgagggtgactctgggggccccctggtctgtaacagaacactgtatggcatcgtctcctggggagacttcccatgtgggcaacctgaccggcctggtgtctacacccgtgtctcaagatacgtcctgtggatccgtgaaacaatccgaaaatatgaaacccagcagcaaaaatggttgaagggcccacaataaaagttgagaaatgtaccggcttccatcctgtcaccatgacttcctcacatggtctgcttagcccttctctgctccttattcccagtgttccatttgaaccagtgatccatgtcctgaaaaatgctcaatctcagctaacattccatgtttcagaagcattcaggcactgccaggcttgcagtctcccagatgttgcatccctgaaacatctcaacaacctgaatgtcccaacccagacaatggcccaggtctctcaacttcatcagtgtggcttctatgagcccagatcaccacctgaacgttctgtctgtggcacattcttaaatatttccatcagcccatctcaacaatatatgtcctataaatggaccatccttgaca

SEQ ID NO: 144930 - DNA, 378 bp, Homo sapiens
  Payload ID: 8643
  Gene Symbol: KLK13
  Gene Name: kallikrein-related peptidase 13
  Uniprot ID: Q9UKR3
  ENST ID: ENST00000335422
  CDS Start-End: 1-378
atgtggcccctggccctagtgatcgcctccctgaccttggccttgtcaggagtgaattaccccaaaactctacaatgtgccaacatccaacttcgctcagatgaggagtgtcgtcaagtctacccaggaaagatcactgacaacatgttgtgtgccggcacaaaagagggtggcaaagactcctgtgagggtgactctgggggccccctggtctgtaacagaacactgtatggcatcgtctcctggggagacttcccatgtgggcaacctgaccggcctggtgtctacacccgtgtctcaagatacgtcctgtggatccgtgaaacaatccgaaaatatgaaacccagcagcaaaaatggttgaagggcccacaataa

SEQ ID NO: 144931 - DNA, 1239 bp, Homo sapiens
  Payload ID: 8643
  Gene Symbol: KLK13
  Gene Name: kallikrein-related peptidase 13
  ENST ID: ENST00000376799
  CDS Start-End: 232-528
cagctcagagctcttcctgcttgtccctgggtgacctggtttcccggctgaggttggccctccgaccccagacccttcacctcccaaaataccctcgcagcagcccctcccgcgttcaaggcttcctgtcctctctggaaagctgaaagacatgggttcgcgtcctgacgctgccgctttgagccagtagcctagcagctgctttgtgcctaaattgttttcatctggaaaatgggcttaatctataagtgcttaccagagaaggtcactgtgaatattgaaacgaggtgtctcccaggagtcttccaaggttctcaacaccaatgggaccagtgggtttctcccaggtggctacacctgcttcccccactctcagccctggcaggctgccctactagtgcaagggcggctactctgtgggggagtcctggtccaccccaaatgggtcctcactgccgcacactgtctaaaggaggggctcaaagtttacctaggcaagcacgccctagggcgtgtggaagctggtgagcagtgaattaccccaaaactctacaatgtgccaacatccaacttcgctcagatgaggagtgtcgtcaagtctacccaggaaagatcactgacaacatgttgtgtgccggcacaaaagagggtggcaaagactcctgtgagggtgactctgggggccccctggtctgtaacagaacactgtatggcatcgtctcctggggagacttcccatgtgggcaacctgaccggcctggtgtctacacccgtgtctcaagatacgtcctgtggatccgtgaaacaatccgaaaatatgaaacccagcagcaaaaatggttgaagggcccacaataaaagttgagaaatgtaccggcttccatcctgtcaccatgacttcctcacatggtctgcttagcccttctctgctccttattcccagtgttccatttgaaccagtgatccatgtcctgaaaaatgctcaatctcagctaacattccatgtttcagaagcattcaggcactgccaggcttgcagtctcccagatgttgcatccctgaaacatctcaacaacctgaatgtcccaacccagacaatggcccaggtctctcaacttcatcagtgtggcttctatgagcccagatcaccacctgaacgttctgtctgtggcacattcttaaatatttccatcagcccatctcaacaatatatgtcctataaatggaccatccttgaca

SEQ ID NO: 144932 - DNA, 1614 bp, Homo sapiens
  Payload ID: 8643
  Gene Symbol: KLK13
  Gene Name: kallikrein-related peptidase 13
  ENST ID: ENST00000441527
  CDS Start-End: 44-325
tcaggccccgcccgccctgccctcccctcccgatcccggagccatgtggcccctggccctagtgatcgcctccctgaccttggccttgtcaggaggtgaagacttcaaggagccaagccaggggcctagagatgtaatggcggcttcccgaccagaggccttcccaaagggcttgacccttgagccaagacctgaaaaaggagggatctgtgggtgcctggcacctggcaccatccttggcctgaaggtggggtggcttttctcctctggcgacactccctggattcatgcccgtgccactcctgagtgccacaccctaggctaggagacccacacgctacgccttgtggagtcctcaacaacctggcgaggtgtctcccaggagtcttccaaggttctcaacaccaatgggaccagtgggtttctcccaggtggctacacctgcttcccccactctcagccctggcaggctgccctactagtgcaagggcggctactctgtgggggagtcctggtccaccccaaatgggtcctcactgccgcacactgtctaaaggaggggctcaaagtttacctaggcaagcacgccctagggcgtgtggaagctggtgagcaggtgagggaagttgtccactctatcccccaccctgaataccggagaagccccacccacctgaaccacgaccatgacatcatgcttctggagctgcagtccccggtccagctcacaggctacatccaaaccctgcccctttcccacaacaaccgcctaacccctggcaccacctgtcgggtgtctggctggggcaccaccaccagcccccagggtatgcacccacacaggtggcctgaggccccataggagtggctggggaaacaggggcagagatgggagggaaggtctgagtgaattaccccaaaactctacaatgtgccaacatccaacttcgctcagatgaggagtgtcgtcaagtctacccaggaaagatcactgacaacatgttgtgtgccggcacaaaagagggtggcaaagactcctgtgagggtgactctgggggccccctggtctgtaacagaacactgtatggcatcgtctcctggggagacttcccatgtgggcaacctgaccggcctggtgtctacacccgtgtctcaagatacgtcctgtggatccgtgaaacaatccgaaaatatgaaacccagcagcaaaaatggttgaagggcccacaataaaagttgagaaatgtaccggcttccatcctgtcaccatgacttcctcacatggtctgcttagcccttctctgctccttattcccagtgttccatttgaaccagtgatccatgtcctgaaaaatgctcaatctcagctaacattccatgtttcagaagcattcaggcactgccaggcttgcagtctcccagatgttgcatccctgaaacatctcaacaacctgaatgtcccaacccagacaatggcccaggtctctcaacttcatcagtgtggcttctatgagcccagatcaccacctgaacgttctgtctgtggcacattcttaaatatttccatcagcccatctcaacaatatatgtcctataaatggaccatccttgaca

SEQ ID NO: 144933 - DNA, 615 bp, Homo sapiens
  Payload ID: 8643
  Gene Symbol: KLK13
  Gene Name: kallikrein-related peptidase 13
  ENST ID: ENST00000595547
  CDS Start-End: 1-615
atgtggcccctggccctagtgatcgcctccctgaccttggccttgtcaggaggtgtctcccaggagtcttccaaggttctcaacaccaatgggaccagtgggtttctcccaggtggctacacctgcttcccccactctcagccctggcaggctgccctactagtgcaagggcggctactctgtgggggagtcctggtccaccccaaatgggtcctcactgccgcacactgtctaaaggaggggctcaaagtttacctaggcaagcacgccctagggcgtgtggaagctgtgaattaccccaaaactctacaatgtgccaacatccaacttcgctcagatgaggagtgtcgtcaagtctacccaggaaagatcactgacaacatgttgtgtgccggcacaaaagagggtggcaaagactcctgtgagggtgactctgggggccccctggtctgtaacagaacactgtatggcatcgtctcctggggagacttcccatgtgggcaacctgaccggcctggtgtctacacccgtgtctcaagatacgtcctgtggatccgtgaaacaatccgaaaatatgaaacccagcagcaaaaatggttgaagggcccacaataa

SEQ ID NO: 144934 - DNA, 927 bp, Homo sapiens
  Payload ID: 8643
  Gene Symbol: KLK13
  Gene Name: kallikrein-related peptidase 13
  Uniprot ID: Q9UKR3
  ENST ID: ENST00000595793
  CDS Start-End: 44-877
tcaggccccgcccgccctgccctcccctcccgatcccggagccatgtggcccctggccctagtgatcgcctccctgaccttggccttgtcaggaggtgtctcccaggagtcttccaaggttctcaacaccaatgggaccagtgggtttctcccaggtggctacacctgcttcccccactctcagccctggcaggctgccctactagtgcaagggcggctactctgtgggggagtcctggtccaccccaaatgggtcctcactgccgcacactgtctaaaggaggggctcaaagtttacctaggcaagcacgccctagggcgtgtggaagctggtgagcaggtgagggaagttgtccactctatcccccaccctgaataccggagaagccccacccacctgaaccacgaccatgacatcatgcttctggagctgcagtccccggtccagctcacaggctacatccaaaccctgcccctttcccacaacaaccgcctaacccctggcaccacctgtcgggtgtctggctggggcaccaccaccagcccccaggtgaattaccccaaaactctacaatgtgccaacatccaacttcgctcagatgaggagtgtcgtcaagtctacccaggaaagatcactgacaacatgttgtgtgccggcacaaaagagggtggcaaagactcctgtgagggtgactctgggggccccctggtctgtaacagaacactgtatggcatcgtctcctggggagacttcccatgtgggcaacctgaccggcctggtgtctacacccgtgtctcaagatacgtcctgtggatccgtgaaacaatccgaaaatatgaaacccagcagcaaaaatggttgaagggcccacaataaaagttgagaaatgtaccggcttccatcctgtcaccatgacttcctcacat

SEQ ID NO: 144935 - DNA, 1530 bp, Homo sapiens
  Payload ID: 8643
  Gene Symbol: KLK13
  Gene Name: kallikrein-related peptidase 13
  ENST ID: ENST00000601975
  CDS Start-End: 232-528
cagctcagagctcttcctgcttgtccctgggtgacctggtttcccggctgaggttggccctccgaccccagacccttcacctcccaaaataccctcgcagcagcccctcccgcgttcaaggcttcctgtcctctctggaaagctgaaagacatgggttcgcgtcctgacgctgccgctttgagccagtagcctagcagctgctttgtgcctaaattgttttcatctggaaaatgggcttaatctataagtgcttaccagagaaggtcactgtgaatattgaaacgaggtgtctcccaggagtcttccaaggttctcaacaccaatgggaccagtgggtttctcccaggtggctacacctgcttcccccactctcagccctggcaggctgccctactagtgcaagggcggctactctgtgggggagtcctggtccaccccaaatgggtcctcactgccgcacactgtctaaaggaggggctcaaagtttacctaggcaagcacgccctagggcgtgtggaagctggtgagcaggtgagggaagttgtccactctatcccccaccctgaataccggagaagccccacccacctgaaccacgaccatgacatcatgcttctggagctgcagtccccggtccagctcacaggctacatccaaaccctgcccctttcccacaacaaccgcctaacccctggcaccacctgtcgggtgtctggctggggcaccaccaccagcccccagggtatgcacccacacaggtggcctgaggccccataggagtggctggggaaacaggggcagagatgggagggaaggtctgagtgaattaccccaaaactctacaatgtgccaacatccaacttcgctcagatgaggagtgtcgtcaagtctacccaggaaagatcactgacaacatgttgtgtgccggcacaaaagagggtggcaaagactcctgtgagggtgactctgggggccccctggtctgtaacagaacactgtatggcatcgtctcctggggagacttcccatgtgggcaacctgaccggcctggtgtctacacccgtgtctcaagatacgtcctgtggatccgtgaaacaatccgaaaatatgaaacccagcagcaaaaatggttgaagggcccacaataaaagttgagaaatgtaccggcttccatcctgtcaccatgacttcctcacatggtctgcttagcccttctctgctccttattcccagtgttccatttgaaccagtgatccatgtcctgaaaaatgctcaatctcagctaacattccatgtttcagaagcattcaggcactgccaggcttgcagtctcccagatgttgcatccctgaaacatctcaacaacctgaatgtcccaacccagacaatggcccaggtctctcaacttcatcagtgtggcttctatgagcccagatcaccacctgaacgttctgtctgtggcacattcttaaatatttccatcagcccatctcaacaatatatgtcctataaatggaccatccttgaca

SEQ ID NO: 144936 - DNA, 737 bp, Homo sapiens
  Payload ID: 8643
  Gene Symbol: KLK13
  Gene Name: kallikrein-related peptidase 13
  ENST ID: ENST00000596955
  CDS Start-End: 48-590
ctcctcaggccccgcccgccctgccctcccctcccgatcccggagccatgtggcccctggccctagtgatcgcctccctgaccttggccttgtcaggaggtgtctcccaggagtcttccaaggttctcaacaccaatgggaccagtgggtttctcccaggtggctacacctgcttcccccactctcagccctggcaggctgccctactagtgcaagggcggctactctgtgggggagtcctggtccaccccaaatgggtcctcactgccgcacactgtctaaaggaggggctcaaagtttacctaggcaagcacgccctagggcgtgtggaagctggtgagcaggtgagggaagttgtccactctatcccccaccctgaataccggagaagccccacccacctgaaccacgaccatgacatcatgcttctggagctgcagtccccggtccagctcacaggctacatccaaaccctgcccctttcccacaacaaccgcctaacccctggcaccacctgtcgggtgtctggctggggcaccaccaccagcccccagggtatgcacccacacaggtggcctgaggccccataggagtggctggggaaacaggggcagagatgggagggaaggtctgaggtaggttcctttatatataaaaatataaataagtaaataaatatatatatttaaagttagctgtatcctttatataaatataaattcatgaatatataaaaa

SEQ ID NO: 144937 - DNA, 1323 bp, Homo sapiens
  Payload ID: 8643
  Gene Symbol: KLK13
  Gene Name: kallikrein-related peptidase 13
  ENST ID: ENST00000602090
  CDS Start-End: 44-325
tcaggccccgcccgccctgccctcccctcccgatcccggagccatgtggcccctggccctagtgatcgcctccctgaccttggccttgtcaggaggtgaagacttcaaggagccaagccaggggcctagagatgtaatggcggcttcccgaccagaggccttcccaaagggcttgacccttgagccaagacctgaaaaaggagggatctgtgggtgcctggcacctggcaccatccttggcctgaaggtggggtggcttttctcctctggcgacactccctggattcatgcccgtgccactcctgagtgccacaccctaggctaggagacccacacgctacgccttgtggagtcctcaacaacctggcgaggtgtctcccaggagtcttccaaggttctcaacaccaatgggaccagtgggtttctcccaggtggctacacctgcttcccccactctcagccctggcaggctgccctactagtgcaagggcggctactctgtgggggagtcctggtccaccccaaatgggtcctcactgccgcacactgtctaaaggaggggctcaaagtttacctaggcaagcacgccctagggcgtgtggaagctggtgagcagtgaattaccccaaaactctacaatgtgccaacatccaacttcgctcagatgaggagtgtcgtcaagtctacccaggaaagatcactgacaacatgttgtgtgccggcacaaaagagggtggcaaagactcctgtgagggtgactctgggggccccctggtctgtaacagaacactgtatggcatcgtctcctggggagacttcccatgtgggcaacctgaccggcctggtgtctacacccgtgtctcaagatacgtcctgtggatccgtgaaacaatccgaaaatatgaaacccagcagcaaaaatggttgaagggcccacaataaaagttgagaaatgtaccggcttccatcctgtcaccatgacttcctcacatggtctgcttagcccttctctgctccttattcccagtgttccatttgaaccagtgatccatgtcctgaaaaatgctcaatctcagctaacattccatgtttcagaagcattcaggcactgccaggcttgcagtctcccagatgttgcatccctgaaacatctcaacaacctgaatgtcccaacccagacaatggcccaggtctctcaacttcatcagtgtggcttctatgagcccagatcaccacctgaacgttctgtctgtggcacattcttaaatatttccatcagcccatctcaacaatatatgtcctataaatggaccatccttgaca

SEQ ID NO: 144938 - DNA, 1060 bp, Homo sapiens
  Payload ID: 8644
  Gene Symbol: KLK14
  Gene Name: kallikrein-related peptidase 14
  Uniprot ID: Q9P0G3
  ENST ID: ENST00000156499
  CDS Start-End: 220-1023
gcacctagcagatcccaagctggggaatgccagttctggcaccaaccttcctgctccctgctggggcctctgctcccccatctctcaggagtcgaaagtgagaaagcaagacatcaaggagggacctgtgccctgctccacatcctcccacctgccgcccgcagagcctgcaggccccgcccccctcgtctctggtccctacctctctgctgtgtcttcatgtccctgagggtcttgggctctgggacctggccctcagcccctaaaatgttcctcctgctgacagcacttcaagtcctggctatagccatgacacagagccaagaggatgagaacaagataattggtggccatacgtgcacccggagctcccagccgtggcaggcggccctgctggcgggtcccaggcgccgcttcctctgcggaggcgccctgctttcaggccagtgggtcatcactgctgctcactgcggccgcccgatccttcaggttgccctgggcaagcacaacctgaggaggtgggaggccacccagcaggtgctgcgcgtggttcgtcaggtgacgcaccccaactacaactcccggacccacgacaacgacctcatgctgctgcagctacagcagcccgcacggatcgggagggcagtcaggcccattgaggtcacccaggcctgtgccagccccgggacctcctgccgagtgtcaggctggggaactatatccagccccatcgccaggtaccccgcctctctgcaatgcgtgaacatcaacatctccccggatgaggtgtgccagaaggcctatcctagaaccatcacgcctggcatggtctgtgcaggagttccccagggcgggaaggactcttgtcagggtgactctgggggacccctggtgtgcagaggacagctccagggcctcgtgtcttggggaatggagcgctgcgccctgcctggctaccccggtgtctacaccaacctgtgcaagtacagaagctggattgaggaaacgatgcgggacaaatgatggtcttcacgagcagttgcttcaggcgttttctccc

SEQ ID NO: 144939 - DNA, 1133 bp, Homo sapiens
  Payload ID: 8644
  Gene Symbol: KLK14
  Gene Name: kallikrein-related peptidase 14
  Uniprot ID: Q9P0G3
  ENST ID: ENST00000391802
  CDS Start-End: 220-1023
gcacctagcagatcccaagctggggaatgccagttctggcaccaaccttcctgctccctgctggggcctctgctcccccatctctcaggagtcgaaagtgagaaagcaagacatcaaggagggacctgtgccctgctccacatcctcccacctgccgcccgcagagcctgcaggccccgcccccctcgtctctggtccctacctctctgctgtgtcttcatgtccctgagggtcttgggctctgggacctggccctcagcccctaaaatgttcctcctgctgacagcacttcaagtcctggctatagccatgacacagagccaagaggatgagaacaagataattggtggccatacgtgcacccggagctcccagccgtggcaggcggccctgctggcgggtcccaggcgccgcttcctctgcggaggcgccctgctttcaggccagtgggtcatcactgctgctcactgcggccgcccgatccttcaggttgccctgggcaagcacaacctgaggaggtgggaggccacccagcaggtgctgcgcgtggttcgtcaggtgacgcaccccaactacaactcccggacccacgacaacgacctcatgctgctgcagctacagcagcccgcacggatcgggagggcagtcaggcccattgaggtcacccaggcctgtgccagccccgggacctcctgccgagtgtcaggctggggaactatatccagccccatcgccaggtaccccgcctctctgcaatgcgtgaacatcaacatctccccggatgaggtgtgccagaaggcctatcctagaaccatcacgcctggcatggtctgtgcaggagttccccagggcgggaaggactcttgtcagggtgactctgggggacccctggtgtgcagaggacagctccagggcctcgtgtcttggggaatggagcgctgcgccctgcctggctaccccggtgtctacaccaacctgtgcaagtacagaagctggattgaggaaacgatgcgggacaaatgatggtcttcacggtgggatggacctcgtcagctgcccaggccctcctctctctactcaggacccaggagtccaggccccagcccctcctccctcagacccaggagtccagg

SEQ ID NO: 144940 - DNA, 1389 bp, Homo sapiens
  Payload ID: 8645
  Gene Symbol: KLK15
  Gene Name: kallikrein-related peptidase 15
  Uniprot ID: Q9H2R5
  ENST ID: ENST00000326856
  CDS Start-End: 131-898
gttactcctcgaaaaactctacgaggggatcctctgattttaaggataagaaactgagacacagagaagaaaaaactcttaccagggtctcccaaaataactgcagccgaaccctggtccctcctccacaatgtggcttctcctcactctctccttcctgctggcatccacagcccaggatggtgacaagttgctggaaggtgacgagtgtgcaccccactcccagccatggcaagtggctctctacgagcgtggacgctttaactgtggcgcttccctcatctccccacactgggtgctgtctgcggcccactgccaaagccgcttcatgagagtgcgcctgggagagcacaacctgcgcaagcgcgatggcccagagcaactacggaccacgtctcgggtcattccacacccgcgctacgaagcgcgcagccaccgcaacgacatcatgttgctgcgcctagtccagcccgcacgcctgaacccccaggtgcgccccgcggtgctacccacgcgttgcccccacccgggggaggcctgtgtggtgtctggctggggcctggtgtcccacaacgagcctgggaccgctgggagcccccggtcacaagtgagtctcccagatacgttgcattgtgccaacatcagcattatctcggacacatcttgtgacaagagctacccagggcgcctgacaaacaccatggtgtgtgcaggcgcggagggcagaggcgcagaatcctgtgagggtgactctgggggacccctggtctgtgggggcatcctgcagggcattgtgtcctggggtgacgtcccttgtgacaacaccaccaagcctggtgtctataccaaagtctgccactacttggagtggatcagggaaaccatgaagaggaactgactattctagcctatctcctgtgcccctgactgagcagaagcccccacagctggccagcagccccgcctgacatggaacagaacggagccatcccccaagaccctgtccaaggcccagatgttagccaaggacttgtcccacctgaggacaaagctggcgctcaaggtcacctgtttaatgccaagataacaaagcgctgatccaagttgctctgtaggaatttctgtgacttttttctggggtcaaagagaaaccccgagacactgtacactgttccttttcacccaccaccccgatccctaggtgaggagaagcggcttgaagcagggctccattcattcaacacacatgaccacccgtgtgatcttgaacaagaggcccaatctcacttcgccttggtttccttatctgtaaaatgagaccatcttattgctgacttcaaagggctgttgtgaggattaaatgagatgattcgtctgaactgattaaaa

SEQ ID NO: 144941 - DNA, 711 bp, Homo sapiens
  Payload ID: 8645
  Gene Symbol: KLK15
  Gene Name: kallikrein-related peptidase 15
  ENST ID: ENST00000602114
  CDS Start-End: 22-384
aaccctggtccctcctccacaatgtggcttctcctcactctctccttcctgctggcatccacagcccaggatggtgacaagttgctggaaggtgacgagtgtgcaccccactcccagccatggcaagtggctctctacgagcgtggacgctttaactgtggcgcttccctcatctccccacactgggtgctgtctgcggcccactgccaaagccgcttcatgagagtgcgcctgggagagcacaacctgcgcaagcgcgatggcccagagcaactacggaccacgtctcgggtcattccacacccgcgctacgaagcgcgcagccaccgcaacgacatcatgttgctgcgcctagtccagcccgcacgcctgaacccccagtgagtctcccagatacgttgcattgtgccaacatcagcattatctcggacacatcttgtgacaagagctacccagggcgcctgacaaacaccatggtgtgtgcaggcgcggagggcagaggcgcagaatcctgtgagggtgactctgggggacccctggtctgtgggggcatcctgcagggcattgtgtcctggggtgacgtcccttgtgacaacaccaccaagcctggtgtctataccaaagtctgccactacttggagtggatcagggaaaccatgaagaggaactgactattctagcctatctcctgtgcccctgactgagcagaag

SEQ ID NO: 144942 - DNA, 855 bp, Homo sapiens
  Payload ID: 8645
  Gene Symbol: KLK15
  Gene Name: kallikrein-related peptidase 15
  Uniprot ID: Q9H2R5
  ENST ID: ENST00000598239
  CDS Start-End: 32-802
actgcagccgaaccctggtccctcctccacaatgtggcttctcctcactctctccttcctgctggcatccacagcagcccaggatggtgacaagttgctggaaggtgacgagtgtgcaccccactcccagccatggcaagtggctctctacgagcgtggacgctttaactgtggcgcttccctcatctccccacactgggtgctgtctgcggcccactgccaaagccgcttcatgagagtgcgcctgggagagcacaacctgcgcaagcgcgatggcccagagcaactacggaccacgtctcgggtcattccacacccgcgctacgaagcgcgcagccaccgcaacgacatcatgttgctgcgcctagtccagcccgcacgcctgaacccccaggtgcgccccgcggtgctacccacgcgttgcccccacccgggggaggcctgtgtggtgtctggctggggcctggtgtcccacaacgagcctgggaccgctgggagcccccggtcacaagtgagtctcccagatacgttgcattgtgccaacatcagcattatctcggacacatcttgtgacaagagctacccagggcgcctgacaaacaccatggtgtgtgcaggcgcggagggcagaggcgcagaatcctgtgagggtgactctgggggacccctggtctgtgggggcatcctgcagggcattgtgtcctggggtgacgtcccttgtgacaacaccaccaagcctggtgtctataccaaagtctgccactacttggagtggatcagggaaaccatgaagaggaactgactattctagcctatctcctgtgcccctgactgagcagaagcccccacagctgg

SEQ ID NO: 144943 - DNA, 692 bp, Homo sapiens
  Payload ID: 8645
  Gene Symbol: KLK15
  Gene Name: kallikrein-related peptidase 15
  ENST ID: ENST00000596931
  CDS Start-End: 22-504
aaccctggtccctcctccacaatgtggcttctcctcactctctccttcctgctggcatccacagcccaggatggtgacaagttgctggaaggtgacgagtgtgcaccccactcccagccatggcaagtggctctctacgagcgtggacgctttaactgtggcgcttccctcatctccccacactgggtgctgtctgcggcccactgccaaagccgcttcatgagagtgcgcctgggagagcacaacctgcgcaagcgcgatggcccagagcaactacggaccacgtctcgggtcattccacacccgcgctacgaagcgcgcagccaccgcaacgacatcatgttgctgcgcctagtccagcccgcacgcctgaacccccaggtgcgccccgcggtgctacccacgcgttgcccccacccgggggaggcctgtgtggtgtctggctggggcctggtgtcccacaacgagcctgggaccgctgggagcccccggtcacaagggtgactctgggggacccctggtctgtgggggcatcctgcagggcattgtgtcctggggtgacgtcccttgtgacaacaccaccaagcctggtgtctataccaaagtctgccactacttggagtggatcagggaaaccatgaagaggaactgactattctagcctatctcctgtgcccctgactgagcagaag

SEQ ID NO: 144944 - DNA, 374 bp, Homo sapiens
  Payload ID: 8645
  Gene Symbol: KLK15
  Gene Name: kallikrein-related peptidase 15
  ENST ID: ENST00000598673
  CDS Start-End: 245-374
gggcagtgctgaggtcacagaaagaacctgacctgagccccatcttcaagacccccagatggagaaaagaacaggccagacctcagcaacccaggatggtgacaagttgctggaaggtgacgagtgtgcaccccactcccagccatggcaagtggctctctacgagcgtggacgctttaactgtggcgcttccctcatctccccacactgggtgctgtctgcggcccactgccaaagccgcttcatgagagtgcgcctgggagagcacaacctgcgcaagcgcgatggcccagagcaactacggaccacgtctcgggtcattccacacccgcgctacgaagcgcgcagccaccgcaacgacatcatgttgctgc

SEQ ID NO: 144945 - DNA, 3019 bp, Homo sapiens
  Payload ID: 8646
  Gene Symbol: KLK2
  Gene Name: kallikrein-related peptidase 2
  Uniprot ID: P20151
  ENST ID: ENST00000325321
  CDS Start-End: 226-1011
gatctagtatgtgtggaacagcaagtgctggctctccctccccttccacagctctgggtgtgggagggggttgtccagcctccagcagcatggggagggccttggtcagcatctaggtgccaacagggcaagggcggggtcctggagaatgaaggctttatagggctcctcagggaggccccccagccccaaactcaccacctggccgtggacacctgtgtcagcatgtgggacctggttctctccatcgccttgtctgtggggtgcactggtgccgtgcccctcatccagtctcggattgtgggaggctgggagtgtgagaagcattcccaaccctggcaggtggctgtgtacagtcatggatgggcacactgtgggggtgtcctggtgcacccccagtgggtgctcacagctgcccattgcctaaagaagaatagccaggtctggctgggtcggcacaacctgtttgagcctgaagacacaggccagagggtccctgtcagccacagcttcccacacccgctctacaatatgagccttctgaagcatcaaagccttagaccagatgaagactccagccatgacctcatgctgctccgcctgtcagagcctgccaagatcacagatgttgtgaaggtcctgggcctgcccacccaggagccagcactggggaccacctgctacgcctcaggctggggcagcatcgaaccagaggagttcttgcgccccaggagtcttcagtgtgtgagcctccatctcctgtccaatgacatgtgtgctagagcttactctgagaaggtgacagagttcatgttgtgtgctgggctctggacaggtggtaaagacacttgtgggggtgattctgggggtccacttgtctgtaatggtgtgcttcaaggtatcacatcatggggccctgagccatgtgccctgcctgaaaagcctgctgtgtacaccaaggtggtgcattaccggaagtggatcaaggacaccatcgcagccaacccctgagtgcccctgtcccacccctacctctagtaaatttaagtccacctcacgttctggcatcacttggcctttctggatgctggacacctgaagcttggaactcacctggccgaagctcgagcctcctgagtcctactgacctgtgctttctggtgtggagtccagggctgctaggaaaaggaatgggcagacacaggtgtatgccaatgtttctgaaatgggtataatttcgtcctctccttcggaacactggctgtctctgaagacttctcgctcagtttcagtgaggacacacacaaagacgtgggtgaccatgttgtttgtggggtgcagagatgggaggggtggggcccaccctggaagagtggacagtgacacaaggtggacactctctacagatcactgaggataagctggagccacaatgcatgaggcacacacacagcaaggatgacgctgtaaacatagcccacgctgtcctgggggcactgggaagcctagataaggccgtgagcagaaagaaggggaggatcctcctatgttgttgaaggagggactagggggagaaactgaaagctgattaattacaggaggtttgttcaggtcccccaaaccaccgtcagatttgatgatttcctagcaggacttacagaaataaagagctatcatgctgtggtttattatggtttgttacattgataggatacatactgaaatcagcaaacaaaacagatgtatagattagagtgtggagaaaacagaggaaaacttgcagttacgaagactggcaacttggctttactaagttttcagactggcaggaagtcaaacctattaggctgaggaccttgtggagtgtagctgatccagctgatagaggaactagccaggtgggggcctttccctttggatggggggcatatctgacagttattctctccaagtggagacttacggacagcatataattctccctgcaaggatgtatgataatatgtacaaagtaattccaactgaggaagctcacctgatccttagtgtccagggtttttactgggggtctgtaggacgagtatggagtacttgaataattgacctgaagtcctcagacctgaggttccctagagttcaaacagatacagcatggtccagagtcccagatgtacaaaaacagggattcatcacaaatcccatctttagcatgaagggtctggcatggcccaaggccccaagtatatcaaggcacttgggcagaacatgccaaggaatcaaatgtcatctcccaggagttattcaagggtgagccctttacttgggatgtacaggctttgagcagtgcagggctgctgagtcaaccttttattgtacaggggatgagggaaagggagaggatgaggaagcccccctggggatttggtttggtcttgtgatcaggtggtctatggggctatccctacaaagaagaatccagaaataggggcacattgaggaatgatactgagcccaaagagcattcaatcattgttttatttgccttcttttcacaccattggtgagggagggattaccaccctggggttatgaagatggttgaacaccccacacatagcaccggagatatgagatcaacagtttcttagccatagagattcacagcccagagcaggaggacgctgcacaccatgcaggatgacatgggggatgcgctcgggattggtgtgaagaagcaaggactgttagaggcaggctttatagtaacaagacggtggggcaaactctgatttccgtgggggaatgtcatggtcttgctttactaagttttgagactggcaggtagtgaaactcattaggctgagaaccttgtggaatgcagctgacccagctgatagaggaagtagccaggtgggagcctttcccagtgggtgtgggacatatctggcaagattttgtggcactcctggttacagatactggggcagcaaataaaactgaatcttgttttcagacctta

SEQ ID NO: 144946 - DNA, 2847 bp, Homo sapiens
  Payload ID: 8646
  Gene Symbol: KLK2
  Gene Name: kallikrein-related peptidase 2
  Uniprot ID: P20151
  ENST ID: ENST00000358049
  CDS Start-End: 17-688
ggacacctgtgtcagcatgtgggacctggttctctccatcgccttgtctgtggggtgcactggtgccgtgcccctcatccagtctcggattgtgggaggctgggagtgtgagaagcattcccaaccctggcaggtggctgtgtacagtcatggatgggcacactgtgggggtgtcctggtgcacccccagtgggtgctcacagctgcccattgcctaaagaagaatagccaggtctggctgggtcggcacaacctgtttgagcctgaagacacaggccagagggtccctgtcagccacagcttcccacacccgctctacaatatgagccttctgaagcatcaaagccttagaccagatgaagactccagccatgacctcatgctgctccgcctgtcagagcctgccaagatcacagatgttgtgaaggtcctgggcctgcccacccaggagccagcactggggaccacctgctacgcctcaggctggggcagcatcgaaccagaggagttcttgcgccccaggagtcttcagtgtgtgagcctccatctcctgtccaatgacatgtgtgctagagcttactctgagaaggtgacagagttcatgttgtgtgctgggctctggacaggtggtaaagacacttgtggggtgagtcatccctactcccaacatctggaggggaaagggtgattctgggggtccacttgtctgtaatggtgtgcttcaaggtatcacatcatggggccctgagccatgtgccctgcctgaaaagcctgctgtgtacaccaaggtggtgcattaccggaagtggatcaaggacaccatcgcagccaacccctgagtgcccctgtcccacccctacctctagtaaatttaagtccacctcacgttctggcatcacttggcctttctggatgctggacacctgaagcttggaactcacctggccgaagctcgagcctcctgagtcctactgacctgtgctttctggtgtggagtccagggctgctaggaaaaggaatgggcagacacaggtgtatgccaatgtttctgaaatgggtataatttcgtcctctccttcggaacactggctgtctctgaagacttctcgctcagtttcagtgaggacacacacaaagacgtgggtgaccatgttgtttgtggggtgcagagatgggaggggtggggcccaccctggaagagtggacagtgacacaaggtggacactctctacagatcactgaggataagctggagccacaatgcatgaggcacacacacagcaaggatgacgctgtaaacatagcccacgctgtcctgggggcactgggaagcctagataaggccgtgagcagaaagaaggggaggatcctcctatgttgttgaaggagggactagggggagaaactgaaagctgattaattacaggaggtttgttcaggtcccccaaaccaccgtcagatttgatgatttcctagcaggacttacagaaataaagagctatcatgctgtggtttattatggtttgttacattgataggatacatactgaaatcagcaaacaaaacagatgtatagattagagtgtggagaaaacagaggaaaacttgcagttacgaagactggcaacttggctttactaagttttcagactggcaggaagtcaaacctattaggctgaggaccttgtggagtgtagctgatccagctgatagaggaactagccaggtgggggcctttccctttggatggggggcatatctgacagttattctctccaagtggagacttacggacagcatataattctccctgcaaggatgtatgataatatgtacaaagtaattccaactgaggaagctcacctgatccttagtgtccagggtttttactgggggtctgtaggacgagtatggagtacttgaataattgacctgaagtcctcagacctgaggttccctagagttcaaacagatacagcatggtccagagtcccagatgtacaaaaacagggattcatcacaaatcccatctttagcatgaagggtctggcatggcccaaggccccaagtatatcaaggcacttgggcagaacatgccaaggaatcaaatgtcatctcccaggagttattcaagggtgagccctttacttgggatgtacaggctttgagcagtgcagggctgctgagtcaaccttttattgtacaggggatgagggaaagggagaggatgaggaagcccccctggggatttggtttggtcttgtgatcaggtggtctatggggctatccctacaaagaagaatccagaaataggggcacattgaggaatgatactgagcccaaagagcattcaatcattgttttatttgccttcttttcacaccattggtgagggagggattaccaccctggggttatgaagatggttgaacaccccacacatagcaccggagatatgagatcaacagtttcttagccatagagattcacagcccagagcaggaggacgctgcacaccatgcaggatgacatgggggatgcgctcgggattggtgtgaagaagcaaggactgttagaggcaggctttatagtaacaagacggtggggcaaactctgatttccgtgggggaatgtcatggtcttgctttactaagttttgagactggcaggtagtgaaactcattaggctgagaaccttgtggaatgcagctgacccagctgatagaggaagtagccaggtgggagcctttcccagtgggtgtgggacatatctggcaagattttgtggcactcctggttacagatactggggcagcaaataaaactgaatcttgttttcagacctta

SEQ ID NO: 144947 - DNA, 2674 bp, Homo sapiens
  Payload ID: 8646
  Gene Symbol: KLK2
  Gene Name: kallikrein-related peptidase 2
  Uniprot ID: P20151
  ENST ID: ENST00000391810
  CDS Start-End: 188-667
agccccaaactcaccacctggccgtggacacctgtgtcagcatgtgggacctggttctctccatcgccttgtctgtggggtgcactggaatagccaggtctggctgggtcggcacaacctgtttgagcctgaagacacaggccagagggtccctgtcagccacagcttcccacacccgctctacaatatgagccttctgaagcatcaaagccttagaccagatgaagactccagccatgacctcatgctgctccgcctgtcagagcctgccaagatcacagatgttgtgaaggtcctgggcctgcccacccaggagccagcactggggaccacctgctacgcctcaggctggggcagcatcgaaccagaggagttcttgcgccccaggagtcttcagtgtgtgagcctccatctcctgtccaatgacatgtgtgctagagcttactctgagaaggtgacagagttcatgttgtgtgctgggctctggacaggtggtaaagacacttgtgggggtgattctgggggtccacttgtctgtaatggtgtgcttcaaggtatcacatcatggggccctgagccatgtgccctgcctgaaaagcctgctgtgtacaccaaggtggtgcattaccggaagtggatcaaggacaccatcgcagccaacccctgagtgcccctgtcccacccctacctctagtaaatttaagtccacctcacgttctggcatcacttggcctttctggatgctggacacctgaagcttggaactcacctggccgaagctcgagcctcctgagtcctactgacctgtgctttctggtgtggagtccagggctgctaggaaaaggaatgggcagacacaggtgtatgccaatgtttctgaaatgggtataatttcgtcctctccttcggaacactggctgtctctgaagacttctcgctcagtttcagtgaggacacacacaaagacgtgggtgaccatgttgtttgtggggtgcagagatgggaggggtggggcccaccctggaagagtggacagtgacacaaggtggacactctctacagatcactgaggataagctggagccacaatgcatgaggcacacacacagcaaggatgacgctgtaaacatagcccacgctgtcctgggggcactgggaagcctagataaggccgtgagcagaaagaaggggaggatcctcctatgttgttgaaggagggactagggggagaaactgaaagctgattaattacaggaggtttgttcaggtcccccaaaccaccgtcagatttgatgatttcctagcaggacttacagaaataaagagctatcatgctgtggtttattatggtttgttacattgataggatacatactgaaatcagcaaacaaaacagatgtatagattagagtgtggagaaaacagaggaaaacttgcagttacgaagactggcaacttggctttactaagttttcagactggcaggaagtcaaacctattaggctgaggaccttgtggagtgtagctgatccagctgatagaggaactagccaggtgggggcctttccctttggatggggggcatatctgacagttattctctccaagtggagacttacggacagcatataattctccctgcaaggatgtatgataatatgtacaaagtaattccaactgaggaagctcacctgatccttagtgtccagggtttttactgggggtctgtaggacgagtatggagtacttgaataattgacctgaagtcctcagacctgaggttccctagagttcaaacagatacagcatggtccagagtcccagatgtacaaaaacagggattcatcacaaatcccatctttagcatgaagggtctggcatggcccaaggccccaagtatatcaaggcacttgggcagaacatgccaaggaatcaaatgtcatctcccaggagttattcaagggtgagccctttacttgggatgtacaggctttgagcagtgcagggctgctgagtcaaccttttattgtacaggggatgagggaaagggagaggatgaggaagcccccctggggatttggtttggtcttgtgatcaggtggtctatggggctatccctacaaagaagaatccagaaataggggcacattgaggaatgatactgagcccaaagagcattcaatcattgttttatttgccttcttttcacaccattggtgagggagggattaccaccctggggttatgaagatggttgaacaccccacacatagcaccggagatatgagatcaacagtttcttagccatagagattcacagcccagagcaggaggacgctgcacaccatgcaggatgacatgggggatgcgctcgggattggtgtgaagaagcaaggactgttagaggcaggctttatagtaacaagacggtggggcaaactctgatttccgtgggggaatgtcatggtcttgctttactaagttttgagactggcaggtagtgaaactcattaggctgagaaccttgtggaatgcagctgacccagctgatagaggaagtagccaggtgggagcctttcccagtgggtgtgggacatatctggcaagattttgtggcactcctggttacagatactggggcagcaaataaaactgaatcttgttttcagacctt

SEQ ID NO: 144948 - DNA, 543 bp, Homo sapiens
  Payload ID: 8646
  Gene Symbol: KLK2
  Gene Name: kallikrein-related peptidase 2
  ENST ID: ENST00000600690
  CDS Start-End: 177-543
agctctgggtgtgggagggggttgtccagcctccagcagcatggggagggccttggtcagcatctaggtgccaacagggcaagggcggggtcctggagaatgaaggctttatagggctcctcagggaggccccccagccccaaactcaccacctggccgtggacacctgtgtcagcatgtgggacctggttctctccatcgccttgtctgtggggtgcactggtgccgtgcccctcatccagtctcggattgtgggaggctgggagtgtgagaagcattcccaaccctggcaggtggctgtgtacagtcatggatgggcacactgtgggggtgtcctggtgcacccccagtgggtgctcacagctgcccattgcctaaagaaagcctgccaagatcacagatgttgtgaaggtcctgggcctgcccacccaggagccagcactggggaccacctgctacgcctcaggctggggcagcatcgaaccagaggagttcttgcgccccaggagtcttcagtgtgtgagcctccatctcctgtccaat

SEQ ID NO: 144949 - DNA, 744 bp, Homo sapiens
  Payload ID: 8646
  Gene Symbol: KLK2
  Gene Name: kallikrein-related peptidase 2
  ENST ID: ENST00000595316
  CDS Start-End: 36-185
aaactcaccacctggccgtggacacctgtgtcagcatgtgggacctggttctctccatcgccttgtctgtggggtgcactggaatagccaggtctggctgggtcggcacaacctgtttgagcctgaagacacaggccagagggtccctgtcagccacagcttcccacacccgctctacaatatgagccttctgaagcatcaaagccttagaccagatgaagactccagccatgacctcatgctgctccgcctgtcagagcctgccaagatcacagatgttgtgaaggtcctgggcctgcccacccaggagccagcactggggaccacctgctacgcctcaggctggggcagcatcgaaccagaggagtgagtcttcagtgtgtgagcctccatctcctgtccaatgacatgtgtgctagagcttactctgagaaggtgacagagttcatgttgtgtgctgggctctggacaggtggtaaagacacttgtggggtgagtcatccctactcccaacatctggaggggaaaggtgagtgaagaccctaattctgggctgcaatctgaaagctaaccagacatctgcctcccctgctccccagctatagccacgccccctccccatgcctcatctgccgccctccttcccccttccctgactccctcaacacaagaggtgattctcacagcataattcacccattcctgtgttgagcacatgcttactgggcacctgctacgtgacca

SEQ ID NO: 144950 - DNA, 721 bp, Homo sapiens
  Payload ID: 8646
  Gene Symbol: KLK2
  Gene Name: kallikrein-related peptidase 2
  ENST ID: ENST00000597727
  CDS Start-End: 39-188
cccaaactcaccacctggccgtggacacctgtgtcagcatgtgggacctggttctctccatcgccttgtctgtggggtgcactggaatagccaggtctggctgggtcggcacaacctgtttgagcctgaagacacaggccagagggtccctgtcagccacagcttcccacacccgctctacaatatgagccttctgaagcatcaaagccttagaccagatgaagactccagccatgacctcatgctgctccgcctgtcagagcctgccaagatcacagatgttgtgaaggtcctgggcctgcccacccaggagccagcactggggaccacctgctacgcctcaggctggggcagcatcgaaccagaggagttcttgcgccccaggagtcttcagtgtgtgagcctccatctcctgtccaatgacatgtgtgctagagcttactctgagaaggtgacagagttcatgttgtgtgctgggctctggacaggtggtaaagacacttgtggggtgagtcatccctactcccaacatctggaggggaaaggtgagtgaagaccctaattctgggctgcaatctgaaagctaaccagacatctgcctcccctgctccccagctatagccacgccccctccccatgcctcatctgccgccctccttcccccttccctgactccctcaacacaagaggtgattctcacagcataattcacccattcctg

SEQ ID NO: 144951 - DNA, 2834 bp, Homo sapiens
  Payload ID: 8646
  Gene Symbol: KLK2
  Gene Name: kallikrein-related peptidase 2
  Uniprot ID: P20151
  ENST ID: ENST00000597439
  CDS Start-End: 17-511
ggacacctgtgtcagcatgtgggacctggttctctccatcgccttgtctgtggggtgcactggtgccgtgcccctcatccagtctcggattgtgggaggctgggagtgtgagaagcattcccaaccctggcaggtggctgtgtacagtcatggatgggcacactgtgggggtgtcctggtgcacccccagtgggtgctcacagctgcccattgcctaaagaagaatagccaggtctggctgggtcggcacaacctgtttgagcctgaagacacaggccagagggtccctgtcagccacagcttcccacacccgctctacaatatgagccttctgaagcatcaaagccttagaccagatgaagactccagccatgacctcatgctgctccgcctgtcagagcctgccaagatcacagatgttgtgaaggtcctgggcctgcccacccaggagccagcactggggaccacctgctacgcctcaggctggggcagcatcgaaccagaggagtgagtcttcagtgtgtgagcctccatctcctgtccaatgacatgtgtgctagagcttactctgagaaggtgacagagttcatgttgtgtgctgggctctggacaggtggtaaagacacttgtggggtgagtcatccctactcccaacatctggaggggaaagggtgattctgggggtccacttgtctgtaatggtgtgcttcaaggtatcacatcatggggccctgagccatgtgccctgcctgaaaagcctgctgtgtacaccaaggtggtgcattaccggaagtggatcaaggacaccatcgcagccaacccctgagtgcccctgtcccacccctacctctagtaaatttaagtccacctcacgttctggcatcacttggcctttctggatgctggacacctgaagcttggaactcacctggccgaagctcgagcctcctgagtcctactgacctgtgctttctggtgtggagtccagggctgctaggaaaaggaatgggcagacacaggtgtatgccaatgtttctgaaatgggtataatttcgtcctctccttcggaacactggctgtctctgaagacttctcgctcagtttcagtgaggacacacacaaagacgtgggtgaccatgttgtttgtggggtgcagagatgggaggggtggggcccaccctggaagagtggacagtgacacaaggtggacactctctacagatcactgaggataagctggagccacaatgcatgaggcacacacacagcaaggatgacgctgtaaacatagcccacgctgtcctgggggcactgggaagcctagataaggccgtgagcagaaagaaggggaggatcctcctatgttgttgaaggagggactagggggagaaactgaaagctgattaattacaggaggtttgttcaggtcccccaaaccaccgtcagatttgatgatttcctagcaggacttacagaaataaagagctatcatgctgtggtttattatggtttgttacattgataggatacatactgaaatcagcaaacaaaacagatgtatagattagagtgtggagaaaacagaggaaaacttgcagttacgaagactggcaacttggctttactaagttttcagactggcaggaagtcaaacctattaggctgaggaccttgtggagtgtagctgatccagctgatagaggaactagccaggtgggggcctttccctttggatggggggcatatctgacagttattctctccaagtggagacttacggacagcatataattctccctgcaaggatgtatgataatatgtacaaagtaattccaactgaggaagctcacctgatccttagtgtccagggtttttactgggggtctgtaggacgagtatggagtacttgaataattgacctgaagtcctcagacctgaggttccctagagttcaaacagatacagcatggtccagagtcccagatgtacaaaaacagggattcatcacaaatcccatctttagcatgaagggtctggcatggcccaaggccccaagtatatcaaggcacttgggcagaacatgccaaggaatcaaatgtcatctcccaggagttattcaagggtgagccctttacttgggatgtacaggctttgagcagtgcagggctgctgagtcaaccttttattgtacaggggatgagggaaagggagaggatgaggaagcccccctggggatttggtttggtcttgtgatcaggtggtctatggggctatccctacaaagaagaatccagaaataggggcacattgaggaatgatactgagcccaaagagcattcaatcattgttttatttgccttcttttcacaccattggtgagggagggattaccaccctggggttatgaagatggttgaacaccccacacatagcaccggagatatgagatcaacagtttcttagccatagagattcacagcccagagcaggaggacgctgcacaccatgcaggatgacatgggggatgcgctcgggattggtgtgaagaagcaaggactgttagaggcaggctttatagtaacaagacggtggggcaaactctgatttccgtgggggaatgtcatggtcttgctttactaagttttgagactggcaggtagtgaaactcattaggctgagaaccttgtggaatgcagctgacccagctgatagaggaagtagccaggtgggagcctttcccagtgggtgtgggacatatctggcaagattttgtggcactcctggttacagatactggggcagcaaataaaactgaatcttgttttcagacctta

SEQ ID NO: 144952 - DNA, 420 bp, Homo sapiens
  Payload ID: 8646
  Gene Symbol: KLK2
  Gene Name: kallikrein-related peptidase 2
  ENST ID: ENST00000597911
  CDS Start-End: 1-155
ctgagaaggtgacagagttcatgttgtgtgctgggctctggacaggtggtaaagacacttgtgggcataattcacccattcctgtgttgagcacatgcttactgggcacctgctacgtgaccagcattgccgtagaccctgggaagcagcagtgaacagtcaggagctgtggatggtgctggacagaagaaggacagggcctggctcagggtgattctgggggtccacttgtctgtaatggtgtgcttcaaggtatcacatcatggggccctgagccatgtgccctgcctgaaaagcctgctgtgtacaccaaggtggtgcattaccggaagtggatcaaggacaccatcgcagccaacccctgagtgcccctgtcccacccctacctctagtaaatttaagtccacctcacgttctggc

SEQ ID NO: 144953 - DNA, 528 bp, Homo sapiens
  Payload ID: 8646
  Gene Symbol: KLK2
  Gene Name: kallikrein-related peptidase 2
  ENST ID: ENST00000599568
  CDS Start-End: 398-528
acaaaaagtagccaggcgtggtgctgcgcgcctgtaatcccaattactagggaggctgaggcaggagaatcgcttgaacccgggagggagaggttgcagtgagccgagatcgtgccactgcactccagcctgggtgacagagcaagactccatctcagaaaaaacaaacaaacaaacaaacaacaaaaaaaatcgaaaggaggggaagggagctggagagagaaagggggacgtggccctgagctgtgggccgggccacccgccactacagagccctcactccagccccagctgcaggaatagccaggtctggctgggtcggcacaacctgtttgagcctgaagacacaggccagagggtccctgtcagccacagcttcccacacccgctctacaatatgagccttctgaagcatcaaagccttagaccagatgaagactccagccatgacctcatgctgctccgcctgtcagagcctgccaagatcacagatgttgtgaaggtcctgggcctgcccacccaggagcc

SEQ ID NO: 144954 - DNA, 550 bp, Homo sapiens
  Payload ID: 8646
  Gene Symbol: KLK2
  Gene Name: kallikrein-related peptidase 2
  ENST ID: ENST00000595050
  CDS Start-End: 1-550
accagatgaagactccagccatgacctcatgctgctccgcctgtcagagcctgccaagatcacagatgttgtgaaggtcctgggcctgcccacccaggagccagcactggggaccacctgctacgcctcaggctggggcagcatcgaaccagaggagttcttgcgccccaggagtcttcagtgtgtgagcctccatctcctgtccaatgacatgtgtgctagagcttactctgagaaggtgacagagttcatgttgtgtgctgggctctggacaggtggtaaagacacttgtggggagtcaggagctgtggatggtgctggacagaagaaggacagggcctggctcagggtgattctgggggtccacttgtctgtaatggtgtgcttcaaggtatcacatcatggggccctgagccatgtgccctgcctgaaaagcctgctgtgtacaccaaggtggtgcattaccggaagtggatcaaggacaccatcgcagccaacccctgagtgcccctgtcccacccctacctctagtaaatttaagtccacctca

SEQ ID NO: 144955 - DNA, 1002 bp, Homo sapiens
  Payload ID: 8646
  Gene Symbol: KLK2
  Gene Name: kallikrein-related peptidase 2
  ENST ID: ENST00000594174
  CDS Start-End: 42-251
agccccaaactcaccacctggccgtggacacctgtgtcagcatgtgggacctggttctctccatcgccttgtctgtggggtgcactggtgccgtgcccctcatccagtctcggattgtgggaggctgggagtgtgagaagcattcccaaccctggcaggtggctgtgtacagtcatggatgggcacactgtgggggtgtcctggtgcacccccagtgggtgctcacagctgcccattgcctaaagaagtaagtaggaccctgggatctggggagggaatggctgtgtcccacaggaataacagcgggatgcttcccccagggtcacttctcaggaatagccaggtctggctgggtcggcacaacctgtttgagcctgaagacacaggccagagggtccctgtcagccacagcttcccacacccgctctacaatatgagccttctgaagcatcaaagccttagaccagatgaagactccagccatgacctcatgctgctccgcctgtcagagcctgccaagatcacagatgttgtgaaggtcctgggcctgcccacccaggagccagcactggggaccacctgctacgcctcaggctggggcagcatcgaaccagaggagttcttgcgccccaggagtcttcagtgtgtgagcctccatctcctgtccaatgacatgtgtgctagagcttactctgagaaggtgacagagttcatgttgtgtgctgggctctggacaggtggtaaagacacttgtgggggtgattctgggggtccacttgtctgtaatggtgtgcttcaaggtatcacatcatggggccctgagccatgtgccctgcctgaaaagcctgctgtgtacaccaaggtggtgcattaccggaagtggatcaaggacaccatcgcagccaacccctgagtgcccctgtcccacccctacctctagtaaatttaagtccacctcacgttctggcatcacttggcctttctggatgctggacacctgaa

SEQ ID NO: 144956 - DNA, 892 bp, Homo sapiens
  Payload ID: 8646
  Gene Symbol: KLK2
  Gene Name: kallikrein-related peptidase 2
  ENST ID: ENST00000599121
  CDS Start-End: 36-185
aaactcaccacctggccgtggacacctgtgtcagcatgtgggacctggttctctccatcgccttgtctgtggggtgcactggaatagccaggtctggctgggtcggcacaacctgtttgagcctgaagacacaggccagagggtccctgtcagccacagcttcccacacccgctctacaatatgagccttctgaagcatcaaagccttagaccagatgaagactccagccatgacctcatgctgctccgcctgtcagagcctgccaagatcacagatgttgtgaaggtcctgggcctgcccacccaggagccagcactggggaccacctgctacgcctcaggctggggcagcatcgaaccagaggagttcttgcgccccaggagtcttcagtgtgtgagcctccatctcctgtccaatgacatgtgtgctagagcttactctgagaaggtgacagagttcatgttgtgtgctgggctctggacaggtggtaaagacacttgtgggggtgattctgggggtccacttgtctgtaatggtgtgcttcaaggtatcacatcatggggccctgagccatgtgccctgcctgaaaagcctgctgtgtacaccaaggtggtgcattaccggaagtggatcaaggacaccatcgcagccaacccctgagtgcccctgtcccacccctacctctagtaaatttaagtccacctcacgttctggcatcacttggcctttctggatgctggacacctgaagcttggaactcacctggccgaagctcgagcctcctgagtcctactgacctgtgctttctggtgtggagtccagggctgctaggaaaaggaatgggcagacacaggtgtatgccaatgtttctgaaatgggtataatttcgtc

SEQ ID NO: 144957 - DNA, 512 bp, Homo sapiens
  Payload ID: 8646
  Gene Symbol: KLK2
  Gene Name: kallikrein-related peptidase 2
  ENST ID: ENST00000593493
  CDS Start-End: 445-512
agtttctcagccacagagattcacagcctagggcaggaggacactgtacaccaggcagaatgacatgggaattgcgctcacgattggcttgaagaagcaaggactgtgggagatcacatctccatgatccataggccctgcccaatctgacctcacaccgtgggaatgcctccagactgatctagtgccgtgcccctcatccagtctcggattgtgggaggctgggagtgtgagaagcattcccaaccctggcaggtggctgtgtacagtcatggatgggcacactgtgggggtgtcctggtgcacccccagtgggtgctcacagctgcccattgcctaaagaagaatagccaggtctggctgggtcggcacaacctgtttgagcctgaagacacaggccagagggtccctgtcagccacagcttcccacacccgctctacaatatgagccttctgaagcatcaaagccttagaccagatgaagactccagccatgacctcatgctgctccg

SEQ ID NO: 144958 - DNA, 1463 bp, Homo sapiens
  Payload ID: 8647
  Gene Symbol: KLK3
  Gene Name: kallikrein-related peptidase 3
  Uniprot ID: P07288
  ENST ID: ENST00000326003
  CDS Start-End: 42-827
agccccaagcttaccacctgcacccggagagctgtgtcaccatgtgggtcccggttgtcttcctcaccctgtccgtgacgtggattggtgctgcacccctcatcctgtctcggattgtgggaggctgggagtgcgagaagcattcccaaccctggcaggtgcttgtggcctctcgtggcagggcagtctgcggcggtgttctggtgcacccccagtgggtcctcacagctgcccactgcatcaggaacaaaagcgtgatcttgctgggtcggcacagcctgtttcatcctgaagacacaggccaggtatttcaggtcagccacagcttcccacacccgctctacgatatgagcctcctgaagaatcgattcctcaggccaggtgatgactccagccacgacctcatgctgctccgcctgtcagagcctgccgagctcacggatgctgtgaaggtcatggacctgcccacccaggagccagcactggggaccacctgctacgcctcaggctggggcagcattgaaccagaggagttcttgaccccaaagaaacttcagtgtgtggacctccatgttatttccaatgacgtgtgtgcgcaagttcaccctcagaaggtgaccaagttcatgctgtgtgctggacgctggacagggggcaaaagcacctgctcgggtgattctgggggcccacttgtctgtaatggtgtgcttcaaggtatcacgtcatggggcagtgaaccatgtgccctgcccgaaaggccttccctgtacaccaaggtggtgcattaccggaagtggatcaaggacaccatcgtggccaacccctgagcacccctatcaaccccctattgtagtaaacttggaaccttggaaatgaccaggccaagactcaagcctccccagttctactgacctttgtccttaggtgtgaggtccagggttgctaggaaaagaaatcagcagacacaggtgtagaccagagtgtttcttaaatggtgtaattttgtcctctctgtgtcctggggaatactggccatgcctggagacatatcactcaatttctctgaggacacagataggatggggtgtctgtgttatttgtggggtacagagatgaaagaggggtgggatccacactgagagagtggagagtgacatgtgctggacactgtccatgaagcactgagcagaagctggaggcacaacgcaccagacactcacagcaaggatggagctgaaaacataacccactctgtcctggaggcactgggaagcctagagaaggctgtgagccaaggagggagggtcttcctttggcatgggatggggatgaagtaaggagagggactggaccccctggaagctgattcactatggggggaggtgtattgaagtcctccagacaaccctcagatttgatgatttcctagtagaactcacagaaataaagagctgttatactgt

SEQ ID NO: 144959 - DNA, 1664 bp, Homo sapiens
  Payload ID: 8647
  Gene Symbol: KLK3
  Gene Name: kallikrein-related peptidase 3
  Uniprot ID: P07288
  ENST ID: ENST00000360617
  CDS Start-End: 1-717
atgtgggtcccggttgtcttcctcaccctgtccgtgacgtggattggtgctgcacccctcatcctgtctcggattgtgggaggctgggagtgcgagaagcattcccaaccctggcaggtgcttgtggcctctcgtggcagggcagtctgcggcggtgttctggtgcacccccagtgggtcctcacagctgcccactgcatcaggaacaaaagcgtgatcttgctgggtcggcacagcctgtttcatcctgaagacacaggccaggtatttcaggtcagccacagcttcccacacccgctctacgatatgagcctcctgaagaatcgattcctcaggccaggtgatgactccagccacgacctcatgctgctccgcctgtcagagcctgccgagctcacggatgctgtgaaggtcatggacctgcccacccaggagccagcactggggaccacctgctacgcctcaggctggggcagcattgaaccagaggagttcttgaccccaaagaaacttcagtgtgtggacctccatgttatttccaatgacgtgtgtgcgcaagttcaccctcagaaggtgaccaagttcatgctgtgtgctggacgctggacagggggcaaaagcacctgctcgtgggtcattctgatcaccgaactgaccatgccagccctgccgatggtcctccatggctccctagtgccctggagaggaggtgtctagtcagagagtagtcctggaaggtggcctctgtgaggagccacggggacagcatcctgcagatggtcctggcccttgtcccaccgacctgtctacaaggactgtcctcgtggaccctcccctctgcacaggagctggaccctgaagtcccttccccaccggccaggactggagcccctacccctctgttggaatccctgcccaccttcttctggaagtcggctctggagacatttctctcttcttccaaagctgggaactgctatctgttatctgcctgtccaggtctgaaagataggattgcccaggcagaaactgggactgacctatctcactctctccctgcttttacccttagggtgattctgggggcccacttgtctgtaatggtgtgcttcaaggtatcacgtcatggggcagtgaaccatgtgccctgcccgaaaggccttccctgtacaccaaggtggtgcattaccggaagtggatcaaggacaccatcgtggccaacccctgagcacccctatcaaccccctattgtagtaaacttggaaccttggaaatgaccaggccaagactcaagcctccccagttctactgacctttgtccttaggtgtgaggtccagggttgctaggaaaagaaatcagcagacacaggtgtagaccagagtgtttcttaaatggtgtaattttgtcctctctgtgtcctggggaatactggccatgcctggagacatatcactcaatttctctgaggacacagataggatggggtgtctgtgttatttgtggggtacagagatgaaagaggggtgggatccacactgagagagtggagagtgacatgtgctggacactgtccatgaagcactgagcagaagctggaggcacaacgcaccagacactcacagcaaggatggagctgaaaacataacccactctgtcctggagg

SEQ ID NO: 144960 - DNA, 1393 bp, Homo sapiens
  Payload ID: 8647
  Gene Symbol: KLK3
  Gene Name: kallikrein-related peptidase 3
  ENST ID: ENST00000422986
  CDS Start-End: 42-314
agccccaagcttaccacctgcacccggagagctgtgtcaccatgtgggtcccggttgtcttcctcaccctgtccgtgacgtggattggtgctgcacccctcatcctgtctcggattgtgggaggctgggagtgcgagaagcattcccaaccctggcaggtgcttgtggcctctcgtggcagggcagtctgcggcggtgttctggtgcacccccagtgggtcctcacagctgcccactgcatcaggaacaaaagcgtgatcttgctgggtcggcacagcctgtttcatcctgaagacacaggccaggccaggtgatgactccagccacgacctcatgctgctccgcctgtcagagcctgccgagctcacggatgctgtgaaggtcatggacctgcccacccaggagccagcactggggaccacctgctacgcctcaggctggggcagcattgaaccagaggagttcttgaccccaaagaaacttcagtgtgtggacctccatgttatttccaatgacgtgtgtgcgcaagttcaccctcagaaggtgaccaagttcatgctgtgtgctggacgctggacagggggcaaaagcacctgctcgggtgattctgggggcccacttgtctgtaatggtgtgcttcaaggtatcacgtcatggggcagtgaaccatgtgccctgcccgaaaggccttccctgtacaccaaggtggtgcattaccggaagtggatcaaggacaccatcgtggccaacccctgagcacccctatcaaccccctattgtagtaaacttggaaccttggaaatgaccaggccaagactcaagcctccccagttctactgacctttgtccttaggtgtgaggtccagggttgctaggaaaagaaatcagcagacacaggtgtagaccagagtgtttcttaaatggtgtaattttgtcctctctgtgtcctggggaatactggccatgcctggagacatatcactcaatttctctgaggacacagataggatggggtgtctgtgttatttgtggggtacagagatgaaagaggggtgggatccacactgagagagtggagagtgacatgtgctggacactgtccatgaagcactgagcagaagctggaggcacaacgcaccagacactcacagcaaggatggagctgaaaacataacccactctgtcctggaggcactgggaagcctagagaaggctgtgagccaaggagggagggtcttcctttggcatgggatggggatgaagtaaggagagggactggaccccctggaagctgattcactatggggggaggtgtattgaagtcctccagacaaccctcagatttgatgatttcctagtagaactcacagaaataaagagctgttatactgtg

SEQ ID NO: 144961 - DNA, 834 bp, Homo sapiens
  Payload ID: 8647
  Gene Symbol: KLK3
  Gene Name: kallikrein-related peptidase 3
  ENST ID: ENST00000595392
  CDS Start-End: 22-396
cacccggagagctgtgtcaccatgtgggtcccggttgtcttcctcaccctgtccgtgacgtggattggtgctgcacccctcatcctgtctcggattgtgggaggctgggagtgcgagaagcattcccaaccctggcaggtgcttgtggcctctcgtggcagggcagtctgcggcggtgttctggtgcacccccagtgggtcctcacagctgcccactgcatcaggaacaaaagcgtgatcttgctgggtcggcacagcctgtttcatcctgaagacacaggccaggtatttcaggtcagccacagcttcccacacccgctctacgatatgagcctcctgaagaatcgattcctcaggccaggtgatgactccacattgaaccagaggagttcttgaccccaaagaaacttcagtgtgtggacctccatgttatttccaatgacgtgtgtgcgcaagttcaccctcagaaggtgaccaagttcatgctgtgtgctggacgctggacagggggcaaaagcacctgctcgggtgattctgggggcccacttgtctgtaatggtgtgcttcaaggtatcacgtcatggggcagtgaaccatgtgccctgcccgaaaggccttccctgtacaccaaggtggtgcattaccggaagtggatcaaggacaccatcgtggccaacccctgagcacccctatcaaccccctattgtagtaaacttggaaccttggaaatgaccaggccaagactcaagcctccccagttctactgacctttgtccttaggtgtgaggtccagggttgctaggaaaagaaatcagcagacacaggtgtagacca

SEQ ID NO: 144962 - DNA, 552 bp, Homo sapiens
  Payload ID: 8647
  Gene Symbol: KLK3
  Gene Name: kallikrein-related peptidase 3
  ENST ID: ENST00000597286
  CDS Start-End: 36-552
aagcttaccacctgcacccggagagctgtgtcaccatgtgggtcccggttgtcttcctcaccctggcagtctgcggcggtgttctggtgcacccccagtgggtcctcacagctgcccactgcatcaggaacaaaagcgtgatcttgctgggtcggcacagcctgtttcatcctgaagacacaggccaggtatttcaggtcagccacagcttcccacacccgctctacgatatgagcctcctgaagaatcgattcctcaggccaggtgatgactccagccacgacctcatgctgctccgcctgtcagagcctgccgagctcacggatgctgtgaaggtcatggacctgcccacccaggagccagcactggggaccacctgctacgcctcaggctggggcagcattgaaccagaggagttcttgaccccaaagaaacttcagtgtgtggacctccatgttatttccaatgacgtgtgtgcgcaagttcaccctcagaaggtgaccaagttcatgctgtgtgctggacgctggacagggggcaaaagcacctgct

SEQ ID NO: 144963 - DNA, 969 bp, Homo sapiens
  Payload ID: 8647
  Gene Symbol: KLK3
  Gene Name: kallikrein-related peptidase 3
  Uniprot ID: P07288
  ENST ID: ENST00000595952
  CDS Start-End: 8-664
tgtcaccatgtgggtcccggttgtcttcctcaccctgtccgtgacgtggattggtgctgcacccctcatcctgtctcggattgtgggaggctgggagtgcgagaagcattcccaaccctggcaggtgcttgtggcctctcgtggcagggcagtctgcggcggtgttctggtgcacccccagtgggtcctcacagctgcccactgcatcaggaagccaggtgatgactccagccacgacctcatgctgctccgcctgtcagagcctgccgagctcacggatgctgtgaaggtcatggacctgcccacccaggagccagcactggggaccacctgctacgcctcaggctggggcagcattgaaccagaggagttcttgaccccaaagaaacttcagtgtgtggacctccatgttatttccaatgacgtgtgtgcgcaagttcaccctcagaaggtgaccaagttcatgctgtgtgctggacgctggacagggggcaaaagcacctgctcgggtgattctgggggcccacttgtctgtaatggtgtgcttcaaggtatcacgtcatggggcagtgaaccatgtgccctgcccgaaaggccttccctgtacaccaaggtggtgcattaccggaagtggatcaaggacaccatcgtggccaacccctgagcacccctatcaaccccctattgtagtaaacttggaaccttggaaatgaccaggccaagactcaagcctccccagttctactgacctttgtccttaggtgtgaggtccagggttgctaggaaaagaaatcagcagacacaggtgtagaccagagtgtttcttaaatggtgtaattttgtcctctctgtgtcctggggaatactggccatgcctggagacatatcactcaatttctctgaggacacagataggatggggtgtctgtgttatttgtggggtacagagatgaaagaggggtgggatcc

SEQ ID NO: 144964 - DNA, 1130 bp, Homo sapiens
  Payload ID: 8647
  Gene Symbol: KLK3
  Gene Name: kallikrein-related peptidase 3
  ENST ID: ENST00000596185
  CDS Start-End: 42-356
agccccaagcttaccacctgcacccggagagctgtgtcaccatgtgggtcccggttgtcttcctcaccctgtccgtgacgtggattggtgagaggggccatggttggggggatgcaggagagggagccagccctgactgtcaagctgaggctctttcccccccaacccagcaccccagcccagacagggagctgggctcttttctgtctctcccagccccactccaagcccatacccccagcccctccatattgcaacagtcctcactcccacaccaggtccccgctccctcccacttaccccagaactttctccccattgcccagccagctccctgctcccagctgctttactaaaggggaagttcctgggcatctccgtgtttctctttgtggggctcaaaacctccaaggacctctctcaatgccattggttccttggaccgtatcactggtccacctcctgagcccctcaatcctatcacagtctactgacttttcccattcagctgtgctgcacccctcatcctgtctcggattgtgggaggctgggagtgcgagaagcattcccaaccctggcaggtgcttgtggcctctcgtggcagggcagtctgcggcggtgttctggtgcacccccagtgggtcctcacagctgcccactgcatcaggaacaaaagcgtgatcttgctgggtcggcacagcctgtttcatcctgaagacacaggccaggtatttcaggtcagccacagcttcccacacccgctctacgatatgagcctcctgaagaatcgattcctcaggccaggtgatgactccagccacgacctcatgctgctccgcctgtcagagcctgccgagctcacggatgctgtgaaggtcatggacctgcccacccaggagccagcactggggaccacctgctacgcctcaggctggggcagcattgaaccagaggagttcttgaccccaaagaaacttcagtgtgtggacctccatgttatttccaatgacgtgtgtgcgcaagttcaccctcagaaggtgaccaagttcatgctgtgtgctggacgctggacagggggcaaaagcacctgctcgggtgattctgggggcccacttgtctgtaatggtgtg

SEQ ID NO: 144965 - DNA, 865 bp, Homo sapiens
  Payload ID: 8647
  Gene Symbol: KLK3
  Gene Name: kallikrein-related peptidase 3
  ENST ID: ENST00000598145
  CDS Start-End: 1-788
tcttcctcaccctgtccgtgacgtggattggtgctgcacccctcatcctgtctcggattgtgggaggctgggagtgcgagaagcattcccaaccctggcaggtgcttgtggcctctcgtggcagggcagtctgcggcggtgttctggtgcacccccagtgggtcctcacagctgcccactgcatcaggaacaaaagcgtgatcttgctgggtcggcacagcctgtttcatcctgaagacacaggccaggtatttcaggtcagccacagcttcccacacccgctctacgatatgagcctcctgaagaatcgattcctcaggccaggtgatgactccagccacgacctcatgctgctccgcctgtcagagcctgccgagctcacggatgctgtgaaggtcatggacctgcccacccaggagccagcactggggaccacctgctacgcctcaggctggggcagcattgaaccagaggagtgtacgcctgggccagatgtcttgaccccaaagaaacttcagtgtgtggacctccatgttatttccaatgacgtgtgtgcgcaagttcaccctcagaaggtgaccaagttcatgctgtgtgctggacgctggacagggggcaaaagcacctgctcgggtgattctgggggcccacttgtctgtaatggtgtgcttcaaggtatcacgtcatggggcagtgaaccatgtgccctgcccgaaaggccttccctgtacaccaaggtggtgcattaccggaagtggatcaaggacaccatcgtggccaacccctgagcacccctatcaaccccctattgtagtaaacttggaaccttggaaatgaccaggccaagactcaagcctccccagtt

SEQ ID NO: 144966 - DNA, 559 bp, Homo sapiens
  Payload ID: 8647
  Gene Symbol: KLK3
  Gene Name: kallikrein-related peptidase 3
  ENST ID: ENST00000601503
  CDS Start-End: 42-559
agccccaagcttaccacctgcacccggagagctgtgtcaccatgtgggtcccggttgtcttcctcaccctgtccgtgacgtggattgcaccccctctgcaggtgcttgtggcctctcgtggcagggcagtctgcggcggtgttctggtgcacccccagtgggtcctcacagctgcccactgcatcaggaacaaaagcgtgatcttgctgggtcggcacagcctgtttcatcctgaagacacaggccaggtatttcaggtcagccacagcttcccacacccgctctacgatatgagcctcctgaagaatcgattcctcaggccaggtgatgactccagccacgacctcatgctgctccgcctgtcagagcctgccgagctcacggatgctgtgaaggtcatggacctgcccacccaggagccagcactggggaccacctgctacgcctcaggctggggcagcattgaaccagaggagttcttgaccccaaagaaacttcagtgtgtggacctccatgttatttccaatgacgtgtgtgcgcaagttcaccctcagaaggt

SEQ ID NO: 144967 - DNA, 810 bp, Homo sapiens
  Payload ID: 8647
  Gene Symbol: KLK3
  Gene Name: kallikrein-related peptidase 3
  ENST ID: ENST00000597483
  CDS Start-End: 27-614
acctgcacccggagagctgtgtcaccatgtgggtcccggttgtcttcctcaccctgtccgtgacgtggattggtgctgcacccctcatcctgtctcggattgtgggaggctgggagtgcgagaagcattcccaaccctggcaggtgcttgtggcctctcgtggcagggcagtctgcggcggtgttctggtgcacccccagtgggtcctcacagctgcccactgcatcaggaagccaggtgatgactccagccacgacctcatgctgctccgcctgtcagagcctgccgagctcacggatgctgtgaaggtcatggacctgcccacccaggagccagcactggggaccacctgctacgcctcaggctggggcagcattgaaccagaggagttcttgaccccaaagaaacttcagtgtgtggacctccatgttatttccaatgacgtgtgtgcgcaagttcaccctcagaaggtgaccaagttcatgctgtgtgctggacgctggacagggggcaaaagcacctgctcgtgggtcattctgatcaccgaactgaccatgccagccctgccgatggtcctccatggctccctagtgccctggagaggaggtgtctagtcagagagtagtcctggaaggtggcctctgtgaggagccacggggacagcatcctgcagatggtcctggcccttgtcccaccgacctgtctacaaggactgtcctcgtggaccctcccctctgcacaggagctggaccctgaagtcccttccccaccggccaggactggagcccctacccctctgttggaatccct

SEQ ID NO: 144968 - DNA, 1035 bp, Homo sapiens
  Payload ID: 8647
  Gene Symbol: KLK3
  Gene Name: kallikrein-related peptidase 3
  Uniprot ID: P07288
  ENST ID: ENST00000593997
  CDS Start-End: 22-705
cacccggagagctgtgtcaccatgtgggtcccggttgtcttcctcaccctgtccgtgacgtggattggtgctgcacccctcatcctgtctcggattgtgggaggctgggagtgcgagaagcattcccaaccctggcaggtgcttgtggcctctcgtggcagggcagtctgcggcggtgttctggtgcacccccagtgggtcctcacagctgcccactgcatcaggaacaaaagcgtgatcttgctgggtcggcacagcctgtttcatcctgaagacacaggccaggtatttcaggtcagccacagcttcccacacccgctctacgatatgagcctcctgaagaatcgattcctcaggccaggtgatgactccagccacgacctcatgctgctccgcctgtcagagcctgccgagctcacggatgctgtgaaggtcatggacctgcccacccaggagccagcactggggaccacctgctacgcctcaggctggggcagcattgaaccagaggagttcttgaccccaaagaaacttcagtgtgtggacctccatgttatttccaatgacgtgtgtgcgcaagttcaccctcagaaggtgaccaagttcatgctgtgtgctggacgctggacagggggcaaaagcacctgctcggtgagtcatccctactcccaagatcttgaggggaaaggtgagtggggaccttaattctgggctggggtctagaagccaacaaggcgtctgcctcccctgctccccagctgtagccatgccacctccccgtgtctcatctcattccctccttccctcttctttgactccctcaaggcaataggttattcttacagcacaactcatctgttcctgcgttcagcacacggttactaggcacctgctatgcacccagcactgccctagagcctgggacatagcagtgaacagacagagagcagcccctcccttctgtagcccccaagccagtgaggggcacaggcaggaacagggaccacaacacagaaaagctggagggtgtcagga

SEQ ID NO: 144969 - DNA, 1341 bp, Homo sapiens
  Payload ID: 8647
  Gene Symbol: KLK3
  Gene Name: kallikrein-related peptidase 3
  ENST ID: ENST00000617027
  CDS Start-End: 42-704
agccccaagcttaccacctgcacccggagagctgtgtcaccatgtgggtcccggttgtcttcctcaccctgtccgtgacgtggattggtgctgcacccctcatcctgtctcggattgtgggaggctgggagtgcgagaagcattcccaaccctggcaggtgcttgtggcctctcgtggcagggcagtctgcggcggtgttctggtgcacccccagtgggtcctcacagctgcccactgcatcaggaacaaaagcgtgatcttgctgggtcggcacagcctgtttcatcctgaagacacaggccaggtatttcaggtcagccacagcttcccacacccgctctacgatatgagcctcctgaagaatcgattcctcaggccaggtgatgactccagcattgaaccagaggagttcttgaccccaaagaaacttcagtgtgtggacctccatgttatttccaatgacgtgtgtgcgcaagttcaccctcagaaggtgaccaagttcatgctgtgtgctggacgctggacagggggcaaaagcacctgctcgggtgattctgggggcccacttgtctgtaatggtgtgcttcaaggtatcacgtcatggggcagtgaaccatgtgccctgcccgaaaggccttccctgtacaccaaggtggtgcattaccggaagtggatcaaggacaccatcgtggccaacccctgagcacccctatcaaccccctattgtagtaaacttggaaccttggaaatgaccaggccaagactcaagcctccccagttctactgacctttgtccttaggtgtgaggtccagggttgctaggaaaagaaatcagcagacacaggtgtagaccagagtgtttcttaaatggtgtaattttgtcctctctgtgtcctggggaatactggccatgcctggagacatatcactcaatttctctgaggacacagataggatggggtgtctgtgttatttgtggggtacagagatgaaagaggggtgggatccacactgagagagtggagagtgacatgtgctggacactgtccatgaagcactgagcagaagctggaggcacaacgcaccagacactcacagcaaggatggagctgaaaacataacccactctgtcctggaggcactgggaagcctagagaaggctgtgagccaaggagggagggtcttcctttggcatgggatggggatgaagtaaggagagggactggaccccctggaagctgattcactatggggggaggtgtattgaagtcctccagacaaccctcagatttgatgatttcctagtagaactcacagaaataaagagctgttatactgtg

SEQ ID NO: 144970 - DNA, 1347 bp, Homo sapiens
  Payload ID: 8648
  Gene Symbol: KLK4
  Gene Name: kallikrein-related peptidase 4
  ENST ID: ENST00000324041
  CDS Start-End: 1-765
atggccacagcaggaaatccctggggctggttcctggggtacctcatccttggtgtcgcaggatcgctcgtctctggtagctgcagccaaatcataaacggcgaggactgcagcccgcactcgcagccctggcaggcggcactggtcatggaaaacgaattgttctgctcgggcgtcctggtgcatccgcagtgggtgctgtcagccgcacactgtttccagaactcctacaccatcgggctgggcctgcacagtcttgaggccgaccaagagccagggagccagatggtggaggccagcctctccgtacggcacccagagtacaacagacccttgctcgctaacgacctcatgctcatcaagttggacgaatccgtgtccgagtctgacaccatccggagcatcagcattgcttcgcagtgccctaccgcggggaactcttgcctcgtttctggctggggtctgctggcgaacggcagaatgcctaccgtgctgcagtgcgtgaacgtgtcggtggtgtctgaggaggtctgcagtaagctctatgacccgctgtaccaccccagcatgttctgcgccggcggagggcaagaccagaaggactcctgcaacggtgactctggggggcccctgatctgcaacgggtacttgcagggccttgtgtctttcggaaaagccccgtgtggccaagttggcgtgccaggtgtctacaccaacctctgcaaattcactgagtggatagagaaaaccgtccaggccagttaactctggggactgggaacccatgaaattgacccccaaatacatcctgcggaaggaattcaggaatatctgttcccagcccctcctccctcaggcccaggagtccaggcccccagcccctcctccctcaaaccaagggtacagatccccagcccctcctccctcagacccaggagtccagaccccccagcccctcctccctcagacccaggagtccagcccctcctccctcagacccaggagtccagaccccccagcccctcctccctcagacccaggagtccagcccctcctccctcagacccaggagtccagaccccccagcccctcctccctcagacccaggggtccaggcccccaacccctcctccctcagactcagaggtccaggcccccaacccctccttccccagacccagaggtccaggtcccagcccctcctccctcagacccagcggtccaatgccacctagactctccctgtacacagtgcccccttgtggcacgttgacccaaccttaccagttggtttttcattttttgtccctttcccctagatccagaaataaagtctaagagaagcgc

SEQ ID NO: 144971 - DNA, 481 bp, Homo sapiens
  Payload ID: 8648
  Gene Symbol: KLK4
  Gene Name: kallikrein-related peptidase 4
  Uniprot ID: Q9Y5K2
  ENST ID: ENST00000431178
  CDS Start-End: 1-333
atggaaaacgaattgttctgctcgggcgtcctggtgcatccgcagtgggtgctgtcagccgcacactgtttccagaactcctacaccatcgggctgggcctgcacagtcttgaggccgaccaagagccagggagccagatggtggaggccagcctctccgtacggcacccagagtacaacagacccttgctcgctaacgacctcatgctcatcaagttggacgaatccgtgtccgagtctgacaccatccggagcatcagcattgcttcgcagtgccctaccgcggggaactcttgcctcgtttctggctggggtctgctggcgaacgggtgactctggggggcccctgatctgcaacgggtacttgcagggccttgtgtctttcggaaaagccccgtgtggccaagttggcgtgccaggtgtctacaccaacctctgcaaattcactgagtggatagagaaaaccgtccaggccagttaa

SEQ ID NO: 144972 - DNA, 691 bp, Homo sapiens
  Payload ID: 8648
  Gene Symbol: KLK4
  Gene Name: kallikrein-related peptidase 4
  ENST ID: ENST00000593885
  CDS Start-End: 186-401
ggaatgagcctggatccggggagccccagagggaagggctgggaggcgggaatcttgcttcggaaggactcagagagtcctgacttgaaatctcagcccagtgctgagtctctagtgaactaagctcctacaccatcgggctgggcctgcacagtcttgaggccgaccaagagccagggagccagatggtggaggccagcctctccgtacggcacccagagtacaacagacccttgctcgctaacgacctcatgctcatcaagttggacgaatccgtgtccgagtctgacaccatccggagcatcagcattgcttcgcagtgccctaccgcggggaactcttgcctcgtttctggctggggtctgctggcgaacgaatgcctaccgtgctgcagtgcgtgaacgtgtcggtggtgtctgaggaggtctgcagtaagctctatgacccgctgtaccaccccagcatgttctgcgccggcggagggcaagaccagaaggactcctgcaacggtgactctggggggcccctgatctgcaacgggtacttgcagggccttgtgtctttcggaaaagccccgtgtggccaagttggcgtgccaggtgtctacaccaacctctgcaaattcactgagtggatagagaaaaccgtccaggccagttaactctggggactgggaacccatgaaattgac

SEQ ID NO: 144973 - DNA, 813 bp, Homo sapiens
  Payload ID: 8648
  Gene Symbol: KLK4
  Gene Name: kallikrein-related peptidase 4
  ENST ID: ENST00000598305
  CDS Start-End: 279-494
atggccacagcaggaaatccctggggctggttcctggggtacctcatccttggtgtcgcagctgcagccaaatcataaacggcgaggactgcagcccgcactcgcagccctggcaggcggcactggtcatggaaaacgaattgttctgctcgggcgtcctggtgcatccgcagtgggtgctgtcagccgcacactgtttccagaagtgagtgcagagctcctacaccatcgggctgggcctgcacagtcttgaggccgaccaagagccagggagccagatggtggaggccagcctctccgtacggcacccagagtacaacagacccttgctcgctaacgacctcatgctcatcaagttggacgaatccgtgtccgagtctgacaccatccggagcatcagcattgcttcgcagtgccctaccgcggggaactcttgcctcgtttctggctggggtctgctggcgaacgaatgcctaccgtgctgcagtgcgtgaacgtgtcggtggtgtctgaggaggtctgcagtaagctctatgacccgctgtaccaccccagcatgttctgcgccggcggagggcaagaccagaaggactcctgcaacggtgactctggggggcccctgatctgcaacgggtacttgcagggccttgtgtctttcggaaaagccccgtgtggccaagttggcgtgccaggtgtctacaccaacctctgcaaattcactgagtggatagagaaaaccgtccaggccagttaactctggggactgggaacccatgaaattgacccccaaatacatcctgcggaaggaattca

SEQ ID NO: 144974 - DNA, 777 bp, Homo sapiens
  Payload ID: 8648
  Gene Symbol: KLK4
  Gene Name: kallikrein-related peptidase 4
  ENST ID: ENST00000602148
  CDS Start-End: 1-228
atggccacagcaggaaatccctggggctggttcctggggtacctcatccttggtgtcgcaggatcgctcgtctctggtagctgcagccaaatcataaacggcgaggactgcagcccgcactcgcagccctggcaggcggcactggtcatggaaaacgaattgttctgctcgggcgtcctggtgcatccgcagtgggtgctgtcagccgcacactgtttccagaagtgagtgcagagctcctacaccatcgggctgggcctgcacagtcttgaggccgaccaagagccagggagccagatggtggaggccagcctctccgtacggcacccagagtacaacagacccttgctcgctaacgacctcatgctcatcaagttggacgaatccgtgtccgagtctgacaccatccggagcatcagcattgcttcgcagtgccctaccgcggggaactcttgcctcgtttctggctggggtctgctggcgaacggcagaatgcctaccgtgctgcagtgcgtgaacgtgtcggtggtgtctgaggaggtctgcagtaagctctatgacccgctgtaccaccccagcatgttctgcgccggcggagggcaagaccagaaggactcctgcaacggtgactctggggggcccctgatctgcaacgggtacttgcagggccttgtgtctttcggaaaagccccgtgtggccaagttggcgtgccaggtgtctacaccaacctctgcaaattcactgagtggatagagaaaaccgtccaggccagttaa

SEQ ID NO: 144975 - DNA, 1563 bp, Homo sapiens
  Payload ID: 8649
  Gene Symbol: KLK5
  Gene Name: kallikrein-related peptidase 5
  Uniprot ID: Q9Y337
  ENST ID: ENST00000336334
  CDS Start-End: 354-1235
gccccagggagcagtgggtggttataactcaggcccggtgcccagagcccaggaggaggcagtggccaggaaggcacaggcctgagaagtctgcggctgagctgggagcaaatcccccaccccctacctgggggacagggcaagtgagacctggtgagggtggctcagcaggcagggaaggagaggtgtctgtgcgtcctgcacccacatctttctctgtcccctccttgccctgtctggaggctgctagactcctatcttctgaattctatagtgcctgggtctcagcgcagtgccgatggtggcccgtccttgtggttcctctctacctggggaaataaggtgcagcggccatggctacagcaagacccccctggatgtgggtgctctgtgctctgatcacagccttgcttctgggggtcacagagcatgttctcgccaacaatgatgtttcctgtgaccacccctctaacaccgtgccctctgggagcaaccaggacctgggagctggggccggggaagacgcccggtcggatgacagcagcagccgcatcatcaatggatccgactgcgatatgcacacccagccgtggcaggccgcgctgttgctaaggcccaaccagctctactgcggggcggtgttggtgcatccacagtggctgctcacggccgcccactgcaggaagaaagttttcagagtccgtctcggccactactccctgtcaccagtttatgaatctgggcagcagatgttccagggggtcaaatccatcccccaccctggctactcccaccctggccactctaacgacctcatgctcatcaaactgaacagaagaattcgtcccactaaagatgtcagacccatcaacgtctcctctcattgtccctctgctgggacaaagtgcttggtgtctggctgggggacaaccaagagcccccaagtgcacttccctaaggtcctccagtgcttgaatatcagcgtgctaagtcagaaaaggtgcgaggatgcttacccgagacagatagatgacaccatgttctgcgccggtgacaaagcaggtagagactcctgccagggtgattctggggggcctgtggtctgcaatggctccctgcagggactcgtgtcctggggagattacccttgtgcccggcccaacagaccgggtgtctacacgaacctctgcaagttcaccaagtggatccaggaaaccatccaggccaactcctgagtcatcccaggactcagcacaccggcatccccacctgctgcagggacagccctgacactcctttcagaccctcattccttcccagagatgttgagaatgttcatctctccagcccctgaccccatgtctcctggactcagggtctgcttcccccacattgggctgaccgtgtctctctagttgaaccctgggaacaatttccaaaactgtccagggcgggggttgcgtctcaatctccctggggcactttcatcctcaagctcagggcccatcccttctctgcagctctgacccaaatttagtcccagaaataaactgagaagtggaa

SEQ ID NO: 144976 - DNA, 1405 bp, Homo sapiens
  Payload ID: 8649
  Gene Symbol: KLK5
  Gene Name: kallikrein-related peptidase 5
  Uniprot ID: Q9Y337
  ENST ID: ENST00000391809
  CDS Start-End: 196-1077
ataactcaggcccggtgcccagagcccaggaggaggcagtggccaggaaggcacaggcctgagaagtctgcggctgagctgggagcaaatcccccaccccctacctgggggacaggtgcctgggtctcagcgcagtgccgatggtggcccgtccttgtggttcctctctacctggggaaataaggtgcagcggccatggctacagcaagacccccctggatgtgggtgctctgtgctctgatcacagccttgcttctgggggtcacagagcatgttctcgccaacaatgatgtttcctgtgaccacccctctaacaccgtgccctctgggagcaaccaggacctgggagctggggccggggaagacgcccggtcggatgacagcagcagccgcatcatcaatggatccgactgcgatatgcacacccagccgtggcaggccgcgctgttgctaaggcccaaccagctctactgcggggcggtgttggtgcatccacagtggctgctcacggccgcccactgcaggaagaaagttttcagagtccgtctcggccactactccctgtcaccagtttatgaatctgggcagcagatgttccagggggtcaaatccatcccccaccctggctactcccaccctggccactctaacgacctcatgctcatcaaactgaacagaagaattcgtcccactaaagatgtcagacccatcaacgtctcctctcattgtccctctgctgggacaaagtgcttggtgtctggctgggggacaaccaagagcccccaagtgcacttccctaaggtcctccagtgcttgaatatcagcgtgctaagtcagaaaaggtgcgaggatgcttacccgagacagatagatgacaccatgttctgcgccggtgacaaagcaggtagagactcctgccagggtgattctggggggcctgtggtctgcaatggctccctgcagggactcgtgtcctggggagattacccttgtgcccggcccaacagaccgggtgtctacacgaacctctgcaagttcaccaagtggatccaggaaaccatccaggccaactcctgagtcatcccaggactcagcacaccggcatccccacctgctgcagggacagccctgacactcctttcagaccctcattccttcccagagatgttgagaatgttcatctctccagcccctgaccccatgtctcctggactcagggtctgcttcccccacattgggctgaccgtgtctctctagttgaaccctgggaacaatttccaaaactgtccagggcgggggttgcgtctcaatctccctggggcactttcatcctcaagctcagggcccatcccttctctgcagctctgacccaaatttagtcccagaaataaactgagaagtggaa

SEQ ID NO: 144977 - DNA, 672 bp, Homo sapiens
  Payload ID: 8649
  Gene Symbol: KLK5
  Gene Name: kallikrein-related peptidase 5
  ENST ID: ENST00000594846
  CDS Start-End: 57-672
agacctggtgagggtggctcagcaggcagggaaggagaggtgtctgtgcagcggccatggctacagcaagacccccctggatgtgggtgctctgtgctctgatcacagccttgcttctgggggtcacagagcatgttctcgccaacaatgatgtttcctgtgaccacccctctaacaccgtgccctctgggagcaaccaggacctgggagctggggccggggaagacgcccggtcggatgacagcagcagccgcatcatcaatggatccgactgcgatatgcacacccagccgtggcaggccgcgctgttgctaaggcccaaccagctctactgcggggcggtgttggtgcatccacagtggctgctcacggccgcccactgcaggaagaaagttttcagagtccgtctcggccactactccctgtcaccagtttatgaatctgggcagcagatgttccagggggtcaaatccatcccccaccctggctactcccaccctggccactctaacgacctcatgctcatcaaactgaacagaagaattcgtcccactaaagatgtcagacccatcaacgtctcctctcattgtccctctgctgggacaaagtgcttggtgtctggctgggggacaaccaagagcccccaagtgcacttccctaaggtcctccagt

SEQ ID NO: 144978 - DNA, 1365 bp, Homo sapiens
  Payload ID: 8649
  Gene Symbol: KLK5
  Gene Name: kallikrein-related peptidase 5
  Uniprot ID: Q9Y337
  ENST ID: ENST00000593428
  CDS Start-End: 156-1037
aatgtgccccagggagcagtgggtggttataactcaggcccggtgcccagagcccaggaggaggcagtggccaggaaggcacaggcctgagaagtctgcggctgagctgggagcaaatcccccaccccctacctgggggacagggtgcagcggccatggctacagcaagacccccctggatgtgggtgctctgtgctctgatcacagccttgcttctgggggtcacagagcatgttctcgccaacaatgatgtttcctgtgaccacccctctaacaccgtgccctctgggagcaaccaggacctgggagctggggccggggaagacgcccggtcggatgacagcagcagccgcatcatcaatggatccgactgcgatatgcacacccagccgtggcaggccgcgctgttgctaaggcccaaccagctctactgcggggcggtgttggtgcatccacagtggctgctcacggccgcccactgcaggaagaaagttttcagagtccgtctcggccactactccctgtcaccagtttatgaatctgggcagcagatgttccagggggtcaaatccatcccccaccctggctactcccaccctggccactctaacgacctcatgctcatcaaactgaacagaagaattcgtcccactaaagatgtcagacccatcaacgtctcctctcattgtccctctgctgggacaaagtgcttggtgtctggctgggggacaaccaagagcccccaagtgcacttccctaaggtcctccagtgcttgaatatcagcgtgctaagtcagaaaaggtgcgaggatgcttacccgagacagatagatgacaccatgttctgcgccggtgacaaagcaggtagagactcctgccagggtgattctggggggcctgtggtctgcaatggctccctgcagggactcgtgtcctggggagattacccttgtgcccggcccaacagaccgggtgtctacacgaacctctgcaagttcaccaagtggatccaggaaaccatccaggccaactcctgagtcatcccaggactcagcacaccggcatccccacctgctgcagggacagccctgacactcctttcagaccctcattccttcccagagatgttgagaatgttcatctctccagcccctgaccccatgtctcctggactcagggtctgcttcccccacattgggctgaccgtgtctctctagttgaaccctgggaacaatttccaaaactgtccagggcgggggttgcgtctcaatctccctggggcactttcatcctcaagctcagggcccatcccttctctgcagctctgacccaaatttagtcccagaaataaactgagaagtggaa

SEQ ID NO: 144979 - DNA, 1511 bp, Homo sapiens
  Payload ID: 8650
  Gene Symbol: KLK6
  Gene Name: kallikrein-related peptidase 6
  Uniprot ID: Q92876
  ENST ID: ENST00000310157
  CDS Start-End: 244-978
ggcggacaaagcccgattgttcctgggccctttccccatcgcgcctgggcctgctccccagcccggggcaggggcgggggccagtgtggtgacacacgctgtagctgtctccccggctggctggctcgctctctcctggggacacagaggtcggcaggcagcacacagagggacctacgggcagctgttccttcccccgactcaagaatccccggagcccggaggcctgcagcaggagcggccatgaagaagctgatggtggtgctgagtctgattgctgcagcctgggcagaggagcagaataagttggtgcatggcggaccctgcgacaagacatctcacccctaccaagctgccctctacacctcgggccacttgctctgtggtggggtccttatccatccactgtgggtcctcacagctgcccactgcaaaaaaccgaatcttcaggtcttcctggggaagcataaccttcggcaaagggagagttcccaggagcagagttctgttgtccgggctgtgatccaccctgactatgatgccgccagccatgaccaggacatcatgctgttgcgcctggcacgcccagccaaactctctgaactcatccagccccttcccctggagagggactgctcagccaacaccaccagctgccacatcctgggctggggcaagacagcagatggtgatttccctgacaccatccagtgtgcatacatccacctggtgtcccgtgaggagtgtgagcatgcctaccctggccagatcacccagaacatgttgtgtgctggggatgagaagtacgggaaggattcctgccagggtgattctgggggtccgctggtatgtggagaccacctccgaggccttgtgtcatggggtaacatcccctgtggatcaaaggagaagccaggagtctacaccaacgtctgcagatacacgaactggatccaaaaaaccattcaggccaagtgaccctgacatgtgacatctacctcccgacctaccaccccactggctggttccagaacgtctctcacctagaccttgcctcccctcctctcctgcccagctctgaccctgatgcttaataaacgcagcgacgtgagggtcctgattctccctggttttaccccagctccatccttgcatcactggggaggacgtgatgagtgaggacttgggtcctcggtcttacccccaccactaagagaatacaggaaaatcccttctaggcatctcctctccccaacccttccacacgtttgatttcttcctgcagaggcccagccacgtgtctggaatcccagctccgctgcttactgtcggtgtccccttgggatgtacctttcttcactgcagatttctcacctgtaagatgaagataaggatgatacagtctccataaggcagtggctgttggaaagatttaaggtttcacacctatgacatacatggaatagcacctgggccaccatgcactcaataaagaatgaattttattatga

SEQ ID NO: 144980 - DNA, 1708 bp, Homo sapiens
  Payload ID: 8650
  Gene Symbol: KLK6
  Gene Name: kallikrein-related peptidase 6
  Uniprot ID: Q92876
  ENST ID: ENST00000376851
  CDS Start-End: 441-1175
agacccaggagtccaggccctcactgcactcagggaccagtgctcccttccctggaggcctggtcaggggtcaccaagagcagagcgtgggggcgggaggaatgtgtgtgggaggcctgggtaaggaggaaaagggtgtagccagtctcctggctcagggacctgagagacaggggttaaaaggacgttccagaagcatctggggacagaaccagcctcttccagggaggcctgggagctgggggtgtgtgtctggcagtccctgcagccctgggctctgcggcccctgcgtcctccgcttggctctgccactgcatctgagtgtcttctctcctcacggctccccgcatttctaactctttctgcctcctcgtctcaaagctgttccttcccccgactcaagaatccccggagcccggaggcctgcagcaggagcggccatgaagaagctgatggtggtgctgagtctgattgctgcagcctgggcagaggagcagaataagttggtgcatggcggaccctgcgacaagacatctcacccctaccaagctgccctctacacctcgggccacttgctctgtggtggggtccttatccatccactgtgggtcctcacagctgcccactgcaaaaaaccgaatcttcaggtcttcctggggaagcataaccttcggcaaagggagagttcccaggagcagagttctgttgtccgggctgtgatccaccctgactatgatgccgccagccatgaccaggacatcatgctgttgcgcctggcacgcccagccaaactctctgaactcatccagccccttcccctggagagggactgctcagccaacaccaccagctgccacatcctgggctggggcaagacagcagatggtgatttccctgacaccatccagtgtgcatacatccacctggtgtcccgtgaggagtgtgagcatgcctaccctggccagatcacccagaacatgttgtgtgctggggatgagaagtacgggaaggattcctgccagggtgattctgggggtccgctggtatgtggagaccacctccgaggccttgtgtcatggggtaacatcccctgtggatcaaaggagaagccaggagtctacaccaacgtctgcagatacacgaactggatccaaaaaaccattcaggccaagtgaccctgacatgtgacatctacctcccgacctaccaccccactggctggttccagaacgtctctcacctagaccttgcctcccctcctctcctgcccagctctgaccctgatgcttaataaacgcagcgacgtgagggtcctgattctccctggttttaccccagctccatccttgcatcactggggaggacgtgatgagtgaggacttgggtcctcggtcttacccccaccactaagagaatacaggaaaatcccttctaggcatctcctctccccaacccttccacacgtttgatttcttcctgcagaggcccagccacgtgtctggaatcccagctccgctgcttactgtcggtgtccccttgggatgtacctttcttcactgcagatttctcacctgtaagatgaagataaggatgatacagtctccataaggcagtggctgttggaaagatttaaggtttcacacctatgacatacatggaatagcacctgggccaccatgcactcaataaagaatgaattttattatga

SEQ ID NO: 144981 - DNA, 1125 bp, Homo sapiens
  Payload ID: 8650
  Gene Symbol: KLK6
  Gene Name: kallikrein-related peptidase 6
  ENST ID: ENST00000376853
  CDS Start-End: 244-606
ggcggacaaagcccgattgttcctgggccctttccccatcgcgcctgggcctgctccccagcccggggcaggggcgggggccagtgtggtgacacacgctgtagctgtctccccggctggctggctcgctctctcctggggacacagaggtcggcaggcagcacacagagggacctacgggcagctgttccttcccccgactcaagaatccccggagcccggaggcctgcagcaggagcggccatgaagaagctgatggtggtgctgagtctgattgctgcagcctgggcagaggagcagaataagttggtgcatggcggaccctgcgacaagacatctcacccctaccaagctgccctctacacctcgggccacttgctctgtggtggggtccttatccatccactgtgggtcctcacagctgcccactgcaaaaaaccggtgattctgggggtccgctggtatgtggagaccacctccgaggccttgtgtcatggggtaacatcccctgtggatcaaaggagaagccaggagtctacaccaacgtctgcagatacacgaactggatccaaaaaaccattcaggccaagtgaccctgacatgtgacatctacctcccgacctaccaccccactggctggttccagaacgtctctcacctagaccttgcctcccctcctctcctgcccagctctgaccctgatgcttaataaacgcagcgacgtgagggtcctgattctccctggttttaccccagctccatccttgcatcactggggaggacgtgatgagtgaggacttgggtcctcggtcttacccccaccactaagagaatacaggaaaatcccttctaggcatctcctctccccaacccttccacacgtttgatttcttcctgcagaggcccagccacgtgtctggaatcccagctccgctgcttactgtcggtgtccccttgggatgtacctttcttcactgcagatttctcacctgtaagatgaagataaggatgatacagtctccataaggcagtggctgttggaaagatttaaggtttcacacctatgacatacatggaatagcacctgggccaccatgcactcaataaagaatgaattttattatg

SEQ ID NO: 144982 - DNA, 1478 bp, Homo sapiens
  Payload ID: 8650
  Gene Symbol: KLK6
  Gene Name: kallikrein-related peptidase 6
  Uniprot ID: Q92876
  ENST ID: ENST00000391808
  CDS Start-End: 533-946
aggacgttccagaagcatctggggacagaaccagcctcttccagggaggcctgggagctgggggtgtgtgtctggcagtccctgcagccctgggctctgcggcccctgcgtcctccgcttggctctgccactgcatctgagtgtcttctctcctcacggctccccgcatttctaactctttctgcctcctcgtctcaaagctgttccttcccccgactcaagaatccccggagcccggaggcctgcagcagcctgggcagaggagcagaataagttggtgcatggcggaccctgcgacaagacatctcacccctaccaagctgccctctacacctcgggccacttgctctgtggtggggtccttatccatccactgtgggtcctcacagctgcccactgcaaaaaaccgaatcttcaggtcttcctggggaagcataaccttcggcaaagggagagttcccaggagcagagttctgttgtccgggctgtgatccaccctgactatgatgccgccagccatgaccaggacatcatgctgttgcgcctggcacgcccagccaaactctctgaactcatccagccccttcccctggagagggactgctcagccaacaccaccagctgccacatcctgggctggggcaagacagcagatggtgatttccctgacaccatccagtgtgcatacatccacctggtgtcccgtgaggagtgtgagcatgcctaccctggccagatcacccagaacatgttgtgtgctggggatgagaagtacgggaaggattcctgccagggtgattctgggggtccgctggtatgtggagaccacctccgaggccttgtgtcatggggtaacatcccctgtggatcaaaggagaagccaggagtctacaccaacgtctgcagatacacgaactggatccaaaaaaccattcaggccaagtgaccctgacatgtgacatctacctcccgacctaccaccccactggctggttccagaacgtctctcacctagaccttgcctcccctcctctcctgcccagctctgaccctgatgcttaataaacgcagcgacgtgagggtcctgattctccctggttttaccccagctccatccttgcatcactggggaggacgtgatgagtgaggacttgggtcctcggtcttacccccaccactaagagaatacaggaaaatcccttctaggcatctcctctccccaacccttccacacgtttgatttcttcctgcagaggcccagccacgtgtctggaatcccagctccgctgcttactgtcggtgtccccttgggatgtacctttcttcactgcagatttctcacctgtaagatgaagataaggatgatacagtctccataaggcagtggctgttggaaagatttaaggtttcacacctatgacatacatggaatagcacctgggccaccatgcactcaataaagaatgaattttattatg

SEQ ID NO: 144983 - DNA, 1353 bp, Homo sapiens
  Payload ID: 8650
  Gene Symbol: KLK6
  Gene Name: kallikrein-related peptidase 6
  Uniprot ID: Q92876
  ENST ID: ENST00000597379
  CDS Start-End: 244-366
ggcggacaaagcccgattgttcctgggccctttccccatcgcgcctgggcctgctccccagcccggggcaggggcgggggccagtgtggtgacacacgctgtagctgtctccccggctggctggctcgctctctcctggggacacagaggtcggcaggcagcacacagagggacctacgggcagctgttccttcccccgactcaagaatccccggagcccggaggcctgcagcaggagcggccatgaagaagctgatggtggtgctgagtctgattgctgcaggaatcttcaggtcttcctggggaagcataaccttcggcaaagggagagttcccaggagcagagttctgttgtccgggctgtgatccaccctgactatgatgccgccagccatgaccaggacatcatgctgttgcgcctggcacgcccagccaaactctctgaactcatccagccccttcccctggagagggactgctcagccaacaccaccagctgccacatcctgggctggggcaagacagcagatggtgatttccctgacaccatccagtgtgcatacatccacctggtgtcccgtgaggagtgtgagcatgcctaccctggccagatcacccagaacatgttgtgtgctggggatgagaagtacgggaaggattcctgccagggtgattctgggggtccgctggtatgtggagaccacctccgaggccttgtgtcatggggtaacatcccctgtggatcaaaggagaagccaggagtctacaccaacgtctgcagatacacgaactggatccaaaaaaccattcaggccaagtgaccctgacatgtgacatctacctcccgacctaccaccccactggctggttccagaacgtctctcacctagaccttgcctcccctcctctcctgcccagctctgaccctgatgcttaataaacgcagcgacgtgagggtcctgattctccctggttttaccccagctccatccttgcatcactggggaggacgtgatgagtgaggacttgggtcctcggtcttacccccaccactaagagaatacaggaaaatcccttctaggcatctcctctccccaacccttccacacgtttgatttcttcctgcagaggcccagccacgtgtctggaatcccagctccgctgcttactgtcggtgtccccttgggatgtacctttcttcactgcagatttctcacctgtaagatgaagataaggatgatacagtctccataaggcagtggctgttggaaagatttaaggtttcacacctatgacatacatggaatagcacctgggccaccatgcactcaataaagaatgaattttattatg

SEQ ID NO: 144984 - DNA, 928 bp, Homo sapiens
  Payload ID: 8650
  Gene Symbol: KLK6
  Gene Name: kallikrein-related peptidase 6
  ENST ID: ENST00000599690
  CDS Start-End: 258-467
acagaaccagcctcttccagggaggcctgggagctgggggtgtgtgtctggcagtccctgcagccctgggctctgcggcccctgcgtcctccgcttggctctgccactgcatctgagtgtcttctctcctcacggctccccgcatttctaactctttctgcctcctcgtctcaaagctgttccttcccccgactcaagaatccccggagcccggaggcctgcagcagcctgggcagaggagcagaataagttggtgcatggcggaccctgcgacaagacatctcacccctaccaagctgccctctacacctcgggccacttgctctgtggtggggtccttatccatccactgtgggtcctcacagctgcccactgcaaaaaaccgaatcttcaggtcttcctggggaagcataaccttcggcaaagggagagttcccaggagcagagttctgttgtccgggctgtgatccaccctgactatgatgccgccagccatgaccaggacatcatgctgttgcgcctggcacgcccagccaaactctctgaactcatccagccccttcccctggagagggactgctcagccaacaccaccagctgccacatcctgggctggggcaagacagcagatggtgatttccctgacaccatccagtgtgcatacatccacctggtgtcccgtgaggagtgtgagcatgcctaccctggccagatcacccagaacatgttgtgtgctggggatgagaagtacgggaaggattcctgccagggtgattctgggggtccgctggtatgtggagaccacctccgaggccttgtgtcatggggtaacatcccctgtggatcaaaggagaagccaggagtctacaccaacgtctgcagatacacgaactggatccaaaaaaccattcaggccaagtgaccctga

SEQ ID NO: 144985 - DNA, 842 bp, Homo sapiens
  Payload ID: 8650
  Gene Symbol: KLK6
  Gene Name: kallikrein-related peptidase 6
  Uniprot ID: Q92876
  ENST ID: ENST00000594641
  CDS Start-End: 93-827
aggagaggatgcagagggagcagacagagggatggggggagggtcgaggcagtgactaatggaccatgtggcttcccctctcaggagcggccatgaagaagctgatggtggtgctgagtctgattgctgcagcctgggcagaggagcagaataagttggtgcatggcggaccctgcgacaagacatctcacccctaccaagctgccctctacacctcgggccacttgctctgtggtggggtccttatccatccactgtgggtcctcacagctgcccactgcaaaaaaccgaatcttcaggtcttcctggggaagcataaccttcggcaaagggagagttcccaggagcagagttctgttgtccgggctgtgatccaccctgactatgatgccgccagccatgaccaggacatcatgctgttgcgcctggcacgcccagccaaactctctgaactcatccagccccttcccctggagagggactgctcagccaacaccaccagctgccacatcctgggctggggcaagacagcagatggtgatttccctgacaccatccagtgtgcatacatccacctggtgtcccgtgaggagtgtgagcatgcctaccctggccagatcacccagaacatgttgtgtgctggggatgagaagtacgggaaggattcctgccagggtgattctgggggtccgctggtatgtggagaccacctccgaggccttgtgtcatggggtaacatcccctgtggatcaaaggagaagccaggagtctacaccaacgtctgcagatacacgaactggatccaaaaaaccattcaggccaagtgaccctgacatgtgaca

SEQ ID NO: 144986 - DNA, 819 bp, Homo sapiens
  Payload ID: 8650
  Gene Symbol: KLK6
  Gene Name: kallikrein-related peptidase 6
  Uniprot ID: Q92876
  ENST ID: ENST00000599881
  CDS Start-End: 236-358
acagaaccagcctcttccagggaggcctgggagctgggggtgtgtgtctggcagtccctgcagccctgggctctgcggcccctgcgtcctccgcttggctctgccactgcatctgagtgtcttctctcctcacggctccccgcatttctaactctttctgcctcctcgtctcaaagctgttccttcccccgactcaagaatccccggagcccggaggcctgcagcaggagcggccatgaagaagctgatggtggtgctgagtctgattgctgcaggaatcttcaggtcttcctggggaagcataaccttcggcaaagggagagttcccaggagcagagttctgttgtccgggctgtgatccaccctgactatgatgccgccagccatgaccaggacatcatgctgttgcgcctggcacgcccagccaaactctctgaactcatccagccccttcccctggagagggactgctcagccaacaccaccagctgccacatcctgggctggggcaagacagcagatggtgatttccctgacaccatccagtgtgcatacatccacctggtgtcccgtgaggagtgtgagcatgcctaccctggccagatcacccagaacatgttgtgtgctggggatgagaagtacgggaaggattcctgccagggtgattctgggggtccgctggtatgtggagaccacctccgaggccttgtgtcatggggtaacatcccctgtggatcaaaggagaagccaggagtctacaccaacgtctgcagatacacgaactggatccaaaaaaccattcaggccaagtgaccctga

SEQ ID NO: 144987 - DNA, 1975 bp, Homo sapiens
  Payload ID: 8651
  Gene Symbol: KLK7
  Gene Name: kallikrein-related peptidase 7
  ENST ID: ENST00000304045
  CDS Start-End: 308-508
tcggagggagggtggagagagagtgcagtggtgccaattgctctcgctgcgtcagggttccagataaccagaaccgcaaatgcaggcgggggtgtcccagagtcggctccgcctgcaccccagggcgctggggccgggcatggggcggggggtgatataagaggacggcccagcagagggatgaagattttggagcccagctgtgtgccagcccaagtcggaacttggatcacatcagatcctctcgagctccagcaggagaggcccttcctcgcctggcagcccctgagcggctcagcagggcaccatggcaagatcccttctcctgcccctgcagatcttactgctatccttagccttggaaactgcaggagaagaagtgagtacaccgtgcacctgggcagtgatacgctgggcgacaggagagctcagaggatcaaggcctcgaagtcattccgccaccccggctactccacacagacccatgttaatgacctcatgctcgtgaagctcaatagccaggccaggctgtcatccatggtgaagaaagtcaggctgccctcccgctgcgaaccccctggaaccacctgtactgtctccggctggggcactaccacgagcccagatgtgacctttccctctgacctcatgtgcgtggatgtcaagctcatctccccccaggactgcacgaaggtttacaaggacttactggaaaattccatgctgtgcgctggcatccccgactccaagaaaaacgcctgcaatggtgactcagggggaccgttggtgtgcagaggtaccctgcaaggtctggtgtcctggggaactttcccttgcggccaacccaatgacccaggagtctacactcaagtgtgcaagttcaccaagtggataaatgacaccatgaaaaagcatcgctaacgccacactgagttaattaactgtgtgcttccaacagaaaatgcacaggagtgaggacgccgatgacctatgaagtcaaatttgactttacctttcctcaaagatatatttaaaccaacctcatgccctgttgataaaccaatcaaattggtaaagacctaaaaccaaaacaaataaagaaacacaaaaccctcagtgctggagaagagtcagtgagaccagcactctcaaacactggaactggacgttcgtacagtctttacggaagacacttggtcaacgtacaccgagacccttattcaccacctttgacccagtaactctaatcttaggaagaacctactgaaacaaaaaaaatccaaaatgtagaacaagacttgaatttaccatgatattatttatcacagaaatgaagtgaaaccatcaaacatgttccaaaagtaccagatggcttaaataatagtctggcttggcacaacgatgttttttttctttgagacagagtctctgttgcttgggctgcaatgcagtgatgcaatcttggctcactgcaacctccgcctcctgggttcaagtgattctcgtgcttcagcctcccaagtacctgggactacaggtgtgcaccaccacaccaggctaattttttgtgtatttttactagagacagggtttcaccatgttggccagcatggtcttgaacgcctgacctcagatgatccacccaccttggcctcccaaagtgctgggattacaggcatgagccaccacggccagcccacaatgatattacaaacctattaaaaatgatacttagacagaattgtcagtattattcaagaacatttaggctataggatgttaaatgacaaaaggaaggacaaaaatatatatgtatgtgaccctacccataaaaaatgaaatattcacagaatcagatctgaaaacacatgtcccagactgcatactggggtcgtcatgaggtgtctccttccttctgtgtacttttccttgaatgtgcacttttataacatgaaaaataaaggtggggaaaaaa

SEQ ID NO: 144988 - DNA, 1912 bp, Homo sapiens
  Payload ID: 8651
  Gene Symbol: KLK7
  Gene Name: kallikrein-related peptidase 7
  Uniprot ID: P49862
  ENST ID: ENST00000391807
  CDS Start-End: 103-864
ggagagggtgatgctggctccaagcctgactctgctctcgagagctccagcaggagaggcccttcctcgcctggcagcccctgagcggctcagcagggcaccatggcaagatcccttctcctgcccctgcagatcttactgctatccttagccttggaaactgcaggagaagaagcccagggtgacaagattattgatggcgccccatgtgcaagaggctcccacccatggcaggtggccctgctcagtggcaatcagctccactgcggaggcgtcctggtcaatgagcgctgggtgctcactgccgcccactgcaagatgaatgagtacaccgtgcacctgggcagtgatacgctgggcgacaggagagctcagaggatcaaggcctcgaagtcattccgccaccccggctactccacacagacccatgttaatgacctcatgctcgtgaagctcaatagccaggccaggctgtcatccatggtgaagaaagtcaggctgccctcccgctgcgaaccccctggaaccacctgtactgtctccggctggggcactaccacgagcccagatgtgacctttccctctgacctcatgtgcgtggatgtcaagctcatctccccccaggactgcacgaaggtttacaaggacttactggaaaattccatgctgtgcgctggcatccccgactccaagaaaaacgcctgcaatggtgactcagggggaccgttggtgtgcagaggtaccctgcaaggtctggtgtcctggggaactttcccttgcggccaacccaatgacccaggagtctacactcaagtgtgcaagttcaccaagtggataaatgacaccatgaaaaagcatcgctaacgccacactgagttaattaactgtgtgcttccaacagaaaatgcacaggagtgaggacgccgatgacctatgaagtcaaatttgactttacctttcctcaaagatatatttaaaccaacctcatgccctgttgataaaccaatcaaattggtaaagacctaaaaccaaaacaaataaagaaacacaaaaccctcagtgctggagaagagtcagtgagaccagcactctcaaacactggaactggacgttcgtacagtctttacggaagacacttggtcaacgtacaccgagacccttattcaccacctttgacccagtaactctaatcttaggaagaacctactgaaacaaaaaaaatccaaaatgtagaacaagacttgaatttaccatgatattatttatcacagaaatgaagtgaaaccatcaaacatgttccaaaagtaccagatggcttaaataatagtctggcttggcacaacgatgttttttttctttgagacagagtctctgttgcttgggctgcaatgcagtgatgcaatcttggctcactgcaacctccgcctcctgggttcaagtgattctcgtgcttcagcctcccaagtacctgggactacaggtgtgcaccaccacaccaggctaattttttgtgtatttttactagagacagggtttcaccatgttggccagcatggtcttgaacgcctgacctcagatgatccacccaccttggcctcccaaagtgctgggattacaggcatgagccaccacggccagcccacaatgatattacaaacctattaaaaatgatacttagacagaattgtcagtattattcaagaacatttaggctataggatgttaaatgacaaaaggaaggacaaaaatatatatgtatgtgaccctacccataaaaaatgaaatattcacagaatcagatctgaaaacacatgtcccagactgcatactggggtcgtcatgaggtgtctccttccttctgtgtacttttccttgaatgtgcacttttataacatgaaaaataaaggtgggg

SEQ ID NO: 144989 - DNA, 1054 bp, Homo sapiens
  Payload ID: 8651
  Gene Symbol: KLK7
  Gene Name: kallikrein-related peptidase 7
  Uniprot ID: P49862
  ENST ID: ENST00000597707
  CDS Start-End: 332-877
agataaccagaaccgcaaatgcaggcgggggtgtcccagagtcggctccgcctgcaccccagggcgctggggccgggcatggggcggggggtgatataagaggacggcccagcagagggatgaagattttggagcccagctgtgtgccagcccaagtcggaacttggatcacatcagatcctctcgagcccagggtgacaagattattgatggcgccccatgtgcaagaggctcccacccatggcaggtggccctgctcagtggcaatcagctccactgcggaggcgtcctggtcaatgagcgctgggtgctcactgccgcccactgcaagatgaatgagtacaccgtgcacctgggcagtgatacgctgggcgacaggagagctcagaggatcaaggcctcgaagtcattccgccaccccggctactccacacagacccatgttaatgacctcatgctcgtgaagctcaatagccaggccaggctgtcatccatggtgaagaaagtcaggctgccctcccgctgcgaaccccctggaaccacctgtactgtctccggctggggcactaccacgagcccagatgtgacctttccctctgacctcatgtgcgtggatgtcaagctcatctccccccaggactgcacgaaggtttacaaggacttactggaaaattccatgctgtgcgctggcatccccgactccaagaaaaacgcctgcaatggtgactcagggggaccgttggtgtgcagaggtaccctgcaaggtctggtgtcctggggaactttcccttgcggccaacccaatgacccaggagtctacactcaagtgtgcaagttcaccaagtggataaatgacaccatgaaaaagcatcgctaacgccacactgagttaattaactgtgtgcttccaacagaaaatgcacaggagtgaggacgccgatgacctatgaagtcaaatttgactttacctttcctcaaagatatatttaaaccaacctcatgccctgttgataaaccaatcaaattggtaaagacctaaaaccaaaacaaataa

SEQ ID NO: 144990 - DNA, 624 bp, Homo sapiens
  Payload ID: 8651
  Gene Symbol: KLK7
  Gene Name: kallikrein-related peptidase 7
  ENST ID: ENST00000593904
  CDS Start-End: 418-624
gattttggagcccagctgtgtgccagcccaagtcggaacttggatcacatcagatcctctcgaggtgagaagaggcttcatcaagggtgcacctgtaggggagagggtgatgctggctccaagcctgactctgctctcgagagctccagcaggagaggcccttcctcgcctggcagcccctgagcggctcagcagggcaccatggcaagatcccttctcctgcccctgcagatcttactgctatccttagccttggaaactgcaggagaagaagcccagggtgacaagattattgatggcgccccatgtgcaagaggctcccacccatggcaggtggccctgctcagtggcaatcagctccactgcggaggcgtcctggtcaatgagcgctgggtgctcactgccgcccactgcaagatgaatgagtacaccgtgcacctgggcagtgatacgctgggcgacaggagagctcagaggatcaaggcctcgaagtcattccgccaccccggctactccacacagacccatgttaatgacctcatgctcgtgaagctcaatagccaggccaggctgtcatccatggtgaagaaagtcaggctgccctcccgctgcgaaccccctgga

SEQ ID NO: 144991 - DNA, 1756 bp, Homo sapiens
  Payload ID: 8651
  Gene Symbol: KLK7
  Gene Name: kallikrein-related peptidase 7
  Uniprot ID: P49862
  ENST ID: ENST00000595820
  CDS Start-End: 247-1008
agataaccagaaccgcaaatgcaggcgggggtgtcccagagtcggctccgcctgcaccccagggcgctggggccgggcatggggcggggggtgatataagaggacggcccagcagagggatgaagattttggagcccagctgtgtgccagcccaagtcggaacttggatcacatcagatcctctcgagctccagcaggagaggcccttcctcgcctggcagcccctgagcggctcagcagggcaccatggcaagatcccttctcctgcccctgcagatcttactgctatccttagccttggaaactgcaggagaagaagcccagggtgacaagattattgatggcgccccatgtgcaagaggctcccacccatggcaggtggccctgctcagtggcaatcagctccactgcggaggcgtcctggtcaatgagcgctgggtgctcactgccgcccactgcaagatgaatgagtacaccgtgcacctgggcagtgatacgctgggcgacaggagagctcagaggatcaaggcctcgaagtcattccgccaccccggctactccacacagacccatgttaatgacctcatgctcgtgaagctcaatagccaggccaggctgtcatccatggtgaagaaagtcaggctgccctcccgctgcgaaccccctggaaccacctgtactgtctccggctggggcactaccacgagcccagatgtgacctttccctctgacctcatgtgcgtggatgtcaagctcatctccccccaggactgcacgaaggtttacaaggacttactggaaaattccatgctgtgcgctggcatccccgactccaagaaaaacgcctgcaatggtgactcagggggaccgttggtgtgcagaggtaccctgcaaggtctggtgtcctggggaactttcccttgcggccaacccaatgacccaggagtctacactcaagtgtgcaagttcaccaagtggataaatgacaccatgaaaaagcatcgctaacgccacactgagttaattaactgtgtgcttccaacagaaaatgcacaggagtgaggacgccgatgacctatgaagtcaaatttgactttacctttcctcaaagatatatttaaaccaacctcatgccctgttgataaaccaatcaaattggtaaagacctaaaaccaaaacaaataaagaaacacaaaaccctcagtgctggagaagagtcagtgagaccagcactctcaaacactggaactggacgttcgtacagtctttacggaagacacttggtcaacgtacaccgagacccttattcaccacctttgacccagtaactctaatcttaggaagaacctactgaaacaaaaaaaatccaaaatgtagaacaagacttgaatttaccatgatattatttatcacagaaatgaagtgaaaccatcaaacatgttccaaaagtaccagatggcttaaataatagtctggcttggcacaacgatgttttttttctttgagacagagtctctgttgcttgggctgcaatgcagtgatgcaatcttggctcactgcaacctccgcctcctgggttcaagtgattctcgtgcttcagcctcccaagtacctgggactacaggtgtgcaccaccacaccaggctaattttttgtgtatttttactagagacagggtttcaccatgttggccagcatggtcttgaacgcctgacctcagatgatccacccaccttggcctcccaaagtgctggga

SEQ ID NO: 144992 - DNA, 853 bp, Homo sapiens
  Payload ID: 8652
  Gene Symbol: KLK8
  Gene Name: kallikrein-related peptidase 8
  ENST ID: ENST00000291726
  CDS Start-End: 383-802
gttcccagaagctccccaggctctagtgcaggaggagaaggaggaggagcaggaggtggagattcccagttaaaaggctccagaatcgtgtaccaggcagagaactgaagtactggggcctcctccactgggtccgaatcagtaggtgaccccgcccctggattctggaagacctcaccatgggacgcccccgacctcgtgcggccaagacgtggatgttcctgctcttgctggggggagcctgggcaggaaatacacagtacgcctgggagaccacagcctacagaataaagatggcccagagcaagaaatacctgtggttcagtccatcccacacccctgctacaacagcagcgatgtggaggaccacaaccatgatctgatgcttcttcaactgcgtgaccaggcatccctggggtccaaagtgaagcccatcagcctggcagatcattgcacccagcctggccagaagtgcaccgtctcaggctggggcactgtcaccagtccccgagagaattttcctgacactctcaactgtgcagaagtaaaaatctttccccagaagaagtgtgaggatgcttacccggggcagatcacagatggcatggtctgtgcaggcagcagcaaaggggctgacacgtgccagggcgattctggaggccccctggtgtgtgatggtgcactccagggcatcacatcctggggctcagacccctgtgggaggtccgacaaacctggcgtctataccaacatctgccgctacctggactggatcaagaagatcataggcagcaagggctgattctaggataagcactagatctcccttaataaactcacaactctctggttc

SEQ ID NO: 144993 - DNA, 456 bp, Homo sapiens
  Payload ID: 8652
  Gene Symbol: KLK8
  Gene Name: kallikrein-related peptidase 8
  Uniprot ID: O60259
  ENST ID: ENST00000320838
  CDS Start-End: 180-278
gttcccagaagctccccaggctctagtgcaggaggagaaggaggaggagcaggaggtggagattcccagttaaaaggctccagaatcgtgtaccaggcagagaactgaagtactggggcctcctccactgggtccgaatcagtaggtgaccccgcccctggattctggaagacctcaccatgggacgcccccgacctcgtgcggccaagacgtggatgttcctgctcttgctggggggagcctgggcagggcgattctggaggccccctggtgtgtgatggtgcactccagggcatcacatcctggggctcagacccctgtgggaggtccgacaaacctggcgtctataccaacatctgccgctacctggactggatcaagaagatcataggcagcaagggctgattctaggataagcactagatctcccttaataaactcacaactctctggttc

SEQ ID NO: 144994 - DNA, 555 bp, Homo sapiens
  Payload ID: 8652
  Gene Symbol: KLK8
  Gene Name: kallikrein-related peptidase 8
  Uniprot ID: O60259
  ENST ID: ENST00000347619
  CDS Start-End: 146-505
gagaaggaggaggagcaggaggtggagattcccagttaaaaggctccagaatcgtgtaccaggcagagaactgaagtactggggcctcctccactgggtccgaatcagtaggtgaccccgcccctggattctggaagacctcaccatgggacgcccccgacctcgtgcggccaagacgtggatgttcctgctcttgctggggggagcctgggcagagaattttcctgacactctcaactgtgcagaagtaaaaatctttccccagaagaagtgtgaggatgcttacccggggcagatcacagatggcatggtctgtgcaggcagcagcaaaggggctgacacgtgccagggcgattctggaggccccctggtgtgtgatggtgcactccagggcatcacatcctggggctcagacccctgtgggaggtccgacaaacctggcgtctataccaacatctgccgctacctggactggatcaagaagatcataggcagcaagggctgattctaggataagcactagatctcccttaataaactcacaactctctggtt

SEQ ID NO: 144995 - DNA, 1051 bp, Homo sapiens
  Payload ID: 8652
  Gene Symbol: KLK8
  Gene Name: kallikrein-related peptidase 8
  Uniprot ID: O60259
  ENST ID: ENST00000391806
  CDS Start-End: 82-999
agagaactgaagtactggggcctcctccactgggtccgaatcagtaggtgaccccgcccctggattctggaagacctcaccatgggacgcccccgacctcgtgcggccaagacgtggatgttcctgctcttgctggggggagcctgggcagcgtgtggaagcctggacctcctcactaagttgtatgcggagaacttgccgtgtgtccatttgaacccacagtggccttcccagccctcgcactgccccagagggtggcgatccaaccctctccctcctgctgcaggacactccagggcacaggaggacaaggtgctggggggtcatgagtgccaaccccattcgcagccttggcaggcggccttgttccagggccagcaactactctgtggcggtgtccttgtaggtggcaactgggtccttacagctgcccactgtaaaaaaccgaaatacacagtacgcctgggagaccacagcctacagaataaagatggcccagagcaagaaatacctgtggttcagtccatcccacacccctgctacaacagcagcgatgtggaggaccacaaccatgatctgatgcttcttcaactgcgtgaccaggcatccctggggtccaaagtgaagcccatcagcctggcagatcattgcacccagcctggccagaagtgcaccgtctcaggctggggcactgtcaccagtccccgagagaattttcctgacactctcaactgtgcagaagtaaaaatctttccccagaagaagtgtgaggatgcttacccggggcagatcacagatggcatggtctgtgcaggcagcagcaaaggggctgacacgtgccagggcgattctggaggccccctggtgtgtgatggtgcactccagggcatcacatcctggggctcagacccctgtgggaggtccgacaaacctggcgtctataccaacatctgccgctacctggactggatcaagaagatcataggcagcaagggctgattctaggataagcactagatctcccttaataaactcacaactctctggttcc

SEQ ID NO: 144996 - DNA, 267 bp, Homo sapiens
  Payload ID: 8652
  Gene Symbol: KLK8
  Gene Name: kallikrein-related peptidase 8
  Uniprot ID: O60259
  ENST ID: ENST00000593490
  CDS Start-End: 1-99
atgggacgcccccgacctcgtgcggccaagacgtggatgttcctgctcttgctggggggagcctgggcagggcgattctggaggccccctggtgtgtgatggtgcactccagggcatcacatcctggggctcagacccctgtgggaggtccgacaaacctggcgtctataccaacatctgccgctacctggactggatcaagaagatcataggcagcaagggctgattctaggataagcactagatctcccttaataaactcacaac

SEQ ID NO: 144997 - DNA, 1324 bp, Homo sapiens
  Payload ID: 8652
  Gene Symbol: KLK8
  Gene Name: kallikrein-related peptidase 8
  Uniprot ID: O60259
  ENST ID: ENST00000600767
  CDS Start-End: 491-1273
cgcccctcgtgatgtcaggggcgcagtagctccgcccacgtggagctcgggcggtgtagagctcagccccttgtggccccgtcctgggcgtgtgctgggtttgaatcctggcggagacctggggggaaattgagggagggtctggatacctttagagccaatgcaacggatgatttttcagtaaacgcgggaaacctcaccttctttctgcctgagctgtgagatgagtggagagcaaacgggtgggcggtgaagggcagatgagggaaccggtaccgccttgcaactcccccttaaacccctatgttccagttcccagaagctccccaggctctagtgcaggaggagaaggaggaggagcaggaggtggagattcccagttaaaaggctccagaatcgtgtaccaggcagagaactgaagtactggggcctcctccactgggtccgaatcagtaggtgaccccgcccctggattctggaagacctcaccatgggacgcccccgacctcgtgcggccaagacgtggatgttcctgctcttgctggggggagcctgggcaggacactccagggcacaggaggacaaggtgctggggggtcatgagtgccaaccccattcgcagccttggcaggcggccttgttccagggccagcaactactctgtggcggtgtccttgtaggtggcaactgggtccttacagctgcccactgtaaaaaaccgaaatacacagtacgcctgggagaccacagcctacagaataaagatggcccagagcaagaaatacctgtggttcagtccatcccacacccctgctacaacagcagcgatgtggaggaccacaaccatgatctgatgcttcttcaactgcgtgaccaggcatccctggggtccaaagtgaagcccatcagcctggcagatcattgcacccagcctggccagaagtgcaccgtctcaggctggggcactgtcaccagtccccgagagaattttcctgacactctcaactgtgcagaagtaaaaatctttccccagaagaagtgtgaggatgcttacccggggcagatcacagatggcatggtctgtgcaggcagcagcaaaggggctgacacgtgccagggcgattctggaggccccctggtgtgtgatggtgcactccagggcatcacatcctggggctcagacccctgtgggaggtccgacaaacctggcgtctataccaacatctgccgctacctggactggatcaagaagatcataggcagcaagggctgattctaggataagcactagatctcccttaataaactcacaactctctggttc

SEQ ID NO: 144998 - DNA, 570 bp, Homo sapiens
  Payload ID: 8652
  Gene Symbol: KLK8
  Gene Name: kallikrein-related peptidase 8
  ENST ID: ENST00000595238
  CDS Start-End: 280-570
gcccacgtggagctcgggcggtgtagagctcagccccttgtggccccgtcctgggcgtgtgctgggtttgaatcctggcggagacctggggggaaattgagggagggtctggatacctttagagccaatgcaacggatgatttttcagtaaacgcgggaaacctcaccttctttctgcctgagctgtgagatgagtggagagcaaacgggtgggcggtgaagggcagatgagggaaccggtaccgccttgcaactcccccttaaacccctaacctcaccatgggacgcccccgacctcgtgcggccaagacgtggatgttcctgctcttgctggggggagcctgggcaggacactccagggcacaggaggacaaggtgctggggggtcatgagtgccaaccccattcgcagccttggcaggcggccttgttccagggccagcaactactctgtggcggtgtccttgtaggtggcaactgggtccttacagctgcccactgtaaaaaaccgaaatacacagtacgcctgggagaccacagcctacagaataaagatggcccagagcaagaa

SEQ ID NO: 144999 - DNA, 481 bp, Homo sapiens
  Payload ID: 8652
  Gene Symbol: KLK8
  Gene Name: kallikrein-related peptidase 8
  ENST ID: ENST00000594669
  CDS Start-End: 1-163
cctgctcttgctggggggagcctgggcaggaaatacacagtacgcctgggagaccacagcctacagaataaagatggcccagagcaagaaatacctgtggttcagtccatcccacacccctgctacaacagcagcgatgtggaggaccacaaccatgatctgatgcttcttcaactgcgtgaccaggcatccctggggtccaaagtgaagcccatcagcctggcagatcattgcacccagcctggccagaagtgcaccgtctcaggctggggcactgtcaccagtccccgagagaattttcctgacactctcaactgtgcagaagtaaaaatctttccccagaagaagtgtgaggatgcttacccggggcagatcacagatggcatggtctgtgcaggcagcagcaaaggggctgacacgtgccagggcgattctggaggccccctggtgtgtgatggtgcactccagggcatcacatcct

SEQ ID NO: 145000 - DNA, 683 bp, Homo sapiens
  Payload ID: 8653
  Gene Symbol: KLK9
  Gene Name: kallikrein-related peptidase 9
  Uniprot ID: Q9UKQ9
  ENST ID: ENST00000544410
  CDS Start-End: 88-273
catggaggaggaaggagatggcatggcttaccataaagaagcactggacgccgggtgcacgttccaggatccaggtgcccaggggtcatgaagctgggactcctctgtgctctgctctctctgctggcaggtatctgtgggtccgccttggagagcaccacctctggaaatgggagggtccggagcagctgttccgggttacggacttcttcccccaccctggcttcaacaaggacctcagcgccaatgaccacaatgatgacatcatgctgatccgcctgcccaggcaggcacgtctgagtcctgctgtgcagcccctcaacctcagccagacctgtgtctccccaggcatgcagtgtctcatctcaggctggggggccgtgtccagccccaaggcgctgtttccagtcacactgcagtgtgccaacatcagcatcctggagaacaaactctgtcactgggcataccctggacacatctcggacagcatgctctgtgcgggcctgtgggaggggggccgaggttcctgccagggtgactctgggggccccctggtttgcaatggaaccttggcaggcgtggtgtctgggggtgctgagccctgctccagaccccggcgccccgcagtctacaccagcgtatgccactaccttgactggatccaagaaatcatggagaactga

SEQ ID NO: 145001 - DNA, 754 bp, Homo sapiens
  Payload ID: 8653
  Gene Symbol: KLK9
  Gene Name: kallikrein-related peptidase 9
  Uniprot ID: Q9UKQ9
  ENST ID: ENST00000594211
  CDS Start-End: 2-754
catgaagctgggactcctctgtgctctgctctctctgctggcagggcatggctgggcagacacccgtgccatcggggccgaggaatgtcgccccaactcccagccttggcaggccggcctcttccaccttactcggctcttctgtggggcgaccctcatcagtgaccgctggctgctcacagctgcccactgccgcaagccgtatctgtgggtccgccttggagagcaccacctctggaaatgggagggtccggagcagctgttccgggttacggacttcttcccccaccctggcttcaacaaggacctcagcgccaatgaccacaatgatgacatcatgctgatccgcctgcccaggcaggcacgtctgagtcctgctgtgcagcccctcaacctcagccagacctgtgtctccccaggcatgcagtgtctcatctcaggctggggggccgtgtccagccccaaggcgctgtttccagtcacactgcagtgtgccaacatcagcatcctggagaacaaactctgtcactgggcataccctggacacatctcggacagcatgctctgtgcgggcctgtgggaggggggccgaggttcctgccagggtgactctgggggccccctggtttgcaatggaaccttggcaggcgtggtgtctgggggtgctgagccctgctccagaccccggcgccccgcagtctacaccagcgtatgccactaccttgactggatccaagaaatcatggagaactga

SEQ ID NO: 145002 - DNA, 1691 bp, Homo sapiens
  Payload ID: 8654
  Gene Symbol: KPTN
  Gene Name: kaptin (actin binding protein)
  Uniprot ID: Q9Y664
  ENST ID: ENST00000338134
  CDS Start-End: 109-1419
agcccgcgcaacggccgggcacccggcggttcaggtcgcttagagagtcgtaggttgggtagtgcgggttggggcgggggctgcggagagggtgcttaactgaggggcatgatgggggaggcggccgtggccgcggggccttgtccgttgcgcgaggacagcttcacgcgcttctcgtcgcagagcaatgtgtacgggctggcaggcggcgccggcgggcgcggggagctgctggccgccacccttaaaggcaaggtgctcggcttccgctaccaagacctccgacagaaaatccggccagtggccaaggagctgcagttcaactacattcccgtggatgcggagattgtctccatcgacactttcaacaagtcaccccccaagcggggtctggttgtggggatcacgttcatcaaggattcaggggacaagggcagccccttcctgaacatttactgcgactacgagcccggctctgagtacaaccttgactctattgcccagagctgcctgaacctggagctccagttcactccgttccagctgtgccatgcggaggtccaggtcggggatcaacttgagactgtgtttctcttgagtgggaacgacccggccattcatctctacaaggagaacgaggggctgcatcagtttgaggaacagcccgtggaaaacctcttcccagagctgacgaacctgaccagtagcgtcctctggctggacgtccacaacttccccggcacgtcccggcgcctctcagctctgggctgtcagagtggttatgtccgtgtcgcccacgtggaccagcggagtcgagaggttctgcagatgtggtcggtcctgcaggacggtcccatctcccgagtgattgtgttcagcctctcggccgccaaggagaccaaggacaggccactacaagatgagtacagcgtgctcgtggccagcatgttggagccagcagtggtgtatcgggacctgctgaaccggggtcttgaagaccagcttctcctgcccggcagtgaccagtttgacagcgtcctctgcagcctggtcaccgatgtggatttggatgggcggccagaagtcctggtggccacctatggacaggaactgctgtgttataagtaccggggcccagagtcggggcttcctgaggcccagcacgggttccatctgctgtggcagcggagcttctccagtcccctgctggccatggctcacgtggacctgaccggggatgggctgcaggagcttgccgtggtctccctgaagggcgtgcacatcctgcagcacagcctgattcaggcctcagagctggtcttgacccggcttcgacatcaagtggagcagaggagacgtcggctacaggggttggaggacggggcaggtgcagggcctgctgagaatgcagcctcttaagcacccatgcacccactcttcccagacctggggcgactcatggcgtgctcacctccagccgctggtggggggtgtcctgaaggacaggatgctctccccagacctccccagggtggtgaagctgtgccctggggccccagctaacccactcctctctctgtacgtcaatgtccctatttgaaagcagggatgatcccattccaccctgtccactctggatgagaattggccacctgatggttatttatacgtccagaagaacatcatttccc

SEQ ID NO: 145003 - DNA, 806 bp, Homo sapiens
  Payload ID: 8654
  Gene Symbol: KPTN
  Gene Name: kaptin (actin binding protein)
  ENST ID: ENST00000595554
  CDS Start-End: 17-806
tgcttaactgaggggcatgatgggggaggcggccgtggccgcggggccttgtccgttgcgcgaggacagcttcacgcgcttctcgtcgcagagcaatgtgtacgggctggcaggcggcgccggcgggcgcggggagctgctggccgccacccttaaaggcaaggtgctcggcttccgctaccaagacctccgacagaaaatccggccagtggccaaggagctgcagttcaactacattcccgagagctgcctgaacctggagctccagttcactccgttccagctgtgccatgcggaggtccaggtcggggatcaacttgagactgtgtttctcttgagtgggaacgacccggccattcatctctacaaggagaacgaggggctgcatcagtttgaggaacagcccgtggaaaacctcttcccagagctgacgaacctgaccagtagcgtcctctggctggacgtccacaacttccccggcacgtcccggcgcctctcagctctgggctgtcagagtggttatgtccgtgtcgcccacgtggaccagcggagtcgagaggttctgcagatgtggtcggtcctgcaggacggtcccatctcccgagtgattgtgttcagcctctcggccgccaaggagaccaaggacaggccactacaagatgagtacagcgtgctcgtggccagcatgttggagccagcagtggtgtatcgggacctgctgaaccggggtcttgaagaccagcttctcctgcccggcagtgaccagtttgacagcgtcctctgcagcctggtcaccgatgtggatt

SEQ ID NO: 145004 - DNA, 1623 bp, Homo sapiens
  Payload ID: 8654
  Gene Symbol: KPTN
  Gene Name: kaptin (actin binding protein)
  ENST ID: ENST00000594208
  CDS Start-End: 3-455
gcatgatgggggaggcggccgtggccgcggggccttgtccgttgcgcgaggacagcttcacgcgcttctcgtcgcagagcaatgtgtacgggctggcaggcggcgccggcgggcgcggggagctgctggccgccacccttaaaggcaaggtgctcggcttccgctaccaagacctccgacagaaaatccggccagtggccaaggagctgcagttcaactacattcccgtggatgcggagattgtctccatcgacactttcaacaagtcaccccccaagcggggtctggttgtggggatcacgttcatcaaggattcaggggacaagggcagccccttcctgaacatttactgcgactacgagcccggctctgagtacaaccttgactctattgcccagagctgcctgaacctggagctccagttcactccgttccagctgtgccatgcggagtgagtgtcccctgcgcatcgacgcccactccactatggtgggttggatttggtctgcaggtcataacttggccaacctctggtctaacagggtccaggtcggggatcaacttgagactgtgtttctcttgagtgggaacgacccggccattcatctctacaaggagaacgaggggctgcatcagtttgaggaacagcccgtggaaaacctcttcccagagctgacgaacctgaccacgtcctctggctggacgtccacaacttccccggcacgtcccggcgcctctcagctctgggctgtcagagtggttatgtccgtgtcgcccacgtggaccagcggagtcgagaggttctgcagatgtggtcggtcctgcaggacggtcccatctcccgagtgattgtgttcagcctctcggccgccaaggagaccaaggacaggccactacaagatgagtacagcgtgctcgtggccagcatgttggagccagcagtggtgtatcgggacctgctgaaccggggtcttgaagaccagcttctcctgcccggcagtgaccagtttgacagcgtcctctgcagcctggtcaccgatgtggatttggatgggcggccagaagtcctggtggccacctatggacaggaactgctgtgttataagtaccggggcccagagtcggggcttcctgaggcccagcacgggttccatctgctgtggcagcggagcttctccagtcccctgctggccatggctcacgtggacctgaccggggatgggctgcaggagcttgccgtggtctccctgaagggcgtgcacatcctgcagcacagcctgattcaggcctcagagctggtcttgacccggcttcgacatcaagtggagcagaggagacgtcggctacaggggttggaggacggggcaggtgcagggcctgctgagaatgcagcctcttaagcacccatgcacccactcttcccagacctggggcgactcatggcgtgctcacctccagccgctggtggggggtgtcctgaaggacaggatgctctccccagacctccccagggtggtgaagctgtgccctggggccccagctaacccactcctctctctgtacgtcaatgtccctatttgaaagcagggatgatcccattccaccctgtccactctggatgag

SEQ ID NO: 145005 - DNA, 743 bp, Homo sapiens
  Payload ID: 8654
  Gene Symbol: KPTN
  Gene Name: kaptin (actin binding protein)
  ENST ID: ENST00000600271
  CDS Start-End: 616-743
gtaggttgggtagtgcgggttggggcgggggctgcggagagggtgctcggcttccgctaccaagacctccgacagaaaatccggccagtggccaaggagctgcagttcaactacattcccgtggatgcggagattgtctccatcgacactttcaacaagtcaccccccaagcggggtctggttgtggggatcacgttcatcaaggattcaggggacaagggcagccccttcctgaacatttactgcgactacgagcccggctctgagtacaaccttgactctattgcccagagctgcctgaacctggagctccagttcactccgttccagctgtgccatgcggaggtccaggtcggggatcaacttgagactgtgtttctcttgagtgggaacgacccggccattcatctctacaaggagaacgaggggctgcatcagtttgaggaacagcccgtggaaaacctcttcccagagctgacgaacctgaccagtagcgtcctctggctggacgtccacaacttccccggcacgtcccggcgcctctcagctctgggctgtcagagtggttatgtccgtgtcgcccacgtggaccagcggagtcgagaggttctgcagatgtggtcggtcctgcaggacggtcccatctcccgagtgattgtgttcagcctctcggccgccaaggagaccaaggacaggccactacaagatgagtacagcgtgctcgtggccagcatgttggagcc

SEQ ID NO: 145006 - DNA, 6139 bp, Homo sapiens
  Payload ID: 8655
  Gene Symbol: KPNB1
  Gene Name: karyopherin (importin) beta 1
  Uniprot ID: Q14974
  ENST ID: ENST00000290158
  CDS Start-End: 408-3038
aacggccaatcgtcgtggagcgcggcgcctccgcggagaggtccggtccgaatatccctccgccttcctccctccctcgctccctccctgcgcgccgcctctcactcacagcctcccttccttctttctccctccgcctcccgagcaccagcgcgctctgagctgcccccagggtccctcccccgccgccagcagcccatttggagggaggaagtaagggaagaggagaggaaggggagccggaccgactacccagacagagccggtgaatgggtttgtggtgacccccgccccccaccccaccctcccttcccacccgacccccaacccccatccccagttcgagccgccgcccgaaaggccgggccgtcgtcttaggaggagtcgccgccgccgccacctccgccatggagctgatcaccattctcgagaagaccgtgtctcccgatcggctggagctggaagcggcgcagaagttcctggagcgtgcggccgtggagaacctgcccactttccttgtggaactgtccagagtgctggcaaatccaggaaacagtcaggttgccagagttgcagctggtctacaaatcaagaactctttgacatctaaagatccagatatcaaggcacaatatcagcagaggtggcttgctattgatgctaatgctcgacgagaagtcaagaactatgttttgcagacattgggtacagaaacttaccggcctagttctgcctcacagtgtgtggctggtattgcttgtgcagagatcccagtaaaccagtggccagaactcattcctcagctggtggccaatgtcacaaaccccaacagcacagagcacatgaaggagtcgacattggaagccatcggttatatttgccaagatatagacccagagcagctacaagataaatccaatgagattctgactgccataatccaggggatgaggaaagaagagcctagtaataatgtgaagctagctgctacgaatgcactcctgaactcattggagttcaccaaagcaaactttgataaagagtctgaaaggcactttattatgcaggtggtctgtgaagccacacagtgtccagatacgagggtacgagtggctgctttacagaatctggtgaagataatgtccttatattatcagtacatggagacatatatgggtcctgctctttttgcaatcacaatcgaagcaatgaaaagtgacattgatgaggtggctttacaagggatagaattctggtccaatgtctgtgatgaggaaatggatttggccattgaagcttcagaggcagcagaacaaggacggccccctgagcacaccagcaagttttatgcgaagggagcactacagtatctggttccaatcctcacacagacactaactaaacaggacgaaaatgatgatgacgatgactggaacccctgcaaagcagcaggggtgtgcctcatgcttctggccacctgctgtgaagatgacattgtcccacatgtcctccccttcattaaagaacacatcaagaacccagattggcggtaccgggatgcagcagtgatggcttttggttgtatcttggaaggaccagagcccagtcagctcaaaccactagttatacaggctatgcccaccctaatagaattaatgaaagaccccagtgtagttgttcgagatacagctgcatggactgtaggcagaatttgtgagctgcttcctgaagctgccatcaatgatgtctacttggctcccctgctacagtgtctgattgagggtctcagtgctgaacccagagtggcttcaaatgtgtgctgggctttctccagtctggctgaagctgcttatgaagctgcagacgttgctgatgatcaggaagaaccagctacttactgcttatcttcttcatttgaactcatagttcagaagctcctagagactacagacagacctgatggacaccagaacaacctgaggagttctgcatatgaatctctgatggaaattgtgaaaaacagtgccaaggattgttatcctgctgtccagaaaacgactttggtcatcatggaacgactgcaacaggttcttcagatggagtcacatatccagagcacatccgatagaatccagttcaatgaccttcagtctttactctgtgcaactcttcagaatgttcttcggaaagtgcaacatcaagatgctttgcagatctctgatgtggttatggcctccctgttaaggatgttccaaagcacagctgggtctgggggagtacaagaggatgccctgatggcagttagcacactggtggaagtgttgggtggtgaattcctcaagtacatggaggcctttaaacccttcctgggcattggattaaaaaattatgctgaataccaggtttgtttggcagctgtgggcttagtgggagacttgtgccgtgccctgcaatccaacatcatacctttctgtgacgaggtgatgcagctgcttctggaaaatttggggaatgagaacgtccacaggtctgtgaagccgcagattctgtcagtgtttggtgatattgcccttgctattggaggagagtttaaaaaatacttagaggttgtattgaatactcttcagcaggcctcccaagcccaggtggacaagtcagactatgacatggtggattatctgaatgagctaagggaaagctgcttggaagcctatactggaatcgtccagggattaaagggggatcaggagaacgtacacccggatgtgatgctggtacaacccagagtagaatttattctgtctttcattgaccacattgctggagatgaggatcacacagatggagtagtagcttgtgctgctggactaataggggacttatgtacagcatttgggaaggatgtactgaaattagtagaagctaggccaatgatccatgaattgttaactgaagggcggagatcgaagactaacaaagcaaaaacccttgctacatgggcaacaaaagaactgaggaaactgaagaaccaagcttgatctgttaccattgggatgataacctgaggacccccactggaaatctcccatcttttgaaaaacctggaagtgaggagtgtgcacggatgctgaatgtttgggaatgagaggatgagtgagtgaggcttgaaaacacaccacattgaaaatcctgccacagcagcagccgcagccgccaacagcagcgctgttagtgagctaagtaagcactgacttcgtagaaaaccataacatcggccatcttggaaaagagaaaaacaatggagttacttatttaaaaaaaaagaaagaaagttatctcttcccaggagaggctagaagtagcttttctgtcttttggccagtgccgagtggaatgcctggtttgggggaggaggagggactgggttcagctgtggtgctttgttgtaaaaggcagcctggcctttgctactgaggagaaagatggagcctgggtctcaagcccaccttcgctgtacctttgccacatggtactgtatgcttgccagctagaaggagggtcagggattttttacagtctgagaatgagtgtgtgtgagtgaggcggtatccacattctcaacttcaagtcattgcagtttctttttcccagaaaacaaggggttagatgttgcatttcataaaactaaccgaagttttgtttactgatgcagcacaagagatgtaaaaaaaaaaaaaaaaaaaaaaaaaaaaacacacacacagaggaaagacgctctttaggttttgttttgttttttttttttggttttgttttttgttttttttactctagggaaaacactgacgaatggtcagagctcctatcctgatcttttcatcaaggcgcctttcctaataatatggttcaactgtgaatgtagaagtgggggggaggggggagaaaaagaaaactctggcgttagaggatatagaaaaatataagtacaattgttacaaataacgcagacttcaaaaacaaaaaaatcacaacccaaacaaaccaaaatttaaatgatcagaattggcagcacaaagaaaacgccctctcctgacttgtattgtggcagtctgaacgcccccagaaaattgtgccaaagagtttagaaaaataaatatacaataaaagtaaacacatacacacaaaacagcaaacttcaggtaactattttggattgcaaacaggataaattaaatgttcaaacaatctgataaaataaccatttggaaactgcttggccttctgttcttttatttgattgactacaatgcggtattggtctcttgctgcacttcaaaagcaaccaacaaaacaaaaacaaaaaaaagtgtgtgttgtgtgaatacacacacacactaactagaagtcttgtgatgaaaatggcacttggaaaaggttttatttttccactgaagttgaaggttaataaaatggtgtcaaacgtcccctggtcacacacttgaatatttttttagaagtgtgatgtggtatgattaccataaatcagacttaattattttcccttttacaagggaacagggcatcctgaattttagagcctttcagcaataagaagggatgttggtgagctttgatcctcttttggttttgcagttgttaggagtttttgctggcattttgaatatgctgctttcagaaaaaccaaggaagttttaaaattgcttcctggtccttagaggactaaaaacaagaccctcattcccactttcatttccactctagcaaaaactgggcttgcgtttttctccaactcctcgtttatatcctcccttccatgtccaagccttccattcctaagtgggattggctcagttttgcccatccatatggcagcatctctaatagctcttgtacagggtatcagatattgtgccttttggtgccaggttcaaagtcaagtgccgatctatgaaccagtgtacaaaaaaaaaaaaatccaggtatttgaaggagagacgctccattgtgaataaagagctcataccagctcctaagccctattaagaagaggcctggtcctctaatgccttgtttccatttcagttgttctttgagagacagaatgatgtactaaccattcgtgattattaagatagggttgggtcagggcttagggagggggcagaaatattggggatagaaaaaaaatctgatcattcctcagtgctacccatttctgtcctgtgtgggctgcttagctagacagcaggagaataaagtacaccgagaaccataatgaaaaaaccttccgtgtgttttgtcatgttttgttccagggaagcagttgatgagtgctgttactaatgctttctcccagatccattcagtggtggagaggaggaaaatgggctggttggatgtggtcttggtgccttgcagttactctgcactggttatgcatttaattctcctcttttctagttaaccttttgccagtgggttttccatagtctgggtatttgtccttatatcagttataccacctaaggcaactgggtgcaaaatgcattctgttcactcactgtctgggccttccccaccctagtcttggcacattccttcaagaatgtagttaccgtctgcttgggaagatgtcagtgcaaatgtgaagataatgggcatcggactaggctttggtttgccacaagtggcagctgcctgtatcaattacatttattaattttgcttttcatttttcccagttctcctcaccccccctttgttgaaatgttggacttgctgtcagaggcaactgtaatattgccttagggacttgtggagaaggggaattgctcagtgtagtgttttaactttcagaaccaagcaatctatttactcttacaaatatttaagaagtgtgttagtccaactttaagaaaaatccaaactcatcagcttttgatagcatcttggtttttgaaacaacttcaatctgtaattggcattcagaatgcccttggcatgccagtctgtgatggcatttaagacctgtaaaacacttgagcccaactcgattaaccaaaaccgataaccaccacctttatcttctaaataaagtccgctttatttttattttcaa

SEQ ID NO: 145007 - DNA, 3163 bp, Homo sapiens
  Payload ID: 8655
  Gene Symbol: KPNB1
  Gene Name: karyopherin (importin) beta 1
  Uniprot ID: Q14974
  ENST ID: ENST00000535458
  CDS Start-End: 739-2934
gttgccgggcacctcccgccttcccgcgccccgaccccgaactcctctccttagttctcccgggcaccctatcctatcaacgcctactatcccagccaatcgcgcaggatccgagtcgtgcctccggtccaccctcctcccagcgctcagccggtctgagctcaaggcctttaccaagcccacccaatcaacggcgggctctctcctaccccatcccaatctccctcccctcggccaatccgcgcgctccattccgctgcccgcccagccaacccgggccttgaaaccagcaggcgaatgggcgcgagacggcccttcgacgctgagcgcctggccagttagggattccgcgtggccaggacaacggccaatcgtcgtggagcgcggcgcctccgcggagagcccactttccttgtggaactgtccagagtgctggcaaatccaggaaacagtcaggttgccagagttgcagctggtctacaaatcaagaactctttgacatctaaagatccagatatcaaggcacaatatcagcagaggtggcttgctattgatgctaatgctcgacgagaagtcaagaactatgttttgcagacattgggtacagaaacttaccggcctagttctgcctcacagtgtgtggctggtattgcttgtgcagagatcccagtaaaccagtggccagaactcattcctcagctggtggccaatgtcacaaaccccaacagcacagagcacatgaaggagtcgacattggaagccatcggttatatttgccaagatatagacccagagcagctacaagataaatccaatgagattctgactgccataatccaggggatgaggaaagaagagcctagtaataatgtgaagctagctgctacgaatgcactcctgaactcattggagttcaccaaagcaaactttgataaagagtctgaaaggcactttattatgcaggtggtctgtgaagccacacagtgtccagatacgagggtacgagtggctgctttacagaatctggtgaagataatgtccttatattatcagtacatggagacatatatgggtcctgctctttttgcaatcacaatcgaagcaatgaaaagtgacattgatgaggtggctttacaagggatagaattctggtccaatgtctgtgatgaggaaatggatttggccattgaagcttcagaggcagcagaacaaggacggccccctgagcacaccagcaagttttatgcgaagggagcactacagtatctggttccaatcctcacacagacactaactaaacaggacgaaaatgatgatgacgatgactggaacccctgcaaagcagcaggggtgtgcctcatgcttctggccacctgctgtgaagatgacattgtcccacatgtcctccccttcattaaagaacacatcaagaacccagattggcggtaccgggatgcagcagtgatggcttttggttgtatcttggaaggaccagagcccagtcagctcaaaccactagttatacaggctatgcccaccctaatagaattaatgaaagaccccagtgtagttgttcgagatacagctgcatggactgtaggcagaatttgtgagctgcttcctgaagctgccatcaatgatgtctacttggctcccctgctacagtgtctgattgagggtctcagtgctgaacccagagtggcttcaaatgtgtgctgggctttctccagtctggctgaagctgcttatgaagctgcagacgttgctgatgatcaggaagaaccagctacttactgcttatcttcttcatttgaactcatagttcagaagctcctagagactacagacagacctgatggacaccagaacaacctgaggagttctgcatatgaatctctgatggaaattgtgaaaaacagtgccaaggattgttatcctgctgtccagaaaacgactttggtcatcatggaacgactgcaacaggttcttcagatggagtcacatatccagagcacatccgatagaatccagttcaatgaccttcagtctttactctgtgcaactcttcagaatgttcttcggaaagtgcaacatcaagatgctttgcagatctctgatgtggttatggcctccctgttaaggatgttccaaagcacagctgggtctgggggagtacaagaggatgccctgatggcagttagcacactggtggaagtgttgggtggtgaattcctcaagtacatggaggcctttaaacccttcctgggcattggattaaaaaattatgctgaataccaggtttgtttggcagctgtgggcttagtgggagacttgtgccgtgccctgcaatccaacatcatacctttctgtgacgaggtgatgcagctgcttctggaaaatttggggaatgagaacgtccacaggtctgtgaagccgcagattctgtcagtgtttggtgatattgcccttgctattggaggagagtttaaaaaatacttagaggttgtattgaatactcttcagcaggcctcccaagcccaggtggacaagtcagactatgacatggtggattatctgaatgagctaagggaaagctgcttggaagcctatactggaatcgtccagggattaaagggggatcaggagaacgtacacccggatgtgatgctggtacaacccagagtagaatttattctgtctttcattgaccacattgctggagatgaggatcacacagatggagtagtagcttgtgctgctggactaataggggacttatgtacagcatttgggaaggatgtactgaaattagtagaagctaggccaatgatccatgaattgttaactgaagggcggagatcgaagactaacaaagcaaaaacccttgctacatgggcaacaaaagaactgaggaaactgaagaaccaagcttgatctgttaccattgggatgataacctgaggacccccactggaaatctcccatcttttgaaaaacctggaagtgaggagtgtgcacggatgctgaatgtttgggaatgagaggatgagtgagtgaggcttgaaaacacaccacattgaaaatcctgccacagcagcagccgcagccgccaacagcagcgctgttagtgagctaagtaagcactgacttcgtagaaaaccat

SEQ ID NO: 145008 - DNA, 2989 bp, Homo sapiens
  Payload ID: 8655
  Gene Symbol: KPNB1
  Gene Name: karyopherin (importin) beta 1
  Uniprot ID: Q14974
  ENST ID: ENST00000540627
  CDS Start-End: 518-2713
atttaaggggtccggagaaaatgaagctaagtccgctagagactggtcctttgtataaaaatgtgggatggattggttgaaacagcctagatgccagttaagtttctctttggtgtccatctcctgttgggggatggggtcagagggaaggattggatgatgcttgacatctttgagaaagcccactttccttgtggaactgtccagagtgctggcaaatccaggaaacagtcaggttgccagagttgcagctggtctacaaatcaagaactctttgacatctaaagatccagatatcaaggcacaatatcagcagaggtggcttgctattgatgctaatgctcgacgagaagtcaagaactatgttttgcagacattgggtacagaaacttaccggcctagttctgcctcacagtgtgtggctggtattgcttgtgcagagatcccagtaaaccagtggccagaactcattcctcagctggtggccaatgtcacaaaccccaacagcacagagcacatgaaggagtcgacattggaagccatcggttatatttgccaagatatagacccagagcagctacaagataaatccaatgagattctgactgccataatccaggggatgaggaaagaagagcctagtaataatgtgaagctagctgctacgaatgcactcctgaactcattggagttcaccaaagcaaactttgataaagagtctgaaaggcactttattatgcaggtggtctgtgaagccacacagtgtccagatacgagggtacgagtggctgctttacagaatctggtgaagataatgtccttatattatcagtacatggagacatatatgggtcctgctctttttgcaatcacaatcgaagcaatgaaaagtgacattgatgaggtggctttacaagggatagaattctggtccaatgtctgtgatgaggaaatggatttggccattgaagcttcagaggcagcagaacaaggacggccccctgagcacaccagcaagttttatgcgaagggagcactacagtatctggttccaatcctcacacagacactaactaaacaggacgaaaatgatgatgacgatgactggaacccctgcaaagcagcaggggtgtgcctcatgcttctggccacctgctgtgaagatgacattgtcccacatgtcctccccttcattaaagaacacatcaagaacccagattggcggtaccgggatgcagcagtgatggcttttggttgtatcttggaaggaccagagcccagtcagctcaaaccactagttatacaggctatgcccaccctaatagaattaatgaaagaccccagtgtagttgttcgagatacagctgcatggactgtaggcagaatttgtgagctgcttcctgaagctgccatcaatgatgtctacttggctcccctgctacagtgtctgattgagggtctcagtgctgaacccagagtggcttcaaatgtgtgctgggctttctccagtctggctgaagctgcttatgaagctgcagacgttgctgatgatcaggaagaaccagctacttactgcttatcttcttcatttgaactcatagttcagaagctcctagagactacagacagacctgatggacaccagaacaacctgaggagttctgcatatgaatctctgatggaaattgtgaaaaacagtgccaaggattgttatcctgctgtccagaaaacgactttggtcatcatggaacgactgcaacaggttcttcagatggagtcacatatccagagcacatccgatagaatccagttcaatgaccttcagtctttactctgtgcaactcttcagaatgttcttcggaaagtgcaacatcaagatgctttgcagatctctgatgtggttatggcctccctgttaaggatgttccaaagcacagctgggtctgggggagtacaagaggatgccctgatggcagttagcacactggtggaagtgttgggtggtgaattcctcaagtacatggaggcctttaaacccttcctgggcattggattaaaaaattatgctgaataccaggtttgtttggcagctgtgggcttagtgggagacttgtgccgtgccctgcaatccaacatcatacctttctgtgacgaggtgatgcagctgcttctggaaaatttggggaatgagaacgtccacaggtctgtgaagccgcagattctgtcagtgtttggtgatattgcccttgctattggaggagagtttaaaaaatacttagaggttgtattgaatactcttcagcaggcctcccaagcccaggtggacaagtcagactatgacatggtggattatctgaatgagctaagggaaagctgcttggaagcctatactggaatcgtccagggattaaagggggatcaggagaacgtacacccggatgtgatgctggtacaacccagagtagaatttattctgtctttcattgaccacattgctggagatgaggatcacacagatggagtagtagcttgtgctgctggactaataggggacttatgtacagcatttgggaaggatgtactgaaattagtagaagctaggccaatgatccatgaattgttaactgaagggcggagatcgaagactaacaaagcaaaaacccttgctacatgggcaacaaaagaactgaggaaactgaagaaccaagcttgatctgttaccattgggatgataacctgaggacccccactggaaatctcccatcttttgaaaaacctggaagtgaggagtgtgcacggatgctgaatgtttgggaatgagaggatgagtgagtgaggcttgaaaacacaccacattgaaaatcctgccacagcagcagccgcagccgccaacagcagcgctgttagtgagctaagtaagcactgacttcgtagaaaaccataacatcggccatcttggaaaagagaaaaacaatggagttacttattt

SEQ ID NO: 145009 - DNA, 653 bp, Homo sapiens
  Payload ID: 8655
  Gene Symbol: KPNB1
  Gene Name: karyopherin (importin) beta 1
  ENST ID: ENST00000582126
  CDS Start-End: 1-68
ctaacaaagcaaaaacccttgctacatgggcaacaaaagaactgaggaaactgaagaaccaagcttgatctgttaccattgggatgataacctgaggacccccactggaaatctcccatcttttgaaaaacctggaagtgaggagtgtgcacggatgctgaatgtttgggaatgagaggatgagtgagtgaggcttgaaaacacaccacattgaaaatcctgccacagcagcagccgcagccgccaacagcagcgctgttagtgagctaagtaagcactgacttcgtagaaaaccataacatcggccatcttggaaaagagaaaaacaatggagttacttatttaaaaaaaaagaaagaaagttatctcttcccaggagaggctagaagtagcttttctgtcttttggccagtgccgagtggaatgcctggtttgggggaggaggagggactgggttcaaagtcaagtgccgatctatgaaccagtgtacaaaaaaaaaaaaatccaggtatttgaaggagagacgctccattgtgaataaagagctcataccagctcctaagccctattaagaagaggcctggtcctctaatgccttgtttccatttcagttgttctttgagagacagaatgatgtactaaccattcgtgat

SEQ ID NO: 145010 - DNA, 2347 bp, Homo sapiens
  Payload ID: 8655
  Gene Symbol: KPNB1
  Gene Name: karyopherin (importin) beta 1
  ENST ID: ENST00000582097
  CDS Start-End: 1-2071
tgcttgtgcagagatcccagtaaaccagtggccagaactcattcctcagctggtggccaatgtcacaaaccccaacagcacagagcacatgaaggagtcgacattggaagccatcggttatatttgccaagatatagacccagagcagctacaagataaatccaatgagattctgactgccataatccaggggatgaggaaagaagagcctagtaataatgtgaagctagctgctacgaatgcactcctgaactcattggagttcaccaaagcaaactttgataaagagtctgaaaggcactttattatgcaggtggtctgtgaagccacacagtgtccagatacgagggtacgagtggctgctttacagaatctggtgaagataatgtccttatattatcagtacatggagacatatatgggtcctgctctttttgcagacgaaaatgatgatgacgatgactggaacccctgcaaagcagcaggggtgtgcctcatgcttctggccacctgctgtgaagatgacattgtcccacatgtcctccccttcattaaagaacacatcaagaacccagattggcggtaccgggatgcagcagtgatggcttttggttgtatcttggaaggaccagagcccagtcagctcaaaccactagttatacaggctatgcccaccctaatagaattaatgaaagaccccagtgtagttgttcgagatacagctgcatggactgtaggcagaatttgtgagctgcttcctgaagctgccatcaatgatgtctacttggctcccctgctacagtgtctgattgagggtctcagtgctgaacccagagtggcttcaaatgtgtgctgggctttctccagtctggctgaagctgcttatgaagctgcagacgttgctgatgatcaggaagaaccagctacttactgcttatcttcttcatttgaactcatagttcagaagctcctagagactacagacagacctgatggacaccagaacaacctgaggagttctgcatatgaatctctgatggaaattgtgaaaaacagtgccaaggattgttatcctgctgtccagaaaacgactttggtcatcatggaacgactgcaacaggttcttcagatggagtcacatatccagagcacatccgatagaatccagttcaatgaccttcagtctttactctgtgcaactcttcagaatgttcttcggaaagtgcaacatcaagatgctttgcagatctctgatgtggttatggcctccctgttaaggatgttccaaagcacagctgggtctgggggagtacaagaggatgccctgatggcagttagcacactggtggaagtgttgggtggtgaattcctcaagtacatggaggcctttaaacccttcctgggcattggattaaaaaattatgctgaataccaggtttgtttggcagctgtgggcttagtgggagacttgtgccgtgccctgcaatccaacatcatacctttctgtgacgaggtgatgcagctgcttctggaaaatttggggaatgagaacgtccacaggtctgtgaagccgcagattctgtcagtgtttggtgatattgcccttgctattggaggagagtttaaaaaatacttagaggttgtattgaatactcttcagcaggcctcccaagcccaggtggacaagtcagactatgacatggtggattatctgaatgagctaagggaaagctgcttggaagcctatactggaatcgtccagggattaaagggggatcaggagaacgtacacccggatgtgatgctggtacaacccagagtagaatttattctgtctttcattgaccacattgctggagatgaggatcacacagatggagtagtagcttgtgctgctggactaataggggacttatgtacagcatttgggaaggatgtactgaaattagtagaagctaggccaatgatccatgaattgttaactgaagggcggagatcgaagactaacaaagcaaaaacccttgctacatgggcaacaaaagaactgaggaaactgaagaaccaagcttgatctgttaccattgggatgataacctgaggacccccactggaaatctcccatcttttgaaaaacctggaagtgaggagtgtgcacggatgctgaatgtttgggaatgagaggatgagtgagtgaggcttgaaaacacaccacattgaaaatcctgccacagcagcagccgcagccgccaacagcagcgctgttagtgagctaagtaagcactgacttcgtagaaaaccataacatcggccatcttggaaaagagaaaaacaatggagttacttattt

SEQ ID NO: 145011 - DNA, 742 bp, Homo sapiens
  Payload ID: 8655
  Gene Symbol: KPNB1
  Gene Name: karyopherin (importin) beta 1
  ENST ID: ENST00000583013
  CDS Start-End: 1-742
cttggaaggaccagagcccagtcagctcaaaccactagttatacaggctatgcccaccctaatagaattaatgaaagaccccagtgtagttgttcgagatacagctgcatggactgtaggcagaatttgtgagctgcttcctgaagctgccatcaatgatgtctacttggctcccctgctacagtgtctgattgagggtctcagtgctgaacccagagtggcttcaaatgtgtgctgggctttctccagtctggctgaagctgcttatgaagctgcagacgttgctgatgatcaggaagaaccagctacttactgcttatcttcttcatttgaactcatagttcagaagctcctagagactacagacagtagagacagggtttcaccatgttggacaggatggtctcgatctcctgaccctcgtgatccacctgccttcgccccccaaagtgccaggattacaggcatgagccaccatgcccggccaactaccatatttttatataggatgaagaacttgggacctgatggacaccagaacaacctgaggagttctgcatatgaatctctgatggaaattgtgaaaaacagtgccaaggattgttatcctgctgtccagaaaacgactttggtcatcatggaacgactgcaacaggttcttcagatggagtcacatatccagagcacatccgatagaatccagttcaatgaccttcagtctttactctgtgcaactcttcag

SEQ ID NO: 145012 - DNA, 896 bp, Homo sapiens
  Payload ID: 8655
  Gene Symbol: KPNB1
  Gene Name: karyopherin (importin) beta 1
  ENST ID: ENST00000583648
  CDS Start-End: 451-896
cttcccgcgccccgaccccgaactcctctccttagttctcccgggcaccctatcctatcaacgcctactatcccagccaatcgcgcaggatccgagtcgtgcctccggtccaccctcctcccagcgctcagccggtctgagctcaaggcctttaccaagcccacccaatcaacggcgggctctctcctaccccatcccaatctccctcccctcggccaatccgcgcgctccattccgctgcccgcccagccaacccgggccttgaaaccagcaggcgaatgggcgcgagacggcccttcgacgctgagcgcctggccagttagggattccgcgtggccaggacaacggccaatcgtcgtggagcgcggcgcctccgcggagagttcgagccgccgcccgaaaggccgggccgtcgtcttaggaggagtcgccgccgccgccacctccgccatggagctgatcaccattctcgagaagaccgtgtctcccgatcggctggagctggaagcggcgcagaagttcctggagcgtgcggccgtggagaacctgcccactttccttgtggaactgtccagagtgctggcaaatccaggaaacagtcaggttgccagagttgcagctggtctacaaatcaagaactctttgacatctaaagatccagatatcaaggcacaatatcagcagaggtggcttgctattgatgctaatgctcgacgagaagtcaagaactatgttttgcagacattgggtacagaaacttaccggcctagttctgcctcacagtgtgtggctggtattgcttgtgcagagatcccagtaaaccagtggccagaactcattcctcagctggtggccaatgtcacaaaccccaacagcacagagcacatgaaggagtc

SEQ ID NO: 145013 - DNA, 605 bp, Homo sapiens
  Payload ID: 8655
  Gene Symbol: KPNB1
  Gene Name: karyopherin (importin) beta 1
  ENST ID: ENST00000577875
  CDS Start-End: 424-605
gctccgtctcccactttcctccccctagatcggctggagctggaagcggcgcagaagttcctggagcgtgcggccgtggagaacctgcccactttccttgtggaactgtccagagtgctggcaaatccaggaaacagtcaggttgccagagttgcagctggtctacaaatcaagaactctttgacatctaaagatccagatatcaaggcacaatatcagcagaggtggcttgctattgatgctaatgctcgacgagaagtcaagaactatgttttgcagacattgggtacagaaacttaccggcctagttctgcctcacagtgtgtggctggtattgcttgtgcagagatcccagtaaaccagtggccagaactcattcctcagctggtggccaatgtcacaaaccccaacagcacagagcacatgaaggagtcgacattggaagccatcggttatatttgccaagatatagacccagagcagctacaagataaatccaatgagattctgactgccataatccaggggatgaggaaagaagagcctagtaataatgtgaagctagctgctacgaatgcactcctgaactcattggagttcaccaa

SEQ ID NO: 145014 - DNA, 6830 bp, Homo sapiens
  Payload ID: 8656
  Gene Symbol: KPNA1
  Gene Name: karyopherin alpha 1 (importin alpha 5)
  Uniprot ID: P52294
  ENST ID: ENST00000344337
  CDS Start-End: 178-1794
gccggctgagctgagtctcgctgctcggtgcgaggcggcggagagcgaggcctggtgagcaccgccgaggcgcgggccagctcttcgaggttgtgcgcgggagtggcacggcgggcgggcgagcgaggggctaacttcagcggtggcaccgggatcggttgccttgagcctgaaatcatgaccaccccaggaaaagagaactttcgcctgaaaagttacaagaacaaatctctgaatcccgatgagatgcgcaggaggagggaggaagaaggactgcagttacgaaagcagaaaagagaagagcagttattcaagcggagaaatgttgctacagcagaagaagaaacagaagaagaagttatgtcagatggaggctttcatgaggctcagattagtaacatggagatggcaccaggtggtgtcatcacttctgacatgattgaaatgatattttccaaaagcccagagcaacagctttcagcaacacagaaattcaggaagctgctttcaaaagaacctaaccctcctattgatgaagttatcagcacaccaggagtagtggccaggtttgtggagttcctcaaacgaaaagagaattgtacactgcagtttgaatcagcttgggtactgacaaatattgcttcaggaaattctcttcagacccgaattgtgattcaggcaggagctgtgcccatcttcatagagttgctcagctcagagtttgaagatgtccaggaacaggcagtctgggctcttggcaacattgctggagatagtaccatgtgcagggactatgtcttagactgcaatatccttccccctcttttgcagttattttcaaagcaaaaccgcctgaccatgacccggaatgcagtatgggctttgtctaatctctgtagagggaaaagtccacctccagaatttgcaaaggtttctccatgtctgaatgtgctttcctggttgctgtttgtcagtgacactgatgtactggctgatgcctgctgggccctctcatatctatcagatggacccaatgataaaattcaagcggtcatcgatgcgggagtatgtaggagacttgtggaactgctgatgcataatgattataaagtggtttctcctgctttgcgagctgtgggaaacattgtcacaggggatgatattcagacacaggtaattctgaattgctcagctctgcagagtttattgcatttgctgagtagcccaaaggaatctatcaaaaaggaagcatgttggacgatatctaatattacagctggaaatagggcacagatccagactgtgatagatgccaacattttcccagccctcattagtattttacaaactgctgaatttcggacaagaaaagaagcagcttgggccatcacaaatgcaacttctggaggatcagctgaacagatcaagtacctagtagaactgggttgtatcaagccgctctgtgatctcctcacggtcatggactctaagattgtacaggttgccctaaatggcttggaaaatatcctgaggcttggagaacaggaagccaaaaggaatggcactggcattaacccttactgtgctttgattgaagaagcttatggtctggataaaattgagttcttacagagtcatgaaaaccaggagatctaccaaaaggcctttgatcttattgagcattacttcgggaccgaagatgaagacagcagcattgcaccccaggttgaccttaaccagcagcagtacatcttccaacagtgtgaggctcctatggaaggtttccagctttgaagcaatactctgctttcacgtacctgtgtcagaccaggctacccagtcgagtcctcttgtggagcccacagtcctcatggagctaacttctcaaatgttttccataatactgtttgcgctcatttgcttgccttgcgcacctgctctcttacacacatctggaaaacctccggctctctgtggtggaatacccttctaataaaagggtaaccagaacggcccactctcttttacggaaaaatccctaggctttggagatccgcacttacattagagttatgggaatatacacatattaatgtggctccctttttcttgtgggggaataaaagaggactcctcctcattccctttaacatgggggaaaaaactgacattaaaagatgagactaaatctttatcttgaattttacacaactacttacgacaagggagatgtttagacctgttgtgtatacttcagagtacttttcatgagttcttccacagtgaacccttggattacctggtggctttttctagccagatttgcattaatccttactgagattggatggttttctttcctctattggcgccattcttcagatattaaagttaaaccatccactccctcaccttcagccttcagtgaatgtgctttctagttgtcaggaatgctgaagaattaacactttgactcctaaatgtgatactggtttgtagattcccttagagcagaaaggagaggggcacatattaatttgtatcgcttttgcttctctttggtcttttgtgtcttagaatttggaagtggttcatttctgttgctggtatgaggatttcgaatacttagtaatcgaaaaccatatcctgtaatttaataaaaaaaactaaggacgaaaaaaccctccaattttcccaaatgcaatcagtgtaactaggggctgtgtttctgcattaaaataaatgtttcaggctttgtggtcctgatcaaggtcctcattaaaaaattggagttcaccctaggtgcttttcccctctgtgactggcagataacacatacttttgaaagtaactttgggatttttttcttaggtgcagctcgattctaatcttttcatgctgcacacgattcctttaatgtagcatccttatctgaaagaaataaccatcttctcaacatgacctgcttaacccaaataagaacagtgatcttataacctcattgtttcctaatcattttatttcatctcctgctagtactgtgccgcttccccctccccccacacaaaataaaaacagtatctgccttctggctcatttaatgatgactgcaatctgtacctgcaaatggcgcttccagtactgtgttcagtgatccacatttgtgcttggactggaatgaaaaaatacgcttaattgccaagacaactgcaaatgagttcaatacgacttctcggtgctagttggccatcttgactcaatgttgggatacactaccagagaagatttttttgttgatgtgctgttcaaagtgaattctgaaggaaaaggttgctcacctctgtttcagagcatacccttttaaacctttttagacttgtcctcttctagaattcattataaccccaaagtgtaaaaactatttggaagttgcccctgacaagctattatacatctctggtaaatcctgctgaatgtaagggatattcagagcttttcatacctcatcatgatgttatttaagcagccaacttatgtgacctgatttaaacttttaaaaaatccacttcattcaaactagaaagagtcaaagacaaaggacatttatcagccaagagtgtgacgcattcttcgcatctagtctgtagtagtgtctgtgctctgggatggataccgtctgatgtctgtttgttattgatggcgcagccactgcaaaactagtcaactcccatctataactgttactttttctagtgctgctttgtgctgagagaacattttagtttactgcacttgacctgtaaaagactgattctttgtaattttagggataaattaggtggttaatttaaagaagaaatttcaatgttgcctttacatcacattaaaatataacttctttcagaaggataatagaagcactgattcatagtaaaaatcttgtttttagctttgacttttttgtggctgttttttaaaattgtaaattactagtaacatgtcatttctataggatgttttaaattatgtaccttccattggatagttaaaataatttcattttataagccaatttgagtgggaaagatacaaagcacacagttgtctccccacattaggaagagtagtgtgcattcagacattcggaatttttgctagtagttggagatgtttcagtgagtgaattaaaacaaagtctatttaactgacgtgatctattttgtgtctaaaacagaggaatttatcttgtcctagaagttcatgaactataagatctaagtttttttttcttttttaacaataaaatgattttttcttaaagtatcaaagttggaattggctaaaagtgaagtagcataactcagatatgttggaacttggtactgaagcaggctttttggtaacagaaatgacattttaaggggtaactgtatatcctgtttttagttctttgcctctcagattctgttaacttagtttaaattcactgaataccctaccactaaggcgttgctcattacaaaagcatgttaatttcaatacaggaaaactcttttgtagttttatatatggattggggaaagtgactttgttttacttttcctttttattcccctccatcctccaaacttccaatctatattatttgtaatgagaactttggtgggggaaaaaaagcattaagagaattttggatgtaaaggcatctggtatctgatggaccagcaggtagatgtggttggattgagaaattttgggtaaggtagatgatagaagaaagagattttaggagacacagttctctgtggaacactttctttcatgttcctgtaactaattgatcaagacccttttaaacgcttatctttgtcagttccgcttttgaaaaaactattgccctaggattgtttcttccatatgacagatgaaggttattggctctgagtcatttttggcattatcgtcacagataaaaagattggcaattaatctcataaaaaatctgaattattccagattgctgccgatttttgcctaagaaacaatatgtaagtatattttataaaccaaactttgtcaaccaattctattgtacgtctacccacaggcaactttgaatttacttctctagtgctaaataaacatttcagcgatttaatcccccaacttgggggatgcattatgaaaaggttttcctggagtcaaggggtttttctttctcgctagttttgtgaaaatttttatatcaataggcaaatcattataactttttaggggttgatggtttttaagtatattggaaattgtggtgtctaaggatgatgttcagtgaagaaaagggatccacttttagaaaccagcattgtttgctttcaactttcatactgtatgctaactcctacgttccaaaatgtgctcatttgcagacacaggtatgcctatatacatggaagtctcaaatctgaatttttatccatctcaatatgaccatttctctctgttgtgagctgaacagattaagtatatatctgccaggttgggaaatattttggtctatcttttcctgtcatcagaacttaatttaaaaaaattatcaaaggtcagatgtgactactacagtaagttggctatcataaagaatattccataaaatgttttatctgccatacaaaattactgggtttatggccggatgtggtggctcatgcctgtaatcccagcagttcaggattacaggttatatacaggttataacaatggataccaggacatcagaatatctgataaagcaaatatttatatgctaatttaaaatatcaaattgctactggacataaaatacatctggaagcttggggtaagaagaaagaaaagaagtgttccgttctgttttcaactaagggtaaacgaagtcccagagtgttttccctgtaggtcaaattaaggtaacatgtctttatttgatcatctattgtacaccagatacctggctaagggctttccttttttctcatgtagtcttccaaatgttctttgataattgtcactatattatagatgacaaagtgaagacttacgagaaattactttgccccaaggttacaacacttagatggctgtccaagggcggggaagagccctgcaaattctgtgtcttgaagaaagcagtggccacgcagtagttccgtgcccaggatctcccagaactagacttggcaaccacagctgggccagccttttttgttagaccattcttcctgactcctgcttaccatcagcacccttaaaatgacgaaatcaggcttaagttgcttttaggttacacagactggagtgtaggccctctcaggccaaacatctttcctcttctgtggtgctaaaattctgtatgaccagacaagtatggtaataggttttttttttttttttttttgtgcaaatgattttgtgtttagtaaaataatggctaaacacatggatccattcaaacgcacaaatgtggaaagtattgacacggaaggaaaggctttgaagaattactgcctcaggaagcagtgccatggatgcgaatttaacacagtctacttcttcctaaaggaatatcatcccaaggaatgtcaaaaattaaaatcaccttttaatgtactggttgttgagtgtttctgctttacctcaagtcattctgaccactctacatcctgcttcaaagtgttctgacacttagatttggaatggctctaatgattctttgtacttgaatgtggtctgtcaggccatgggtgagtgccttgcacatagtagacattcaataaatactaaatgaaggaata

SEQ ID NO: 145015 - DNA, 727 bp, Homo sapiens
  Payload ID: 8656
  Gene Symbol: KPNA1
  Gene Name: karyopherin alpha 1 (importin alpha 5)
  ENST ID: ENST00000482287
  CDS Start-End: 84-727
ggagccctggtgtgatcgccatcgggaacgccggtcgaggctaggcggggcggggcggcgtggcgcggcggcggggctaaatcatgaccaccccaggaaaagagaactttcgcctgaaaagttacaagaacaaatctctgaatcccgatgagatgcgcaggaggagggaggaagaaggactgcagttacgaaagcagaaaagagaagagcagttattcaagcggagaaatgttgctacagcagaagaagaaacagaagaagaagttatgtcagatggaggctttcatgaggctcagattagtaacatggagatggcaccaggtggtgtcatcacttctgacatgattgaaatgatattttccaaaagcccagagcaacagctttcagcaacacagaaattcaggaagctgctttcaaaagaacctaaccctcctattgatgaagttatcagcacaccaggagtagtggccaggtttgtggagttcctcaaacgaaaagagaattgtacactgcagtttgaatcagcttgggtactgacaaatattgcttcaggaaattctcttcagacccgaattgtgattcaggcaggagctgtgcccatcttcatagagttgctcagctcagagtttgaagatgtccaggaacaggcagtctgggctcttggcaacattgctggagatagtaccatgtgcagggactatgtcttagactgcaatatccttccccc

SEQ ID NO: 145016 - DNA, 575 bp, Homo sapiens
  Payload ID: 8656
  Gene Symbol: KPNA1
  Gene Name: karyopherin alpha 1 (importin alpha 5)
  ENST ID: ENST00000476916
  CDS Start-End: 69-575
actgcgaacgccggctgagctgagtctcgctgctcggtgcgaggcggcggagagcgaggcctgaaatcatgaccaccccaggaaaagagaactttcgcctgaaaagttacaagaacaaatctctgaatcccgatgagatgcgcaggaggagggaggaagaaggactgcagttacgaaagcagaaaagagaagagcagttattcaagcggagaaatgttgctacagcagaagaagaaacagaagaagaagttatgtcagatggaggctttcatgaggctcagattagtaacatggagatggcaccaggtggtgtcatcacttctgacatgattgaaatgatattttccaaaagcccagagcaacagctttcagcaacacagaaattcaggaagctgctttcaaaagaacctaaccctcctattgatgaagttatcagcacaccaggagtagtggccaggtttgtggagttcctcaaacgaaaagagaattgtacactgcaggcagtctgggctcttggcaacattgctggagatagtaccatgtgcagggactatgtcttagactgcaatatcctt

SEQ ID NO: 145017 - DNA, 1923 bp, Homo sapiens
  Payload ID: 8656
  Gene Symbol: KPNA1
  Gene Name: karyopherin alpha 1 (importin alpha 5)
  ENST ID: ENST00000494339
  CDS Start-End: 184-732
gcgaacgccggctgagctgagtctcgctgctcggtgcgaggcggcggagagcgaggcctggtgagcaccgccgaggcgcgggccagctcttcgaggttgtgcgcgggagtggcacggcgggcgggcgagcgaggggctaacttcagcggtggcaccgggatcggttgccttgagcctgaaatcatgaccaccccaggaaaagagaactttcgcctgaaaagttacaagaacaaatctctgaatcccgatgagatgcgcaggaggagggaggaagaaggactgcagttacgaaagcagaaaagagaagagcagttattcaagcggagaaatgttgctacagcagaagaagaaacagaagaagaagttatgtcagatggaggctttcatgaggctcagattagtaacatggagatggcaccaggtggtgtcatcacttctgacatgattgaaatgatattttccaaaagcccagagcaacagctttcagcaacacagaaattcaggaagctgctttcaaaagaacctaaccctcctattgatgaagttatcagcacaccaggagtagtggccaggtttgtggagttcctcaaacgaaaagagaattgtacactgcaggtgagcctggcatttgctaggaaccagagtggaaccggcaaagtggccagcaacagagtcctgatccaaatggagaaagggaaccaggcgtacctcaacctggagtgggaaacttgataggagtttgaatcagcttgggtactgacaaatattgcttcaggaaattctcttcagacccgaattgtgattcaggcaggagctgtgcccatcttcatagagttgctcagctcagagtttgaagatgtccaggaacaggcagtctgggctcttggcaacattgctggagatagtaccatgtgcagggactatgtcttagactgcaatatccttccccctcttttgcagttattttcaaagcaaaaccgcctgaccatgacccggaatgcagtatgggctttgtctaatctctgtagagggaaaagtccacctccagaatttgcaaaggtttctccatgtctgaatgtgctttcctggttgctgtttgtcagtgacactgatgtactggctgatgcctgctgggccctctcatatctatcagatggacccaatgataaaattcaagcggtcatcgatgcgggagtatgtaggagacttgtggaactgctgatgcataatgattataaagtggtttctcctgctttgcgagctgtgggaaacattgtcacaggggatgatattcagacacaggtaattctgaattgctcagctctgcagagtttattgcatttgctgagtagcccaaaggaatctatcaaaaaggaagcatgttggacgatatctaatattacagctggaaatagggcacagatccagactgtgatagatgccaacattttcccagccctcattagtattttacaaactgctgaatttcggacaagaaaagaagcagcttgggccatcacaaatgcaacttctggaggatcagctgaacagatcaagtacctagtagaactgggttgtatcaagccgctctgtgatctcctcacggtcatggactctaagattgtacaggttgccctaaatggcttggaaaatatcctgaggcttggagaacaggaagccaaaaggaatggcactggcattaacccttactgtgctttgattgaagaagcttatggtctggataaaattgagttcttacagagtcatgaaaaccaggagatctaccaaaaggcctttgatcttattgagcattacttcgggaccgaagatgaagacagcagcattgcaccccaggttgaccttaaccagcagcagtacatcttccaacagtgtgaggctcctatggaaggtttccagctttga

SEQ ID NO: 145018 - DNA, 596 bp, Homo sapiens
  Payload ID: 8656
  Gene Symbol: KPNA1
  Gene Name: karyopherin alpha 1 (importin alpha 5)
  ENST ID: ENST00000493510
  CDS Start-End: 73-596
gctcggtgcgaggcggcggagagcgaggcctggtgagcaccgccgaggcgcgggccagctcttcgagaaatcatgaccaccccaggaaaagagaactttcgcctgaaaagttacaagaacaaatctctgaatcccgatgagatgcgcaggaggagggaggaagaaggactgcagttacgaaagcagaaaagagaagagcagttattcaagcggagaaatgttgctacagcagaagaagaaacagaagaagaagttatgtcagatggaggctttcatgaggctcagattagtaacatggagatggcaccaggtggtgtcatcacttctgacatgattgaaatgatattttccaaaagcccagagcaacagctttcagcaacacagaaattcaggaagctgctttcaaaagaacctaaccctcctattgatgaagttatcagcacaccaggagtagtggccaggtttgtggagttcctcaaacgaaaagagaattgtacactgcagtttgaatcagcttgggtactgacaaatattgcttcaggaaattctcttcagacccgaattgtgattcaggcaggagctgtgcccatcttcat

SEQ ID NO: 145019 - DNA, 1062 bp, Homo sapiens
  Payload ID: 8656
  Gene Symbol: KPNA1
  Gene Name: karyopherin alpha 1 (importin alpha 5)
  ENST ID: ENST00000465882
  CDS Start-End: 77-1062
gcaggcgcactgcgaacgccggctgagctgagtctcgctgctcggtgcgaggcggcggagagcgaggcctgaaatcatgaccaccccaggaaaagagaactttcgcctgaaaagttacaagaacaaatctctgaatcccgatgagatgcgcaggaggagggaggaagaaggactgcagttacgaaagcagaaaagagaagagcagttattcaagcggagaaatgttgctacagcagaagaagaaacagaagaagaagttatgtcagatggaggctttcatgaggctcagattagtaacatggagatggcaccaggtggtgtcatcacttctgacatgattgaaatgatattttccaaaagcccagagcaacagctttcagcaacacagaaattcaggaagctgctttcaaaagaacctaaccctcctattgatgaagttatcagcacaccaggagtagtggccaggtttgtggagttcctcaaacgaaaagagaattgtacactgcagtttgaatcagcttgggtactgacaaatattgcttcaggaaattctcttcagacccgaattgtgattcaggcaggagctgtgcccatcttcatagagttgctcagctcagagtttgaagatgtccaggaacaggcagtctgggctcttggcaacattgctggagatagtaccatgtgcagggactatgtcttagactgcaatatccttccccctcttttgcagttattttcaaagcaaaaccgcctgaccatgacccggaatgcagtatgggctttgtctaatctctgtagagggaaaagtccacctccagaatttgcaaaggtttctccatgtctgaatgtgctttcctggttgctgtttgtcagtgacactgatgtactggctgatgcctgctgggccctctcatatctatcagatggacccaatgataaaattcaagcggtcatcgatgcgggagtatgtaggagacttgtggaactgctgatgcataatgattataaagtggtttctcctgctttgcgagctgtgggaaacattgtcacaggggatgatat

SEQ ID NO: 145020 - DNA, 1843 bp, Homo sapiens
  Payload ID: 8656
  Gene Symbol: KPNA1
  Gene Name: karyopherin alpha 1 (importin alpha 5)
  ENST ID: ENST00000485027
  CDS Start-End: 73-621
ctgagctcttagaataacagagctcttcacagtaaactcatttgttctctccccacttgtattgtagaaatcatgaccaccccaggaaaagagaactttcgcctgaaaagttacaagaacaaatctctgaatcccgatgagatgcgcaggaggagggaggaagaaggactgcagttacgaaagcagaaaagagaagagcagttattcaagcggagaaatgttgctacagcagaagaagaaacagaagaagaagttatgtcagatggaggctttcatgaggctcagattagtaacatggagatggcaccaggtggtgtcatcacttctgacatgattgaaatgatattttccaaaagcccagagcaacagctttcagcaacacagaaattcaggaagctgctttcaaaagaacctaaccctcctattgatgaagttatcagcacaccaggagtagtggccaggtttgtggagttcctcaaacgaaaagagaattgtacactgcaggtgagcctggcatttgctaggaaccagagtggaaccggcaaagtggccagcaacagagtcctgatccaaatggagaaagggaaccaggcgtacctcaacctggagtgggaaacttgataggagtttgaatcagcttgggtactgacaaatattgcttcaggaaattctcttcagacccgaattgtgattcaggcaggagctgtgcccatcttcatagagttgctcagctcagagtttgaagatgtccaggaacaggcagtctgggctcttggcaacattgctggagatagtaccatgtgcagggactatgtcttagactgcaatatccttccccctcttttgcagttattttcaaagcaaaaccgcctgaccatgacccggaatgcagtatgggctttgtctaatctctgtagagggaaaagtccacctccagaatttgcaaaggtttctccatgtctgaatgtgctttcctggttgctgtttgtcagtgacactgatgtactggctgatgcctgctgggccctctcatatctatcagatggacccaatgataaaattcaagcggtcatcgatgcgggagtatgtaggagacttgtggaactgctgatgcataatgattataaagtggtttctcctgctttgcgagctgtgggaaacattgtcacaggggatgatattcagacacaggtaattctgaattgctcagctctgcagagtttattgcatttgctgagtagcccaaaggaatctatcaaaaaggaagcatgttggacgatatctaatattacagctggaaatagggcacagatccagactgtgatagatgccaacattttcccagccctcattagtattttacaaactgctgaatttcggacaagaaaagaagcagcttgggccatcacaaatgcaacttctggaggatcagctgaacagatcaagtacctagtagaactgggttgtatcaagccgctctgtgatctcctcacggtcatggactctaagattgtacaggttgccctaaatggcttggaaaatatcctgaggcttggagaacaggaagccaaaaggaatggcactggcattaacccttactgtgctttgattgaagaagcttatggtctggataaaattgagttcttacagagtcatgaaaaccaggagatctaccaaaaggcctttgatcttattgagcattacttcgggaccgaagatgaagacagcagcattgcaccccaggttgaccttaaccagcagcagtacatcttccaacagtgtgaggctcctatggaaggtttccagctttgaagcaatactctgctttcacgtacctgtgtca

SEQ ID NO: 145021 - DNA, 2181 bp, Homo sapiens
  Payload ID: 8657
  Gene Symbol: KPNA2
  Gene Name: karyopherin alpha 2 (RAG cohort 1, importin alpha 1)
  Uniprot ID: P52292
  ENST ID: ENST00000330459
  CDS Start-End: 346-1935
gctccctcaccgcccggccgctccctcatctcgcgatgccatcctctttttttttttttctttcccccctcccactcgcccccaagccctatgactccctcccctcccaacgtgtttttcaaatccaccaatgggcacacagcttaggctcgaaccagccaatcggaatgcggagtcaccgggaaatttaaatcgcgccggccggctgcacgagccacacggtctttgagctgagtcgaggtggaccctttgaacgcagtcgccctacagccgctgattccccccgcatcgcctcccgtggaagcccaggcccgcttcgcagctttctccctttgtctcataaccatgtccaccaacgagaatgctaatacaccagctgcccgtcttcacagattcaagaacaagggaaaagacagtacagaaatgaggcgtcgcagaatagaggtcaatgtggagctgaggaaagctaagaaggatgaccagatgctgaagaggagaaatgtaagctcatttcctgatgatgctacttctccgctgcaggaaaaccgcaacaaccagggcactgtaaattggtctgttgatgacattgtcaaaggcataaatagcagcaatgtggaaaatcagctccaagctactcaagctgccaggaaactactttccagagaaaaacagccccccatagacaacataatccgggctggtttgattccgaaatttgtgtccttcttgggcagaactgattgtagtcccattcagtttgaatctgcttgggcactcactaacattgcttctgggacatcagaacaaaccaaggctgtggtagatggaggtgccatcccagcattcatttctctgttggcatctccccatgctcacatcagtgaacaagctgtctgggctctaggaaacattgcaggtgatggctcagtgttccgagacttggttattaagtacggtgcagttgacccactgttggctctccttgcagttcctgatatgtcatctttagcatgtggctacttacgtaatcttacctggacactttctaatctttgccgcaacaagaatcctgcacccccgatagatgctgttgagcagattcttcctaccttagttcggctcctgcatcatgatgatccagaagtattagcagatacctgctgggctatttcctaccttactgatggtccaaatgaacgaattggcatggtggtgaaaacaggagttgtgccccaacttgtgaagcttctaggagcttctgaattgccaattgtgactcctgccctaagagccatagggaatattgtcactggtacagatgaacagactcaggttgtgattgatgcaggagcactcgccgtctttcccagcctgctcaccaaccccaaaactaacattcagaaggaagctacgtggacaatgtcaaacatcacagccggccgccaggaccagatacagcaagttgtgaatcatggattagtcccattccttgtcagtgttctctctaaggcagattttaagacacaaaaggaagctgtgtgggccgtgaccaactataccagtggtggaacagttgaacagattgtgtaccttgttcactgtggcataatagaaccgttgatgaacctcttaactgcaaaagataccaagattattctggttatcctggatgccatttcaaatatctttcaggctgctgagaaactaggtgaaactgagaaacttagtataatgattgaagaatgtggaggcttagacaaaattgaagctctacaaaaccatgaaaatgagtctgtgtataaggcttcgttaagcttaattgagaagtatttctctgtagaggaagaggaagatcaaaacgttgtaccagaaactacctctgaaggctacactttccaagttcaggatggggctcctgggacctttaacttttagatcatgtagctgagacataaatttgttgtgtactacgtttggtattttgtcttattgtttctctactaagaactctttcttaaatgtggtttgttactgtagcactttttacactgaaactatacttgaacagttccaactgtacatacatactgtatgaagcttgtcctctgactaggtttctaatttctatgtggaatttcctatcttgcagcatcctgtaaataaacattcaagtccaccctt

SEQ ID NO: 145022 - DNA, 2456 bp, Homo sapiens
  Payload ID: 8657
  Gene Symbol: KPNA2
  Gene Name: karyopherin alpha 2 (RAG cohort 1, importin alpha 1)
  Uniprot ID: P52292
  ENST ID: ENST00000537025
  CDS Start-End: 621-2210
gttgactaggcctcgggggcgacgttcattgaccaggcggctgagtttcgcggggtctgcgggtttagggcgccgacgctctgcaaacggcagcggaggccttaacgcgtcgcggccgggagaatcggagcgagccaggcttgagggcgaatgtcccgggaggacttgtggcggccctggtttcgcctcctcctttctcgttgcatcttccccggcgtgggggcaggggctgggggtggcagttgggagcaccgtctctgacacctaggccccgggggtggctctgccaccaagtcgtaggcgagcgtaatgaaagcaaagatagcaaattgtaaggagggctttgacttttgtcatcttctgaatgacgcacagctgatgtcatcctaattaagcgcattcactcctagtctctggaaatgcaaatcaaatatgcgagatgcggcactgcatttttaatgttgaccataatgtaatgatgaagcaaatttttatttaattttcgagtctgcacctattttggccaagtaaagacagtaaaatagggagagcctcctgaggatctgaatttattgccctggcacataatttttagctctttctccctttgtctcataaccatgtccaccaacgagaatgctaatacaccagctgcccgtcttcacagattcaagaacaagggaaaagacagtacagaaatgaggcgtcgcagaatagaggtcaatgtggagctgaggaaagctaagaaggatgaccagatgctgaagaggagaaatgtaagctcatttcctgatgatgctacttctccgctgcaggaaaaccgcaacaaccagggcactgtaaattggtctgttgatgacattgtcaaaggcataaatagcagcaatgtggaaaatcagctccaagctactcaagctgccaggaaactactttccagagaaaaacagccccccatagacaacataatccgggctggtttgattccgaaatttgtgtccttcttgggcagaactgattgtagtcccattcagtttgaatctgcttgggcactcactaacattgcttctgggacatcagaacaaaccaaggctgtggtagatggaggtgccatcccagcattcatttctctgttggcatctccccatgctcacatcagtgaacaagctgtctgggctctaggaaacattgcaggtgatggctcagtgttccgagacttggttattaagtacggtgcagttgacccactgttggctctccttgcagttcctgatatgtcatctttagcatgtggctacttacgtaatcttacctggacactttctaatctttgccgcaacaagaatcctgcacccccgatagatgctgttgagcagattcttcctaccttagttcggctcctgcatcatgatgatccagaagtattagcagatacctgctgggctatttcctaccttactgatggtccaaatgaacgaattggcatggtggtgaaaacaggagttgtgccccaacttgtgaagcttctaggagcttctgaattgccaattgtgactcctgccctaagagccatagggaatattgtcactggtacagatgaacagactcaggttgtgattgatgcaggagcactcgccgtctttcccagcctgctcaccaaccccaaaactaacattcagaaggaagctacgtggacaatgtcaaacatcacagccggccgccaggaccagatacagcaagttgtgaatcatggattagtcccattccttgtcagtgttctctctaaggcagattttaagacacaaaaggaagctgtgtgggccgtgaccaactataccagtggtggaacagttgaacagattgtgtaccttgttcactgtggcataatagaaccgttgatgaacctcttaactgcaaaagataccaagattattctggttatcctggatgccatttcaaatatctttcaggctgctgagaaactaggtgaaactgagaaacttagtataatgattgaagaatgtggaggcttagacaaaattgaagctctacaaaaccatgaaaatgagtctgtgtataaggcttcgttaagcttaattgagaagtatttctctgtagaggaagaggaagatcaaaacgttgtaccagaaactacctctgaaggctacactttccaagttcaggatggggctcctgggacctttaacttttagatcatgtagctgagacataaatttgttgtgtactacgtttggtattttgtcttattgtttctctactaagaactctttcttaaatgtggtttgttactgtagcactttttacactgaaactatacttgaacagttccaactgtacatacatactgtatgaagcttgtcctctgactaggtttctaatttctatgtggaatttcctatcttgcagcatcctgtaaataaacattcaagtccaccctt

SEQ ID NO: 145023 - DNA, 569 bp, Homo sapiens
  Payload ID: 8657
  Gene Symbol: KPNA2
  Gene Name: karyopherin alpha 2 (RAG cohort 1, importin alpha 1)
  ENST ID: ENST00000579754
  CDS Start-End: 140-569
cctctagtatacaggtgtggattcagtagatgcttgataattcagttcttatttggtactattattgacaaaggaaaatgataaaggaaatatttttctcttcccccatcttttagctttctccctttgtctcataaccatgtccaccaacgagaatgctaatacaccagctgcccgtcttcacagattcaagaacaagggaaaagacagtacagaaatgaggcgtcgcagaatagaggtcaatgtggagctgaggaaagctaagaaggatgaccagatgctgaagaggagaaatgtaagctcatttcctgatgatgctacttctccgctgcaggaaaaccgcaacaaccagggcactgtaaattggtctgttgatgacattgtcaaaggcataaatagcagcaatgtggaaaatcagctccaagctactcaagctgccaggaaactactttccagagaaaaacagccccccatagacaacataatccgggctggtttgattccgaaatttgtgtccttcttgggcagaactgattgtagtcccattcagtttgaatctgcttgggcac

SEQ ID NO: 145024 - DNA, 611 bp, Homo sapiens
  Payload ID: 8657
  Gene Symbol: KPNA2
  Gene Name: karyopherin alpha 2 (RAG cohort 1, importin alpha 1)
  ENST ID: ENST00000583269
  CDS Start-End: 157-309
aaatcgcgccggccggctgcacgagccacacggtctttgagctgagtcgaggtggaccctttgaacgcagtcgccctacagccgctgattccccccgcatcgcctcccgtggaagcccaggcccgcttcgcagctttctccctttgtctcataaccatgtccaccaacgagaatgctaatacaccagctgcccgtcttcacagattcaagaacaagggaaaagacagtacagtgaaacggcatgttatcttttctcaaggaaatgaggcgtcgcagaatagaggtcaatgtggagctgaggaaagctaagaaggatgaccagatgctgaagaggagaaatgtaagctcatttcctgatgatgctacttctccgctgcaggaaaaccgcaacaaccagggcactgtaaattggtctgttgatgacattgtcaaaggcataaatagcagcaatgtggaaaatcagctccaagctactcaagctgccaggaaactactttccagagaaaaacagccccccatagacaacataatccgggctggtttgattccgaaatttgtgtccttcttgggcagaactgattgtagtcccattcagtttgaatctgcttggg

SEQ ID NO: 145025 - DNA, 561 bp, Homo sapiens
  Payload ID: 8657
  Gene Symbol: KPNA2
  Gene Name: karyopherin alpha 2 (RAG cohort 1, importin alpha 1)
  ENST ID: ENST00000584026
  CDS Start-End: 160-561
acacggtctttgagctgagtcgaggtggaccctttgaacgcagtcgccctacagccgctgattccccccgcatcgcctcccgtggaagcccaggcccgcttcgcaggaaatatttttctcttcccccatcttttagctttctccctttgtctcataaccatgtccaccaacgagaatgctaatacaccagctgcccgtcttcacagattcaagaacaagggaaaagacagtacagaaatgaggcgtcgcagaatagaggtcaatgtggagctgaggaaagctaagaaggatgaccagatgctgaagaggagaaatgtaagctcatttcctgatgatgctacttctccgctgcaggaaaaccgcaacaaccagggcactgtaaattggtctgttgatgacattgtcaaaggcataaatagcagcaatgtggaaaatcagctccaagctactcaagctgccaggaaactactttccagagaaaaacagccccccatagacaacataatccgggctggtttgattccgaaatttgtgtccttcttgggcagaactgattgtagt

SEQ ID NO: 145026 - DNA, 4474 bp, Homo sapiens
  Payload ID: 8658
  Gene Symbol: KPNA3
  Gene Name: karyopherin alpha 3 (importin alpha 4)
  Uniprot ID: O00505
  ENST ID: ENST00000261667
  CDS Start-End: 416-1981
gccccgcgcctgaggggcagtaaaagtcgccaggtccggctccatttctggcacaaaacttgcagcaccgaggggttgtggagagcccttgcaggggaagagggcagggtcatcccgagaaccaacgggcacgtatagcccggcgaacgcccaagccggtcaccgcccccggtcacgtgtcgccagcctccgcggccgcgcgccgctctcagcaccgttcccgccccacccggcccggcagtcggcccgcgcctcccccggcgctactgccacctcgcgctcggaggcgtcacagaacgtgctcttctctcccctcccccctcccgctctccccctcctccccctcccgctccaagattcgccgccgccgccgccgcagccgcaggagtagccgccgccggagccgcgcgcagccatggccgagaaccccagcttggagaaccaccgcatcaagagcttcaagaacaagggccgcgatgtggaaacaatgcgaagacatagaaatgaagtgacagtggaactgcggaagaacaaaagagatgaacacttattgaaaaagagaaatgttccccaagaagaaagtctagaagattcagatgttgatgctgattttaaagcacaaaatgtaaccctagaagctatattgcagaatgccacaagtgataacccagtggtccaattgagtgctgtccaggcagcaagaaaactgttatccagtgacagaaatccaccgattgatgacttaataaaatctgggattttaccaattctagtcaaatgtctagaaagggatgataatccttcattacagtttgaagctgcttgggcattaactaacatagcatcaggaacttctgcacagactcaagctgttgtgcagtctaatgcagtacctctttttctgagacttcttcgttcaccacatcagaatgtttgtgaacaagcagtatgggctttgggaaacattataggtgatggtcctcaatgtagagattatgtcatatcactgggagttgtcaaacctcttctgtccttcatcagtccctccatccccatcaccttccttcggaacgtcacatgggtcattgtcaatctctgcaggaataaggatcccccgccgcctatggagacagttcaggagattttgccagctttatgtgtcctcatataccatacagatataaacattcttgtagacactgtttgggctctgtcatacttgacagatggaggtaatgaacagatacagatggttattgattcaggagttgtgccctttcttgtgccccttctgagccatcaggaagtcaaagttcaaacagcagccctcagagcagttggcaacatagtgactggcaccgacgagcagacccaggttgttctcaattgtgatgtcctgtcacacttcccaaatctcttatcacacccaaaagagaagataaataaggaagcagtgtggttcctttccaacataacagcaggcaaccagcaacaagttcaagctgtaatagatgctggattaattcctatgataattcatcagcttgctaagggggactttggaacacaaaaagaagctgcttgggcaatcagcaacttaacaataagtggcagaaaagatcaggttgagtaccttgtacagcagaatgtaataccaccgttctgtaatttactgtcagtgaaagattctcaagtggttcaggtggttctagatggtctaaaaaacattctgataatggccggtgatgaagcaagcacaatagctgaaataatagaggaatgtggaggtttggagaaaattgaagttttacagcaacatgaaaatgaagacatatataaattagcatttgaaatcatagatcagtatttctctggtgatgatattgatgaagatccctgcctcattcctgaagcaacacaaggaggtacctacaattttgatccaacagccaaccttcaaacaaaagaatttaatttttaaattcagttgagtgcagcatctttcccacattcaatatgaagcaccaccagatggctaccaaatgataagaacaacagcaacaaaaggctccaaaacacacatgcctctttgttttgatgcttctaaagcaagccatgtctcagtcactttgcagttgccaaaagtcactatcacatggactgtaaatgcatatgcatgatttcctaaactgttttagaactctccttaacaatctcaactaccctatttttccctgttccctggtgccacaggctgacaactgcagtctccagtttagaataaatattccatagtggtgacatgtcagctgcccactgatactcctttggaaaatggtgcgctgtggatcaagacactttggtatgatgcatatacaagttggaagactaaagaggtgcagtgtgatctgagcctccatcattgtcctccacaaacatattttcatattctttatgtggaagaatagattttaaagtacaagccaaatgattttcattggtggaactgacacaaaaaaagtaacttaaaaacaagaaacttggttattgaataaacagataagtttaaaaaaaaaaaaaaactacttcatctaccagtaattgatgtgtttattatctgcctcagaagccagggttggaggaagaactttagatatggatattaatgcttttgccattatacctaatttttgagaacagcaagccctatttgaccactctcttcagcctgtgtgttcctgctgttttgaagtaatcaaatgctgtgcatggtattttacctgagctgcaacctgttatggacttgaacttctgtttaagttgaaagcaagagtccctgagtataaaggaaaaacagcaaaacaaaaagcaaacaaaaaaaaactgcaaaagtctaaaatacccattggtgatgttttttaaaaaaatcttgctttcagctttcaggagttaatattctttgttttaatttgataattggatatggttgatttatattgggtttaaactgtggagctttcatgtttactgtaatttagtcttaaaatattttttacttagtaaccagtgcttttgataatgtggttggcaacaaaccagcaactatttagaagtgtcataagagttcattctttgagtattgggaaagttaattcagatcctactcaaaaagcatcttcacatattaaaagattcagacagggatctgtgtagaggagtaatttgcagttatttaacataaacctgatttgcagtgatctctaagtaattctgcaaaatccggtattactatgtcaagttattgcttttggtaaattgtctgacccagttattaatgaaagaatatggatttaaaaatttttaaactaaataatttgtgctgtcacagaaatggtattgttgctcttgtttactgggtataatttcccaatgcattgatgtgaagggatagaaaatctaaactaatttagttatccattggggggtgtatttactgtgatgaagatgagacagatgccatcagagctttgtgaatcagctggggtgttttcactgataaacaacacatagcaggtgtgcattcattacaaatatatgtatctgccaaggtggagccactttaaagagtgagttttgtcttgtatctaaagtggatacaagcgtatgtttaaactgcaagatttttacttgctagagaatctgttttaatatagtggtttggcctctgattatttataggttttataaattttagaatcaatttctctttaaggtggctcagatttttcaactcttgtgcacataaaattgagttgaagttcattgtgcctttttttctttatccaaattttgagttaaagcttcatatggtaactgcatcctgttcggacactatagtctaaatttttgaaactgtgtggtgttcgctaaaagtaggaataacaacgtaaaagctaattaaggtcacaaacttcggtgaaacccttaaaagtccaaatcttcttgatattgtgaaccgtaccccttccagtttagtttcttctggactttccttacttaactgacagttaccttttaaaatttgcacacattatgattaaaattgggcctctactgtgatgattcctatttcctctcatgttttaaagtgcaaactaacatttaagtgaacattagcatcaagtagtgcagacacttgtatgcatttccttgattcaatttgtgaccttaccagttttgaattggaattgcaccatttcgtagataaaggaaactaagtatattgctgcacttttaagttttcaaaacagtgtttaaaaattgcattgttatttttttttaaactcagtttaaaaagactaaaacgttctttcaaaagaggcatctaaatgtgttcctaattttgtatatgggcttaggttttgtaaccaataaaaaaagctgctatcaaatatgataaaacattgaaaactta

SEQ ID NO: 145027 - DNA, 588 bp, Homo sapiens
  Payload ID: 8658
  Gene Symbol: KPNA3
  Gene Name: karyopherin alpha 3 (importin alpha 4)
  ENST ID: ENST00000436760
  CDS Start-End: 1-275
caccgttctgtaatttactgtcagtgaaagattctcaagtggttcaggtggttctagatggtctaaaaaacattctgataatggccggtgatgaagcaagcacaatagctgaaataatagaggaatgtggaggtttggagaaaattgaagttttacagcaacatgaaaatgaagacatatataaattagcatttgaaatcatagatcagtatttctctggtgatgatattgatgaagatccctgcctcattcctgaagcaacacaaggaggctgacaactgcagtctccagtttagaataaatattccatagtggtgacatgtcagctgcccactgatactcctttggaaaatggtgcgctgtggatcaagacactttggtatgatgcatatacaagttggaagactaaagaggtgcagtgtgatctgagcctccatcattgtcctccacaaacatattttcatattctttatgtggaagaatagattttaaagtacaagccaaatgattttcattggtggaactgacacaaaaaaagtaacttaaaaacaagaaacttggttattgaataaacagataagtttaaaa

SEQ ID NO: 145028 - DNA, 8981 bp, Homo sapiens
  Payload ID: 8659
  Gene Symbol: KPNA4
  Gene Name: karyopherin alpha 4 (importin alpha 3)
  Uniprot ID: O00629
  ENST ID: ENST00000334256
  CDS Start-End: 307-1872
gcagcgccggggccctcagatcgaggctgcctccccctctcagccggcagcacattccgtcgccttgccgccgcccggccccacagttgtctttgccggagctgcagtcgcgctggggttagggcgggggggcgggcggggagaggagaaggccgcggcggaggcaggtgagaggaggaaggaagcggcggcgcggcgggcacagcagctcaggcggcggcccggttcctgggagtgtcggtgcggcgcgttggttggggcggatcccgcggggcccgggcgggggaaggagtcaccggcccggccatggcggacaacgagaaactggacaaccaacggctcaagaatttcaagaacaaaggccgcgacttggagactatgagaagacaacgaaatgaagttgtagttgaattaaggaagaataaaagagatgaacatctcttaaagagaaggaatgtaccacatgaagatatctgtgaagactctgatatagatggtgattatagagtgcaaaatacctctctagaagctattgttcaaaatgcttcaagtgataaccaaggaattcaattaagtgcagttcaagctgctaggaagcttttgtccagtgatcgaaatccaccaattgatgacttaataaaatctggaatattgcccattttagtccattgtcttgaaagagatgacaatccttctttacagtttgaagctgcatgggctttgacaaacattgcatctggaacttctgaacaaactcaagcagtagttcagtccaatgctgtgccacttttcctgaggcttctccattcaccccatcagaatgtctgtgagcaagcagtgtgggcattgggaaatatcataggtgatgggccccagtgtagagattatgtcataagtcttggagttgtgaaacctttactttccttcataagtccatctattcctataacattcttaagaaatgttacttgggttatggtcaacttatgtcgccacaaagacccaccaccaccaatggaaaccattcaggagattcttccagccctttgtgttttaattcatcacacagatgtaaatatactggtagacacagtctgggccctctcttaccttactgatgctggcaatgaacaaatacagatggtaatagactctggaatagttcctcatttggttcctctgctcagccaccaggaagttaaagttcagactgctgcacttagagctgtgggcaacattgttactggaactgatgagcaaacacaagtagttttgaactgtgatgctctttcacacttcccagcactcctgacacatcccaaagagaaaattaataaagaagcagtgtggttcctctccaacatcactgcaggaaatcagcagcaggtacaggcagtaattgatgccaatcttgtaccaatgataatacaccttttggataagggggattttggcactcaaaaagaagctgcttgggccataagtaacttaacaattagtggaaggaaagatcaagtggcttaccttatccaacaaaatgttatcccacctttttgcaacttgctgactgtaaaagatgcacaagttgtgcaagtagtactcgatggactaagtaatatattaaaaatggctgaagatgaggcagaaaccataggcaatcttatagaagaatgtggagggctggagaaaattgaacaacttcaaaatcatgaaaatgaagacatctacaaattggcctatgagatcattgatcagttcttctcttcagatgatattgatgaagaccctagccttgttccagaggcaattcaaggcggaacatttggtttcaattcatctgccaatgtaccaacagaagggttccagttttagaaagatgttgtggaagttaggtacaatgcagcactgagatatatatatatatatgtgtgtgtgtatatatatatatatatacatatatataaaaaggtttgatccatcaagcttggctcatgggatctgctgctgcattaaatcgggaaagaaaatgtgaagatttcatttggaatcacagaaaatgcccaaatgaggtcaagatggcgagtgggtgcgagtgagaatgagtggcaaaatgtaatgaaaactttacatgaatgcttatttaggttgttcaaagtaaaaagggctacaggtcacagatcgtcagtgcctgagaaagaacattgacttactctatatcaattgaggggaaagtgcagtaccgtcatcttcaagccttgtaagcataaaagagaataggctgcccatataagtcaaaggaaaatgagcccaggccttgctatgaagcagtgtgtgaatggacaatgttgaatgaatgtctggctcagtgatggagagccaggttcatctttgaaatctagggctcttcactcatgaagcagactcctagtcctggagtgactgtgtacgagagcgtggttgtggtgctgtatgtgaacgcatgcaagcttgattcaccttcagggggctgataacctagtaaatcatcaaaatgagatcataagtgttaatgtacactggacatgaaaacaaagactggtttagcagcagacattggtttactctgcagcctgtgttttctgtttccccctttcccacctccttccccccacccaatccttttttttttcttttttgcttttcttttctttttttttagtttttatttactttacctagtatgcctttttttagttgcttctcaagtcagaaaacttttcaggaaggtttccctgtgcatttgcaccagatgaatgtttgatgctatgaaaagctttccatatcatcaaaactaatttgtgtagatttttgcatgaaaaaaatcataaatttccctcaaaatagactgtgttgcagtacacaagttgccataatagtataaaacagtaaaatgtgcttaaaaggccatccttttcattttcagagataacataaagatctttgcatgaggtaaatctacagcatagttcatttttagattttgttgagtcctgtaaagaagaagaagaaaaaagtttcagttgtggtagaataccgtgctgtgtttaaatgttacttgttttcaaactttgttttctatgaaaatgatatggaaacttctaaaatggaatttggtgcatatgtactgctgaataaagaccgatgaagaggtttgagtagatgtacaaatcaagtaatggtttgaacacctttaataatatgcctaatctgttcaattgttttagaatctttttatcttagatgtaggcagccatgaacaatctattttgagccactttagggagaaaactttgtatttttaaaacttgcataaaagttatgcaagtggtttttataaattggaataatacctcagttttgaggttatgcacactaaattaaatgtgacataaattaatttgtacaaaaagaactctttataaggtggctcattgtaggaaatcctgtgccttcccctttgagcacaagtgttgcatgaacaacagtttgctataagaaacataccagattagccaccattagcatctatatctactttgtgtttaaaaatcaactggtaattctgaaacactgtagaatggataaaaattattttgtgatcataactctttgttgaactagagtatttttgcagcattccttgtcatcagaaacatggttaaagtttaaaactagaagcagcagaaaactagcttgtaaaatttatccaagtagagtgcaggctaggctgtcttggggaaataaacattaaaacttaaagcaatgttttacatggggtgtgtgtgtgtggtgtgtggatttttttttttttataaagttagagtataattcaatggcttacattagcttcctgtctttttacctagaaccagcataataagaaatttctttggttctgtcatttcagtatggacatattaatattttagcccactgagtttgtccagttgacaccatcagtgcttcagttttctctctatccaaagcaaggttttaactttccttcattctccagtaaaacagaccgagacaacttgaactatattttgagtattgctatatcttcaacatatagctccaaatgatggattgtatacaaagcatagtacagaaggtttcagtaattggaaggtgaacacagcaatgctttacataatttgtgttttttagtaaaaaatattggattcaaagtaagccaatgagcttgtatacaaattttatatacaaattattgtatagaacagtgatatggaaaataggtaagggtgatattaatatctctgggtataaggactaccttatcgtttaaatattttatttccatctatagcctaatatagaacattgattttctagtagaaattctgggaagggcttttctgtctctgaaattgattcagtacagttgacagttcatcacggttacctggttaaacactttttttttttttttaattctccagtgatctaggaaattgtttcatttttaacacaggcttatttctgatggggatgggggcatagaataatatgcctaataagctaaacgttcttaacgtttcatgtcttaaactgtctttttgaacattgagaccacctcaagtgctgtaaaaataagaatgttatattaggggtgtgtgagacgccctagtctaaaatctatctttaaatatatttcctttgtaattttcaaagacttcagtaattgtgtgttatggtggaaataatactttccattggtccacattgctctggaccaaacctggagcatttctataattagagctatctatgaatcattaaaaatggatctagaataattttggggagagggagtgtatcatttagtttaggcttacctcagcagcacttcatagggtgaggagttgtttgtttctttaaaggtataactgcattgtaaaatgactgggtttattgtaacagtaatttatgggggcaccctttttggattctccattgcctcagtttcctcaaggaaaaagttacagagattaagctaaattttgaatttagagaataactgctgtgtaattttggtataattaccataaatttagtgtcttaaaacacaacatacattatttcacaatttctgtaggtcaagagtgtagttaggttttctgctcagggtctcacaaggctgcaataaaggtgtcagccagagctgcagtcttatctgaagctagggggtcctcttttatgcacatatggcaaaatccattgcctagcaactgaagaaatcatgggaacttcttcaaggccagcaagagaatctctgatctcagggaaggccttaagcgcttttttaaaggtctcacctgattagatcaggccacctacccaccagggtgatctcccttttgattaacccaaagccaaactgatgaggtaccttcattacccctgcaaaatcccttcacctttgccctgcattgtagtccaatcacaggggtgatacgcatcatattcaaagatcctgttcacagtcaagggagggggttatatggagtatgtataccagggaatcttgggagccatcttaagagttcttcctatgacaaggactcaactatttagaactggaacaatttacaagtgatagccttatatagttatcatagcaagcttatttggggatcaaggttgcctctgagaacctaatgaaaactggaccagcttccccaaaaagtgtatatacatggtagtttttcatacagttttaggggattcataagagtccatgaattacagtctgtcccaacccttccctttagatgatgagttgttgaggtgacttgcccaaggtcacacagctactaagggccaaataaagcccacatctcaactcccatactgcccagggcttctaattactattctaaaggtaatctaaattcatttaaatttgtgaaccaatgcaaaaaaatgtgaatgtagctttttggatattttttttgtttactaaggaatgggtaacattgttatagaagcttgcctaagagttttgaaattagttgacctttttgagtttccaaaattgaatcttccattgtagctattaaagtgaactataaataggccaactttaattgttaactcctcgggtttggtggattatctaccatttatatataaaatttcagttagaatccaccattggcgttttgaaggccaagatagctgagtatcttatcctttttgtaacttcttgattattttacttattggcaaaattcattaactgtcagccaataatttaatattatgggaggaaaaaattttgcccagatatctgaggcaatactcccaaacactaacaaactgatgcctaacaaacttgacattttgaacacttaaagttttccctaaactttttaataagcacattaataaagtatgcttttaaatatatatgtacaataatttttaaaagttgctgcaagatgccttcaaatcaatatgcacgttggtggcattagtgcagtcttctatttttatttttttgagacacagtctcgctctgtggcccaggctggagtgtagtggcgcaatctcggctcactgcaacctctgcctcaagggttcaagcaattctgcctcagcctcctgagtagctgggattacaggagtacgctaccacgcctggctaatttttgtatttttagtagaaatggggtttcaccgtattggccaggctggtattggaatcctgaccgcaaatgatctgcccacctcggcttcccaaagtgctgggattacaggcgtgagccactgcgcccaaccagccttaattcttaataaaggaagttgaaaaataatgaacattggtaaaactattctagtgtgatcagaagcaaatttggactgtagtgtcaaattgataaaaaactaagcacaccaatcatgtataagaaaagtagatttaacatttttttccctaaacacttaacccagaagttaacaataatcttgaaaattccttttaaatccaggccctttaggtgatggcagtttgactcaggatgtccaagtccagtgtattttcaataaaattgacttgacagctactgctctgggtgtaagagcagttgactgtgaggaaaagtaaatggttctacagattctttatgatctacctcccaccagaggactgcagtactcccttgttatttatattttctgccccaatttttgccttctccacaaattttataccttttgtagctgcctactccagattacttcacctttccagactatcagttcttccacttttattcttcataaagaaaattccaataacctgtttcacttaggtttttctattactcttcaagcatgaatcctaatttccctgactatatcttacctctgatctccataactgatggattcctatcctagactatgttactctaatattacccaagattttctccagcctgtttttactcttactttgaaacagctgtttaaaatgactcgtaatctgcttaaatctacatgctttttgtggttctcaatccagttacctaccttccagataattccctcactgtcctgtcctctccattcctctgatgtttaagccctgtgagccacctttcccccatcctttgtgcatagttaccattttactctttcttgttgcccaggcaggaatgcagtggtgccatcttggctcactgcaacctccacctcctaggttcaagcgattctcctgcctcagcctcctgagtagctgggaccacaagcgtgcaccaccacgcccggctaatttttgtatttttagtagagatggggtttcaccacgttggccaggctggtctcgaactcctgacctcagatgatccaccctccttggcctcccaaagtgctgggattgcaggcgtgagccaccgcctggccaccattttactctttttaggtacagtaatctaatatccaaagtcttggactcagctaaagagggtatttaccttaaaaaaaaaaaaaaaaagactccatcttttgattcataattgtggtgggggcggggaatcaagacaaccttagtcactttggtattaccataattcttgtcttttcagggttgtcctgttcagctgcataaaacatcatgtattctaggtatttcctaccttcacttacatttttacttgccgatgtgctgccttcataaatgggtatattccgccacacatctagtaagcccccaatgcagtacacaatgtgtatcactgataaaactcgcacttctgccatgtcagtattatattcagttgagtggtctttagcatagtggcagtcctagtcatcctaaccttttagttaaggtaaaattacatatgtttatagaactcatatagacaagctagtttttaaaatcttccttttaaccagtttaggatgatctaggatagctaagttacctacatggtgactgttcggtctaattcagaaacagaagtactaaaagaatactaaaaagtttttacccattatctctatccctgttttctttttgcaattctcagctgcagggagcaagaaaatacacagcagataggaaatgtttgtttgcatcctggctttctcaaccgcactttacgtccttgaatattctagatatttactccttcaagaagtcaggagtatatccaggcctacctatcatccttgccatccccattaaccctcatttttcagtatgtgttttacatttatggttatttttcagtctatagtatctgttcactcattgctctatcacatctgagtttctccgtctttctttccactagattgtaagctccttaagggcaaggtcggcatataagcaaagttctgtaaacaccgtgaaggtaccatgagttctatgggtactcaataaatgcttgtgataatgatgcaatttctca

SEQ ID NO: 145029 - DNA, 510 bp, Homo sapiens
  Payload ID: 8659
  Gene Symbol: KPNA4
  Gene Name: karyopherin alpha 4 (importin alpha 3)
  ENST ID: ENST00000483437
  CDS Start-End: 1-510
caggaagttaaagttcagactgctgcacttagagctgtgggcaacattgttactggaactgatgagcaaacacaagtagttttgaactgtgatgctctttcacacttcccagcactcctgacacatcccaaagagaaaattaataaagaagcagtgtggttcctctccaacatcactgcaggaaatcagcagcaggtacaggcagtaattgatgccaatcttgtaccaatgataatacaccttttggataaggtggcttaccttatccaacaaaatgttatcccacctttttgcaacttgctgactgtaaaagatgcacaagttgtgcaagtagtactcgatggactaagtaatatattaaaaatggctgaagatgaggcagaaaccataggcaatcttatagaagaatgtggagggctggagaaaattgaacaacttcaaaatcatgaaaatgaagacatctacaaattggcctatgagatcattgatcagttcttctcttcagatgat

SEQ ID NO: 145030 - DNA, 2157 bp, Homo sapiens
  Payload ID: 8660
  Gene Symbol: KPNA5
  Gene Name: karyopherin alpha 5 (importin alpha 6)
  Uniprot ID: O15131
  ENST ID: ENST00000356348
  CDS Start-End: 132-1751
ggccgccatcttggattgcgaactgggtcgctacgcttcacgccaggggcggagtggcggcccttctgttacccgccacacacgtcgccgctggggactgggaaatcagggcatcggagagtgccacattaatggatgccatggctagtccagggaaagataactatagaatgaaaagttataagaataaagccctaaatcctcaagagatgcgtagacgaagagaagaagaaggaatacagcttagaaaacaaaaaagagaagaacagttgttcaaacgcagaaatgtctatttgcccagaaatgatgaatctatgcttgaaagtcctatacaggatccagatattagttccactgtacccattccagaggaagaagttgttactacagatatggttcagatgattttttctaataatgctgatcaacagctaacagcaacacagaaatttagaaagctgctttctaaagaacctaatccaccaatagatcaagttatacagaaaccaggagttgtacagagatttgtgaaatttcttgaaagaaatgaaaattgcactttacaatttgaagctgcatgggcattaacaaatatagcatctggaacttttctgcataccaaggtagtgattgaaactggggctgttccgatttttatcaaacttcttaattctgaacatgaagatgttcaggaacaggctgtttgggcacttggtaatattgctggtgacaatgcagaatgcagagattttgttttgaattgtgaaatacttccacctcttttagagttattaacaaattcaaacagactcacaacaacaagaaatgccgtgtgggccctctcaaatttatgtagaggcaaaaaccctcctccaaactttagtaaggtttcaccttgcttaaatgtcctgtcacgactgttgtttagcagtgacccagatgtgttagcagacgtgtgttgggccctttcttatctctccgatggacccaatgataaaattcaagcagtcattgattctggagtctgtcgaagattggtggaacttttgatgcacaatgattataaagttgtatcacctgcattaagggcagttggtaatattgtgactggtgatgatattcaaacacaggtaattttgaattgttctgcattaccctgtctcttacatttattgagtagcccaaaggagtcaattagaaaagaagcctgctggactgtttctaacatcactgctggaaatagagctcagattcaggctgttatagatgcaaatatttttcctgttttgattgagattcttcagaaagcagagtttcgtaccagaaaagaagcagcttgggctataactaatgcaacatcaggaggtactccagagcaaataaggtatttggtagctttaggctgcattaaaccactttgtgatcttttgactgttatggactccaaaatagtccaagtggctttaaatggacttgaaaatattttacgtcttggagaacaagaatctaagcagaatggaataggcattaatccatactgtgctctcattgaagaagcatatggtctggataaaattgagtttttgcaaagccatgaaaatcaggaaatttaccagaaggcatttgatctgattgaacattactttggtgtagaagaagatgaccccagcattgtacctcaggtggatgaaaaccaacaacagtttatatttcagcagcaggaagcaccaatggatggatttcaactttaacttactggaggaaaaaaaatttatggctaaaaagggtagcttcagaaatgacagactttttcattgaatgatgaggacacagcagccatattatgccaagaggaaaaatatcatgatcatattgaaagatcaagcatgagcttccatggtgaagtcttctgtaccaatgcaccagagaatgcctaccatccaaaaaagcagtcagctgatggaaaagaagattattaaacctttgttctgggatttactgttaaaaaacaaacaaaaaacaacaaaaaagcggtgacaggaaacagttaaggaaatgatttaactgaagggaagcaagatttttttaaagcattgttcttaatccccatgactgtccttcagtcacaattccagaataaaagaatctactttgtgt

SEQ ID NO: 145031 - DNA, 5089 bp, Homo sapiens
  Payload ID: 8660
  Gene Symbol: KPNA5
  Gene Name: karyopherin alpha 5 (importin alpha 6)
  Uniprot ID: O15131
  ENST ID: ENST00000368564
  CDS Start-End: 149-1768
ggagaaggggcgcaggtggccgccatcttggattgcgaactgggtcgctacgcttcacgccaggggcggagtggcggcccttctgttacccgccacacacgtcgccgctggggactgggaaatcagggcatcggagagtgccacattaatggatgccatggctagtccagggaaagataactatagaatgaaaagttataagaataaagccctaaatcctcaagagatgcgtagacgaagagaagaagaaggaatacagcttagaaaacaaaaaagagaagaacagttgttcaaacgcagaaatgtctatttgcccagaaatgatgaatctatgcttgaaagtcctatacaggatccagatattagttccactgtacccattccagaggaagaagttgttactacagatatggttcagatgattttttctaataatgctgatcaacagctaacagcaacacagaaatttagaaagctgctttctaaagaacctaatccaccaatagatcaagttatacagaaaccaggagttgtacagagatttgtgaaatttcttgaaagaaatgaaaattgcactttacaatttgaagctgcatgggcattaacaaatatagcatctggaacttttctgcataccaaggtagtgattgaaactggggctgttccgatttttatcaaacttcttaattctgaacatgaagatgttcaggaacaggctgtttgggcacttggtaatattgctggtgacaatgcagaatgcagagattttgttttgaattgtgaaatacttccacctcttttagagttattaacaaattcaaacagactcacaacaacaagaaatgccgtgtgggccctctcaaatttatgtagaggcaaaaaccctcctccaaactttagtaaggtttcaccttgcttaaatgtcctgtcacgactgttgtttagcagtgacccagatgtgttagcagacgtgtgttgggccctttcttatctctccgatggacccaatgataaaattcaagcagtcattgattctggagtctgtcgaagattggtggaacttttgatgcacaatgattataaagttgtatcacctgcattaagggcagttggtaatattgtgactggtgatgatattcaaacacaggtaattttgaattgttctgcattaccctgtctcttacatttattgagtagcccaaaggagtcaattagaaaagaagcctgctggactgtttctaacatcactgctggaaatagagctcagattcaggctgttatagatgcaaatatttttcctgttttgattgagattcttcagaaagcagagtttcgtaccagaaaagaagcagcttgggctataactaatgcaacatcaggaggtactccagagcaaataaggtatttggtagctttaggctgcattaaaccactttgtgatcttttgactgttatggactccaaaatagtccaagtggctttaaatggacttgaaaatattttacgtcttggagaacaagaatctaagcagaatggaataggcattaatccatactgtgctctcattgaagaagcatatggtctggataaaattgagtttttgcaaagccatgaaaatcaggaaatttaccagaaggcatttgatctgattgaacattactttggtgtagaagaagatgaccccagcattgtacctcaggtggatgaaaaccaacaacagtttatatttcagcagcaggaagcaccaatggatggatttcaactttaacttactggaggaaaaaaaatttatggctaaaaagggtagcttcaggtaactcctctttgttgccaatgtaagaatgtttgtttttttacatagaacagtaaagagaatttgatgcacttttagaaagcaaaatgaaacaaaaatttccattcagatgcaacctttcattgtagtttgttgttgttttagttttgttgttgtgcctgtatttatatcttctattgtttggatttttgtatctatttgtgaataattgaatatgcaattatttagtaatttaagcttgaaaaggagaattttggtgaagcattacttagtaattctgaattttttcaagcattcttggaaactgcacattagcagtaaacctattgataattgcattttggcagtaagtcttacacatctaatctctactaaatctacctctatcttgaagcagaaataaaaacaaaaaagcttcagaagcatgaaataatgcaaatgctaaattagaatgtgaaaatatttattaccttaaattatacatatcactgtgctgtaggttatactttgcaaaaaattgcaacagaaaacctataaaatttatttataaaacagaagaaatattatactgataatccattaaaatgtggcaattgtgaagggagaagctgtttttcatgttgaacacattaaaaagattactttataaaatgtttaaatatttctgtttttaacatataagtgctatgtatattagtatattttgtatttcaaccaaatatgctaccatttttgaaatagtgttttattgtttttcactcattgttttaaagagcatcatgacagagatgtcatcatgaatctaaagtagtgctgcatatctaaaataataactaattatttctctgatttttcagagcagtaattgaaaagtttcattttctgtataatagtactagtttaagtttaagtacaagtacaagtttaggtactcgaatgacaaaattaccctgaagaaataaccttattatgtgttaaattgtattaaatgcatttaacatttggatgctaaatgataatgaaaattgctaaaggttctttaatatggttcaaatctataagacttttttcttttagtaatactcagagggtcattctgctgcttgttatgaatcatagattacattcatgtcagattgatcaatatgtatgttttatgatttaacagcaaaaacctcttcaaacggaaaatttgaaagaaaggtttcaatagaaaaattatatatatatttatacatatatatgtgtgtgtgttactctcacagttcaactactgttgaactcaatcttttaatttatagttatacgtaggctatttatgtgtccaattgtatacctagaatacttacttaaaacttagtttacaactctttttaagatgagaactaaggcaattttgatatgattcatggtctattctttaaaaaaagatttcatttatgatagtatttgtaatgtttctgctggaaatcagaggcacgttccaagaggaaaatgtatataggagtacttttaaagaatatgtcactttgtaaattacatatcatgaaactaagcttttgacaagatacttaaaacctacagctgtaaaatacaggtttaaatggtgttcgtaatgctgagtgcatctgccagcccttttttattattaagtagaagattgtatctgtgccccttttttcgtagtggaaggtatatagccgagtataaaatggttttcttttgcattatctgtattcaaaaaacagggtagttatattaaagcttaccaaattgatggtgaatttatcagattaacctttttgtggtgcagatggttctaagtatcaggtgacagggtattctactctttctagtcaattaaaattgataatgcagcatgattcataaactaaccagctgtgcctccttttattttgaggaccctgtagtcactataataaatttctaagccaaatttttcaaacaagatagttcttatagaaggagaaataataaatatgtgtgtgttgatgcatgcacacagaatgacctgtgaaaggaaacttaaattttgccggtaaaacaaacatatctctacagactgtgattatacttcataagcatttaaatacagttttatttatttccttaaatatattacttgggtaattaattttagatttgattgcaaagagcactgtatagcagttgggaccagctcttggcttggcttggcttggcttattgttaagagtttattggatcaagactaacaaataactttgtgatgaaaattcttcaaaaatatagctactcttttcaagtataccatttaaaatatttcatcaggcagagccctgaccaggaaaaaaaaaaaaaaagaaagaaagaaaagaaaaaaataaataaaatgctccaaaaagtgttttcagtagtcttcactggcccttgtgggaggaaaaatacttttttaacttgcttttctaagatttgttatatttaaatccaagagaaactatgccgaaaaaaagtgttataaagaggaatgcatgtagcattaatgcaaatatcaagaaaatacttgaaagagtccttttcatttatttaattaaatttggtgttttattttgtctgaatctgaatttctcctatttaatctatgcaattatgcttgttttatatttataagcacttgactcactgggtgtggtctttttactgtgttttatttcaaaacgttgttttaagtgatagtgtccttaaattttagtgtcatttggtcaacttactggtaacaccagaacaagaaagcaaaaaagtaataaattctgctggcacagaactaacatatcatttggtaactgtaaaacctatttgcagttaaaggttgatttattggataagggactaaaagaagcatatattacctttgcctttatattttttcttcttttaagaaggagcattatggaaaaataaatataaagtcttagtgaatttttgttatggttctcaattcagcaatctactggctgcttgcgaaactgtgaaatcaaattgttcttaacctttattcagtttagtttatagcattactgttttatgaaatgtgacattttaggagccaatataatagagctctaaaaggatagtatatctttaaattctgactggggagtaagaagagaagatattcttaccctactaaataaaccaacttttgagtagtatgcaatattatgaaatgttacaacactatattaaaaataataaaatattttaaaattgcattta

SEQ ID NO: 145032 - DNA, 773 bp, Homo sapiens
  Payload ID: 8660
  Gene Symbol: KPNA5
  Gene Name: karyopherin alpha 5 (importin alpha 6)
  ENST ID: ENST00000392517
  CDS Start-End: 1-367
gtatttggtagctttaggctgcattaaaccactttgtgatcttttgactgttatggactccaaaatagtccaagtggctttaaatggacttgaaaatattttacgtcttggagaacaagaatctaagcagaatggaataggcattaatccatactgtgctctcattgaagaagcatatggtctggataaaattgagtttttgcaaagccatgaaaatcaggaaatttaccagaaggcatttgatctgattgaacattactttggtgtagaagaagatgaccccagcattgtacctcaggtggatgaaaaccaacaacagtttatatttcagcagcaggaagcaccaatggatggatttcaactttaacttactggaggaaaaaaaatttatggctaaaaagggtagcttcagaaatgacagactttttcattgaatgatgaggacacagcagccatattatgccaagaggaaaaatatcatgatcatattgaaagatcaagcatgagcttccatggtgaagtcttctgtaccaatgcaccagagaatgcctaccatccaaaaaagcagtcagctgatggaaaagaagattattaaacctttgttctgggatttactgttaaaaaacaaacaaaaaacaacaaaaaagcggtgacaggaaacagttaaggaaatgatttaactgaagggaagcaagatttttttaaagcattgttcttaatccccatgactgtccttcagtcacaattccagaataaaagaatctactttgtgt

SEQ ID NO: 145033 - DNA, 689 bp, Homo sapiens
  Payload ID: 8660
  Gene Symbol: KPNA5
  Gene Name: karyopherin alpha 5 (importin alpha 6)
  ENST ID: ENST00000413340
  CDS Start-End: 264-689
ggagaaggggcgcaggtggccgccatcttggattgcgaactgggtcgctacgcttcacgccaggggcggagtggcggcccttctgttacccgccacacacgtcgccgctggggactgggaaatcagggcatcggagagtgccacattaatgggtctctggaacctggcggtgccgggtgtttctcgtgttttccccagggcgacagcggtcgcgggggcgtggcagccggacctttcccttgcggacgcgaaggcgtgatgccatggctagtccagggaaagataactatagaatgaaaagttataagaataaagccctaaatcctcaagagatgcgtagacgaagagaagaagaaggaatacagcttagaaaacaaaaaagagaagaacagttgttcaaacgcagaaatgtctatttgcccagaaatgatgaatctatgcttgaaagtcctatacaggatccagatattagttccactgtacccattccagaggaagaagttgttactacagatatggttcagatgattttttctaataatgctgatcaacagctaacagcaacacagaaatttagaaagctgctttctaaagaacctaatccaccaatagatcaagttatacagaaaccaggagttgtacagagatttgtgaaatttcttgaaagaaatgaaaattgcactttacaa

SEQ ID NO: 145034 - DNA, 7378 bp, Homo sapiens
  Payload ID: 8661
  Gene Symbol: KPNA6
  Gene Name: karyopherin alpha 6 (importin alpha 7)
  Uniprot ID: O60684
  ENST ID: ENST00000373625
  CDS Start-End: 94-1704
ccgtcctacagatccgccatattgtctactgaaagctgccgctgaagctgccgccgttgcctccgccgccaagagtgagcgagcggacccgcgatggagaccatggcgagcccagggaaagacaattatcgaatgaagagctataagaacaatgctctaaaccctgaagaaatgagacgaagaagagaggaagagggcattcagctccggaagcagaagcgagagcaacaactttttaaacggagaaatgtggagctgattaatgaagaagctgccatgttcgatagtcttctcatggactcttatgtgagctctaccactggggagagtgtgatcacaagagagatggtggagatgctcttttctgatgattctgacctgcagttagcaaccacacagaaattccggaaactgctctccaaagagcctagtcctccaatagatgaagttatcaacactccaagagtggtggatcggttcgtggagtttctgaagaggaatgagaattgtacattacagtttgaagctgcctgggctctaacgaatattgcctctggaacctctcagcagaccaaaattgtcattgaagcaggggctgtccccatttttatagagctgcttaattcagactttgaggatgttcaggaacaggcagtctgggcactgggaaacatagctggagatagctctgtttgccgagattacgtcttgaactgttccatccttaatcctttgttaacactccttaccaagtccacacgactgacgatgacacggaatgcagtctgggccctgtcaaatctctgccgagggaaaaacccacccccagagtttgcaaaggtctctccttgtttgcctgtactgtctcgcctactcttcagcagcgactcggacttgctggcagatgcttgctgggccctttcttatctgtctgatggccccaatgagaagatccaggcagtcatagactccggagtctgccggagattggtagagctgctgatgcacaatgattacaaagtggcttctcctgccctgagagccgtgggtaacatcgtcactggggatgacatccagacccaggtcattcttaactgttcagccctaccttgccttctccacttgttgagcagtcccaaggagtcaatccggaaggaagcttgctggactatttcaaatattactgctggcaacagggctcaaatacaggctgttatagatgcaaatatcttccctgtgttgatcgaaatccttcagaaagcagagtttcgtacaaggaaagaggcagcctgggccatcaccaatgccacatcaggaggaacccctgagcagatcaggtacctggtctcactgggctgcatcaaacccctatgtgacttgctgactgtaatggattcgaagattgtgcaagtggccctcaatggactggagaacatcctgcggcttggagagcaagagggcaagcgcagtggctcaggggtcaatccttattgtggcctcatagaggaagcctatggcttggataaaattgagtttctccagagccacgagaaccaggagatctaccagaaggccttcgacctcattgagcactactttggtgtagaagacgatgatagcagcctggctccccaagtcgatgaaacgcaacagcagttcatcttccagcagcctgaggcccccatggagggcttccagctataatatctgcctccagggaggggaggggatgggaagcaccaccagccagcggaagagcagccctctggtgggcgggaaaccagtgtccccaccatcagccaccacacacctctgctgccctggagactgtgctcttgacctgctccgcccccttccctggagggagcaccctctggacagacagaaccatctgaggctcacctttgggttttgtgacaagaaggggacgtgttgggtttttcttccttacactatattttggctgcacacatgtctttaacccaggagcccaggggtagacaaaggaggactaaggtaatcaatttgcacctttttttatttttattttttttctttttttcttcagtggtgacttccttccctttatcttttttcattcttcccggtcctctgccctgatctgtgtaactcttatcttgggtacttgagcagacggtatattccagaggtgggaggtgggaggggaagggagaaatccaaaacaaagtgttcttgctctgacagaatattaatcttgtacgcttggattgagttatttaatttttttttcttttgcacatttttcttgtattaagattgctcttcccaagagccacaagttcctggttttagtaaacccagctgcctgcattgcctgggactagaggctggggaggctaccatgaaacaaaggtccctccctccctctgactctttgcccagacctctttagtttgggggatcctcctcactctcctgaagtgtctcaagtataccagtgggagtgcaggggaggagcacaggccttcagatggggcttcccacgtgtagctactgatcccatatttcctactcaccttccaaatggtgcgacccaacttcatttgtttacttgaaaattccccctcgaggttgagagaacctctgaggtggctgtattttctcctaagcttgagatagggggctgtggtccttcctttctcctgaggagaaagtccttgctctggtgacctgtaagttgcagaggagggtggagtgagagtgtcatgtattgggatagtcagggatccctgcctttggcctttcttcttcttcttcttcctcttccatagttggatcatgtatattttacttctaaaggagagaatgtcaaaaagttctgtatttttttatattctatatattaggtaggtcaatcttaattggtctcaagaggaagaactgtctgtcatttcggtaagtaggatactgtgaggaagaccaaaaagagatatggatgcttcctcgctcaggaggcctgagcttggtccttttcctctctgcttggattctggaccaccacctgggaccaaccttcagctctggaaccttcataaagcaggtcagcgtggcctgattgtcccaggacctgaagggagcaaggatggcctcagggcctggtgaagtctgctactctgtccttactgctgaacatcctgcttgtatcaggaaactcagaagcagtttgccttgtcaaattcaatctcaatggccattgtccacataactgatcacccatggctgcctctcctattatctattatcactgaaacttagtagcctgctttttttttttttttttttagagctattgcgtatcttccctgtttgggatccttgtacctggtttgggttttcccttccttgtgacaattataatccagatgcctcttctttctgtttgaattacggtagtgcattgccttagtggcttgcctgtgcctctgggtggattacatatgatagtaaagcccacctgtttggatgggagtagaggaagttggtgtagaccagctgtggagctgaaggcacagtctgccccacccccacctccccactgtggttagtcagaggcatcctgctccaagctctgcttttccttcctctgaaacaatgccattcttgcttctattgctacacatctccttctggctcaggtgaaatccatgcccttctgcttatagacctaaagttcaggtacttattattggccattgatcttgaatttgccctctcctagtgctgcagtcccacttcaaagccattttctgaggaggatggtttaggtctggcaattgtccttgaaaaatcccacccatgttgtaccaccttggtgagtcatatgccactcatcagcttgggaatgatggctgccaactcccaatctcccaggaaggcagggggcagaatctttttttcacttggcctgctacctccattaaaaaaccattctcttacagtttaaaaaaaaaaaaaaaaaaaaagccttcccctacccaacctccgcccattgttctcttccaaagggcaatttagtaggatctactttgtacatctcaagtaagagttaagtccctgatacagggaccagtttcttagtgtaagacatacacatcctgcttgtccagctgttcctccaaaatctactttggcttcagctccgggtcctgtaccagatggaaaatgtttttggtgatctggctgctgcttaaagccagttttccctaagaactccaaaggctaaagtctactaggggcagagtgtgaggatagatttctaatcagagaaaagtggcctccaggagctttcatttatgtcttctccagaccaggttttcctgttatcttcctttaatcccctttcaaccaacaggtgaagttcttccagcccacagaggtagtaatatcatcttttctatctcctcctctcctttggccatgtaatgaagcaaaatattatttatttagcccaggcttgagagccactgtttgtggacagtcttcatctagattccataccctggcctaggcgaggtaaggctctctggttattgccaggatggagcccctctaccccagtctgctgtagggaataccctaattagttgaggcatgcttttggaatcctggcatgttggcatatggctggtctatcctttttaagatctctggttgggggtatctggatatggattaggagggacaaggagcctttttcttggctaatgttttccaatacttttttgaatggtgccagcccctccaggcatcccacccccaaatcatcatctttagtactaacagggtgtctggtcttagaagcctcccttcagatcccagctgaccctggtgactgcctggccttgatgttggctgcagccttctgatagaaccacatggattccacccacagctggccaggcttgttacatgggtcagggaatacaaatggcccccccccagggagcaggtgttggcctcagttttcagggacccttggtgttgctccttacctagagcccattaatctaccccatcaactctctgccatgaaagccatcttccaggagccctgttttttggagctgaactgcacagattatagctgctattgtacttaaataagggagaggaaaagaaggttctcaggcacagactttctatttttctcaagccaaaccagtttaaaatgtctagcagaatgaactgtatttccatttcttcatgtctacctgccttccccccacaccctaaagttgtacttgtttctagcaaactagaaggaaaagataggaaagcctggcactactaacctcacctctcatacacctctttgaaggccccagctcttttgttcaggcctctcttctcccctagactcactcagcttggtatccatcatcttgagcattcttcagtagattcatctagggttcagattccagactctcagctgaagacagggagccaatttcccccaggtccctgcaggtaatccagggaccccatagggagaacaggctgactggggcattaggaatgtttgtacctctctgcttccctggcagcctggggaagggtgcagggctcagtgcgctaaaccatggtaaacatcttcaatagaactaccctagaatttagtgagtgtgagactgagatattgctcagaataaatttattccatagccatttaggattgcatgttctggaccaaccttgtccagtatgttttctgtttgagctttttcattcttttgttaagccaacaagttgagaatttggccctgctgggatccatgtagtgggcactagctgctctttggccaaggccttcataaatgattcagtctctcattatctgtcctctagccccacaccctgatttagaccgtggcaaaggaagaacttgaggtcaagaccaaccaaatctgtgaattaaagctgttatttttttctctgcaagggcgctttgcttcaggtctgggctatgtgcagaacctaagcaggctgtgagagttagaagaggcagtattacatgttaggcccagaacaccatgggaaaaggtttatgtagtgtatcttagtggcctgcctagctgcctctgggccaggctgacttctgatgtccacattagctcgtacctgaaccctgttgctgaatgccagccctgttctcctgtaactattatatacgccatggcctggggggcattgaaggaagtaagctctcagagatcctaacactggctgggaacctctgactcagagcatgtctttaaagagtccacatctggccaggcgcggtggcacatgcctgtaatcccagcactttgggaggccgaggcgggtggatcacgaggtcaggagtttgagaccagcctggcaacatagtgaaaccccatctctaataaaaatacaaaaaattagctgggcgtggtggcaggcgcctgtaatcccagctacttgggaggctgagacaggagaatcacttgaacccaggaggcggaggttgcagtgagccaagatcatgccactgcactccagcttgggtgacagtgcgagactccatctcaaaaaaaaaaaaaaaaaaaaaatccacatcttcagctgggcgcggtggctcatgcctgtaatcctagcactttgggaggctgaggcgggcagatcacttgaggttaggggttcaaaaccagcctgaccaacatagtaaaaccccgtccctacaaaaataaaaaaataaaaaaaataagccaggtgtggtggtgggcacctgtgatctcagctacgtgggaggctgaggcaggagaatctcttgaacctaggaggcagaggttgcagtgagccaagattgtgccagcctgggcgacagggtgaggctcttgtctcaaaaaaaaaagtccacatcttcatgaaccctcagactctggagttgggtgtcggcttttttagccagcttttgtgggaattgcctttgacctattaaagaaggaaagtgggtaatggagtcccagccactcaagagactggatatcccccgagaatggcttgggttaccagctatggacccttggaagatgaatctaatccttctcactggtttttctttgcaaattcatttgcttttatttttctaataacaataaactctattttccatgttctcagggcccctgggtagacagacacagcttgatttcagagcagacataggcgaagaaaacatggcattgagtgtgctgagtccagacaaatgttatttatatacacatccaaatttgaagagaaaatgtatttctttaggtttcaaacactgtaatagatataaagcaaaaataaaaacctgttgcaaagttctaaa

SEQ ID NO: 145035 - DNA, 965 bp, Homo sapiens
  Payload ID: 8661
  Gene Symbol: KPNA6
  Gene Name: karyopherin alpha 6 (importin alpha 7)
  ENST ID: ENST00000446515
  CDS Start-End: 1-965
cggagaaatgtggagctgattaatgaagaagctgccatgttcgatagtcttctcatggactcttatgtgagctctaccactggggagagtgtgatcacaagagagatggtggagatgctcttttctgatgattctgacctgcagttagcaaccacacagaaattccggaaactgctctccaaagagcctagtcctccaatagatgaagttatcaacactccaagagtggtggatcggttcgtggagtttctgaagaggaatgagaattgtacattacaggcagtctgggcactgggaaacatagctggagatagctctgtttgccgagattacgtcttgaactgttccatccttaatcctttgttaacactccttaccaagtccacacgactgacgatgacacggaatgcagtctgggccctgtcaaatctctgccgagggaaaaacccacccccagagtttgcaaaggtctctccttgtttgcctgtactgtctcgcctactcttcagcagcgactcggacttgctggcagatgcttgctgggccctttcttatctgtctgatggccccaatgagaagatccaggcagtcatagactccggagtctgccggagattggtagagctgctgatgcacaatgattacaaagtggcttctcctgccctgagagccgtgggtaacatcgtcactggggatgacatccagacccaggtcattcttaactgttcagccctaccttgccttctccacttgttgagcagtcccaaggagtcaatccggaaggaagcttgctggactatttcaaatattactgctggcaacagggctcaaatacaggctgttatagatgcaaatatcttccctgtgttgatcgaaatccttcagaaagcagagtttcgtacaaggaaagaggcagcctgggccatcaccaatgccacatcaggaggaacccctgagcagatcag

SEQ ID NO: 145036 - DNA, 3941 bp, Homo sapiens
  Payload ID: 8661
  Gene Symbol: KPNA6
  Gene Name: karyopherin alpha 6 (importin alpha 7)
  ENST ID: ENST00000471599
  CDS Start-End: 74-634
attgtctactgaaagctgccgctgaagctgccgccgttgcctccgccgccaagagtgagcgagcggacccgcgatggagaccatggcgagcccagggaaagacaattatcgaatgaagagctataagaacaatgctctaaaccctgaagaaatgagacgaagaagagaggaagagggcattcagctccggaagcagaagcgagagcaacaactttttaaacggagaaatgtggagctgattaatgaagaagctgccatgttcgatagtcttctcatggactcttatgagagtgtgatcacaagagagatggtggagatgctcttttctgatgattctgacctgcagttagcaaccacacagaaattccggaaactgctctccaaagagcctagtcctccaatagatgaagttatcaacactccaagagtggtggatcggttcgtggagtttctgaagaggaatgagaattgtacattacagtttgaagctgcctgggctctaacgaatattgcctctggaacctctcagcagaccaaaattgtcattgaagcaggggctgtccccatttttatagagctgcttaattcagactttgaggatgttcaggaacagtctgggcactgggaaacatagctggagatagctctgtttgccgagattacgtcttgaactgttccatccttaatcctttgttaacactccttaccaagtccacacgactgacgatgacacggaatgcagtctgggccctgtcaaatctctgccgagggaaaaacccacccccagagtttgcaaaggtctctccttgtttgcctgtactgtctcgcctactcttcagcagcgactcggacttgctggcagatgcttgctgggccctttcttatctgtctgatggccccaatgagaagatccaggcagtcatagactccggagtctgccggagattggtagagctgctgatgcacaatgattacaaagtggcttctcctgccctgagagccgtgggtaacatcgtcactggggatgacatccagacccaggtcattcttaactgttcagccctaccttgccttctccacttgttgagcagtcccaaggagtcaatccggaaggaagcttgctggactatttcaaatattactgctggcaacagggctcaaatacaggctgttatagatgcaaatatcttccctgtgttgatcgaaatccttcagaaagcagagtttcgtacaaggaaagaggcagcctgggccatcaccaatgccacatcaggaggaacccctgagcagatcaggtacctggtctcactgggctgcatcaaacccctatgtgacttgctgactgtaatggattcgaagattgtgcaagtggccctcaatggactggagaacatcctgcggcttggagagcaagagggcaagcgcagtggctcaggggtcaatccttattgtggcctcatagaggaagcctatggcttggataaaattgagtttctccagagccacgagaaccaggagatctaccagaaggccttcgacctcattgagcactactttggtgtagaagacgatgatagcagcctggctccccaagtcgatgaaacgcaacagcagttcatcttccagcagcctgaggcccccatggagggcttccagctataatatctgcctccagggaggggaggggatgggaagcaccaccagccagcggaagagcagccctctggtgggcgggaaaccagtgtccccaccatcagccaccacacacctctgctgccctggagactgtgctcttgacctgctccgcccccttccctggagggagcaccctctggacagacagaaccatctgaggctcacctttgggttttgtgacaagaaggggacgtgttgggtttttcttccttacactatattttggctgcacacatgtctttaacccaggagcccaggggtagacaaaggaggactaaggtaatcaatttgcacctttttttatttttattttttttctttttttcttcagtggtgacttccttccctttatcttttttcattcttcccggtcctctgccctgatctgtgtaactcttatcttgggtacttgagcagacggtatattccagaggtgggaggtgggaggggaagggagaaatccaaaacaaagtgttcttgctctgacagaatattaatcttgtacgcttggattgagttatttaatttttttttcttttgcacatttttcttgtattaagattgctcttcccaagagccacaagttcctggttttagtaaacccagctgcctgcattgcctgggactagaggctggggaggctaccatgaaacaaaggtccctccctccctctgactctttgcccagacctctttagtttgggggatcctcctcactctcctgaagtgtctcaagtataccagtgggagtgcaggggaggagcacaggccttcagatggggcttcccacgtgtagctactgatcccatatttcctactcaccttccaaatggtgcgacccaacttcatttgtttacttgaaaattccccctcgaggttgagagaacctctgaggtggctgtattttctcctaagcttgagatagggggctgtggtccttcctttctcctgaggagaaagtccttgctctggtgacctgtaagttgcagaggagggtggagtgagagtgtcatgtattgggatagtcagggatccctgcctttggcctttcttcttcttcttcttcctcttccatagttggatcatgtatattttacttctaaaggagagaatgtcaaaaagttctgtatttttttatattctatatattaggtaggtcaatcttaattggtctcaagaggaagaactgtctgtcatttcggtaagtaggatactgtgaggaagaccaaaaagagatatggatgcttcctcgctcaggaggcctgagcttggtccttttcctctctgcttggattctggaccaccacctgggaccaaccttcagctctggaaccttcataaagcaggtcagcgtggcctgattgtcccaggacctgaagggagcaaggatggcctcagggcctggtgaagtctgctactctgtccttactgctgaacatcctgcttgtatcaggaaactcagaagcagtttgccttgtcaaattcaatctcaatggccattgtccacataactgatcacccatggctgcctctcctattatctattatcactgaaacttagtagcctgctttttttttttttttttttagagctattgcgtatcttccctgtttgggatccttgtacctggtttgggttttcccttccttgtgacaattataatccagatgcctcttctttctgtttgaattacggtagtgcattgccttagtggcttgcctgtgcctctgggtggattacatatgatagtaaagcccacctgtttggatgggagtagaggaagttggtgtagaccagctgtggagctgaaggcacagtctgccccacccccacctccccactgtggttagtcagaggcatcctgctccaagctctgcttttccttcctctgaaacaatgccattcttgcttctattgctacacatctccttctggctcaggtgaaatccatgcccttctgcttatagacctaaagttcaggtacttattattggccattgatcttgaatttgccctctcctagtgctgcagtcccacttcaaagccattttctgaggaggatggtttaggtctggcaattgtccttgaaaaatcccacccatgttgtaccaccttggtgagtcatatgccactcatcagcttgggaatgatggctgccaactcccaatctcccaggaaggcagggggcagaatctttttttcacttggcctgctacctccattaaaaaaccattctcttacagttt

SEQ ID NO: 145037 - DNA, 1725 bp, Homo sapiens
  Payload ID: 8662
  Gene Symbol: KPNA7
  Gene Name: karyopherin alpha 7 (importin alpha 8)
  Uniprot ID: A9QM74
  ENST ID: ENST00000327442
  CDS Start-End: 41-1591
tgctgtccaacctgcaggtaacttactacttccagtcaatatgccgaccttagatgctccagaagagaggcggagaaaatttaagtaccgaggcaaagatgtgtctctgaggcgacagcagaggatggcggtcagtctggagctccgaaaggccaagaaagatgaacagaccttaaagagaaggaatatcacgagcttctgccctgacacaccttctgaaaaaacagccaaaggggtggcggtcagcctcactctgggtgaaataatcaaaggtgtgaatagctcagatccagtcctatgtttccaggccacccagacagccaggaaaatgctatcccaggaaaagaacccccctctgaaactggtcattgaagcgggcctcattcccaggatggtggagttcctgaagtcatcactttacccctgcttgcagtttgaggctgcctgggccctgaccaacatcgcttcagggacttcggagcagactcgtgccgtggtagaagggggagccatccagcccttgattgagctcctgtcttcctccaacgtggctgtgtgtgaacaggcagtgtgggctcttggtaatatagccggtgatggcccagagttcagagataacgtcatcacaagcaatgccatcccacatctcctagccttgatttcacccaccctgccgatcacatttctgcggaacatcacgtggaccttgtcgaatctgtgccgaaacaagaacccatacccttgcgacactgcggtgaagcagatactgccggccctccttcacctcctgcagcaccaggacagtgaggttctctcggatgcctgctgggcactgtcctacctcaccgacggctccaacaagcgcatcggccaagtggttaacacgggggtcctgcccaggctggtagtgctcatgaccagctcagaactcaatgtcttgactccttctctccgcaccgtggggaacattgtcacgggcacagatgagcagacgcagatggccattgatgcgggtatgctgaacgtgctcccccagctcctgcaacacaacaagccctccatccagaaggaggcagcctgggccctgagcaacgtagcagcggggccttgtcaccacatccagcagctgcttgcctacgacgtcttgcctcccttggtggctctgctaaaaaacggagaatttaaagtccagaaagaggctgtctggatggtggcgaactttgcaacaggggccaccatggatcagctgatccagctcgtccactctggggtcctggagccactggtgaatctgctcactgccccagatgttaaaattgttctcatcatccttgatgtcatctcttgcatcctccaggcggcagagaaacggtctgagaaggaaaacctgtgtcttctgatagaagaacttggtgggatcgatagaattgaggctttacagctgcatgagaaccgtcaaattggccagtcggctttgaacatcatcgagaagcactttggtgaggaagaagatgagagccaaactttactgagccaagtcatagaccaagattatgaatttatagattatgaatgcttagcaaaaaaatagccaagctccctacctcctaaaccaacaacccagtgctaaaggataacttctttaagaagcagcagtcctctatcttagtgtaacccaaatgtgaagcttttaaaacttgacattaataaaatgttcaacacttt

SEQ ID NO: 145038 - DNA, 5309 bp, Homo sapiens
  Payload ID: 8663
  Gene Symbol: KANSL1
  Gene Name: KAT8 regulatory NSL complex subunit 1
  Uniprot ID: Q7Z3B3
  ENST ID: ENST00000262419
  CDS Start-End: 472-3789
tcctcctcctcctgctgccctttctccttctcctcgctctccctgtggctcccatttctctctctctttgttagttgtaactagaaaggcagggcagggtagaaaaatcccccggaactttaaatggcctctccgggcttccctgctgcgggtccgggctgggagtcgccccaagggcgggggtgtgcgggggcccttccccaggagctgccgcctcgttcgccagcttttcctttggcgttctatttaaaaaggcggcctgaagaacatgatttattcccgtaaaagaaccccccaaacaaactctggctctcgccttgaacttctcttgactgcaaaaggcctttctctgctcgaaacacacatcttggcgcgttgcacgtctgttctctggggaggcagtaaggggccgtggagctggcctcggcctcggcatcgggagaggctggacttcctgtctctctgtgctgaatggctgcgatggcgcccgctctcactgacgcagcagctgaagcacaccatatccggttcaaactggctcccccatcctctaccttgtcccctggcagtgccgaaaataacggcaacgccaacatccttattgctgccaacggaaccaaaagaaaagccattgctgcagaggatcccagcctagatttccgaaataatcctaccaaggaagacttgggaaagctgcaaccactggtggcatcttatctctgctctgatgtaacatctgttccctcaaaggagtctttgaagttgcaaggggtcttcagcaagcagacagtccttaaatctcatcctctcttatctcagtcctatgaactccgagctgagctgttggggagacagccagttttggagttttccttagaaaatcttagaaccatgaatacgagtggtcagacagctctgccacaagcacctgtaaatgggttggctaagaaattgactaaaagttcaacacattctgatcatgacaattccacttccctcaatgggggaaaacgggctctcacttcatctgctcttcatgggggtgaaatgggaggatctgaatctggggacttgaaggggggtatgaccaattgcactcttccacatagaagccttgatgtagaacacacaactttgtatagcaataatagcactgcaaacaaatcctctgtcaattccatggaacagccggcacttcaaggaagcagtagattatcacctggtacagactccagctctaacttggggggtgtcaaattggagggtaaaaagtctcccctgtcttccattcttttcagtgctttagattctgacacaaggataacagctttactgcggcgacaggctgacattgagagccgtgcccgcagattacaaaagcgcttacaggttgtgcaagccaagcaggttgagaggcatatacaacatcagctgggtggatttttggagaagactttgagcaaactgccaaacttggaatccttgagaccacggagccagttgatgctgactcgaaaggctgaagctgccttgagaaaagctgccagtgagaccaccacttcagagggacttagcaactttctgaaaagcaattcaatttcagaagaattggagagatttacagctagtggcatagccaacttgaggtgcagtgaacaggcatttgattcagatgtcactgacagtagttcaggaggggagtctgatattgaagaggaagaactgaccagagctgatcccgagcagcgtcatgtacccctgagacgcaggtcagaatggaaatgggctgcagaccgggcagctattgtcagccgctggaactggcttcaggctcatgtttctgacttggaatatcgaattcgtcagcaaacagacatttacaaacagatacgtgctaataaggggttgatagttcttggggaggtacctcccccagagcatacaacagacttatttcttccacttagttctgaggtgaagacagatcatgggactgataaattgattgagtctgtttctcagccattggaaaaccatggtgcccctattattggtcatatttcagagtcactgtctaccaaatcatgtggagcactcagacctgtcaatggagttattaacactcttcagcctgtcttggcagaccacattccaggtgacagctctgatgctgaggaacaattacataagaagcaacgactgaatctcgtctcttcatcatctgatggcacctgtgtggcagcccggacacgtcctgtactgagctgtaagaagcggaggcttgttcgacccaacagcatcgttcctctttccaagaaggttcaccggaacagcacaatccgccctggctgtgatgtgaatccctcctgcgcactgtgtggttcaggcagcatcaacaccatgcctcccgaaattcactatgaagcccctctgttggaacgtctttcccagttggactcttgtgttcatcctgttctagcatttccagatgatgttcccacaagcctgcatttccagagcatgctgaaatctcagtggcagaacaagccttttgacaaaatcaaacctcccaaaaagttatcgcttaagcacagagcacccatgccgggcagtctgccagattcagctcgtaaggacaggcacaaattggtcagctccttcctaacaacagccaagctgtcccatcaccaaacccggcctgacaggacccacaggcagcacttagacgatgtgggggccgtgcccatggtggagcgagtgacagcgccaaaagcagagcgcttgctcaacccaccaccacccgtgcatgacccaaaccacagcaaaatgagattgcgagaccattcatctgagagaagtgaagtgttgaagcatcacacagacatgagcagttcgagctacttggcagccacccaccatcctccacacagtcccttggtgcgacagctctccacctcctcagattcccctgcacccgccagctctagctcacaggttacagccagcacatcgcagcagccagtaaggaggagaaggggagagagctcatttgatattaacaacattgtcatcccaatgtctgttgctgcaacaactcgcgtagagaaactgcaatacaaggaaatccttacgcccagctggcgggaggttgatcttcagtctctgaaggggagtcctgatgaggagaatgaagagattgaggacctatccgacgcagccttcgccgccctgcatgccaaatgtgaggagatggagagggcacggtggctgtggaccacgagtgtgccaccccagcggcggggcagcaggtcctacaggtcatcagacggccggacaaccccccagctgggcagtgccaacccctccaccccccagcctgcctcccctgatgtcagcagtagccactctttgtcagaatactcccatggtcagtcccctaggagccccattagcccggaactgcactcagcacccctcacccctgtggctcgggacactccgcgacacttagccagtgaggatacccgttgttccacaccagagctggggctggatgaacagtctgtccagccctgggagcggcggaccttccccctggcgcacagtccccaggcggagtgtgaggaccagctggatgcacaggagcgagcagcccgctgcactcgacgcacctcaggcagcaagactggccgggagacagaggcagcgcccacctcgcctcccattgtccccctcaagagtcggcatctggtggcagcagccacagctcagcgcccgactcacagatgagcgggagacagccatctaaacagactcactaactattggcattaaagcttcagaaatctctgcgtttgatattcaaacatcatatgccggaaattttcacagtttttagtgaacttaaggaatttagatcctactttggtatttttttttcttgttttaatttttgttttgtttttgtttccatgttttcttgtcacacacctgagcacttcctcccgttggcaaacagaagttcaggatgagaccctgctggcctggtcctggcacatcctctgcactgttgaatcactggacttactgatcttagatgaccaccccctccctcacacctgtgggcagggcagaacagcctggcgggctacagtttagcatggccttcttgagctagggtggaatggggcagggtgctctggactcttaccccctcccctcccatctgtggcttggctctgctgtggccctcctggctgggtccccttggtttttcgtgctggaacatccccaccagagcctctctgccataactgccagctgctctccccgagtgctcagctggcagaacacctttcctttctcacccagaacttaagagactgattttttgtttcatctgcatttggtcttctctgttttgactctttcactgcagtaacctggctgtggctgctcaggttcccctcctcatgccccttggtacccttccctgtctgctctcccatgccatgtacacacccacaacccgtccttccacttggaatatttttaccacctatcctgatctttgaaggtagggttaggactacttaacctctattcccactcccctgcaaactgggggttgtgggaagtgagcagccatctccctgtgtgattttttttttttttccctctgattcactttgccatgtttccttcacatccagatccctgtcggtgttagttccactcttggtctttcacgctccccttgcctgtggaacattgtctggtcctagctgtggttcccattgttcccccttcacccttctctgttaaccttgtgcctgtctcctgtatgatcacatcaccaaaaagggggaggggggagaagactctttttttttggccattttgtaatcgtataaaaatagtagacaactgcttaatggttggggttttttcacaattttcaacattagtgatttttttttctgtttgcaagttaaagggtttgtcattgtttctttaaaaaaaaatacaataatgcaccatatccctatgcataaagtgcttcttctatttataaggttgaaaattctgaataacccttttagcattgaaaaaaaaaacaaaaacaaaaaatggaaaaaaaaaaccttgtattttgtaaatattttcttttcctgctttggagctgtgtaatggcagcgaaacatgtagctgtctttgttctatagaaatgcttttcttcagagaagctgatctttgttaatgtcttgattctgttcgcaaagcacagactagtgcttaaaaaaaaaaaa

SEQ ID NO: 145039 - DNA, 5080 bp, Homo sapiens
  Payload ID: 8663
  Gene Symbol: KANSL1
  Gene Name: KAT8 regulatory NSL complex subunit 1
  Uniprot ID: Q7Z3B3
  ENST ID: ENST00000432791
  CDS Start-End: 258-3572
cgcccccacttctaggcttggttgaaccgtgcagataccttctcgaaacaaaagattttcctacctgcttatacttggtaaccgagggaattactaagacttcttgctcatttctgagtattgtctttatatcctgacactatgaatgctacttggatgcctcttaagtctgttctctggggaggcagtaaggggccgtggagctggcctcggcctcggcatcgggagaggctggacttcctgtctctctgtgctgaatggctgcgatggcgcccgctctcactgacgcagcagctgaagcacaccatatccggttcaaactggctcccccatcctctaccttgtcccctggcagtgccgaaaataacggcaacgccaacatccttattgctgccaacggaaccaaaagaaaagccattgctgcagaggatcccagcctagatttccgaaataatcctaccaaggaagacttgggaaagctgcaaccactggtggcatcttatctctgctctgatgtaacatctgttccctcaaaggagtctttgaagttgcaaggggtcttcagcaagcagacagtccttaaatctcatcctctcttatctcagtcctatgaactccgagctgagctgttggggagacagccagttttggagttttccttagaaaatcttagaaccatgaatacgagtggtcagacagctctgccacaagcacctgtaaatgggttggctaagaaattgactaaaagttcaacacattctgatcatgacaattccacttccctcaatgggggaaaacgggctctcacttcatctgctcttcatgggggtgaaatgggaggatctgaatctggggacttgaaggggggtatgaccaattgcactcttccacatagaagccttgatgtagaacacacaactttgtatagcaataatagcactgcaaacaaatcctctgtcaattccatggaacagccggcacttcaaggaagcagtagattatcacctggtacagactccagctctaacttggggggtgtcaaattggagggtaaaaagtctcccctgtcttccattcttttcagtgctttagattctgacacaaggataacagctttactgcggcgacaggctgacattgagagccgtgcccgcagattacaaaagcgcttacaggttgtgcaagccaagcaggttgagaggcatatacaacatcagctgggtggatttttggagaagactttgagcaaactgccaaacttggaatccttgagaccacggagccagttgatgctgactcgaaaggctgaagctgccttgagaaaagctgccagtgagaccaccacttcagagggacttagcaactttctgaaaagcaattcaatttcagaagaattggagagatttacagctagtggcatagccaacttgaggtgcagtgaacaggcatttgattcagatgtcactgacagtagttcaggaggggagtctgatattgaagaggaagaactgaccagagctgatcccgagcagcgtcatgtacccctgagacgcaggtcagaatggaaatgggctgcagaccgggcagctattgtcagccgctggaactggcttcaggctcatgtttctgacttggaatatcgaattcgtcagcaaacagacatttacaaacagatacgtgctaataaggggttgatagttcttggggaggtacctcccccagagcatacaacagacttatttcttccacttagttctgaggtgaagacagatcatgggactgataaattgattgagtctgtttctcagccattggaaaaccatggtgcccctattattggtcatatttcagagtcactgtctaccaaatcatgtggagcactcagacctgtcaatggagttattaacactcttcagcctgtcttggcagaccacattccaggtgacagctctgatgctgaggaacaattacataagaagcaacgactgaatctcgtctcttcatcatctgatggcacctgtgtggcagcccggacacgtcctgtactgagctgtaagaagcggaggcttgttcgacccaacagcatcgttcctctttccaagaaggttcaccggaacagcacaatccgccctggctgtgatgtgaatccctcctgcgcactgtgtggttcaggcagcatcaacaccatgcctcccgaaattcactatgaagcccctctgttggaacgtctttcccagttggactcttgtgttcatcctgttctagcatttccagatgatgttcccacaagcctgcatttccagagcatgctgaaatctcagtggcagaacaagccttttgacaaaatcaaacctcccaaaaagttatcgcttaagcacagagcacccatgccgggcagtctgccagattcagctcgtaaggacaggcacaaattggtcagctccttcctaacaacagccaagctgtcccatcaccaaacccggcctgacaggacccacaggcagcacttagacgatgtgggggccgtgcccatggtggagcgagtgacagcgccaaaagcagagcgcttgctcaacccaccaccacccgtgcatgacccaaaccacagcaaaatgagattgcgagaccattcatctgagagaagtgaagtgttgaagcatcacacagacatgagcagttcgagctacttggcagccacccaccatcctccacacagtcccttggtgcgacagctctccacctcctcagattcccctgcacccgccagctctagctcacaggttacagccagcacatcgcagccagtaaggaggagaaggggagagagctcatttgatattaacaacattgtcatcccaatgtctgttgctgcaacaactcgcgtagagaaactgcaatacaaggaaatccttacgcccagctggcgggaggttgatcttcagtctctgaaggggagtcctgatgaggagaatgaagagattgaggacctatccgacgcagccttcgccgccctgcatgccaaatgtgaggagatggagagggcacggtggctgtggaccacgagtgtgccaccccagcggcggggcagcaggtcctacaggtcatcagacggccggacaaccccccagctgggcagtgccaacccctccaccccccagcctgcctcccctgatgtcagcagtagccactctttgtcagaatactcccatggtcagtcccctaggagccccattagcccggaactgcactcagcacccctcacccctgtggctcgggacactccgcgacacttagccagtgaggatacccgttgttccacaccagagctggggctggatgaacagtctgtccagccctgggagcggcggaccttccccctggcgcacagtccccaggcggagtgtgaggaccagctggatgcacaggagcgagcagcccgctgcactcgacgcacctcaggcagcaagactggccgggagacagaggcagcgcccacctcgcctcccattgtccccctcaagagtcggcatctggtggcagcagccacagctcagcgcccgactcacagatgagcgggagacagccatctaaacagactcactaactattggcattaaagcttcagaaatctctgcgtttgatattcaaacatcatatgccggaaattttcacagtttttagtgaacttaaggaatttagatcctactttggtatttttttttcttgttttaatttttgttttgtttttgtttccatgttttcttgtcacacacctgagcacttcctcccgttggcaaacagaagttcaggatgagaccctgctggcctggtcctggcacatcctctgcactgttgaatcactggacttactgatcttagatgaccaccccctccctcacacctgtgggcagggcagaacagcctggcgggctacagtttagcatggccttcttgagctagggtggaatggggcagggtgctctggactcttaccccctcccctcccatctgtggcttggctctgctgtggccctcctggctgggtccccttggtttttcgtgctggaacatccccaccagagcctctctgccataactgccagctgctctccccgagtgctcagctggcagaacacctttcctttctcacccagaacttaagagactgattttttgtttcatctgcatttggtcttctctgttttgactctttcactgcagtaacctggctgtggctgctcaggttcccctcctcatgccccttggtacccttccctgtctgctctcccatgccatgtacacacccacaacccgtccttccacttggaatatttttaccacctatcctgatctttgaaggtagggttaggactacttaacctctattcccactcccctgcaaactgggggttgtgggaagtgagcagccatctccctgtgtgattttttttttttttccctctgattcactttgccatgtttccttcacatccagatccctgtcggtgttagttccactcttggtctttcacgctccccttgcctgtggaacattgtctggtcctagctgtggttcccattgttcccccttcacccttctctgttaaccttgtgcctgtctcctgtatgatcacatcaccaaaaagggggaggggggagaagactctttttttttggccattttgtaatcgtataaaaatagtagacaactgcttaatggttggggttttttcacaattttcaacattagtgatttttttttctgtttgcaagttaaagggtttgtcattgtttctttaaaaaaaaatacaataatgcaccatatccctatgcataaagtgcttcttctatttataaggttgaaaattctgaataacccttttagcattgaaaaaaaaaacaaaaacaaaaaatggaaaaaaaaaaccttgtattttgtaaatattttcttttcctgctttggagctgtgtaatggcagcgaaacatgtagctgtctttgttctatagaaatgcttttcttcagagaagctgatctttgttaatgtcttgattctgttcgcaaagcacagactagtgctt

SEQ ID NO: 145040 - DNA, 586 bp, Homo sapiens
  Payload ID: 8663
  Gene Symbol: KANSL1
  Gene Name: KAT8 regulatory NSL complex subunit 1
  ENST ID: ENST00000571698
  CDS Start-End: 220-586
tactacacagtgcaaacagttcctcgctcacgtcctctcgctccgcggcgccggcccgccctgcccctcaactggcgagccgcaccgccggccccagcacggagggcatgtgacggcgtcagtgcctcagtctgttctctggggaggcagtaaggggccgtggagctggcctcggcctcggcatcgggagaggctggacttcctgtctctctgtgctgaatggctgcgatggcgcccgctctcactgacgcagcagctgaagcacaccatatccggttcaaactggctcccccatcctctaccttgtcccctggcagtgccgaaaataacggcaacgccaacatccttattgctgccaacggaaccaaaagaaaagccattgctgcagaggatcccagcctagatttccgaaataatcctaccaaggaagacttgggaaagctgcaaccactggtggcatcttatctctgctctgatgtaacatctgttccctcaaaggagtctttgaagttgcaaggggtcttcagcaagcagacagtccttaaatctcatcctctcttatctcagtcctatgaactccgagctg

SEQ ID NO: 145041 - DNA, 667 bp, Homo sapiens
  Payload ID: 8663
  Gene Symbol: KANSL1
  Gene Name: KAT8 regulatory NSL complex subunit 1
  ENST ID: ENST00000574655
  CDS Start-End: 251-667
acttctaggcttggttgaaccgtgcagataccttctcgaaacaaaagattttcctacctgcttatacttggtaaccgagggaattactaagacttcttgctcatttctgagtattgtctttatatcctgacactatgaatgctacttggatgcctcttaagtctgttctctggggaggcagtaaggggccgtggagctggcctcggcctcggcatcgggagaggctggacttcctgtctctctgtgctgaatggctgcgatggcgcccgctctcactgacgcagcagctgaagcacaccatatccggttcaaactggctcccccatcctctaccttgtcccctggcagtgccgaaaataacggcaacgccaacatccttattgctgccaacggaaccaaaagaaaagccattgctgcagaggatcccagcctagatttccgaaataatcctaccaaggaagacttgggaaagctgcaaccactggtggcatcttatctctgctctgatgtaacatctgttccctcaaaggagtctttgaagttgcaaggggtcttcagcaagcagacagtccttaaatctcatcctctcttatctcagtcctatgaactccgagctgagctgttggggagacagccagttttggagttttccttagaaaatcttaga

SEQ ID NO: 145042 - DNA, 404 bp, Homo sapiens
  Payload ID: 8663
  Gene Symbol: KANSL1
  Gene Name: KAT8 regulatory NSL complex subunit 1
  ENST ID: ENST00000576739
  CDS Start-End: 378-404
ctgtggggctctgaagtccgcctgagacttgggtcaagagtcaaactgtcgccccccgctcctcccccaaaatccggtgagcggtaaggaaagtgatgccaagtcttcgaagcctcagtgacaaacgcatagcaagaacacatccactccagagataccttctcgaaacaaaagattttcctacctgcttatacttggtaaccgagggaattactaagacttcttgctcatttctgagtattgtctttatatcctgacactatgaatgctacttggatgcctcttaagtctgttctctggggaggcagtaaggggccgtggagctggcctcggcctcggcatcgggagaggctggacttcctgtctctctgtgctgaatggctgcgatggcgcccgctctcact

SEQ ID NO: 145043 - DNA, 4711 bp, Homo sapiens
  Payload ID: 8663
  Gene Symbol: KANSL1
  Gene Name: KAT8 regulatory NSL complex subunit 1
  ENST ID: ENST00000575318
  CDS Start-End: 35-3160
gggagaggctggacttcctgtctctctgtgctgaatggctgcgatggcgcccgctctcactgacgcagcagctgaagcacaccatatccggttcaaactggctcccccatcctctaccttgtcccctggcagtgccgaaaataacggcaacgccaacatccttattgctgccaacggaaccaaaagaaaagccattgctgcagaggatcccagcctagatttccgaaataatcctaccaaggaagacttgggaaagctgcaaccactggtggcatcttatctctgctctgatgtaacatctgttccctcaaaggagtctttgaagttgcaaggggtcttcagcaagcagacagtccttaaatctcatcctctcttatctcagtcctatgaactccgagctgagctgttggggagacagccagttttggagttttccttagaaaatcttagaaccatgaatacgagtggtcagacagctctgccacaagcacctgtaaatgggttggctaagaaattgactaaaagttcaacacattctgatcatgacaattccacttccctcaatgggggaaaacgggctctcacttcatctgctcttcatgggggtgaaatgggaggatctgaatctggggacttgaaggggggtatgaccaattgcactcttccacatagaagccttgatgtagaacacacaactttgtatagcaataatagcactgcaaacaaatcctctgtcaattccatggaacagccggcacttcaaggaagcagtagattatcacctggtacagactccagctctaacttggggggtgtcaaattggagggtaaaaagtctcccctgtcttccattcttttcagtgctttagattctgacacaaggataacagctttactgcggcgacaggctgacattgagagccgtgcccgcagattacaaaagcgcttacaggttgtgcaagccaagcaggttgagaggcatatacaacatcagctgggtggatttttggagaagactttgagcaaactgccaaacttggaatccttgagaccacggagccagttgatgctgactcgaaaggctgaagctgccttgagaaaagctgccagtgagaccaccacttcagagggacttagcaactttctgaaaagcaattcaatttcagaagaattggagagatttacagctagtggcatagccaacttgaggtgcagtgaacaggcatttgattcagatgtcactgacagtagttcaggaggggagtctgatattgaagaggaagaactgaccagagctgatcccgagcagcgtcatgtacccctgagacgcaggtcagaatggaaatgggctgcagaccgggcagctattgtcagccgctggaactggcttcaggctcatgtttctgacttggaatatcgaattcgtcagcaaacagacatttacaaacagatacgtgctaataaggggttgatagttcttggggaggtacctcccccagagcatacaacagacttatttcttccacttagttctgaggtgaagacagatcatgggactgataaattgattgagtctgtttctcagccattggaaaaccatggtgcccctattattggtcatatttcagagtcactgtctaccaaatcatgtggagcactcagacctgtcaatggagttattaacactcttcagcctgtcttggcagaccacattccaggtgacagctctgatgctgaggaacaattacataagaagcaacgactgaatctcgtctcttcatcatctgatggcacctgtgtggcagcccggacacgtcctgtactgagctgtaagaagcggaggcttgttcgacccaacagcatcgttcctctttccaagaaggttcaccggaacagcacaatccgccctggctgtgatgtgaatccctcctgcgcactgtgtggttcaggcagcatcaacaccatgcctcccgaaattcactatgaagcccctctgttggaacgtctttcccagttggactcttgtgttcatcctgttctagcatttccagatgatgttcccacaagcctgcatttccagagcatgctgaaatctcagtggcagaacaagccttttgacaaaatcaaacctcccaaaaagttatcgcttaagcacagagcacccatgccgggcagtctgccagattcagctcgtaaggacaggcacaaattggtcagctccttcctaacaacagccatgttgaagcatcacacagacatgagcagttcgagctacttggcagccacccaccatcctccacacagtcccttggtgcgacagctctccacctcctcagattcccctgcacccgccagctctagctcacaggttacagccagcacatcgcagccagtaaggaggagaaggggagagagctcatttgatattaacaacattgtcatcccaatgtctgttgctgcaacaactcgcgtagagaaactgcaatacaaggaaatccttacgcccagctggcgggaggttgatcttcagtctctgaaggggagtcctgatgaggagaatgaagagattgaggacctatccgacgcagccttcgccgccctgcatgccaaatgtgaggagatggagagggcacggtggctgtggaccacgagtgtgccaccccagcggcggggcagcaggtcctacaggtcatcagacggccggacaaccccccagctgggcagtgccaacccctccaccccccagcctgcctcccctgatgtcagcagtagccactctttgtcagaatactcccatggtcagtcccctaggagccccattagcccggaactgcactcagcacccctcacccctgtggctcgggacactccgcgacacttagccagtgaggatacccgttgttccacaccagagctggggctggatgaacagtctgtccagccctgggagcggcggaccttccccctggcgcacagtccccaggcggagtgtgaggaccagctggatgcacaggagcgagcagcccgctgcactcgacgcacctcaggcagcaagactggccgggagacagaggcagcgcccacctcgcctcccattgtccccctcaagagtcggcatctggtggcagcagccacagctcagcgcccgactcacagatgagcgggagacagccatctaaacagactcactaactattggcattaaagcttcagaaatctctgcgtttgatattcaaacatcatatgccggaaattttcacagtttttagtgaacttaaggaatttagatcctactttggtatttttttttcttgttttaatttttgttttgtttttgtttccatgttttcttgtcacacacctgagcacttcctcccgttggcaaacagaagttcaggatgagaccctgctggcctggtcctggcacatcctctgcactgttgaatcactggacttactgatcttagatgaccaccccctccctcacacctgtgggcagggcagaacagcctggcgggctacagtttagcatggccttcttgagctagggtggaatggggcagggtgctctggactcttaccccctcccctcccatctgtggcttggctctgctgtggccctcctggctgggtccccttggtttttcgtgctggaacatccccaccagagcctctctgccataactgccagctgctctccccgagtgctcagctggcagaacacctttcctttctcacccagaacttaagagactgattttttgtttcatctgcatttggtcttctctgttttgactctttcactgcagtaacctggctgtggctgctcaggttcccctcctcatgccccttggtacccttccctgtctgctctcccatgccatgtacacacccacaacccgtccttccacttggaatatttttaccacctatcctgatctttgaaggtagggttaggactacttaacctctattcccactcccctgcaaactgggggttgtgggaagtgagcagccatctccctgtgtgattttttttttttttccctctgattcactttgccatgtttccttcacatccagatccctgtcggtgttagttccactcttggtctttcacgctccccttgcctgtggaacattgtctggtcctagctgtggttcccattgttcccccttcacccttctctgttaaccttgtgcctgtctcctgtatgatcacatcaccaaaaagggggaggggggagaagactctttttttttggccattttgtaatcgtataaaaatagtagacaactgcttaatggttggggttttttcacaattttcaacattagtgatttttttttctgtttgcaagttaaagggtttgtcattgtttctttaaaaaaaaatacaataatgcaccatatccctatgcataaagtgcttcttctatttataaggttgaaaattctgaataacccttttagcattgaaaaaaaaaacaaaaacaaaaaatggaaaaaaaaaaccttgtattttgtaaatattttcttttcctgctttggagctgtgtaatggcagcgaaacatgtagctgtctttgttctatagaaatgcttttcttcagagaagctgatctttgttaatgtcttgattctgttcgcaaagcacagactagtgcttaaaaaaaaaaaagaaggaaaaattgaaaaaaataaaaaaaaaa

SEQ ID NO: 145044 - DNA, 5014 bp, Homo sapiens
  Payload ID: 8663
  Gene Symbol: KANSL1
  Gene Name: KAT8 regulatory NSL complex subunit 1
  Uniprot ID: Q7Z3B3
  ENST ID: ENST00000572904
  CDS Start-End: 174-3491
cggcgcccaggccggggggctgtttgcaaactgcgcccattttgtggggctgaatccgcccgggctacgctcctccatcacgtgtctgttctctggggaggcagtaaggggccgtggagctggcctcggcctcggcatcgggagaggctggacttcctgtctctctgtgctgaatggctgcgatggcgcccgctctcactgacgcagcagctgaagcacaccatatccggttcaaactggctcccccatcctctaccttgtcccctggcagtgccgaaaataacggcaacgccaacatccttattgctgccaacggaaccaaaagaaaagccattgctgcagaggatcccagcctagatttccgaaataatcctaccaaggaagacttgggaaagctgcaaccactggtggcatcttatctctgctctgatgtaacatctgttccctcaaaggagtctttgaagttgcaaggggtcttcagcaagcagacagtccttaaatctcatcctctcttatctcagtcctatgaactccgagctgagctgttggggagacagccagttttggagttttccttagaaaatcttagaaccatgaatacgagtggtcagacagctctgccacaagcacctgtaaatgggttggctaagaaattgactaaaagttcaacacattctgatcatgacaattccacttccctcaatgggggaaaacgggctctcacttcatctgctcttcatgggggtgaaatgggaggatctgaatctggggacttgaaggggggtatgaccaattgcactcttccacatagaagccttgatgtagaacacacaactttgtatagcaataatagcactgcaaacaaatcctctgtcaattccatggaacagccggcacttcaaggaagcagtagattatcacctggtacagactccagctctaacttggggggtgtcaaattggagggtaaaaagtctcccctgtcttccattcttttcagtgctttagattctgacacaaggataacagctttactgcggcgacaggctgacattgagagccgtgcccgcagattacaaaagcgcttacaggttgtgcaagccaagcaggttgagaggcatatacaacatcagctgggtggatttttggagaagactttgagcaaactgccaaacttggaatccttgagaccacggagccagttgatgctgactcgaaaggctgaagctgccttgagaaaagctgccagtgagaccaccacttcagagggacttagcaactttctgaaaagcaattcaatttcagaagaattggagagatttacagctagtggcatagccaacttgaggtgcagtgaacaggcatttgattcagatgtcactgacagtagttcaggaggggagtctgatattgaagaggaagaactgaccagagctgatcccgagcagcgtcatgtacccctgagacgcaggtcagaatggaaatgggctgcagaccgggcagctattgtcagccgctggaactggcttcaggctcatgtttctgacttggaatatcgaattcgtcagcaaacagacatttacaaacagatacgtgctaataaggggttgatagttcttggggaggtacctcccccagagcatacaacagacttatttcttccacttagttctgaggtgaagacagatcatgggactgataaattgattgagtctgtttctcagccattggaaaaccatggtgcccctattattggtcatatttcagagtcactgtctaccaaatcatgtggagcactcagacctgtcaatggagttattaacactcttcagcctgtcttggcagaccacattccaggtgacagctctgatgctgaggaacaattacataagaagcaacgactgaatctcgtctcttcatcatctgatggcacctgtgtggcagcccggacacgtcctgtactgagctgtaagaagcggaggcttgttcgacccaacagcatcgttcctctttccaagaaggttcaccggaacagcacaatccgccctggctgtgatgtgaatccctcctgcgcactgtgtggttcaggcagcatcaacaccatgcctcccgaaattcactatgaagcccctctgttggaacgtctttcccagttggactcttgtgttcatcctgttctagcatttccagatgatgttcccacaagcctgcatttccagagcatgctgaaatctcagtggcagaacaagccttttgacaaaatcaaacctcccaaaaagttatcgcttaagcacagagcacccatgccgggcagtctgccagattcagctcgtaaggacaggcacaaattggtcagctccttcctaacaacagccaagctgtcccatcaccaaacccggcctgacaggacccacaggcagcacttagacgatgtgggggccgtgcccatggtggagcgagtgacagcgccaaaagcagagcgcttgctcaacccaccaccacccgtgcatgacccaaaccacagcaaaatgagattgcgagaccattcatctgagagaagtgaagtgttgaagcatcacacagacatgagcagttcgagctacttggcagccacccaccatcctccacacagtcccttggtgcgacagctctccacctcctcagattcccctgcacccgccagctctagctcacaggttacagccagcacatcgcagcagccagtaaggaggagaaggggagagagctcatttgatattaacaacattgtcatcccaatgtctgttgctgcaacaactcgcgtagagaaactgcaatacaaggaaatccttacgcccagctggcgggaggttgatcttcagtctctgaaggggagtcctgatgaggagaatgaagagattgaggacctatccgacgcagccttcgccgccctgcatgccaaatgtgaggagatggagagggcacggtggctgtggaccacgagtgtgccaccccagcggcggggcagcaggtcctacaggtcatcagacggccggacaaccccccagctgggcagtgccaacccctccaccccccagcctgcctcccctgatgtcagcagtagccactctttgtcagaatactcccatggtcagtcccctaggagccccattagcccggaactgcactcagcacccctcacccctgtggctcgggacactccgcgacacttagccagtgaggatacccgttgttccacaccagagctggggctggatgaacagtctgtccagccctgggagcggcggaccttccccctggcgcacagtccccaggcggagtgtgaggaccagctggatgcacaggagcgagcagcccgctgcactcgacgcacctcaggcagcaagactggccgggagacagaggcagcgcccacctcgcctcccattgtccccctcaagagtcggcatctggtggcagcagccacagctcagcgcccgactcacagatgagcgggagacagccatctaaacagactcactaactattggcattaaagcttcagaaatctctgcgtttgatattcaaacatcatatgccggaaattttcacagtttttagtgaacttaaggaatttagatcctactttggtatttttttttcttgttttaatttttgttttgtttttgtttccatgttttcttgtcacacacctgagcacttcctcccgttggcaaacagaagttcaggatgagaccctgctggcctggtcctggcacatcctctgcactgttgaatcactggacttactgatcttagatgaccaccccctccctcacacctgtgggcagggcagaacagcctggcgggctacagtttagcatggccttcttgagctagggtggaatggggcagggtgctctggactcttaccccctcccctcccatctgtggcttggctctgctgtggccctcctggctgggtccccttggtttttcgtgctggaacatccccaccagagcctctctgccataactgccagctgctctccccgagtgctcagctggcagaacacctttcctttctcacccagaacttaagagactgattttttgtttcatctgcatttggtcttctctgttttgactctttcactgcagtaacctggctgtggctgctcaggttcccctcctcatgccccttggtacccttccctgtctgctctcccatgccatgtacacacccacaacccgtccttccacttggaatatttttaccacctatcctgatctttgaaggtagggttaggactacttaacctctattcccactcccctgcaaactgggggttgtgggaagtgagcagccatctccctgtgtgattttttttttttttccctctgattcactttgccatgtttccttcacatccagatccctgtcggtgttagttccactcttggtctttcacgctccccttgcctgtggaacattgtctggtcctagctgtggttcccattgttcccccttcacccttctctgttaaccttgtgcctgtctcctgtatgatcacatcaccaaaaagggggaggggggagaagactctttttttttggccattttgtaatcgtataaaaatagtagacaactgcttaatggttggggttttttcacaattttcaacattagtgatttttttttctgtttgcaagttaaagggtttgtcattgtttctttaaaaaaaaatacaataatgcaccatatccctatgcataaagtgcttcttctatttataaggttgaaaattctgaataacccttttagcattgaaaaaaaaaacaaaaacaaaaaatggaaaaaaaaaaccttgtattttgtaaatattttcttttcctgctttggagctgtgtaatggcagcgaaacatgtagctgtctttgttctatagaaatgcttttcttcagagaagctgatctttgttaatgtcttgattctgttcgcaaagcacagactagtgcttaaaaaaaaaaaagaa

SEQ ID NO: 145045 - DNA, 5105 bp, Homo sapiens
  Payload ID: 8663
  Gene Symbol: KANSL1
  Gene Name: KAT8 regulatory NSL complex subunit 1
  Uniprot ID: Q7Z3B3
  ENST ID: ENST00000574590
  CDS Start-End: 228-3545
tcagataccttctcgaaacaaaagattttcctacctgcttatacttggtaaccgagggaattactaagacttcttgctcatttctgagtattgtctttatatcctgacactatgaatgctacttggatgcctcttaagtctgttctctggggaggcagtaaggggccgtggagctggcctcggcctcggcatcgggagaggctggacttcctgtctctctgtgctgaatggctgcgatggcgcccgctctcactgacgcagcagctgaagcacaccatatccggttcaaactggctcccccatcctctaccttgtcccctggcagtgccgaaaataacggcaacgccaacatccttattgctgccaacggaaccaaaagaaaagccattgctgcagaggatcccagcctagatttccgaaataatcctaccaaggaagacttgggaaagctgcaaccactggtggcatcttatctctgctctgatgtaacatctgttccctcaaaggagtctttgaagttgcaaggggtcttcagcaagcagacagtccttaaatctcatcctctcttatctcagtcctatgaactccgagctgagctgttggggagacagccagttttggagttttccttagaaaatcttagaaccatgaatacgagtggtcagacagctctgccacaagcacctgtaaatgggttggctaagaaattgactaaaagttcaacacattctgatcatgacaattccacttccctcaatgggggaaaacgggctctcacttcatctgctcttcatgggggtgaaatgggaggatctgaatctggggacttgaaggggggtatgaccaattgcactcttccacatagaagccttgatgtagaacacacaactttgtatagcaataatagcactgcaaacaaatcctctgtcaattccatggaacagccggcacttcaaggaagcagtagattatcacctggtacagactccagctctaacttggggggtgtcaaattggagggtaaaaagtctcccctgtcttccattcttttcagtgctttagattctgacacaaggataacagctttactgcggcgacaggctgacattgagagccgtgcccgcagattacaaaagcgcttacaggttgtgcaagccaagcaggttgagaggcatatacaacatcagctgggtggatttttggagaagactttgagcaaactgccaaacttggaatccttgagaccacggagccagttgatgctgactcgaaaggctgaagctgccttgagaaaagctgccagtgagaccaccacttcagagggacttagcaactttctgaaaagcaattcaatttcagaagaattggagagatttacagctagtggcatagccaacttgaggtgcagtgaacaggcatttgattcagatgtcactgacagtagttcaggaggggagtctgatattgaagaggaagaactgaccagagctgatcccgagcagcgtcatgtacccctgagacgcaggtcagaatggaaatgggctgcagaccgggcagctattgtcagccgctggaactggcttcaggctcatgtttctgacttggaatatcgaattcgtcagcaaacagacatttacaaacagatacgtgctaataaggggttgatagttcttggggaggtacctcccccagagcatacaacagacttatttcttccacttagttctgaggtgaagacagatcatgggactgataaattgattgagtctgtttctcagccattggaaaaccatggtgcccctattattggtcatatttcagagtcactgtctaccaaatcatgtggagcactcagacctgtcaatggagttattaacactcttcagcctgtcttggcagaccacattccaggtgacagctctgatgctgaggaacaattacataagaagcaacgactgaatctcgtctcttcatcatctgatggcacctgtgtggcagcccggacacgtcctgtactgagctgtaagaagcggaggcttgttcgacccaacagcatcgttcctctttccaagaaggttcaccggaacagcacaatccgccctggctgtgatgtgaatccctcctgcgcactgtgtggttcaggcagcatcaacaccatgcctcccgaaattcactatgaagcccctctgttggaacgtctttcccagttggactcttgtgttcatcctgttctagcatttccagatgatgttcccacaagcctgcatttccagagcatgctgaaatctcagtggcagaacaagccttttgacaaaatcaaacctcccaaaaagttatcgcttaagcacagagcacccatgccgggcagtctgccagattcagctcgtaaggacaggcacaaattggtcagctccttcctaacaacagccaagctgtcccatcaccaaacccggcctgacaggacccacaggcagcacttagacgatgtgggggccgtgcccatggtggagcgagtgacagcgccaaaagcagagcgcttgctcaacccaccaccacccgtgcatgacccaaaccacagcaaaatgagattgcgagaccattcatctgagagaagtgaagtgttgaagcatcacacagacatgagcagttcgagctacttggcagccacccaccatcctccacacagtcccttggtgcgacagctctccacctcctcagattcccctgcacccgccagctctagctcacaggttacagccagcacatcgcagcagccagtaaggaggagaaggggagagagctcatttgatattaacaacattgtcatcccaatgtctgttgctgcaacaactcgcgtagagaaactgcaatacaaggaaatccttacgcccagctggcgggaggttgatcttcagtctctgaaggggagtcctgatgaggagaatgaagagattgaggacctatccgacgcagccttcgccgccctgcatgccaaatgtgaggagatggagagggcacggtggctgtggaccacgagtgtgccaccccagcggcggggcagcaggtcctacaggtcatcagacggccggacaaccccccagctgggcagtgccaacccctccaccccccagcctgcctcccctgatgtcagcagtagccactctttgtcagaatactcccatggtcagtcccctaggagccccattagcccggaactgcactcagcacccctcacccctgtggctcgggacactccgcgacacttagccagtgaggatacccgttgttccacaccagagctggggctggatgaacagtctgtccagccctgggagcggcggaccttccccctggcgcacagtccccaggcggagtgtgaggaccagctggatgcacaggagcgagcagcccgctgcactcgacgcacctcaggcagcaagactggccgggagacagaggcagcgcccacctcgcctcccattgtccccctcaagagtcggcatctggtggcagcagccacagctcagcgcccgactcacagatgagcgggagacagccatctaaacagactcactaactattggcattaaagcttcagaaatctctgcgtttgatattcaaacatcatatgccggaaattttcacagtttttagtgaacttaaggaatttagatcctactttggtatttttttttcttgttttaatttttgttttgtttttgtttccatgttttcttgtcacacacctgagcacttcctcccgttggcaaacagaagttcaggatgagaccctgctggcctggtcctggcacatcctctgcactgttgaatcactggacttactgatcttagatgaccaccccctccctcacacctgtgggcagggcagaacagcctggcgggctacagtttagcatggccttcttgagctagggtggaatggggcagggtgctctggactcttaccccctcccctcccatctgtggcttggctctgctgtggccctcctggctgggtccccttggtttttcgtgctggaacatccccaccagagcctctctgccataactgccagctgctctccccgagtgctcagctggcagaacacctttcctttctcacccagaacttaagagactgattttttgtttcatctgcatttggtcttctctgttttgactctttcactgcagtaacctggctgtggctgctcaggttcccctcctcatgccccttggtacccttccctgtctgctctcccatgccatgtacacacccacaacccgtccttccacttggaatatttttaccacctatcctgatctttgaaggtagggttaggactacttaacctctattcccactcccctgcaaactgggggttgtgggaagtgagcagccatctccctgtgtgattttttttttttttccctctgattcactttgccatgtttccttcacatccagatccctgtcggtgttagttccactcttggtctttcacgctccccttgcctgtggaacattgtctggtcctagctgtggttcccattgttcccccttcacccttctctgttaaccttgtgcctgtctcctgtatgatcacatcaccaaaaagggggaggggggagaagactctttttttttggccattttgtaatcgtataaaaatagtagacaactgcttaatggttggggttttttcacaattttcaacattagtgatttttttttctgtttgcaagttaaagggtttgtcattgtttctttaaaaaaaaatacaataatgcaccatatccctatgcataaagtgcttcttctatttataaggttgaaaattctgaataacccttttagcattgaaaaaaaaaacaaaaacaaaaaatggaaaaaaaaaaccttgtattttgtaaatattttcttttcctgctttggagctgtgtaatggcagcgaaacatgtagctgtctttgttctatagaaatgcttttcttcagagaagctgatctttgttaatgtcttgattctgttcgcaaagcacagactagtgcttaaaaaaaaaaaagaaggaaaaattgaaaaaaataaaaaaaaaagttacagaa

SEQ ID NO: 145046 - DNA, 4735 bp, Homo sapiens
  Payload ID: 8663
  Gene Symbol: KANSL1
  Gene Name: KAT8 regulatory NSL complex subunit 1
  ENST ID: ENST00000611596
  CDS Start-End: 92-3409
agtctgttctctggggaggcagtaaggggccgtggagctggcctcggcctcggcatcgggagaggctggacttcctgtctctctgtgctgaatggctgcgatggcgcccgctctcactgacgcagcagctgaagcacaccatatccggttcaaactggctcccccatcctctaccttgtcccctggcagtgccgaaaataacggcaacgccaacatccttattgctgccaacggaaccaaaagaaaagccattgctgcagaggatcccagcctagatttccgaaataatcctaccaaggaagacttgggaaagctgcaaccactggtggcatcttatctctgctctgatgtaacatctgttccctcaaaggagtctttgaagttgcaaggggtcttcagcaagcagacagtccttaaatctcatcctctcttatctcagtcctatgaactccgagctgagctgttggggagacagccagttttggagttttccttagaaaatcttagaaccatgaatacgagtggtcagacagctctgccacaagcacctgtaaatgggttggctaagaaattgactaaaagttcaacacattctgatcatgacaattccacttccctcaatgggggaaaacgggctctcacttcatctgctcttcatgggggtgaaatgggaggatctgaatctggggacttgaaggggggtatgaccaattgcactcttccacatagaagccttgatgtagaacacacaactttgtatagcaataatagcactgcaaacaaatcttctgtcaattccatggaacagccggcacttcaaggaagcagtaggttatcacctggtacagactccagctctaacttggggggtgtcaaattggagggtaaaaagtctcccctgtcttccattcttttcagtgctttagattctgacacaaggataacagctttactgcggcgacaggctgacattgagagccgtgcccgcagattacaaaagcgcttacaggttgtgcaagccaagcaggttgagaggcatatacaacatcagctgggtggatttttggagaagactttgagcaaactgccaaacttggaatccttgagaccacggagccagttgatgctgactcgaaaggctgaagctgccttgagaaaagctgccagtgagaccaccacttcagagggacttagcaactttctgaaaagcaattcaatttcagaagaattggagagatttacagctagtggcatagccaacttgaggtgcagtgaacaggcatttgattcagatgtcactgacagtagttcaggaggggagtctgatattgaagaggaagaactgaccagagctgatcccgagcagcgtcatgtacccctgagacgcaggtcagaatggaaatgggctgcagaccgggcagctattgtcagccgctggaactggcttcaggctcatgtttctgacttggaatatcgaattcgtcagcaaacagacatttacaaacagatacgtgctaataaggggttgatagttcttggggaggtacctcccccagagcatacaacagacttatttcttccgcttagttctgaggtgaagacagatcatgggactgataaattgattgagtctgtttctcagccattggaaaaccatggtgcccctattattggtcatatttcagagtcactgtctaccaaatcatgtggagcactcagacctgtcaatggagttattaacactcttcagcctgtcttggcagaccacattccaggtgacagctctgatgctgaggaacaattacataagaagcaacgactgaatctcgtctcttcatcatctgatggcacctgtgtggcagcccggacacgtcctgtactgagctgtaagaagcggaggcttgttcgacccaacagcatcgttcctctttccaagaaggttcaccggaacagcacaatccgccctggctgtgatgtgaatccctcctgcgcactgtgtggttcaggcagcatcaacaccatgcctcccgaaattcactatgaagcccctctgttggaacgtctttcccagttggactcttgtgttcatcctgttctagcatttccagatgatgttcccacaagcctgcatttccagagcatgctgaaatctcagtggcagaacaagccttttgacaaaatcaaacctcccaaaaagttatcgcttaagcacagagcacccatgccgggcagtctgccagatccagctcgtaaggacaggcacaaattggtcagctccttcctaacaacagccaagctgtcccatcaccaaacccggcctgacaggacccacaggcagcacttagacgatgtgggggccgtgcccatggtggagcgagtgacagcgccaaaagcagagcgcttgctcaacccaccaccacccgtgcatgacccaaaccacagcaaaatgagattgcgagaccattcatctgagagaagtgaagtgttgaagcatcacacagacatgagcagttcgagctacttggcagccacccaccatcctccacacagtcccttggtgcgacagctctccacctcctcagattcccctgcacccgccagctctagctcacaggttacagccagcacatcgcagcagccagtaaggaggagaaggggagagagctcattcgatattaacaacattgtcatcccaatgtctgttgctgcaacaactcgcgtagagaaactgcaatacaaggaaatccttacgcccagctggcgggaggttgatcttcagtctctgaaggggagtcctgatgaggagaatgaagagattgaggacctatccgatgcagcctttgccgccctgcatgccaaatgtgaggagatggagagggcacggtggctgtggaccacgagtgtgccaccccagcggcggggcagcaggtcctacaggtcatcagacggccggacaaccccccagctgggcagtgccaacccctccaccccccagcctgcctcccctgatgtcagcagtagccactctttgtcagaatactcccatggtcagtcccctaggagccccattagcccggaactgcactcagcacccctcacccctgtggctcgggacactccgcgacacttagccagtgaggatacccgttgttccacaccagagctggggctggatgaacagtctgtccagccctgggagcggcggaccttccccctggcgcacagtccccaggcggagtgtgaggaccagctggatgcacaggagcgagcagcccgctgcactcgacgcacctcaggcagcaagactggccgggagacagaggcagcgcccacctcgcctcccactgtccccctcaagagtcggcatctggtggcagcagccacagctcagcgcccgactcacagatgagcgggagacagccatctaaacagactcactaactattggcattaaagcttcagaaatctctgcgtttgatattcaaacatcatatgccggaaattttcacagtttttagtgaacttaaggaatttagatcctactttggtatttttttttcttgttttaatttttgttttgtttttgtttccatgttttcttgtcacacacctgagcacttcctcccgttggcaaacagaagttcaggatgagaccctgctggcctggtcctggcacatcctctgcactgttgaatcactggacttactgatcttagatgaccaccccctccctcacacctgtgggcagggcagaacagcctggcgggcagagggctacagtttagcatggccttcttgagctagggtggaatggggcagggtgctctggactcttaccccctcccctcccatctgtggcttggctctgctgtggccctcctggctgggtccccttggttttttgtgctggaacatccccaccagagcctctctgccataactgccagctgctctccccgagtgctcagctggcagaacacctttcctttctcacccagaacttaagagactgattttttgtttcatctgcatttggtcttctctgttttgactctctcactgcagtaacctggctgtggctgctcaggttcccctcctcatgccccttggtacccttccctgtctgctctcccatgccatgtacacacccacaacccatccttccacttggaatatttttaccacctatcctgatctttgaaggtagggttaggactacttaacctctattcccactcccctgcaaactgggggttgtgggaagtgagcagccatctccctgtgtgattttttttttttttccctctgattcactttgccatgtttccttcacatccagatccctgtcggtgttagttccactcttggtctttcacgctccccttgcctgtggaacattgtctggtcctagctgtggttcccattgttcccccttcacccttctctgttaaccttgtgcctgtctcctgtatgatcacatcaccaaaaagggggaggggggagaagactctttttttttggccattttgtaatcgtataaaaatagtagacaactgcttaatggttggggttttttcacaattttcaacattagtgatttttttttctgtttgcaagttaaagggtttgtcattgtttctttaaaaaaaaaatacaataatgcaccatatccctatgcataaagtgcttcttctatttataaggttgaaaattctgaataacccttttagcattg

SEQ ID NO: 145047 - DNA, 5080 bp, Homo sapiens
  Payload ID: 8663
  Gene Symbol: KANSL1
  Gene Name: KAT8 regulatory NSL complex subunit 1
  ENST ID: ENST00000613150
  CDS Start-End: 258-3572
cgcccccacttctaggcttggttgaaccgtgcagataccttctcgaaacaaaagattttcctacctgcttatacttggtaaccgagggaattactaagacttcttgctcatttctgagtattgtctttatatcctgacactatgaatgctacttggatgcctcttaagtctgttctctggggaggcagtaaggggccgtggagctggcctcggcctcggcatcgggagaggctggacttcctgtctctctgtgctgaatggctgcgatggcgcccgctctcactgacgcagcagctgaagcacaccatatccggttcaaactggctcccccatcctctaccttgtcccctggcagtgccgaaaataacggcaacgccaacatccttattgctgccaacggaaccaaaagaaaagccattgctgcagaggatcccagcctagatttccgaaataatcctaccaaggaagacttgggaaagctgcaaccactggtggcatcttatctctgctctgatgtaacatctgttccctcaaaggagtctttgaagttgcaaggggtcttcagcaagcagacagtccttaaatctcatcctctcttatctcagtcctatgaactccgagctgagctgttggggagacagccagttttggagttttccttagaaaatcttagaaccatgaatacgagtggtcagacagctctgccacaagcacctgtaaatgggttggctaagaaattgactaaaagttcaacacattctgatcatgacaattccacttccctcaatgggggaaaacgggctctcacttcatctgctcttcatgggggtgaaatgggaggatctgaatctggggacttgaaggggggtatgaccaattgcactcttccacatagaagccttgatgtagaacacacaactttgtatagcaataatagcactgcaaacaaatcctctgtcaattccatggaacagccggcacttcaaggaagcagtagattatcacctggtacagactccagctctaacttggggggtgtcaaattggagggtaaaaagtctcccctgtcttccattcttttcagtgctttagattctgacacaaggataacagctttactgcggcgacaggctgacattgagagccgtgcccgcagattacaaaagcgcttacaggttgtgcaagccaagcaggttgagaggcatatacaacatcagctgggtggatttttggagaagactttgagcaaactgccaaacttggaatccttgagaccacggagccagttgatgctgactcgaaaggctgaagctgccttgagaaaagctgccagtgagaccaccacttcagagggacttagcaactttctgaaaagcaattcaatttcagaagaattggagagatttacagctagtggcatagccaacttgaggtgcagtgaacaggcatttgattcagatgtcactgacagtagttcaggaggggagtctgatattgaagaggaagaactgaccagagctgatcccgagcagcgtcatgtacccctgagacgcaggtcagaatggaaatgggctgcagaccgggcagctattgtcagccgctggaactggcttcaggctcatgtttctgacttggaatatcgaattcgtcagcaaacagacatttacaaacagatacgtgctaataaggggttgatagttcttggggaggtacctcccccagagcatacaacagacttatttcttccacttagttctgaggtgaagacagatcatgggactgataaattgattgagtctgtttctcagccattggaaaaccatggtgcccctattattggtcatatttcagagtcactgtctaccaaatcatgtggagcactcagacctgtcaatggagttattaacactcttcagcctgtcttggcagaccacattccaggtgacagctctgatgctgaggaacaattacataagaagcaacgactgaatctcgtctcttcatcatctgatggcacctgtgtggcagcccggacacgtcctgtactgagctgtaagaagcggaggcttgttcgacccaacagcatcgttcctctttccaagaaggttcaccggaacagcacaatccgccctggctgtgatgtgaatccctcctgcgcactgtgtggttcaggcagcatcaacaccatgcctcccgaaattcactatgaagcccctctgttggaacgtctttcccagttggactcttgtgttcatcctgttctagcatttccagatgatgttcccacaagcctgcatttccagagcatgctgaaatctcagtggcagaacaagccttttgacaaaatcaaacctcccaaaaagttatcgcttaagcacagagcacccatgccgggcagtctgccagattcagctcgtaaggacaggcacaaattggtcagctccttcctaacaacagccaagctgtcccatcaccaaacccggcctgacaggacccacaggcagcacttagacgatgtgggggccgtgcccatggtggagcgagtgacagcgccaaaagcagagcgcttgctcaacccaccaccacccgtgcatgacccaaaccacagcaaaatgagattgcgagaccattcatctgagagaagtgaagtgttgaagcatcacacagacatgagcagttcgagctacttggcagccacccaccatcctccacacagtcccttggtgcgacagctctccacctcctcagattcccctgcacccgccagctctagctcacaggttacagccagcacatcgcagccagtaaggaggagaaggggagagagctcatttgatattaacaacattgtcatcccaatgtctgttgctgcaacaactcgcgtagagaaactgcaatacaaggaaatccttacgcccagctggcgggaggttgatcttcagtctctgaaggggagtcctgatgaggagaatgaagagattgaggacctatccgacgcagccttcgccgccctgcatgccaaatgtgaggagatggagagggcacggtggctgtggaccacgagtgtgccaccccagcggcggggcagcaggtcctacaggtcatcagacggccggacaaccccccagctgggcagtgccaacccctccaccccccagcctgcctcccctgatgtcagcagtagccactctttgtcagaatactcccatggtcagtcccctaggagccccattagcccggaactgcactcagcacccctcacccctgtggctcgggacactctgcgacacttagccagtgaggatacccgttgttccacaccagagctggggctggatgaacagtctgtccagccctgggagcggcggaccttccccctggcgcacagtccccaggcggagtgtgaggaccagctggatgcacaggagcgagcagcccgctgcactcgacgcacctcaggcagcaagactggccgggagacagaggcagcgcccacctcgcctcccattgtccccctcaagagtcggcatctggtggcagcagccacagctcagcgcccgactcacagatgagcgggagacagccatctaaacagactcactaactattggcattaaagcttcagaaatctctgcgtttgatattcaaacatcatatgccggaaattttcacagtttttagtgaacttaaggaatttagatcctactttggtatttttttttcttgttttaatttttgttttgtttttgtttccatgttttcttgtcacacacctgagcacttcctcccgttggcaaacagaagttcaggatgagaccctgctggcctggtcctggcacatcctctgcactgttgaatcactggacttactgatcttagatgaccaccccctccctcacacctgtgggcagggcagaacagcctggcgggctacagtttagcatggccttcttgagctagggtggaatggggcagggtgctctggactcttaccccctcccctcccatctgtggcttggctctgctgtggccctcctggctgggtccccttggtttttcgtgctggaacatccccaccagagcctctctgccataactgccagctgctctccccgagtgctcagctggcagaacacctttcctttctcacccagaacttaagagactgattttttgtttcatctgcatttggtcttctctgttttgactctttcactgcagtaacctggctgtggctgctcaggttcccctcctcatgccccttggtacccttccctgtctgctctcccatgccatgtacacacccacaacccgtccttccacttggaatatttttaccacctatcctgatctttgaaggtagggttaggactacttaacctctattcccactcccctgcaaactgggggttgtgggaagtgagcagccatctccctgtgtgattttttttttttttccctctgattcactttgccatgtttccttcacatccagatccctgtcggtgttagttccactcttggtctttcacgctccccttgcctgtggaacattgtctggtcctagctgtggttcccattgttcccccttcacccttctctgttaaccttgtgcctgtctcctgtatgatcacatcaccaaaaagggggaggggggagaagactctttttttttggccattttgtaatcgtataaaaatagtagacaactgcttaatggttggggttttttcacaattttcaacattagtgatttttttttctgtttgcaagttaaagggtttgtcattgtttctttaaaaaaaaatacaataatgcaccatatccctatgcataaagtgcttcttctatttataaggttgaaaattctgaataacccttttagcattgaaaaaaaaaacaaaaacaaaaaatggaaaaaaaaaaccttgtattttgtaaatattttcttttcctgctttggagctgtgtaatggcagcgaaacatgtagctgtctttgttctatagaaatgcttttcttcagagaagctgatctttgttaatgtcttgattctgttcgcaaagcacagactagtgctt

SEQ ID NO: 145048 - DNA, 5014 bp, Homo sapiens
  Payload ID: 8663
  Gene Symbol: KANSL1
  Gene Name: KAT8 regulatory NSL complex subunit 1
  ENST ID: ENST00000622036
  CDS Start-End: 174-3491
cggcgcccaggccggggggctgtttgcaaactgcgcccattttgtggggctgaatccgcccgggctacgctcctccatcacgtgtctgttctctggggaggcagtaaggggccgtggagctggcctcggcctcggcatcgggagaggctggacttcctgtctctctgtgctgaatggctgcgatggcgcccgctctcactgacgcagcagctgaagcacaccatatccggttcaaactggctcccccatcctctaccttgtcccctggcagtgccgaaaataacggcaacgccaacatccttattgctgccaacggaaccaaaagaaaagccattgctgcagaggatcccagcctagatttccgaaataatcctaccaaggaagacttgggaaagctgcaaccactggtggcatcttatctctgctctgatgtaacatctgttccctcaaaggagtctttgaagttgcaaggggtcttcagcaagcagacagtccttaaatctcatcctctcttatctcagtcctatgaactccgagctgagctgttggggagacagccagttttggagttttccttagaaaatcttagaaccatgaatacgagtggtcagacagctctgccacaagcacctgtaaatgggttggctaagaaattgactaaaagttcaacacattctgatcatgacaattccacttccctcaatgggggaaaacgggctctcacttcatctgctcttcatgggggtgaaatgggaggatctgaatctggggacttgaaggggggtatgaccaattgcactcttccacatagaagccttgatgtagaacacacaactttgtatagcaataatagcactgcaaacaaatcctctgtcaattccatggaacagccggcacttcaaggaagcagtagattatcacctggtacagactccagctctaacttggggggtgtcaaattggagggtaaaaagtctcccctgtcttccattcttttcagtgctttagattctgacacaaggataacagctttactgcggcgacaggctgacattgagagccgtgcccgcagattacaaaagcgcttacaggttgtgcaagccaagcaggttgagaggcatatacaacatcagctgggtggatttttggagaagactttgagcaaactgccaaacttggaatccttgagaccacggagccagttgatgctgactcgaaaggctgaagctgccttgagaaaagctgccagtgagaccaccacttcagagggacttagcaactttctgaaaagcaattcaatttcagaagaattggagagatttacagctagtggcatagccaacttgaggtgcagtgaacaggcatttgattcagatgtcactgacagtagttcaggaggggagtctgatattgaagaggaagaactgaccagagctgatcccgagcagcgtcatgtacccctgagacgcaggtcagaatggaaatgggctgcagaccgggcagctattgtcagccgctggaactggcttcaggctcatgtttctgacttggaatatcgaattcgtcagcaaacagacatttacaaacagatacgtgctaataaggggttgatagttcttggggaggtacctcccccagagcatacaacagacttatttcttccacttagttctgaggtgaagacagatcatgggactgataaattgattgagtctgtttctcagccattggaaaaccatggtgcccctattattggtcatatttcagagtcactgtctaccaaatcatgtggagcactcagacctgtcaatggagttattaacactcttcagcctgtcttggcagaccacattccaggtgacagctctgatgctgaggaacaattacataagaagcaacgactgaatctcgtctcttcatcatctgatggcacctgtgtggcagcccggacacgtcctgtactgagctgtaagaagcggaggcttgttcgacccaacagcatcgttcctctttccaagaaggttcaccggaacagcacaatccgccctggctgtgatgtgaatccctcctgcgcactgtgtggttcaggcagcatcaacaccatgcctcccgaaattcactatgaagcccctctgttggaacgtctttcccagttggactcttgtgttcatcctgttctagcatttccagatgatgttcccacaagcctgcatttccagagcatgctgaaatctcagtggcagaacaagccttttgacaaaatcaaacctcccaaaaagttatcgcttaagcacagagcacccatgccgggcagtctgccagattcagctcgtaaggacaggcacaaattggtcagctccttcctaacaacagccaagctgtcccatcaccaaacccggcctgacaggacccacaggcagcacttagacgatgtgggggccgtgcccatggtggagcgagtgacagcgccaaaagcagagcgcttgctcaacccaccaccacccgtgcatgacccaaaccacagcaaaatgagattgcgagaccattcatctgagagaagtgaagtgttgaagcatcacacagacatgagcagttcgagctacttggcagccacccaccatcctccacacagtcccttggtgcgacagctctccacctcctcagattcccctgcacccgccagctctagctcacaggttacagccagcacatcgcagcagccagtaaggaggagaaggggagagagctcatttgatattaacaacattgtcatcccaatgtctgttgctgcaacaactcgcgtagagaaactgcaatacaaggaaatccttacgcccagctggcgggaggttgatcttcagtctctgaaggggagtcctgatgaggagaatgaagagattgaggacctatccgacgcagccttcgccgccctgcatgccaaatgtgaggagatggagagggcacggtggctgtggaccacgagtgtgccaccccagcggcggggcagcaggtcctacaggtcatcagacggccggacaaccccccagctgggcagtgccaacccctccaccccccagcctgcctcccctgatgtcagcagtagccactctttgtcagaatactcccatggtcagtcccctaggagccccattagcccggaactgcactcagcacccctcacccctgtggctcgggacactctgcgacacttagccagtgaggatacccgttgttccacaccagagctggggctggatgaacagtctgtccagccctgggagcggcggaccttccccctggcgcacagtccccaggcggagtgtgaggaccagctggatgcacaggagcgagcagcccgctgcactcgacgcacctcaggcagcaagactggccgggagacagaggcagcgcccacctcgcctcccattgtccccctcaagagtcggcatctggtggcagcagccacagctcagcgcccgactcacagatgagcgggagacagccatctaaacagactcactaactattggcattaaagcttcagaaatctctgcgtttgatattcaaacatcatatgccggaaattttcacagtttttagtgaacttaaggaatttagatcctactttggtatttttttttcttgttttaatttttgttttgtttttgtttccatgttttcttgtcacacacctgagcacttcctcccgttggcaaacagaagttcaggatgagaccctgctggcctggtcctggcacatcctctgcactgttgaatcactggacttactgatcttagatgaccaccccctccctcacacctgtgggcagggcagaacagcctggcgggctacagtttagcatggccttcttgagctagggtggaatggggcagggtgctctggactcttaccccctcccctcccatctgtggcttggctctgctgtggccctcctggctgggtccccttggtttttcgtgctggaacatccccaccagagcctctctgccataactgccagctgctctccccgagtgctcagctggcagaacacctttcctttctcacccagaacttaagagactgattttttgtttcatctgcatttggtcttctctgttttgactctttcactgcagtaacctggctgtggctgctcaggttcccctcctcatgccccttggtacccttccctgtctgctctcccatgccatgtacacacccacaacccgtccttccacttggaatatttttaccacctatcctgatctttgaaggtagggttaggactacttaacctctattcccactcccctgcaaactgggggttgtgggaagtgagcagccatctccctgtgtgattttttttttttttccctctgattcactttgccatgtttccttcacatccagatccctgtcggtgttagttccactcttggtctttcacgctccccttgcctgtggaacattgtctggtcctagctgtggttcccattgttcccccttcacccttctctgttaaccttgtgcctgtctcctgtatgatcacatcaccaaaaagggggaggggggagaagactctttttttttggccattttgtaatcgtataaaaatagtagacaactgcttaatggttggggttttttcacaattttcaacattagtgatttttttttctgtttgcaagttaaagggtttgtcattgtttctttaaaaaaaaatacaataatgcaccatatccctatgcataaagtgcttcttctatttataaggttgaaaattctgaataacccttttagcattgaaaaaaaaaacaaaaacaaaaaatggaaaaaaaaaaccttgtattttgtaaatattttcttttcctgctttggagctgtgtaatggcagcgaaacatgtagctgtctttgttctatagaaatgcttttcttcagagaagctgatctttgttaatgtcttgattctgttcgcaaagcacagactagtgcttaaaaaaaaaaaagaa

SEQ ID NO: 145049 - DNA, 5309 bp, Homo sapiens
  Payload ID: 8663
  Gene Symbol: KANSL1
  Gene Name: KAT8 regulatory NSL complex subunit 1
  ENST ID: ENST00000610328
  CDS Start-End: 472-3789
tcctcctcctcctgctgccctttctccttctcctcgctctccctgtggctcccatttctctctctctttgttagttgtaactagaaaggcagggcagggtagaaaaatcccccggaactttaaatggcctctccgggcttccctgctgcgggtccgggctgggagtcgccccaagggcgggggtgtgcgggggcccttccccaggagctgccgcctcgttcgccagcttttcctttggcgttctatttaaaaaggcggcctgaagaacatgatttattcccgtaaaagaaccccccaaacaaactctggctctcgccttgaacttctcttgactgcaaaaggcctttctctgctcgaaacacacatcttggcgcgttgcacgtctgttctctggggaggcagtaaggggccgtggagctggcctcggcctcggcatcgggagaggctggacttcctgtctctctgtgctgaatggctgcgatggcgcccgctctcactgacgcagcagctgaagcacaccatatccggttcaaactggctcccccatcctctaccttgtcccctggcagtgccgaaaataacggcaacgccaacatccttattgctgccaacggaaccaaaagaaaagccattgctgcagaggatcccagcctagatttccgaaataatcctaccaaggaagacttgggaaagctgcaaccactggtggcatcttatctctgctctgatgtaacatctgttccctcaaaggagtctttgaagttgcaaggggtcttcagcaagcagacagtccttaaatctcatcctctcttatctcagtcctatgaactccgagctgagctgttggggagacagccagttttggagttttccttagaaaatcttagaaccatgaatacgagtggtcagacagctctgccacaagcacctgtaaatgggttggctaagaaattgactaaaagttcaacacattctgatcatgacaattccacttccctcaatgggggaaaacgggctctcacttcatctgctcttcatgggggtgaaatgggaggatctgaatctggggacttgaaggggggtatgaccaattgcactcttccacatagaagccttgatgtagaacacacaactttgtatagcaataatagcactgcaaacaaatcctctgtcaattccatggaacagccggcacttcaaggaagcagtagattatcacctggtacagactccagctctaacttggggggtgtcaaattggagggtaaaaagtctcccctgtcttccattcttttcagtgctttagattctgacacaaggataacagctttactgcggcgacaggctgacattgagagccgtgcccgcagattacaaaagcgcttacaggttgtgcaagccaagcaggttgagaggcatatacaacatcagctgggtggatttttggagaagactttgagcaaactgccaaacttggaatccttgagaccacggagccagttgatgctgactcgaaaggctgaagctgccttgagaaaagctgccagtgagaccaccacttcagagggacttagcaactttctgaaaagcaattcaatttcagaagaattggagagatttacagctagtggcatagccaacttgaggtgcagtgaacaggcatttgattcagatgtcactgacagtagttcaggaggggagtctgatattgaagaggaagaactgaccagagctgatcccgagcagcgtcatgtacccctgagacgcaggtcagaatggaaatgggctgcagaccgggcagctattgtcagccgctggaactggcttcaggctcatgtttctgacttggaatatcgaattcgtcagcaaacagacatttacaaacagatacgtgctaataaggggttgatagttcttggggaggtacctcccccagagcatacaacagacttatttcttccacttagttctgaggtgaagacagatcatgggactgataaattgattgagtctgtttctcagccattggaaaaccatggtgcccctattattggtcatatttcagagtcactgtctaccaaatcatgtggagcactcagacctgtcaatggagttattaacactcttcagcctgtcttggcagaccacattccaggtgacagctctgatgctgaggaacaattacataagaagcaacgactgaatctcgtctcttcatcatctgatggcacctgtgtggcagcccggacacgtcctgtactgagctgtaagaagcggaggcttgttcgacccaacagcatcgttcctctttccaagaaggttcaccggaacagcacaatccgccctggctgtgatgtgaatccctcctgcgcactgtgtggttcaggcagcatcaacaccatgcctcccgaaattcactatgaagcccctctgttggaacgtctttcccagttggactcttgtgttcatcctgttctagcatttccagatgatgttcccacaagcctgcatttccagagcatgctgaaatctcagtggcagaacaagccttttgacaaaatcaaacctcccaaaaagttatcgcttaagcacagagcacccatgccgggcagtctgccagattcagctcgtaaggacaggcacaaattggtcagctccttcctaacaacagccaagctgtcccatcaccaaacccggcctgacaggacccacaggcagcacttagacgatgtgggggccgtgcccatggtggagcgagtgacagcgccaaaagcagagcgcttgctcaacccaccaccacccgtgcatgacccaaaccacagcaaaatgagattgcgagaccattcatctgagagaagtgaagtgttgaagcatcacacagacatgagcagttcgagctacttggcagccacccaccatcctccacacagtcccttggtgcgacagctctccacctcctcagattcccctgcacccgccagctctagctcacaggttacagccagcacatcgcagcagccagtaaggaggagaaggggagagagctcatttgatattaacaacattgtcatcccaatgtctgttgctgcaacaactcgcgtagagaaactgcaatacaaggaaatccttacgcccagctggcgggaggttgatcttcagtctctgaaggggagtcctgatgaggagaatgaagagattgaggacctatccgacgcagccttcgccgccctgcatgccaaatgtgaggagatggagagggcacggtggctgtggaccacgagtgtgccaccccagcggcggggcagcaggtcctacaggtcatcagacggccggacaaccccccagctgggcagtgccaacccctccaccccccagcctgcctcccctgatgtcagcagtagccactctttgtcagaatactcccatggtcagtcccctaggagccccattagcccggaactgcactcagcacccctcacccctgtggctcgggacactctgcgacacttagccagtgaggatacccgttgttccacaccagagctggggctggatgaacagtctgtccagccctgggagcggcggaccttccccctggcgcacagtccccaggcggagtgtgaggaccagctggatgcacaggagcgagcagcccgctgcactcgacgcacctcaggcagcaagactggccgggagacagaggcagcgcccacctcgcctcccattgtccccctcaagagtcggcatctggtggcagcagccacagctcagcgcccgactcacagatgagcgggagacagccatctaaacagactcactaactattggcattaaagcttcagaaatctctgcgtttgatattcaaacatcatatgccggaaattttcacagtttttagtgaacttaaggaatttagatcctactttggtatttttttttcttgttttaatttttgttttgtttttgtttccatgttttcttgtcacacacctgagcacttcctcccgttggcaaacagaagttcaggatgagaccctgctggcctggtcctggcacatcctctgcactgttgaatcactggacttactgatcttagatgaccaccccctccctcacacctgtgggcagggcagaacagcctggcgggctacagtttagcatggccttcttgagctagggtggaatggggcagggtgctctggactcttaccccctcccctcccatctgtggcttggctctgctgtggccctcctggctgggtccccttggtttttcgtgctggaacatccccaccagagcctctctgccataactgccagctgctctccccgagtgctcagctggcagaacacctttcctttctcacccagaacttaagagactgattttttgtttcatctgcatttggtcttctctgttttgactctttcactgcagtaacctggctgtggctgctcaggttcccctcctcatgccccttggtacccttccctgtctgctctcccatgccatgtacacacccacaacccgtccttccacttggaatatttttaccacctatcctgatctttgaaggtagggttaggactacttaacctctattcccactcccctgcaaactgggggttgtgggaagtgagcagccatctccctgtgtgattttttttttttttccctctgattcactttgccatgtttccttcacatccagatccctgtcggtgttagttccactcttggtctttcacgctccccttgcctgtggaacattgtctggtcctagctgtggttcccattgttcccccttcacccttctctgttaaccttgtgcctgtctcctgtatgatcacatcaccaaaaagggggaggggggagaagactctttttttttggccattttgtaatcgtataaaaatagtagacaactgcttaatggttggggttttttcacaattttcaacattagtgatttttttttctgtttgcaagttaaagggtttgtcattgtttctttaaaaaaaaatacaataatgcaccatatccctatgcataaagtgcttcttctatttataaggttgaaaattctgaataacccttttagcattgaaaaaaaaaacaaaaacaaaaaatggaaaaaaaaaaccttgtattttgtaaatattttcttttcctgctttggagctgtgtaatggcagcgaaacatgtagctgtctttgttctatagaaatgcttttcttcagagaagctgatctttgttaatgtcttgattctgttcgcaaagcacagactagtgcttaaaaaaaaaaaa

SEQ ID NO: 145050 - DNA, 5110 bp, Homo sapiens
  Payload ID: 8663
  Gene Symbol: KANSL1
  Gene Name: KAT8 regulatory NSL complex subunit 1
  ENST ID: ENST00000627698
  CDS Start-End: 228-3545
tcagataccttctcgaaacaaaagattttcctacctgcttatacttggtaaccgagggaattactaagacttcttgctcatttctgagtattgtctttatatcctgacactatgaatgctacttggatgcctcttaagtctgttctctggggaggcagtaaggggccgtggagctggcctcggcctcggcatcgggagaggctggacttcctgtctctctgtgctgaatggctgcgatggcgcccgctctcactgacgcagcagctgaagcacaccatatccggttcaaactggctcccccatcctctaccttgtcccctggcagtgccgaaaataacggcaacgccaacatccttattgctgccaacggaaccaaaagaaaagccattgctgcagaggatcccagcctagatttccgaaataatcctaccaaggaagacttgggaaagctgcaaccactggtggcatcttatctctgctctgatgtaacatctgttccctcaaaggagtctttgaagttgcaaggggtcttcagcaagcagacagtccttaaatctcatcctctcttatctcagtcctatgaactccgagctgagctgttggggagacagccagttttggagttttccttagaaaatcttagaaccatgaatacgagtggtcagacagctctgccacaagcacctgtaaatgggttggctaagaaattgactaaaagttcaacacattctgatcatgacaattccacttccctcaatgggggaaaacgggctctcacttcatctgctcttcatgggggtgaaatgggaggatctgaatctggggacttgaaggggggtatgaccaattgcactcttccacatagaagccttgatgtagaacacacaactttgtatagcaataatagcactgcaaacaaatcttctgtcaattccatggaacagccggcacttcaaggaagcagtaggttatcacctggtacagactccagctctaacttggggggtgtcaaattggagggtaaaaagtctcccctgtcttccattcttttcagtgctttagattctgacacaaggataacagctttactgcggcgacaggctgacattgagagccgtgcccgcagattacaaaagcgcttacaggttgtgcaagccaagcaggttgagaggcatatacaacatcagctgggtggatttttggagaagactttgagcaaactgccaaacttggaatccttgagaccacggagccagttgatgctgactcgaaaggctgaagctgccttgagaaaagctgccagtgagaccaccacttcagagggacttagcaactttctgaaaagcaattcaatttcagaagaattggagagatttacagctagtggcatagccaacttgaggtgcagtgaacaggcatttgattcagatgtcactgacagtagttcaggaggggagtctgatattgaagaggaagaactgaccagagctgatcccgagcagcgtcatgtacccctgagacgcaggtcagaatggaaatgggctgcagaccgggcagctattgtcagccgctggaactggcttcaggctcatgtttctgacttggaatatcgaattcgtcagcaaacagacatttacaaacagatacgtgctaataaggggttgatagttcttggggaggtacctcccccagagcatacaacagacttatttcttccgcttagttctgaggtgaagacagatcatgggactgataaattgattgagtctgtttctcagccattggaaaaccatggtgcccctattattggtcatatttcagagtcactgtctaccaaatcatgtggagcactcagacctgtcaatggagttattaacactcttcagcctgtcttggcagaccacattccaggtgacagctctgatgctgaggaacaattacataagaagcaacgactgaatctcgtctcttcatcatctgatggcacctgtgtggcagcccggacacgtcctgtactgagctgtaagaagcggaggcttgttcgacccaacagcatcgttcctctttccaagaaggttcaccggaacagcacaatccgccctggctgtgatgtgaatccctcctgcgcactgtgtggttcaggcagcatcaacaccatgcctcccgaaattcactatgaagcccctctgttggaacgtctttcccagttggactcttgtgttcatcctgttctagcatttccagatgatgttcccacaagcctgcatttccagagcatgctgaaatctcagtggcagaacaagccttttgacaaaatcaaacctcccaaaaagttatcgcttaagcacagagcacccatgccgggcagtctgccagatccagctcgtaaggacaggcacaaattggtcagctccttcctaacaacagccaagctgtcccatcaccaaacccggcctgacaggacccacaggcagcacttagacgatgtgggggccgtgcccatggtggagcgagtgacagcgccaaaagcagagcgcttgctcaacccaccaccacccgtgcatgacccaaaccacagcaaaatgagattgcgagaccattcatctgagagaagtgaagtgttgaagcatcacacagacatgagcagttcgagctacttggcagccacccaccatcctccacacagtcccttggtgcgacagctctccacctcctcagattcccctgcacccgccagctctagctcacaggttacagccagcacatcgcagcagccagtaaggaggagaaggggagagagctcattcgatattaacaacattgtcatcccaatgtctgttgctgcaacaactcgcgtagagaaactgcaatacaaggaaatccttacgcccagctggcgggaggttgatcttcagtctctgaaggggagtcctgatgaggagaatgaagagattgaggacctatccgatgcagcctttgccgccctgcatgccaaatgtgaggagatggagagggcacggtggctgtggaccacgagtgtgccaccccagcggcggggcagcaggtcctacaggtcatcagacggccggacaaccccccagctgggcagtgccaacccctccaccccccagcctgcctcccctgatgtcagcagtagccactctttgtcagaatactcccatggtcagtcccctaggagccccattagcccggaactgcactcagcacccctcacccctgtggctcgggacactccgcgacacttagccagtgaggatacccgttgttccacaccagagctggggctggatgaacagtctgtccagccctgggagcggcggaccttccccctggcgcacagtccccaggcggagtgtgaggaccagctggatgcacaggagcgagcagcccgctgcactcgacgcacctcaggcagcaagactggccgggagacagaggcagcgcccacctcgcctcccactgtccccctcaagagtcggcatctggtggcagcagccacagctcagcgcccgactcacagatgagcgggagacagccatctaaacagactcactaactattggcattaaagcttcagaaatctctgcgtttgatattcaaacatcatatgccggaaattttcacagtttttagtgaacttaaggaatttagatcctactttggtatttttttttcttgttttaatttttgttttgtttttgtttccatgttttcttgtcacacacctgagcacttcctcccgttggcaaacagaagttcaggatgagaccctgctggcctggtcctggcacatcctctgcactgttgaatcactggacttactgatcttagatgaccaccccctccctcacacctgtgggcagggcagaacagcctggcgggcagagggctacagtttagcatggccttcttgagctagggtggaatggggcagggtgctctggactcttaccccctcccctcccatctgtggcttggctctgctgtggccctcctggctgggtccccttggttttttgtgctggaacatccccaccagagcctctctgccataactgccagctgctctccccgagtgctcagctggcagaacacctttcctttctcacccagaacttaagagactgattttttgtttcatctgcatttggtcttctctgttttgactctctcactgcagtaacctggctgtggctgctcaggttcccctcctcatgccccttggtacccttccctgtctgctctcccatgccatgtacacacccacaacccatccttccacttggaatatttttaccacctatcctgatctttgaaggtagggttaggactacttaacctctattcccactcccctgcaaactgggggttgtgggaagtgagcagccatctccctgtgtgattttttttttttttccctctgattcactttgccatgtttccttcacatccagatccctgtcggtgttagttccactcttggtctttcacgctccccttgcctgtggaacattgtctggtcctagctgtggttcccattgttcccccttcacccttctctgttaaccttgtgcctgtctcctgtatgatcacatcaccaaaaagggggaggggggagaagactctttttttttggccattttgtaatcgtataaaaatagtagacaactgcttaatggttggggttttttcacaattttcaacattagtgatttttttttctgtttgcaagttaaagggtttgtcattgtttctttaaaaaaaaaatacaataatgcaccatatccctatgcataaagtgcttcttctatttataaggttgaaaattctgaataacccttttagcattgaaaaaaaaacaaaaacaaaaaatggaaaaaaaaaccttgtattttgtaaatattttcttttcctgctttggagctgtgtaatggcagcgaaacatgtagctgtctttgttctatagaaatgcttttcttcagagaagctgatctttgttaatgtcttgattctgttcgcaaagcacagactagtgcttaaaaaaaaaaagaaggaaaaattgaaaaaaataaaaaaaaaagttacagaa

SEQ ID NO: 145051 - DNA, 4716 bp, Homo sapiens
  Payload ID: 8663
  Gene Symbol: KANSL1
  Gene Name: KAT8 regulatory NSL complex subunit 1
  ENST ID: ENST00000630200
  CDS Start-End: 35-3160
gggagaggctggacttcctgtctctctgtgctgaatggctgcgatggcgcccgctctcactgacgcagcagctgaagcacaccatatccggttcaaactggctcccccatcctctaccttgtcccctggcagtgccgaaaataacggcaacgccaacatccttattgctgccaacggaaccaaaagaaaagccattgctgcagaggatcccagcctagatttccgaaataatcctaccaaggaagacttgggaaagctgcaaccactggtggcatcttatctctgctctgatgtaacatctgttccctcaaaggagtctttgaagttgcaaggggtcttcagcaagcagacagtccttaaatctcatcctctcttatctcagtcctatgaactccgagctgagctgttggggagacagccagttttggagttttccttagaaaatcttagaaccatgaatacgagtggtcagacagctctgccacaagcacctgtaaatgggttggctaagaaattgactaaaagttcaacacattctgatcatgacaattccacttccctcaatgggggaaaacgggctctcacttcatctgctcttcatgggggtgaaatgggaggatctgaatctggggacttgaaggggggtatgaccaattgcactcttccacatagaagccttgatgtagaacacacaactttgtatagcaataatagcactgcaaacaaatcttctgtcaattccatggaacagccggcacttcaaggaagcagtaggttatcacctggtacagactccagctctaacttggggggtgtcaaattggagggtaaaaagtctcccctgtcttccattcttttcagtgctttagattctgacacaaggataacagctttactgcggcgacaggctgacattgagagccgtgcccgcagattacaaaagcgcttacaggttgtgcaagccaagcaggttgagaggcatatacaacatcagctgggtggatttttggagaagactttgagcaaactgccaaacttggaatccttgagaccacggagccagttgatgctgactcgaaaggctgaagctgccttgagaaaagctgccagtgagaccaccacttcagagggacttagcaactttctgaaaagcaattcaatttcagaagaattggagagatttacagctagtggcatagccaacttgaggtgcagtgaacaggcatttgattcagatgtcactgacagtagttcaggaggggagtctgatattgaagaggaagaactgaccagagctgatcccgagcagcgtcatgtacccctgagacgcaggtcagaatggaaatgggctgcagaccgggcagctattgtcagccgctggaactggcttcaggctcatgtttctgacttggaatatcgaattcgtcagcaaacagacatttacaaacagatacgtgctaataaggggttgatagttcttggggaggtacctcccccagagcatacaacagacttatttcttccgcttagttctgaggtgaagacagatcatgggactgataaattgattgagtctgtttctcagccattggaaaaccatggtgcccctattattggtcatatttcagagtcactgtctaccaaatcatgtggagcactcagacctgtcaatggagttattaacactcttcagcctgtcttggcagaccacattccaggtgacagctctgatgctgaggaacaattacataagaagcaacgactgaatctcgtctcttcatcatctgatggcacctgtgtggcagcccggacacgtcctgtactgagctgtaagaagcggaggcttgttcgacccaacagcatcgttcctctttccaagaaggttcaccggaacagcacaatccgccctggctgtgatgtgaatccctcctgcgcactgtgtggttcaggcagcatcaacaccatgcctcccgaaattcactatgaagcccctctgttggaacgtctttcccagttggactcttgtgttcatcctgttctagcatttccagatgatgttcccacaagcctgcatttccagagcatgctgaaatctcagtggcagaacaagccttttgacaaaatcaaacctcccaaaaagttatcgcttaagcacagagcacccatgccgggcagtctgccagatccagctcgtaaggacaggcacaaattggtcagctccttcctaacaacagccatgttgaagcatcacacagacatgagcagttcgagctacttggcagccacccaccatcctccacacagtcccttggtgcgacagctctccacctcctcagattcccctgcacccgccagctctagctcacaggttacagccagcacatcgcagccagtaaggaggagaaggggagagagctcattcgatattaacaacattgtcatcccaatgtctgttgctgcaacaactcgcgtagagaaactgcaatacaaggaaatccttacgcccagctggcgggaggttgatcttcagtctctgaaggggagtcctgatgaggagaatgaagagattgaggacctatccgatgcagcctttgccgccctgcatgccaaatgtgaggagatggagagggcacggtggctgtggaccacgagtgtgccaccccagcggcggggcagcaggtcctacaggtcatcagacggccggacaaccccccagctgggcagtgccaacccctccaccccccagcctgcctcccctgatgtcagcagtagccactctttgtcagaatactcccatggtcagtcccctaggagccccattagcccggaactgcactcagcacccctcacccctgtggctcgggacactccgcgacacttagccagtgaggatacccgttgttccacaccagagctggggctggatgaacagtctgtccagccctgggagcggcggaccttccccctggcgcacagtccccaggcggagtgtgaggaccagctggatgcacaggagcgagcagcccgctgcactcgacgcacctcaggcagcaagactggccgggagacagaggcagcgcccacctcgcctcccactgtccccctcaagagtcggcatctggtggcagcagccacagctcagcgcccgactcacagatgagcgggagacagccatctaaacagactcactaactattggcattaaagcttcagaaatctctgcgtttgatattcaaacatcatatgccggaaattttcacagtttttagtgaacttaaggaatttagatcctactttggtatttttttttcttgttttaatttttgttttgtttttgtttccatgttttcttgtcacacacctgagcacttcctcccgttggcaaacagaagttcaggatgagaccctgctggcctggtcctggcacatcctctgcactgttgaatcactggacttactgatcttagatgaccaccccctccctcacacctgtgggcagggcagaacagcctggcgggcagagggctacagtttagcatggccttcttgagctagggtggaatggggcagggtgctctggactcttaccccctcccctcccatctgtggcttggctctgctgtggccctcctggctgggtccccttggttttttgtgctggaacatccccaccagagcctctctgccataactgccagctgctctccccgagtgctcagctggcagaacacctttcctttctcacccagaacttaagagactgattttttgtttcatctgcatttggtcttctctgttttgactctctcactgcagtaacctggctgtggctgctcaggttcccctcctcatgccccttggtacccttccctgtctgctctcccatgccatgtacacacccacaacccatccttccacttggaatatttttaccacctatcctgatctttgaaggtagggttaggactacttaacctctattcccactcccctgcaaactgggggttgtgggaagtgagcagccatctccctgtgtgattttttttttttttccctctgattcactttgccatgtttccttcacatccagatccctgtcggtgttagttccactcttggtctttcacgctccccttgcctgtggaacattgtctggtcctagctgtggttcccattgttcccccttcacccttctctgttaaccttgtgcctgtctcctgtatgatcacatcaccaaaaagggggaggggggagaagactctttttttttggccattttgtaatcgtataaaaatagtagacaactgcttaatggttggggttttttcacaattttcaacattagtgatttttttttctgtttgcaagttaaagggtttgtcattgtttctttaaaaaaaaaatacaataatgcaccatatccctatgcataaagtgcttcttctatttataaggttgaaaattctgaataacccttttagcattgaaaaaaaaacaaaaacaaaaaatggaaaaaaaaaccttgtattttgtaaatattttcttttcctgctttggagctgtgtaatggcagcgaaacatgtagctgtctttgttctatagaaatgcttttcttcagagaagctgatctttgttaatgtcttgattctgttcgcaaagcacagactagtgcttaaaaaaaaaaagaaggaaaaattgaaaaaaataaaaaaaaaa

SEQ ID NO: 145052 - DNA, 5314 bp, Homo sapiens
  Payload ID: 8663
  Gene Symbol: KANSL1
  Gene Name: KAT8 regulatory NSL complex subunit 1
  ENST ID: ENST00000626533
  CDS Start-End: 472-3789
tcctcctcctcctgctgccctttctccttctcctcgctctccctgtggctcccatttctctctctctttgttagttgtaactagaaaggcagggcagggtagaaaaaacccccggaactttaaatggcctctccgggcttccctgctgcgggtccgggctgggagtcgccccaagggcgggggtgtgcgggggcccttcccctggagctgccgcctcgttcgccagcttttcctttggcgttctatttaaaaaggcggcctgaagaacatgatttattcccgtaaaagaaccccccaaacaaactctggctctcgccttgaacttctcttgactgcaaaaggcctttctctgctcgaaacacacatcttggcgcgttgcacgtctgttctctggggaggcagtaaggggccgtggagctggcctcggcctcggcatcgggagaggctggacttcctgtctctctgtgctgaatggctgcgatggcgcccgctctcactgacgcagcagctgaagcacaccatatccggttcaaactggctcccccatcctctaccttgtcccctggcagtgccgaaaataacggcaacgccaacatccttattgctgccaacggaaccaaaagaaaagccattgctgcagaggatcccagcctagatttccgaaataatcctaccaaggaagacttgggaaagctgcaaccactggtggcatcttatctctgctctgatgtaacatctgttccctcaaaggagtctttgaagttgcaaggggtcttcagcaagcagacagtccttaaatctcatcctctcttatctcagtcctatgaactccgagctgagctgttggggagacagccagttttggagttttccttagaaaatcttagaaccatgaatacgagtggtcagacagctctgccacaagcacctgtaaatgggttggctaagaaattgactaaaagttcaacacattctgatcatgacaattccacttccctcaatgggggaaaacgggctctcacttcatctgctcttcatgggggtgaaatgggaggatctgaatctggggacttgaaggggggtatgaccaattgcactcttccacatagaagccttgatgtagaacacacaactttgtatagcaataatagcactgcaaacaaatcttctgtcaattccatggaacagccggcacttcaaggaagcagtaggttatcacctggtacagactccagctctaacttggggggtgtcaaattggagggtaaaaagtctcccctgtcttccattcttttcagtgctttagattctgacacaaggataacagctttactgcggcgacaggctgacattgagagccgtgcccgcagattacaaaagcgcttacaggttgtgcaagccaagcaggttgagaggcatatacaacatcagctgggtggatttttggagaagactttgagcaaactgccaaacttggaatccttgagaccacggagccagttgatgctgactcgaaaggctgaagctgccttgagaaaagctgccagtgagaccaccacttcagagggacttagcaactttctgaaaagcaattcaatttcagaagaattggagagatttacagctagtggcatagccaacttgaggtgcagtgaacaggcatttgattcagatgtcactgacagtagttcaggaggggagtctgatattgaagaggaagaactgaccagagctgatcccgagcagcgtcatgtacccctgagacgcaggtcagaatggaaatgggctgcagaccgggcagctattgtcagccgctggaactggcttcaggctcatgtttctgacttggaatatcgaattcgtcagcaaacagacatttacaaacagatacgtgctaataaggggttgatagttcttggggaggtacctcccccagagcatacaacagacttatttcttccgcttagttctgaggtgaagacagatcatgggactgataaattgattgagtctgtttctcagccattggaaaaccatggtgcccctattattggtcatatttcagagtcactgtctaccaaatcatgtggagcactcagacctgtcaatggagttattaacactcttcagcctgtcttggcagaccacattccaggtgacagctctgatgctgaggaacaattacataagaagcaacgactgaatctcgtctcttcatcatctgatggcacctgtgtggcagcccggacacgtcctgtactgagctgtaagaagcggaggcttgttcgacccaacagcatcgttcctctttccaagaaggttcaccggaacagcacaatccgccctggctgtgatgtgaatccctcctgcgcactgtgtggttcaggcagcatcaacaccatgcctcccgaaattcactatgaagcccctctgttggaacgtctttcccagttggactcttgtgttcatcctgttctagcatttccagatgatgttcccacaagcctgcatttccagagcatgctgaaatctcagtggcagaacaagccttttgacaaaatcaaacctcccaaaaagttatcgcttaagcacagagcacccatgccgggcagtctgccagatccagctcgtaaggacaggcacaaattggtcagctccttcctaacaacagccaagctgtcccatcaccaaacccggcctgacaggacccacaggcagcacttagacgatgtgggggccgtgcccatggtggagcgagtgacagcgccaaaagcagagcgcttgctcaacccaccaccacccgtgcatgacccaaaccacagcaaaatgagattgcgagaccattcatctgagagaagtgaagtgttgaagcatcacacagacatgagcagttcgagctacttggcagccacccaccatcctccacacagtcccttggtgcgacagctctccacctcctcagattcccctgcacccgccagctctagctcacaggttacagccagcacatcgcagcagccagtaaggaggagaaggggagagagctcattcgatattaacaacattgtcatcccaatgtctgttgctgcaacaactcgcgtagagaaactgcaatacaaggaaatccttacgcccagctggcgggaggttgatcttcagtctctgaaggggagtcctgatgaggagaatgaagagattgaggacctatccgatgcagcctttgccgccctgcatgccaaatgtgaggagatggagagggcacggtggctgtggaccacgagtgtgccaccccagcggcggggcagcaggtcctacaggtcatcagacggccggacaaccccccagctgggcagtgccaacccctccaccccccagcctgcctcccctgatgtcagcagtagccactctttgtcagaatactcccatggtcagtcccctaggagccccattagcccggaactgcactcagcacccctcacccctgtggctcgggacactccgcgacacttagccagtgaggatacccgttgttccacaccagagctggggctggatgaacagtctgtccagccctgggagcggcggaccttccccctggcgcacagtccccaggcggagtgtgaggaccagctggatgcacaggagcgagcagcccgctgcactcgacgcacctcaggcagcaagactggccgggagacagaggcagcgcccacctcgcctcccactgtccccctcaagagtcggcatctggtggcagcagccacagctcagcgcccgactcacagatgagcgggagacagccatctaaacagactcactaactattggcattaaagcttcagaaatctctgcgtttgatattcaaacatcatatgccggaaattttcacagtttttagtgaacttaaggaatttagatcctactttggtatttttttttcttgttttaatttttgttttgtttttgtttccatgttttcttgtcacacacctgagcacttcctcccgttggcaaacagaagttcaggatgagaccctgctggcctggtcctggcacatcctctgcactgttgaatcactggacttactgatcttagatgaccaccccctccctcacacctgtgggcagggcagaacagcctggcgggcagagggctacagtttagcatggccttcttgagctagggtggaatggggcagggtgctctggactcttaccccctcccctcccatctgtggcttggctctgctgtggccctcctggctgggtccccttggttttttgtgctggaacatccccaccagagcctctctgccataactgccagctgctctccccgagtgctcagctggcagaacacctttcctttctcacccagaacttaagagactgattttttgtttcatctgcatttggtcttctctgttttgactctctcactgcagtaacctggctgtggctgctcaggttcccctcctcatgccccttggtacccttccctgtctgctctcccatgccatgtacacacccacaacccatccttccacttggaatatttttaccacctatcctgatctttgaaggtagggttaggactacttaacctctattcccactcccctgcaaactgggggttgtgggaagtgagcagccatctccctgtgtgattttttttttttttccctctgattcactttgccatgtttccttcacatccagatccctgtcggtgttagttccactcttggtctttcacgctccccttgcctgtggaacattgtctggtcctagctgtggttcccattgttcccccttcacccttctctgttaaccttgtgcctgtctcctgtatgatcacatcaccaaaaagggggaggggggagaagactctttttttttggccattttgtaatcgtataaaaatagtagacaactgcttaatggttggggttttttcacaattttcaacattagtgatttttttttctgtttgcaagttaaagggtttgtcattgtttctttaaaaaaaaaatacaataatgcaccatatccctatgcataaagtgcttcttctatttataaggttgaaaattctgaataacccttttagcattgaaaaaaaaacaaaaacaaaaaatggaaaaaaaaaccttgtattttgtaaatattttcttttcctgctttggagctgtgtaatggcagcgaaacatgtagctgtctttgttctatagaaatgcttttcttcagagaagctgatctttgttaatgtcttgattctgttcgcaaagcacagactagtgcttaaaaaaaaaaa

SEQ ID NO: 145053 - DNA, 404 bp, Homo sapiens; identical to SEQ ID NO: 145042
  Payload ID: 8663
  Gene Symbol: KANSL1
  Gene Name: KAT8 regulatory NSL complex subunit 1
  ENST ID: ENST00000628726
  CDS Start-End: 378-404

SEQ ID NO: 145054 - DNA, 5016 bp, Homo sapiens
  Payload ID: 8663
  Gene Symbol: KANSL1
  Gene Name: KAT8 regulatory NSL complex subunit 1
  ENST ID: ENST00000629551
  CDS Start-End: 174-3491
cggcgcccaggccggggggctgtttgcaaactgcgcccattttgtggggctgaatccgcccgggctacgctcctccatcacgtgtctgttctctggggaggcagtaaggggccgtggagctggcctcggcctcggcatcgggagaggctggacttcctgtctctctgtgctgaatggctgcgatggcgcccgctctcactgacgcagcagctgaagcacaccatatccggttcaaactggctcccccatcctctaccttgtcccctggcagtgccgaaaataacggcaacgccaacatccttattgctgccaacggaaccaaaagaaaagccattgctgcagaggatcccagcctagatttccgaaataatcctaccaaggaagacttgggaaagctgcaaccactggtggcatcttatctctgctctgatgtaacatctgttccctcaaaggagtctttgaagttgcaaggggtcttcagcaagcagacagtccttaaatctcatcctctcttatctcagtcctatgaactccgagctgagctgttggggagacagccagttttggagttttccttagaaaatcttagaaccatgaatacgagtggtcagacagctctgccacaagcacctgtaaatgggttggctaagaaattgactaaaagttcaacacattctgatcatgacaattccacttccctcaatgggggaaaacgggctctcacttcatctgctcttcatgggggtgaaatgggaggatctgaatctggggacttgaaggggggtatgaccaattgcactcttccacatagaagccttgatgtagaacacacaactttgtatagcaataatagcactgcaaacaaatcttctgtcaattccatggaacagccggcacttcaaggaagcagtaggttatcacctggtacagactccagctctaacttggggggtgtcaaattggagggtaaaaagtctcccctgtcttccattcttttcagtgctttagattctgacacaaggataacagctttactgcggcgacaggctgacattgagagccgtgcccgcagattacaaaagcgcttacaggttgtgcaagccaagcaggttgagaggcatatacaacatcagctgggtggatttttggagaagactttgagcaaactgccaaacttggaatccttgagaccacggagccagttgatgctgactcgaaaggctgaagctgccttgagaaaagctgccagtgagaccaccacttcagagggacttagcaactttctgaaaagcaattcaatttcagaagaattggagagatttacagctagtggcatagccaacttgaggtgcagtgaacaggcatttgattcagatgtcactgacagtagttcaggaggggagtctgatattgaagaggaagaactgaccagagctgatcccgagcagcgtcatgtacccctgagacgcaggtcagaatggaaatgggctgcagaccgggcagctattgtcagccgctggaactggcttcaggctcatgtttctgacttggaatatcgaattcgtcagcaaacagacatttacaaacagatacgtgctaataaggggttgatagttcttggggaggtacctcccccagagcatacaacagacttatttcttccgcttagttctgaggtgaagacagatcatgggactgataaattgattgagtctgtttctcagccattggaaaaccatggtgcccctattattggtcatatttcagagtcactgtctaccaaatcatgtggagcactcagacctgtcaatggagttattaacactcttcagcctgtcttggcagaccacattccaggtgacagctctgatgctgaggaacaattacataagaagcaacgactgaatctcgtctcttcatcatctgatggcacctgtgtggcagcccggacacgtcctgtactgagctgtaagaagcggaggcttgttcgacccaacagcatcgttcctctttccaagaaggttcaccggaacagcacaatccgccctggctgtgatgtgaatccctcctgcgcactgtgtggttcaggcagcatcaacaccatgcctcccgaaattcactatgaagcccctctgttggaacgtctttcccagttggactcttgtgttcatcctgttctagcatttccagatgatgttcccacaagcctgcatttccagagcatgctgaaatctcagtggcagaacaagccttttgacaaaatcaaacctcccaaaaagttatcgcttaagcacagagcacccatgccgggcagtctgccagatccagctcgtaaggacaggcacaaattggtcagctccttcctaacaacagccaagctgtcccatcaccaaacccggcctgacaggacccacaggcagcacttagacgatgtgggggccgtgcccatggtggagcgagtgacagcgccaaaagcagagcgcttgctcaacccaccaccacccgtgcatgacccaaaccacagcaaaatgagattgcgagaccattcatctgagagaagtgaagtgttgaagcatcacacagacatgagcagttcgagctacttggcagccacccaccatcctccacacagtcccttggtgcgacagctctccacctcctcagattcccctgcacccgccagctctagctcacaggttacagccagcacatcgcagcagccagtaaggaggagaaggggagagagctcattcgatattaacaacattgtcatcccaatgtctgttgctgcaacaactcgcgtagagaaactgcaatacaaggaaatccttacgcccagctggcgggaggttgatcttcagtctctgaaggggagtcctgatgaggagaatgaagagattgaggacctatccgatgcagcctttgccgccctgcatgccaaatgtgaggagatggagagggcacggtggctgtggaccacgagtgtgccaccccagcggcggggcagcaggtcctacaggtcatcagacggccggacaaccccccagctgggcagtgccaacccctccaccccccagcctgcctcccctgatgtcagcagtagccactctttgtcagaatactcccatggtcagtcccctaggagccccattagcccggaactgcactcagcacccctcacccctgtggctcgggacactccgcgacacttagccagtgaggatacccgttgttccacaccagagctggggctggatgaacagtctgtccagccctgggagcggcggaccttccccctggcgcacagtccccaggcggagtgtgaggaccagctggatgcacaggagcgagcagcccgctgcactcgacgcacctcaggcagcaagactggccgggagacagaggcagcgcccacctcgcctcccactgtccccctcaagagtcggcatctggtggcagcagccacagctcagcgcccgactcacagatgagcgggagacagccatctaaacagactcactaactattggcattaaagcttcagaaatctctgcgtttgatattcaaacatcatatgccggaaattttcacagtttttagtgaacttaaggaatttagatcctactttggtatttttttttcttgttttaatttttgttttgtttttgtttccatgttttcttgtcacacacctgagcacttcctcccgttggcaaacagaagttcaggatgagaccctgctggcctggtcctggcacatcctctgcactgttgaatcactggacttactgatcttagatgaccaccccctccctcacacctgtgggcagggcagaacagcctggcgggcagagggctacagtttagcatggccttcttgagctagggtggaatggggcagggtgctctggactcttaccccctcccctcccatctgtggcttggctctgctgtggccctcctggctgggtccccttggttttttgtgctggaacatccccaccagagcctctctgccataactgccagctgctctccccgagtgctcagctggcagaacacctttcctttctcacccagaacttaagagactgattttttgtttcatctgcatttggtcttctctgttttgactctctcactgcagtaacctggctgtggctgctcaggttcccctcctcatgccccttggtacccttccctgtctgctctcccatgccatgtacacacccacaacccatccttccacttggaatatttttaccacctatcctgatctttgaaggtagggttaggactacttaacctctattcccactcccctgcaaactgggggttgtgggaagtgagcagccatctccctgtgtgattttttttttttttccctctgattcactttgccatgtttccttcacatccagatccctgtcggtgttagttccactcttggtctttcacgctccccttgcctgtggaacattgtctggtcctagctgtggttcccattgttcccccttcacccttctctgttaaccttgtgcctgtctcctgtatgatcacatcaccaaaaagggggaggggggagaagactctttttttttggccattttgtaatcgtataaaaatagtagacaactgcttaatggttggggttttttcacaattttcaacattagtgatttttttttctgtttgcaagttaaagggtttgtcattgtttctttaaaaaaaaaatacaataatgcaccatatccctatgcataaagtgcttcttctatttataaggttgaaaattctgaataacccttttagcattgaaaaaaaaacaaaaacaaaaaatggaaaaaaaaaccttgtattttgtaaatattttcttttcctgctttggagctgtgtaatggcagcgaaacatgtagctgtctttgttctatagaaatgcttttcttcagagaagctgatctttgttaatgtcttgattctgttcgcaaagcacagactagtgcttaaaaaaaaaaa

SEQ ID NO: 145055 - DNA, 667 bp, Homo sapiens; identical to SEQ ID NO: 145041
  Payload ID: 8663
  Gene Symbol: KANSL1
  Gene Name: KAT8 regulatory NSL complex subunit 1
  ENST ID: ENST00000626557
  CDS Start-End: 251-667

SEQ ID NO: 145056 - DNA, 586 bp, Homo sapiens
  Payload ID: 8663
  Gene Symbol: KANSL1
  Gene Name: KAT8 regulatory NSL complex subunit 1
  ENST ID: ENST00000629079
  CDS Start-End: 220-586
tactacacagtgcaaacagttcctcgctcacgtcctctcgctccgcggcgccggcccgccctgcccctcaactggcgagccgcaccgccggcctcagcacggagggcatgtgacggcgtcagtgcctcagtctgttctctggggaggcagtaaggggccgtggagctggcctcggcctcggcatcgggagaggctggacttcctgtctctctgtgctgaatggctgcgatggcgcccgctctcactgacgcagcagctgaagcacaccatatccggttcaaactggctcccccatcctctaccttgtcccctggcagtgccgaaaataacggcaacgccaacatccttattgctgccaacggaaccaaaagaaaagccattgctgcagaggatcccagcctagatttccgaaataatcctaccaaggaagacttgggaaagctgcaaccactggtggcatcttatctctgctctgatgtaacatctgttccctcaaaggagtctttgaagttgcaaggggtcttcagcaagcagacagtccttaaatctcatcctctcttatctcagtcctatgaactccgagctg

SEQ ID NO: 145057 - DNA, 4711 bp, Homo sapiens
  Payload ID: 8663
  Gene Symbol: KANSL1
  Gene Name: KAT8 regulatory NSL complex subunit 1
  ENST ID: ENST00000633346
  CDS Start-End: 35-3160
gggagaggctggacttcctgtctctctgtgctgaatggctgcgatggcgcccgctctcactgacgcagcagctgaagcacaccatatccggttcaaactggctcccccatcctctaccttgtcccctggcagtgccgaaaataacggcaacgccaacatccttattgctgccaacggaaccaaaagaaaagccattgctgcagaggatcccagcctagatttccgaaataatcctaccaaggaagacttgggaaagctgcaaccactggtggcatcttatctctgctctgatgtaacatctgttccctcaaaggagtctttgaagttgcaaggggtcttcagcaagcagacagtccttaaatctcatcctctcttatctcagtcctatgaactccgagctgagctgttggggagacagccagttttggagttttccttagaaaatcttagaaccatgaatacgagtggtcagacagctctgccacaagcacctgtaaatgggttggctaagaaattgactaaaagttcaacacattctgatcatgacaattccacttccctcaatgggggaaaacgggctctcacttcatctgctcttcatgggggtgaaatgggaggatctgaatctggggacttgaaggggggtatgaccaattgcactcttccacatagaagccttgatgtagaacacacaactttgtatagcaataatagcactgcaaacaaatcctctgtcaattccatggaacagccggcacttcaaggaagcagtagattatcacctggtacagactccagctctaacttggggggtgtcaaattggagggtaaaaagtctcccctgtcttccattcttttcagtgctttagattctgacacaaggataacagctttactgcggcgacaggctgacattgagagccgtgcccgcagattacaaaagcgcttacaggttgtgcaagccaagcaggttgagaggcatatacaacatcagctgggtggatttttggagaagactttgagcaaactgccaaacttggaatccttgagaccacggagccagttgatgctgactcgaaaggctgaagctgccttgagaaaagctgccagtgagaccaccacttcagagggacttagcaactttctgaaaagcaattcaatttcagaagaattggagagatttacagctagtggcatagccaacttgaggtgcagtgaacaggcatttgattcagatgtcactgacagtagttcaggaggggagtctgatattgaagaggaagaactgaccagagctgatcccgagcagcgtcatgtacccctgagacgcaggtcagaatggaaatgggctgcagaccgggcagctattgtcagccgctggaactggcttcaggctcatgtttctgacttggaatatcgaattcgtcagcaaacagacatttacaaacagatacgtgctaataaggggttgatagttcttggggaggtacctcccccagagcatacaacagacttatttcttccacttagttctgaggtgaagacagatcatgggactgataaattgattgagtctgtttctcagccattggaaaaccatggtgcccctattattggtcatatttcagagtcactgtctaccaaatcatgtggagcactcagacctgtcaatggagttattaacactcttcagcctgtcttggcagaccacattccaggtgacagctctgatgctgaggaacaattacataagaagcaacgactgaatctcgtctcttcatcatctgatggcacctgtgtggcagcccggacacgtcctgtactgagctgtaagaagcggaggcttgttcgacccaacagcatcgttcctctttccaagaaggttcaccggaacagcacaatccgccctggctgtgatgtgaatccctcctgcgcactgtgtggttcaggcagcatcaacaccatgcctcccgaaattcactatgaagcccctctgttggaacgtctttcccagttggactcttgtgttcatcctgttctagcatttccagatgatgttcccacaagcctgcatttccagagcatgctgaaatctcagtggcagaacaagccttttgacaaaatcaaacctcccaaaaagttatcgcttaagcacagagcacccatgccgggcagtctgccagattcagctcgtaaggacaggcacaaattggtcagctccttcctaacaacagccatgttgaagcatcacacagacatgagcagttcgagctacttggcagccacccaccatcctccacacagtcccttggtgcgacagctctccacctcctcagattcccctgcacccgccagctctagctcacaggttacagccagcacatcgcagccagtaaggaggagaaggggagagagctcatttgatattaacaacattgtcatcccaatgtctgttgctgcaacaactcgcgtagagaaactgcaatacaaggaaatccttacgcccagctggcgggaggttgatcttcagtctctgaaggggagtcctgatgaggagaatgaagagattgaggacctatccgacgcagccttcgccgccctgcatgccaaatgtgaggagatggagagggcacggtggctgtggaccacgagtgtgccaccccagcggcggggcagcaggtcctacaggtcatcagacggccggacaaccccccagctgggcagtgccaacccctccaccccccagcctgcctcccctgatgtcagcagtagccactctttgtcagaatactcccatggtcagtcccctaggagccccattagcccggaactgcactcagcacccctcacccctgtggctcgggacactctgcgacacttagccagtgaggatacccgttgttccacaccagagctggggctggatgaacagtctgtccagccctgggagcggcggaccttccccctggcgcacagtccccaggcggagtgtgaggaccagctggatgcacaggagcgagcagcccgctgcactcgacgcacctcaggcagcaagactggccgggagacagaggcagcgcccacctcgcctcccattgtccccctcaagagtcggcatctggtggcagcagccacagctcagcgcccgactcacagatgagcgggagacagccatctaaacagactcactaactattggcattaaagcttcagaaatctctgcgtttgatattcaaacatcatatgccggaaattttcacagtttttagtgaacttaaggaatttagatcctactttggtatttttttttcttgttttaatttttgttttgtttttgtttccatgttttcttgtcacacacctgagcacttcctcccgttggcaaacagaagttcaggatgagaccctgctggcctggtcctggcacatcctctgcactgttgaatcactggacttactgatcttagatgaccaccccctccctcacacctgtgggcagggcagaacagcctggcgggctacagtttagcatggccttcttgagctagggtggaatggggcagggtgctctggactcttaccccctcccctcccatctgtggcttggctctgctgtggccctcctggctgggtccccttggtttttcgtgctggaacatccccaccagagcctctctgccataactgccagctgctctccccgagtgctcagctggcagaacacctttcctttctcacccagaacttaagagactgattttttgtttcatctgcatttggtcttctctgttttgactctttcactgcagtaacctggctgtggctgctcaggttcccctcctcatgccccttggtacccttccctgtctgctctcccatgccatgtacacacccacaacccgtccttccacttggaatatttttaccacctatcctgatctttgaaggtagggttaggactacttaacctctattcccactcccctgcaaactgggggttgtgggaagtgagcagccatctccctgtgtgattttttttttttttccctctgattcactttgccatgtttccttcacatccagatccctgtcggtgttagttccactcttggtctttcacgctccccttgcctgtggaacattgtctggtcctagctgtggttcccattgttcccccttcacccttctctgttaaccttgtgcctgtctcctgtatgatcacatcaccaaaaagggggaggggggagaagactctttttttttggccattttgtaatcgtataaaaatagtagacaactgcttaatggttggggttttttcacaattttcaacattagtgatttttttttctgtttgcaagttaaagggtttgtcattgtttctttaaaaaaaaatacaataatgcaccatatccctatgcataaagtgcttcttctatttataaggttgaaaattctgaataacccttttagcattgaaaaaaaaaacaaaaacaaaaaatggaaaaaaaaaaccttgtattttgtaaatattttcttttcctgctttggagctgtgtaatggcagcgaaacatgtagctgtctttgttctatagaaatgcttttcttcagagaagctgatctttgttaatgtcttgattctgttcgcaaagcacagactagtgcttaaaaaaaaaaaagaaggaaaaattgaaaaaaataaaaaaaaaa

SEQ ID NO: 145058 - DNA, 667 bp, Homo sapiens; identical to SEQ ID NO: 145041
  Payload ID: 8663
  Gene Symbol: KANSL1
  Gene Name: KAT8 regulatory NSL complex subunit 1
  ENST ID: ENST00000632215
  CDS Start-End: 251-667

SEQ ID NO: 145059 - DNA, 5105 bp, Homo sapiens
  Payload ID: 8663
  Gene Symbol: KANSL1
  Gene Name: KAT8 regulatory NSL complex subunit 1
  ENST ID: ENST00000633819
  CDS Start-End: 228-3545
tcagataccttctcgaaacaaaagattttcctacctgcttatacttggtaaccgagggaattactaagacttcttgctcatttctgagtattgtctttatatcctgacactatgaatgctacttggatgcctcttaagtctgttctctggggaggcagtaaggggccgtggagctggcctcggcctcggcatcgggagaggctggacttcctgtctctctgtgctgaatggctgcgatggcgcccgctctcactgacgcagcagctgaagcacaccatatccggttcaaactggctcccccatcctctaccttgtcccctggcagtgccgaaaataacggcaacgccaacatccttattgctgccaacggaaccaaaagaaaagccattgctgcagaggatcccagcctagatttccgaaataatcctaccaaggaagacttgggaaagctgcaaccactggtggcatcttatctctgctctgatgtaacatctgttccctcaaaggagtctttgaagttgcaaggggtcttcagcaagcagacagtccttaaatctcatcctctcttatctcagtcctatgaactccgagctgagctgttggggagacagccagttttggagttttccttagaaaatcttagaaccatgaatacgagtggtcagacagctctgccacaagcacctgtaaatgggttggctaagaaattgactaaaagttcaacacattctgatcatgacaattccacttccctcaatgggggaaaacgggctctcacttcatctgctcttcatgggggtgaaatgggaggatctgaatctggggacttgaaggggggtatgaccaattgcactcttccacatagaagccttgatgtagaacacacaactttgtatagcaataatagcactgcaaacaaatcctctgtcaattccatggaacagccggcacttcaaggaagcagtagattatcacctggtacagactccagctctaacttggggggtgtcaaattggagggtaaaaagtctcccctgtcttccattcttttcagtgctttagattctgacacaaggataacagctttactgcggcgacaggctgacattgagagccgtgcccgcagattacaaaagcgcttacaggttgtgcaagccaagcaggttgagaggcatatacaacatcagctgggtggatttttggagaagactttgagcaaactgccaaacttggaatccttgagaccacggagccagttgatgctgactcgaaaggctgaagctgccttgagaaaagctgccagtgagaccaccacttcagagggacttagcaactttctgaaaagcaattcaatttcagaagaattggagagatttacagctagtggcatagccaacttgaggtgcagtgaacaggcatttgattcagatgtcactgacagtagttcaggaggggagtctgatattgaagaggaagaactgaccagagctgatcccgagcagcgtcatgtacccctgagacgcaggtcagaatggaaatgggctgcagaccgggcagctattgtcagccgctggaactggcttcaggctcatgtttctgacttggaatatcgaattcgtcagcaaacagacatttacaaacagatacgtgctaataaggggttgatagttcttggggaggtacctcccccagagcatacaacagacttatttcttccacttagttctgaggtgaagacagatcatgggactgataaattgattgagtctgtttctcagccattggaaaaccatggtgcccctattattggtcatatttcagagtcactgtctaccaaatcatgtggagcactcagacctgtcaatggagttattaacactcttcagcctgtcttggcagaccacattccaggtgacagctctgatgctgaggaacaattacataagaagcaacgactgaatctcgtctcttcatcatctgatggcacctgtgtggcagcccggacacgtcctgtactgagctgtaagaagcggaggcttgttcgacccaacagcatcgttcctctttccaagaaggttcaccggaacagcacaatccgccctggctgtgatgtgaatccctcctgcgcactgtgtggttcaggcagcatcaacaccatgcctcccgaaattcactatgaagcccctctgttggaacgtctttcccagttggactcttgtgttcatcctgttctagcatttccagatgatgttcccacaagcctgcatttccagagcatgctgaaatctcagtggcagaacaagccttttgacaaaatcaaacctcccaaaaagttatcgcttaagcacagagcacccatgccgggcagtctgccagattcagctcgtaaggacaggcacaaattggtcagctccttcctaacaacagccaagctgtcccatcaccaaacccggcctgacaggacccacaggcagcacttagacgatgtgggggccgtgcccatggtggagcgagtgacagcgccaaaagcagagcgcttgctcaacccaccaccacccgtgcatgacccaaaccacagcaaaatgagattgcgagaccattcatctgagagaagtgaagtgttgaagcatcacacagacatgagcagttcgagctacttggcagccacccaccatcctccacacagtcccttggtgcgacagctctccacctcctcagattcccctgcacccgccagctctagctcacaggttacagccagcacatcgcagcagccagtaaggaggagaaggggagagagctcatttgatattaacaacattgtcatcccaatgtctgttgctgcaacaactcgcgtagagaaactgcaatacaaggaaatccttacgcccagctggcgggaggttgatcttcagtctctgaaggggagtcctgatgaggagaatgaagagattgaggacctatccgacgcagccttcgccgccctgcatgccaaatgtgaggagatggagagggcacggtggctgtggaccacgagtgtgccaccccagcggcggggcagcaggtcctacaggtcatcagacggccggacaaccccccagctgggcagtgccaacccctccaccccccagcctgcctcccctgatgtcagcagtagccactctttgtcagaatactcccatggtcagtcccctaggagccccattagcccggaactgcactcagcacccctcacccctgtggctcgggacactctgcgacacttagccagtgaggatacccgttgttccacaccagagctggggctggatgaacagtctgtccagccctgggagcggcggaccttccccctggcgcacagtccccaggcggagtgtgaggaccagctggatgcacaggagcgagcagcccgctgcactcgacgcacctcaggcagcaagactggccgggagacagaggcagcgcccacctcgcctcccattgtccccctcaagagtcggcatctggtggcagcagccacagctcagcgcccgactcacagatgagcgggagacagccatctaaacagactcactaactattggcattaaagcttcagaaatctctgcgtttgatattcaaacatcatatgccggaaattttcacagtttttagtgaacttaaggaatttagatcctactttggtatttttttttcttgttttaatttttgttttgtttttgtttccatgttttcttgtcacacacctgagcacttcctcccgttggcaaacagaagttcaggatgagaccctgctggcctggtcctggcacatcctctgcactgttgaatcactggacttactgatcttagatgaccaccccctccctcacacctgtgggcagggcagaacagcctggcgggctacagtttagcatggccttcttgagctagggtggaatggggcagggtgctctggactcttaccccctcccctcccatctgtggcttggctctgctgtggccctcctggctgggtccccttggtttttcgtgctggaacatccccaccagagcctctctgccataactgccagctgctctccccgagtgctcagctggcagaacacctttcctttctcacccagaacttaagagactgattttttgtttcatctgcatttggtcttctctgttttgactctttcactgcagtaacctggctgtggctgctcaggttcccctcctcatgccccttggtacccttccctgtctgctctcccatgccatgtacacacccacaacccgtccttccacttggaatatttttaccacctatcctgatctttgaaggtagggttaggactacttaacctctattcccactcccctgcaaactgggggttgtgggaagtgagcagccatctccctgtgtgattttttttttttttccctctgattcactttgccatgtttccttcacatccagatccctgtcggtgttagttccactcttggtctttcacgctccccttgcctgtggaacattgtctggtcctagctgtggttcccattgttcccccttcacccttctctgttaaccttgtgcctgtctcctgtatgatcacatcaccaaaaagggggaggggggagaagactctttttttttggccattttgtaatcgtataaaaatagtagacaactgcttaatggttggggttttttcacaattttcaacattagtgatttttttttctgtttgcaagttaaagggtttgtcattgtttctttaaaaaaaaatacaataatgcaccatatccctatgcataaagtgcttcttctatttataaggttgaaaattctgaataacccttttagcattgaaaaaaaaaacaaaaacaaaaaatggaaaaaaaaaaccttgtattttgtaaatattttcttttcctgctttggagctgtgtaatggcagcgaaacatgtagctgtctttgttctatagaaatgcttttcttcagagaagctgatctttgttaatgtcttgattctgttcgcaaagcacagactagtgcttaaaaaaaaaaaagaaggaaaaattgaaaaaaataaaaaaaaaagttacagaa

SEQ ID NO: 145060 - DNA, 586 bp, Homo sapiens; identical to SEQ ID NO: 145040
  Payload ID: 8663
  Gene Symbol: KANSL1
  Gene Name: KAT8 regulatory NSL complex subunit 1
  ENST ID: ENST00000633540
  CDS Start-End: 220-586

SEQ ID NO: 145061 - DNA, 404 bp, Homo sapiens; identical to SEQ ID NO: 145042
  Payload ID: 8663
  Gene Symbol: KANSL1
  Gene Name: KAT8 regulatory NSL complex subunit 1
  ENST ID: ENST00000633448
  CDS Start-End: 378-404

SEQ ID NO: 145062 - DNA, 4754 bp, Homo sapiens
  Payload ID: 8664
  Gene Symbol: KANSL1L
  Gene Name: KAT8 regulatory NSL complex subunit 1-like
  Uniprot ID: A0AUZ9
  ENST ID: ENST00000281772
  CDS Start-End: 265-3228
gagccgcacggagctgcgggcagcgggcggactgttaaaccgcggcggcggcggcggcggcggcggcggcggcggcggcggcggcggccggggcgggagcggggcgcgctctggagacgagtcagcggcgccccgggtgggggaggcgggcgggcagctagagatcacctcagcagcccccaccacggccggaccgaaggtgcggcggcggaggggagccagggcgccccagcaggtttccaatacttatctacaggaatcgccatgaccccagctctgagggaggcaacagcaaagggtatcagcttttcatctttgccaagtaccatggagtctgacaagatgctctacatggaaagtcccagaactgtagatgaaaagctaaagggagacaccttttctcagatgcttggatttccaactcctgaacctactcttaatactaattttgtgaatttaaaacattttggctcccctcagtcttcaaaacattaccagactgtttttttaatgagatctaattctacattaaataaacacaatgagaattataaacaaaagaaattaggggagcccagttgcaataagctgaaaaacatactgtataatggcagcaacattcagctcagtaaaatctgtctttctcattctgaagagttcatcaaaaaggagcctctatcagataccacgagccagtgcatgaaagatgtacaaattattctggattcaaatataaccaaagacactaatgtagataaagtacaactacaaaactgtaaatggtatcaagagaatgcacttttggataaagttactgatgctgagattaaaaagggtttattgcactgtactcaaaagaaaattgtacctggccactcaaatgtgcctgttagttcttcagctgctgaaaaagaggaggaagtacatgctcgtttacttcattgtgtaagcaaacagaaaattttacttagccaggctagaagaactcagaaacatttgcagatgctcctggcaaagcatgttgttaagcactatggtcagcagatgaaattgtctatgaaacatcaactccccaaaatgaagacatttcatgaacctaccacaattttgggtaatagtttacctaaatgcactgaaattaagccagaagttaacacattgactgcagagaataaattgtgggatgatgcaaaaaatggctttgcacggtgtacagctgcggaaatccaaagatttgcattttctgctacagggctgttgtctcatgttgaagagggtttggattccgatgcaactgatagcagctctgatgacgatttggatgaatatacccttagaaaaaatgtggcagttaactgtagtactgaatggaagtggcttgtagacagagcacgagttggcagccgatggacttggcttcaagctcagatttcagacctagaatgcaaaatccaacaactaacagacattcacaggcaaattcgtgcctccaaggggatagtggtcctagaagaatgtcagcttccaaaagatattttgaaaaaacaaatgcaatttgcagaccaagcagcttcactaaacattctagggaatcctcaggttccccaggagtgtcaagatcctgtaccggaacaagattttgaaatgtcaccaagcagccctactttacttcttcgaaacatcgaaaaacagagtgcacagttgactgagatcatcaacagtttgattgcccctctcaacttgtccccaacttcatcacccctctcttccaaatcctgtagccataaatgtctggctaatggcatttacaggagtgcatcagagaatttagatgagctgtcttcctccagtagctggttacttaaccagaagcacagtaagaaaaagagaaaagacaggacaagactgaaatcttcatccttgactttcatgagtacatcagcccgaacaaggccacttcagagtttccacaaacgaaaactgtacagattgagccctactttttattggactccacagactttgccttcaaaagaaacagcatttttaaacactacacaaatgccttgcctgcaatcagcttcaacttggagtagctatgaacacaattcggagtcttacctattaagagaacatgtatcagagttagattcctctttccattctgttctatcattgccatcagatgtgcctcttcattttcactttgaaacactgttaaaaaagactgaaataaaaggcaatcttgctgaaaataaatttgtagatgaatatatcatatctccatcacctgtacatagtactctgaatcaatggagaaatggatattcacctatatgtaagcctcaaataaggtcagaatcttctgcacaactgttacagggaagaaagaaaagacatttgagtgaaacagcattaggagaaagaactaaacttgaagaatctgattttcaacacacagaatcaggatcccatagcaattttactgctgtttccaatgtcaacgttttatcaagaatccagaattcatcacgaaatactgcacgacggagattgagaagtgagagctcttatgacatagataacattgtgattcccatgtcattagtagccccagctaaattagagaaactccaatataaggaaatacttactccaagctggaggatggttgttcttcagcctttggatgaatataatttaggcaaagaagagatagaagatctttctgatgaagtcttctccctaaggcacaaaaaatatgaagagagagagcaagccaggtggtcactatgggagcaaagcaagtggcacagaagaaacagcagagcttacagtaaaaatgttgaaggacaggacttgcttttgaaagaataccctaataacttcagtagcagtcagcaatgtgctgctgcaagtcctcctgggcttccttcagagaaccaggatctgtgtgcatatggcttaccttctttaaatcaaagtcaagaaaccaagtctttgtggtgggaacgacgggcttttccactgaagggtgaagacatggcagccttattatgtcaagatgaaaaaaaggatcaggttgaaaggtcaagcacagctttccatggtgaaatcttcggtaccagtgtaccagagaatggccaccatccaaaaaagcagtcagatggaatggaagaatacaaaacctttggtctaggacttactaatgttaaaaaaaataggtgacagggaacaggttaagaaaactatgtaaatgtaggaaagatgggaggaaataaagccctgttctggatcccccatcccctccagaataagagcatgttctgcatgtattaatcttttatgctgtttatgaaacaggcaagataagtctgtttttccttctggaaccataagggtaaccagattttcatctacagacaagtggtagtcatttgtgtttatcatgcaacttacttacaaacaccaagatattaattgctgcaacttgatgtcaaatcacattactgggtaatttttaagactatgtacccacaccatacatacatacatatatatatacacatacatacaaacctgtgtgccaagtgacagctatttttttatatacatggtaattcattaaaattgccttagtaatatattagaatatacaaatatgtgtgtataaaataaacatacacacacacacacacccctatgtagtttttaaaacactggcaatgacccactccccttggaaatgcatgtatgaactaccctatgaaatgtaagctgcagaatagataaaacacaggtttccactaataaaagacatctgaacgtcctgaatatagagacagaagttttttgttgttgttgttgttgttttaacatgtttaaccaacagaagttatttacagaaattcatatatccaggcaacacaaaactcctttattcaaaatcactgctatctttgggactaaacacaggctactttctgtttactcctaacaaaataaagcaagcaaatttgagtcaaatattggtgcactttaatactatcacatctttgaaaactcaatttgagttttaccaattaatgtgtctcatgaagagaagacaccagttttaaaatgagccacaaacagtaaagccctatcagtataaaatttgaaaaaaaaaaaaaagatgattgtatttctagattagcaagaaattagttaattctggctgatttctatttctagctaatttggtcattctttgccatagcttactctattcaaataaacatatattcttgcttgcatcctagattggaaattaaaatttttcaaagaacaaagcttcaatattggatactgaagagtatacatgaaagaaaattccttttgaagctattaaaccatttttttcctatgtgaaagttgaggacaatttatataactcactttttgtcatgtaaaaaaggttactcaagttgtactacccacataactgaaaatattggccatttggccttatctgtgagatttgacactaagtttttgttagagattggaaattatactagtccttttaaggggtaaaaaattcaattcaatactgacaaacttttgcttgtagttttactgtacatttatttttaaagaaaaagaaaacaaaagccagacaaacccaagttgtccaggcaaataaactcaaatctttgtcacgtctgatattataatcttctatgtaagttttttaattaaagttatttctatat

SEQ ID NO: 145063 - DNA, 668 bp, Homo sapiens
  Payload ID: 8664
  Gene Symbol: KANSL1L
  Gene Name: KAT8 regulatory NSL complex subunit 1-like
  ENST ID: ENST00000415553
  CDS Start-End: 1-599
tgggtaatagtttacctaaatgcactgaaattaagccagaagttaacacattgactgcagagaataaattgtgggatgatgcaaaaaatggctttgcacggtgtacagctgcggaaatccaaagatttgcattttctgctacagggctgttgtctcatgttgaagagggtttggattccgatgcaactgatagcagctctgatgacgatttggatgaatatacccttagaaaaaatgtggcagttaactgtagtactgaatggaagtggcttgtagacagagcacgagttggcagccgatggacttggcttcaagctcagatttcagacctagaatgcaaaatccaacaactaacagacattcacaggcaaattcgtgcctccaaggggatagtggtcctagaagaatgtcagcttccaaaagatattttgaaaaaacaaatgcaatttgcagaccaagcagcttcactaaacattctagggaatcctcaggttccccaggagtgtcaagatcctgtaccggaacaagattttgaaatgtcaccaagcagccctactttacttcttcgaaacatcgaaaaacaggtaaagtcaaagtaaggatatcagtggtatgaaatgacttttcattgattttgtaaactattcaaataaacatcattatatgtg

SEQ ID NO: 145064 - DNA, 2264 bp, Homo sapiens
  Payload ID: 8664
  Gene Symbol: KANSL1L
  Gene Name: KAT8 regulatory NSL complex subunit 1-like
  Uniprot ID: A0AUZ9
  ENST ID: ENST00000457374
  CDS Start-End: 139-2256
gtagctgggattacagttgcccaccaccatgcccggctaatttttatatttttagtagagacagagtttcaccatgttggccatgctgatctcgaactcctgatctcaggtttccaatacttatctacaggaatcgccatgaccccagctctgagggaggcaacagcaaagggtatcagcttttcatctttgccaagtaccatggagtctgacaagatgctctacatggaaagtcccagaactgtagatgaaaagctaaagggagacaccttttctcagatgcttggatttccaactcctgaacctactcttaatactaattttgtgaatttaaaacattttggctcccctcagtcttcaaaacattaccagactgtttttttaatgagatctaattctacattaaataaacacaatgagaattataaacaaaagaaattaggggagcccagttgcaataagctgaaaaacatactgtataatggcagcaacattcagctcagtaaaatctgtctttctcattctgaagagttcatcaaaaaggagcctctatcagataccacgagccagtgcatgaaagatgtacaaattattctggattcaaatataaccaaagacactaatgtagataaagtacaactacaaaactgtaaatggtatcaagagaatgcacttttggataaagttactgatgctgagattaaaaagggtttattgcactgtactcaaaagaaaattgtacctggccactcaaatgtgcctgttagttcttcagctgctgaaaaagaggaggaagtacatgctcgtttacttcattgtgtaagcaaacagaaaattttacttagccaggctagaagaactcagaaacatttgcagatgctcctggcaaagcatgttgttaagcactatggtcagcagatgaaattgtctatgaaacatcaactccccaaaatgaagacatttcatgaacctaccacaattttgggtaatagtttacctaaatgcactgaaattaagccagaagttaacacattgactgcagagaataaattgtgggatgatgcaaaaaatggctttgcacggtgtacagctgcggaaatccaaagatttgcattttctgctacagggctgttgtctcatgttgaagagggtttggattccgatgcaactgatagcagctctgatgacgatttggatgaatatacccttagaaaaaatgtggcagttaactgtagtactgaatggaagtggcttgtagacagagcacgagttggcagccgatggacttggcttcaagctcagatttcagacctagaatgcaaaatccaacaactaacagacattcacaggcaaattcgtgcctccaaggggatagtggtcctagaagaatgtcagcttccaaaagatattttgaaaaaacaaatgcaatttgcagaccaagcagcttcactaaacattctagggaatcctcaggttccccaggagtgtcaagatcctgtaccggaacaagattttgaaatgtcaccaagcagccctactttacttcttcgaaacatcgaaaaacagagtgcacagttgactgagatcatcaacagtttgattgcccctctcaacttgtccccaacttcatcacccctctcttccaaatcctgtagccataaatgtctggctaatggcatttacaggagtgcatcagagaatttagatgagctgtcttcctccagtagctggttacttaaccagaagcacagtaagaaaaagagaaaagacaggacaagactgaaatcttcatccttgactttcatgagtacatcagcccgaacaaggccacttcagagtttccacaaacgaaaactgtacagattgagccctactttttattggactccacagactttgccttcaaaagaaacagcatttttaaacactacacaaatgccttgcctgcaatcagcttcaacttggagtagctatgaacacaattcggagtcttacctattaagagaacatgtatcagagttagattcctctttccattctgttctatcattgccatcagatgtgcctcttcattttcactttgaaacactgttaaaaaagactgaaataaaaggcaatcttgctgaaaataaatttgtagatgaatatatcatatctccatcacctggtatgtcacatttacagttcttgtactctatatgcctttttatgtctttatacttactatttttgcattctaagaaaaataaaatctaagaaaagaa

SEQ ID NO: 145065 - DNA, 2334 bp, Homo sapiens
  Payload ID: 8664
  Gene Symbol: KANSL1L
  Gene Name: KAT8 regulatory NSL complex subunit 1-like
  Uniprot ID: A0AUZ9
  ENST ID: ENST00000452086
  CDS Start-End: 209-2326
gcggcggcggcggcggcggcggcggcggcggccggggcgggagcggggcgcgctctggagacgagtcagcggcgccccgggtgggggaggcgggcgggcagctagagatcacctcagcagcccccaccacggccggaccgaaggtgcggcggcggaggggagccagggcgccccagcaggtttccaatacttatctacaggaatcgccatgaccccagctctgagggaggcaacagcaaagggtatcagcttttcatctttgccaagtaccatggagtctgacaagatgctctacatggaaagtcccagaactgtagatgaaaagctaaagggagacaccttttctcagatgcttggatttccaactcctgaacctactcttaatactaattttgtgaatttaaaacattttggctcccctcagtcttcaaaacattaccagactgtttttttaatgagatctaattctacattaaataaacacaatgagaattataaacaaaagaaattaggggagcccagttgcaataagctgaaaaacatactgtataatggcagcaacattcagctcagtaaaatctgtctttctcattctgaagagttcatcaaaaaggagcctctatcagataccacgagccagtgcatgaaagatgtacaaattattctggattcaaatataaccaaagacactaatgtagataaagtacaactacaaaactgtaaatggtatcaagagaatgcacttttggataaagttactgatgctgagattaaaaagggtttattgcactgtactcaaaagaaaattgtacctggccactcaaatgtgcctgttagttcttcagctgctgaaaaagaggaggaagtacatgctcgtttacttcattgtgtaagcaaacagaaaattttacttagccaggctagaagaactcagaaacatttgcagatgctcctggcaaagcatgttgttaagcactatggtcagcagatgaaattgtctatgaaacatcaactccccaaaatgaagacatttcatgaacctaccacaattttgggtaatagtttacctaaatgcactgaaattaagccagaagttaacacattgactgcagagaataaattgtgggatgatgcaaaaaatggctttgcacggtgtacagctgcggaaatccaaagatttgcattttctgctacagggctgttgtctcatgttgaagagggtttggattccgatgcaactgatagcagctctgatgacgatttggatgaatatacccttagaaaaaatgtggcagttaactgtagtactgaatggaagtggcttgtagacagagcacgagttggcagccgatggacttggcttcaagctcagatttcagacctagaatgcaaaatccaacaactaacagacattcacaggcaaattcgtgcctccaaggggatagtggtcctagaagaatgtcagcttccaaaagatattttgaaaaaacaaatgcaatttgcagaccaagcagcttcactaaacattctagggaatcctcaggttccccaggagtgtcaagatcctgtaccggaacaagattttgaaatgtcaccaagcagccctactttacttcttcgaaacatcgaaaaacagagtgcacagttgactgagatcatcaacagtttgattgcccctctcaacttgtccccaacttcatcacccctctcttccaaatcctgtagccataaatgtctggctaatggcatttacaggagtgcatcagagaatttagatgagctgtcttcctccagtagctggttacttaaccagaagcacagtaagaaaaagagaaaagacaggacaagactgaaatcttcatccttgactttcatgagtacatcagcccgaacaaggccacttcagagtttccacaaacgaaaactgtacagattgagccctactttttattggactccacagactttgccttcaaaagaaacagcatttttaaacactacacaaatgccttgcctgcaatcagcttcaacttggagtagctatgaacacaattcggagtcttacctattaagagaacatgtatcagagttagattcctctttccattctgttctatcattgccatcagatgtgcctcttcattttcactttgaaacactgttaaaaaagactgaaataaaaggcaatcttgctgaaaataaatttgtagatgaatatatcatatctccatcacctggtatgtcacatttacagttcttgtactctatatgcctttttatgtctttatacttactatttttgcattctaagaaaaataaaatctaagaaaagaa

SEQ ID NO: 145066 - DNA, 1510 bp, Homo sapiens
  Payload ID: 8664
  Gene Symbol: KANSL1L
  Gene Name: KAT8 regulatory NSL complex subunit 1-like
  ENST ID: ENST00000428655
  CDS Start-End: 1-1030
ggatgatgcaaaaaatggctttgcacggtgtacagctgcggaaatccaaagatttgcattttctgctacagggctgttgtctcatgttgaagagggtttggattccgatgcaactgatagcagctctgatgacgatttggatgaatatacccttagaaaaaatgtggcagttaactgtagtactgaatggaagtggcttgtagacagagcacgagttggcagccgatggacttggcttcaagctcagatttcagacctagaatgcaaaatccaacaactaacagacattcacaggcaaattcgtgcctccaaggggatagtggtcctagaagaatgtcagcttccaaaagatattttgaaaaaacaaatgcaatttgcagaccaagcagcttcactaaacattctagggaatcctcaggttccccaggagtgtcaagatcctgtaccggaacaagattttgaaatgtcaccaagcagccctactttacttcttcgaaacatcgaaaaacagagtgcacagttgactgagatcatcaacagtttgattgcccctctcaacttgtccccaacttcatcacccctctcttccaaatcctgtagccataaatgtctggctaatggcatttacaggagtgcatcagagaatttagatgagctgtcttcctccagtagctggttacttaaccagaagcacagtaagaaaaagagaaaagacaggacaagactgaaatcttcatccttgactttcatgagtacatcagcccgaacaaggccacttcagagtttccacaaacgaaaactgtacagattgagccctactttttattggactccacagactttgccttcaaaagaaacagcatttttaaacactacacaaatgccttgcctgcaatcagcttcaacttggagtagctatgaacacaattcggagtcttacctattaagagaacatgtatcagagttagattcctctttccattctgttctatcattgccatcaggtaagcctccttgtaacaatttctaagtaacgatattttctgtactgaaatctaatcctctaaatacagagaatctaataaatcttattttatcaattttttttcagtagatattagaactaagcaatgccttgacaattaaatttgttgtagaggaattaatctagtcacatgcacggttaatgttctatctgtgtaagttgattctttaattccttctaaaccaacttgatttactttgggaaattactaggtttttatcttgttaaattttgagcattttattggtaacatggctgtgctgttgaaatgtttctgagtaatggtaattcagtgttctttttctaatgtgctgttatacatggaggtttccctgtcataaaatatttctccatttataatctgcattgaatttctcaatgcagagggaagaaaactgcgtacctataagtatagtcaacctcaagagtatctgtactttataactgagtaaatgaggcttatac

SEQ ID NO: 145067 - DNA, 3562 bp, Homo sapiens
  Payload ID: 8664
  Gene Symbol: KANSL1L
  Gene Name: KAT8 regulatory NSL complex subunit 1-like
  Uniprot ID: A0AUZ9
  ENST ID: ENST00000418791
  CDS Start-End: 209-3046
gcggcggcggcggcggcggcggcggcggcggccggggcgggagcggggcgcgctctggagacgagtcagcggcgccccgggtgggggaggcgggcgggcagctagagatcacctcagcagcccccaccacggccggaccgaaggtgcggcggcggaggggagccagggcgccccagcaggtttccaatacttatctacaggaatcgccatgaccccagctctgagggaggcaacagcaaagggtatcagcttttcatctttgccaagtaccatggagtctgacaagatgctctacatggaaagtcccagaactgtagatgaaaagctaaagggagacaccttttctcagatgcttggatttccaactcctgaacctactcttaatactaattttgtgaatttaaaacattttggctcccctcagtcttcaaaacattaccagactgtttttttaatgagatctaattctacattaaataaacacaatgagaattataaacaaaagaaattaggggagcccagttgcaataagctgaaaaacatactgtataatggcagcaacattcagctcagtaaaatctgtctttctcattctgaagagttcatcaaaaaggagcctctatcagataccacgagccagtgcatgaaagatgtacaaattattctggattcaaatataaccaaagacactaatgtagataaagtacaactacaaaactgtaaatggtatcaagagaatgcacttttggataaagttactgatgctgagattaaaaagggtttattgcactgtactcaaaagaaaattgtacctggccactcaaatgtgcctgttagttcttcagctgctgaaaaagaggaggaagtacatgctcgtttacttcattgtgtaagcaaacagaaaattttacttagccaggctagaagaactcagaaacatttgcagatgctcctggcaaagcatgttgttaagcactatggtcagcagatgaaattgtctatgaaacatcaactccccaaaatgaagacatttcatgaacctaccacaattttgggtaatagtttacctaaatgcactgaaattaagccagaagttaacacattgactgcagagaataaattgtgggatgatgcaaaaaatggctttgcacggtgtacagctgcggaaatccaaagatttgcattttctgctacagggctgttgtctcatgttgaagagggtttggattccgatgcaactgatagcagctctgatgacgatttggatgaatatacccttagaaaaaatgtggcagttaactgtagtactgaatggaagtggcttgtagacagagcacgagttggcagccgatggacttggcttcaagctcagatttcagacctagaatgcaaaatccaacaactaacagacattcacaggcaaattcgtgcctccaaggggatagtggtcctagaagaatgtcagcttccaaaagatattttgaaaaaacaaatgcaatttgcagaccaagcagcttcactaaacattctagggaatcctcaggttccccaggagtgtcaagatcctgtaccggaacaagattttgaaatgtcaccaagcagccctactttacttcttcgaaacatcgaaaaacagagtgcacagttgactgagatcatcaacagtttgattgcccctctcaacttgtccccaacttcatcacccctctcttccaaatcctgtagccataaatgtctggctaatggcatttacaggagtgcatcagagaatttagatgagctgtcttcctccagtagctggttacttaaccagaagcacagtaagaaaaagagaaaagacaggacaagactgaaatcttcatccttgactttcatgagtacatcagcccgaacaaggccacttcagagtttccacaaacgaaaactgtacagattgagccctactttttattggactccacagactttgccttcaaaagaaacagcatttttaaacactacacaaatgccttgcctgcaatcagcttcaacttggagtagctatgaacacaattcggagtcttacctattaagagaacatgtatcagagttagattcctctttccattctgttctatcattgccatcagatgtgcctcttcattttcactttgaaacactgttaaaaaagactgaaataaaaggcaatcttgctgaaaataaatttgtagatgaatatatcatatctccatcacctggagaaagaactaaacttgaagaatctgattttcaacacacagaatcaggatcccatagcaattttactgctgtttccaatgtcaacgttttatcaagaatccagaattcatcacgaaatactgcacgacggagattgagaagtgagagctcttatgacatagataacattgtgattcccatgtcattagtagccccagctaaattagagaaactccaatataaggaaatacttactccaagctggaggatggttgttcttcagcctttggatgaatataatttaggcaaagaagagatagaagatctttctgatgaagtcttctccctaaggcacaaaaaatatgaagagagagagcaagccaggtggtcactatgggagcaaagcaagtggcacagaagaaacagcagagcttacagtaaaaatgttgaaggacaggacttgcttttgaaagaataccctaataacttcagtagcagtcagcaatgtgctgctgcaagtcctcctgggcttccttcagagaaccaggatctgtgtgcatatggcttaccttctttaaatcaaagtcaagaaaccaagtctttgtggtgggaacgacgggcttttccactgaagggtgaagacatggcagccttattatgtcaagatgaaaaaaaggatcaggttgaaaggtcaagcacagctttccatggtgaaatcttcggtaccagtgtaccagagaatggccaccatccaaaaaagcagtcagatggaatggaagaatacaaaacctttggtctaggacttactaatgttaaaaaaaataggtgacagggaacaggttaagaaaactatgtaaatgtaggaaagatgggaggaaataaagccctgttctggatcccccatcccctccagaataagagcatgttctgcatgtattaatcttttatgctgtttatgaaacaggcaagataagtctgtttttccttctggaaccataagggtaaccagattttcatctacagacaagtggtagtcatttgtgtttatcatgcaacttacttacaaacaccaagatattaattgctgcaacttgatgtcaaatcacattactgggtaatttttaagactatgtacccacaccatacatacatacatatatatatacacatacatacaaacctgtgtgccaagtgacagctatttttttatatacatggtaattcattaaaattgccttagtaatatattagaatatacaaatatgtgtgtataaaataaacatacacacacacacacacccctatgtagtttttaaaacactggcaatgacccactccccttgga

SEQ ID NO: 145068 - DNA, 808 bp, Homo sapiens
  Payload ID: 8664
  Gene Symbol: KANSL1L
  Gene Name: KAT8 regulatory NSL complex subunit 1-like
  ENST ID: ENST00000438563
  CDS Start-End: 1-575
ctgctacagggctgttgtctcatgttgaagagggtttggattccgatgcaactgatagcagctctgatgacgatttggatgaatatacccttagaaaaaatgtggcagttaactgtagtactgaatggaagtggcttgtagacagagcacgagttggcagccgatggacttggcttcaagctcagatttcagacctagaatgcaaaatccaacaactaacagacattcacaggcaaattcgtgcctccaaggggatagtggtcctagaagaatgtcagcttccaaaagatattttgaaaaaacaaatgcaatttgcagaccaagcagcttcactaaacattctagggaatcctcaggttccccaggagtgtcaagatcctgtaccggaacaagattttgaaatgtcaccaagcagccctactttacttcttcgaaacatcgaaaaacagagtgcacagttgactgagatcatcaacagtttgattgcccctctcaacttgtccccaacttcatcacccctctcttccaaatcctgtagccataaatgtctggctaatggcatttacaggaggtaggtatcaatggaatagcttagcttttaaattcaactttgcctattttatcttattttgattttgttttgatattttaagtattatagctactttttttgtacattaggggctactagagtacaatcaatataccatggatgcattttttgataatattaaatttacacaattaaggtaatgataaatctaggaatgagggagagagatttctgggaagtttcataatgtttctt

SEQ ID NO: 145069 - DNA, 547 bp, Homo sapiens
  Payload ID: 8664
  Gene Symbol: KANSL1L
  Gene Name: KAT8 regulatory NSL complex subunit 1-like
  ENST ID: ENST00000634716
  CDS Start-End: 1-211
acgaaatactgcacgacggagattgagaagtgagagctcttatgacatagataacattgtgattcccatgtcattagtagccccagctaaattagagaaactccaatataaggaaatacttactccaagctggaggatggttgttcttcagcctttggatgaatataatttaggcaaagaagagatttttggattttggaattgcagatagaagatctttctgatgaagtcttctccctaaggcacaaaaaatatgaagagagagagcaagccaggtggtcactatgggagcaaagcaagtggcacagaagaaacagcagagcttacagtaaaaatgttgaaggacaggacttgcttttgaaagaataccctaataacttcagtagcagtcagcaatgtgctgctgcaagtcctcctgggcttccttcagagaaccaggatctgtgtgcatatggcttaccttctttaaatcaaagtcaagaaaccaagtctttgtggtgggaacgacgggcttttccactgaagggtgaagacatggcagccttat

SEQ ID NO: 145070 - DNA, 2155 bp, Homo sapiens
  Payload ID: 8665
  Gene Symbol: KANSL2
  Gene Name: KAT8 regulatory NSL complex subunit 2
  Uniprot ID: Q9H9L4
  ENST ID: ENST00000420613
  CDS Start-End: 49-1527
gagcggcgcggcagagtgcggcgcagcgcagctcctgaggttttggttatgaacaggattcggattcacgtcttgccaaccaatcgggggaggatcactccagtgcccaggtctcaggaacctctgtcttgtgcattcactcatcgtccatgctctcaccctcgtctggaggggcaggagttttgcattaagcatatccttgaagacaagaatgcacccttcaagcagtgtagttatatatcgacgaagaatggaaaaagatgtcccaatgctgccccaaagccagagaagaaagatggggtgtccttctgtgctgaacatgtccgtaggaatgccctggcacttcatgctcaaatgaagaagaccaacccagggcctgtgggtgaaacactcctgtgccagctgagctcatatgctaagacagagctggggtctcagactccagaaagtagtcgcagtgaagccagccgaatactagatgaagacagctggagtgatggggagcaggaacccattactgtggatcagacatggagaggtgaccctgacagtgaagctgatagcatagacagtgatcaagaagatcccctaaaacatgctggtgtctacacagcagaagaagtggccctgattatgcgtgaaaagctaattcgtttgcagtcgttgtatattgatcagtttaaacgacttcagcatctgctcaaggagaagaagcgccgatacttacataatcgcaaagtggaacatgaagctctaggcagtagtctcctgactggcccagagggacttttggccaaagaacgagagaacttaaagcgattaaaatgtctgcgacgataccgccagcgctatggagtggaagccttactgcataggcagttgaaggaacggagaatgctggccacagatggtgctgcccaacaggcccataccactcgttccagtcagaggtgcttggcctttgtggatgatgttcgttgttccaatcagtctcttccaatgaccagacactgccttacccatatttgtcaggatacgaatcaggttctcttcaagtgctgccagggatctgaagaggtaccctgcaacaaacctgttcctgtaagcctctctgaggatccctgctgcccactgcatttccagttgcctcctcagatgtataagcccgagcaggtactgtctgtgccagacgatctggaagccggccccatggatctgtacttgagtgctgctgagcttcagcccactgagagtttacctctggagttcagtgatgacttggatgttgtgggtgatggtatgcagtgtcctccttcacctttgctttttgatccttcactaacccttgaagatcatttagtcaaagaaattgctgaagacccagtggatattttgggccagatgcagatggctggagatgggtgcagatcccagggatctcgaaattctgagaaagcctctgcaccattgtctcagagtggattggctactgcaaatgggaagccagaacccacttctattagttgatagtttggggaaccattttactttggtggatttaaatttctcgttcttcaaagaagtatttctgatcatctctcacaaaacacaggcaacccagactaccttgtttttcttctggattgagtattatagtcaaacgtaaagccaaattttgaggacgtggaccgtgggtttcttcccactcagggcaaggaagagaaagagagataatccctatcaaagcttctgggattatttgggactatacctaaaaggaaagtgacatctttgtaatgggatttcccaagtcatggatagaaatccacttaagtagctaggtgggagctgtctttgtgagtggtgtctttgagatactgatggccctaatatcggttatctctatctgaagacctgcagtttagcttttcttcacctctacttaattgggcagtctttaacccctttccctggtgaactctggctttttatcctctgagaaaacagcccacaggactgggtcctccttatccgtcttgcttttaacctatgtaaatttctgtggttgctatcttatgtaaaatatagtaaaaatttattgtatatagtttctattaaatgttaaagaaaatgttatgaaaatatcaaacagtca

SEQ ID NO: 145071 - DNA, 343 bp, Homo sapiens
  Payload ID: 8665
  Gene Symbol: KANSL2
  Gene Name: KAT8 regulatory NSL complex subunit 2
  ENST ID: ENST00000548304
  CDS Start-End: 135-343
cggcagagtgcggcgcagcgcagctcctgaggcttccaggagccaggatctccggtgactggagccgtaggacaaaatggcgctcgcataggcttccgaggccaggcccagtcgtgcgctctgaggttttggttatgaacaggattcggattcacgtcttgccaaccaatcgggggaggatcactccagtgcccaggtctcaggaacctctgtcttgtgcattcactcatcgtccatgctctcaccctcgtctggaggggcaggagttttgcattaagcatatccttgaagacaagaatgcacccttcaagcagtgtagttatatatcgacgaagaatggaaa

SEQ ID NO: 145072 - DNA, 1514 bp, Homo sapiens
  Payload ID: 8665
  Gene Symbol: KANSL2
  Gene Name: KAT8 regulatory NSL complex subunit 2
  ENST ID: ENST00000548147
  CDS Start-End: 1-77
ctccagaaagtagtcgcagtgaagccagccgaatactagacatgctggtgtctacacagcagaagaagtggccctgattatgcgtgaaaagctaattcgtttgcagtcgttgtatattgatcagtttaaacgacttcagcatctgctcaaggagaagaagcgccgatacttacataatcgcaaagtggaacatgaagctctaggcagtagtctcctgactggcccagagggacttttggccaaagaacgagagaacttaaagcgattaaaatgtctgcgacgataccgccagcgctatggagtggaagccttactgcataggcagttgaaggaacggagaatgctggccacagatggtgctgcccaacaggcccataccactcgttccagtcagaggtgcttggcctttgtggatgatgttcgttgttccaatcagtctcttccaatgaccagacactgccttacccatatttgtcaggatacgaatcaggttctcttcaagtgctgccagggatctgaagaggtaccctgcaacaaacctgttcctgtaagcctctctgaggatccctgctgcccactgcatttccagttgcctcctcagatgtataagcccgagcaggacttggatgttgtgggtgatggtatgcagtgtcctccttcacctttgctttttgatccttcactaacccttgaagatcatttagtcaaagaaattgctgaagacccagtggatattttgggccagatgcagatggctggagatgggtgcagatcccagggatctcgaaattctgagaaagcctctgcaccattgtctcagagtggattggctactgcaaatgggaagccagaacccacttctattagttgatagtttggggaaccattttactttggtggatttaaatttctcgttcttcaaagaagtatttctgatcatctctcacaaaacacaggcaacccagactaccttgtttttcttctggattgagtattatagtcaaacgtaaagccaaattttgaggacgtggaccgtgggtttcttcccactcagggcaaggaagagaaagagagataatccctatcaaagcttctgggattatttgggactatacctaaaaggaaagtgacatctttgtaatgggatttcccaagtcatggatagaaatccacttaagtagctaggtgggagctgtctttgtgagtggtgtctttgagatactgatggccctaatatcggttatctctatctgaagacctgcagtttagcttttcttcacctctacttaattgggcagtctttaacccctttccctggtgaactctggctttttatcctctgagaaaacagcccacaggactgggtcctccttatccgtcttgcttttaacctatgtaaatttctgtggttgctatcttatgtaaaatatagtaaaaatttattgtatatagtttctattaaatgttaaagaaaatgttatgaaaatatcaaacagtcacctgaattgaatgca

SEQ ID NO: 145073 - DNA, 831 bp, Homo sapiens
  Payload ID: 8665
  Gene Symbol: KANSL2
  Gene Name: KAT8 regulatory NSL complex subunit 2
  ENST ID: ENST00000547087
  CDS Start-End: 1-621
gagaacttaaagcgattaaaatgtctgcgacgataccgccagcgctatggagtggaagccttactgcataggcagttgaaggaacggagaatgctggccacagatggtgctgcccaacaggcccataccactcgttccagtcagaggtgcttggcctttgtggatgatgttcgttgttccaatcagtctcttccaatgaccagacactgccttacccatatttgtcaggatacgaatcaggttctcttcaagtgctgccagggatctgaagaggtaccctgcaacaaacctgttcctgtaagcctctctgaggatccctgctgcccactgcatttccagttgcctcctcagatgtataagcccgagcaggacttggatgttgtgggtgatggtatgcagtgtcctccttcacctttgctttttgatccttcactaacccttgaagatcatttagtcaaagaaattgctgaagacccagtggatattttgggccagatgcagatggctggagatgggtgcagatcccagggatctcgaaattctgagaaagcctctgcaccattgtctcagagtggattggctactgcaaatgggaagccagaacccacttctattagttgatagtttggggaaccattttactttggtggatttaaatttctcgttcttcaaagaagtatttctgatcatctctcacaaaacacaggcaacccagactaccttgtttttcttctggattgagtattatagtcaaacgtaaagccaaattttgaggacgtggaccgtgggtttcttcccactcagggcaaggaagagaaagagagataatcc

SEQ ID NO: 145074 - DNA, 461 bp, Homo sapiens
  Payload ID: 8665
  Gene Symbol: KANSL2
  Gene Name: KAT8 regulatory NSL complex subunit 2
  ENST ID: ENST00000550931
  CDS Start-End: 62-461
actagagaagggcgagcggcgcggcagagtgcggcgcagcgcagctcctgaggttttggttatgaacaggattcggattcacgtcttgccaaccaatcgggggaggatcactccagtgcccagggtgtccttctgtgctgaacatgtccgtaggaatgccctggcacttcatgctcaaatgaagaagaccaacccagggcctgtgggtgaaacactcctgtgccagctgagctcatatgctaagacagagctggggtctcagactccagaaagtagtcgcagtgaagccagccgaatactagatgaagacagctggagtgatggggagcaggaacccattactgtggatcagacatggagaggtgaccctgacagtgaagctgatagcatagacagtgatcaagaagatcccctaaaacatgctggtgtctacacagcagaagaagtggccctgattatgc

SEQ ID NO: 145075 - DNA, 1881 bp, Homo sapiens
  Payload ID: 8665
  Gene Symbol: KANSL2
  Gene Name: KAT8 regulatory NSL complex subunit 2
  Uniprot ID: Q9H9L4
  ENST ID: ENST00000546701
  CDS Start-End: 35-502
agtgcggcgcagcgcagctcctgaggttttggttatgaacaggattcggattcacgtcttgccaaccaatcgggggaggatcactccagtgcccaggtctcaggaacctctgtcttgtgcattcactcatcgtccatgctctcaccctcgtctggaggggcaggagttttgcattaagcatatccttgaagacaagaatgcacccttcaagcagtgtagttatatatcgacgaagaatggaaaaagatgtcccaatgctgccccaaagccagagaagaaagatggggtgtccttctgtgctgaacatgtccgtaggaatgccctggcacttcatgctcaaatgaagaagaccaacccagggcctgtgggtgaaacactcctgtgccagctgagctcatatgctaagacagagctggggtctcagactccagaaagtagtcgcagtgaagccagccgaatactagacatgctggtgtctacacagcagaagaagtggccctgattatgcgtgaaaagctaattcgtttgcagtcgttgtatattgatcagtttaaacgacttcagcatctgctcaaggagaagaagcgccgatacttacataatcgcaaagtggaacatgaagctctaggcagtagtctcctgactggcccagagggacttttggccaaagaacgagagaacttaaagcgattaaaatgtctgcgacgataccgccagcgctatggagtggaagccttactgcataggcagttgaaggaacggagaatgctggccacagatggtgctgcccaacaggcccataccactcgttccagtcagaggtgcttggcctttgtggatgatgttcgttgttccaatcagtctcttccaatgaccagacactgccttacccagaaagatgcgactgccattggtgacctgttaactctttactgtggtctaatggagacagcactcgactgaaagtgaaggacccagactctagttgacttggatgttgtgggtgatggtatgcagtgtcctccttcacctttgctttttgatccttcactaacccttgaagatcatttagtcaaagaaattgctgaagacccagtggatattttgggccagatgcagatggctggagatgggtgcagatcccagggatctcgaaattctgagaaagcctctgcaccattgtctcagagtggattggctactgcaaatgggaagccagaacccacttctattagttgatagtttggggaaccattttactttggtggatttaaatttctcgttcttcaaagaagtatttctgatcatctctcacaaaacacaggcaacccagactaccttgtttttcttctggattgagtattatagtcaaacgtaaagccaaattttgaggacgtggaccgtgggtttcttcccactcagggcaaggaagagaaagagagataatccctatcaaagcttctgggattatttgggactatacctaaaaggaaagtgacatctttgtaatgggatttcccaagtcatggatagaaatccacttaagtagctaggtgggagctgtctttgtgagtggtgtctttgagatactgatggccctaatatcggttatctctatctgaagacctgcagtttagcttttcttcacctctacttaattgggcagtctttaacccctttccctggtgaactctggctttttatcctctgagaaaacagcccacaggactgggtcctccttatccgtcttgcttttaacctatgtaaatttctgtggttgctatcttatgtaaaatatagtaaaaatttattgtatatagtttctattaaatgttaaagaaaatgttatgaaaatatcaaacagtcacctgaattgaatgc

SEQ ID NO: 145076 - DNA, 593 bp, Homo sapiens
  Payload ID: 8665
  Gene Symbol: KANSL2
  Gene Name: KAT8 regulatory NSL complex subunit 2
  ENST ID: ENST00000550870
  CDS Start-End: 270-593
actagagaagggcgagcggcgcggcagagtgcggcgcagcgcagctcctgaggcttccaggagccaggatctccggtgactggagccgtaggacaaaatggcgctcgcataggcttccgaggccaggcccagtcgtgcgctctgaggcaggccgggacaaaggcggcgtgcggggaggcggcgtggccgccgcgtggggctggtgttgtcgcttcccttcgtgctgcagctgtgcgagtcctgaagatacattcagcgtggttttggttatgaacaggattcggattcacgtcttgccaaccaatcgggggaggatcactccagtgcccaggtctcaggaacctctgtcttgtgcattcactcatcgtccatgctctcaccctcgtctggaggggcaggagttttgcattaagcatatccttgaagacaagaatgcacccttcaagcagtgtagttatatatcgacgaagaatggaaaaagatgtcccaatgctgccccaaagccagagaagaaagatggggtgtccttctgtgctgaacatgtccgtaggaatgccctggcacttcatgctcaaatgaagaagaccaaccca

SEQ ID NO: 145077 - DNA, 1830 bp, Homo sapiens
  Payload ID: 8665
  Gene Symbol: KANSL2
  Gene Name: KAT8 regulatory NSL complex subunit 2
  ENST ID: ENST00000553086
  CDS Start-End: 311-1675
ctcttgcggttgggctgctatttcgctctttttgtcagctcagagctgctactccgcctcaaagcagtgtcagagtcagtctccttcctgcaggcttccaggagccaggatctccggtgactggagccgtaggacaaaatggcgctcgcataggcttccgaggccaggcccagtcgtgcgctctgaggcaggccgggacaaaggcggcgtgcggggaggcggcgtggccgccgcgtggggctggtgttgtcgcttcccttcgtgctgcagctgtgcgagtcctgaagatacattcagcgtggttttggttatgaacaggattcggattcacgtcttgccaaccaatcgggggaggatcactccagtgcccaggtctcaggaacctctgtcttgtgcattcactcatcgtccatgctctcaccctcgtctggaggggcaggagttttgcattaagcatatccttgaagacaagaatgcacccttcaagcagtgtagttatatatcgacgaagaatggaaaaagatgtcccaatgctgccccaaagccagagaagaaagatggggtgtccttctgtgctgaacatgtccgtaggaatgccctggcacttcatgctcaaatgaagaagaccaacccagggcctgtgggtgaaacactcctgtgccagctgagctcatatgctaagacagagctggggtctcagactccagaaagtagtcgcagtgaagccagccgaatactagatgaagacagctggagtgatggggagcaggaacccattactgtggatcagacatggagaggtgaccctgacagtgaagctgatagcatagacagtgatcaagaagatcccctaaaacatgctggtgtctacacagcagaagaagtggccctgattatgcgtgaaaagctaattcgtttgcagtcgttgtatattgatcagtttaaacgacttcagcatctgctcaaggagaagaagcgccgatacttacataatcgcaaagtggaacatgaagctctaggcagtagtctcctgactggcccagagggacttttggccaaagaacgagagaacttaaagcgattaaaatgtctgcgacgataccgccagcgctatggagtggaagccttactgcataggcagttgaaggaacggagaatgctggccacagatggtgctgcccaacaggcccataccactcgttccagtcagaggtgcttggcctttgtggatgatgttcgttgttccaatcagtctcttccaatgaccagacactgccttacccatatttgtcaggatacgaatcaggttctcttcaagtgctgccagggatctgaagaggtaccctgcaacaaacctgttcctgtaagcctctctgaggatccctgctgcccactgcatttccagttgcctcctcagatgtataagcccgagcaggacttggatgttgtgggtgatggtatgcagtgtcctccttcacctttgctttttgatccttcactaacccttgaagatcatttagtcaaagaaattgctgaagacccaggccagatgcagatggctggagatgggtgcagatcccagggatctcgaaattctgagaaagcctctgcaccattgtctcagagtggattggctactgcaaatgggaagccagaacccacttctattagttgatagtttggggaaccattttactttggtggatttaaatttctcgttcttcaaagaagtatttctgatcatctctcacaaaacacaggcaacccagactaccttgtttttcttctggattgagtattatagtcaaacgtaaagccaaattttgagga

SEQ ID NO: 145078 - DNA, 581 bp, Homo sapiens
  Payload ID: 8665
  Gene Symbol: KANSL2
  Gene Name: KAT8 regulatory NSL complex subunit 2
  ENST ID: ENST00000547582
  CDS Start-End: 1-225
cccaatgctgccccaaagccagagaagaaagatggggtgtccttctgtgctgaacatgtccgtaggaatgccctggcacttcatgctcaaatgaagaagaccaacccagggcctgtgggtgaaacactcctgtgccagctgagctcatatgctaagacagagctggggtctcagactccagaaagtagtcgcagtgaagccagccgaatactaggtttgggttgataaaagtaatctagttttgtgtggtggagttacagaggtgggaagtcttaatggctgctctcccttccttgcctcagatgaagacagctggagtgatggggagcaggaacccattactgtggatcagacatggagaggtgaccctgacagtgaagctgatagcatagacagtgatcaagaagatcccctaaaacatgctggtgtctacacagcagaagaagtggccctgattatgcgtgaaaagctaattcgtttgcagtcgttgtatattgatcagtttaaacgacttcagcatctgctcaaggagaagaagcgccgatacttacataatcgcaaagtggaacatgaagctctag

SEQ ID NO: 145079 - DNA, 2714 bp, Homo sapiens
  Payload ID: 8665
  Gene Symbol: KANSL2
  Gene Name: KAT8 regulatory NSL complex subunit 2
  ENST ID: ENST00000550347
  CDS Start-End: 45-2072
gagcggcgcggcagagtgcggcgcagcgcagctcctgaggtaagatggcggtgctctttcctctaagctcttgcggttgggctgctatttcgctctttttgtcagctcagagctgctactccgcctcaaagcagtgtcagagtcagtctccttcctgcaggcttccaggagccaggatctccggtgactggagccgtaggacaaaatggcgctcgcataggcttccgaggccaggcccagtcgtgcgctctgaggcaggccgggacaaaggcggcgtgcggggaggcggcgtggccgccgcgtggggctggtgttgtcgcttcccttcgtgctgcagctgtgcgagtcctgaagatacattcagcgtggtgtggttcggggtggggccgggcatggagggacacgctaaagggaggcaaagccacagatgcctgtggagacttggggagggcggcggggacttacggagcgtaccttacggggacgacttctgcatgtcctttggaaactgtccgcgcgatctgtgtggagcaggaattttcgggaagggtaagggctttttggtctttcgtttgaccccgcaggttttggttatgaacaggattcggattcacgtcttgccaaccaatcgggggaggatcactccagtgcccaggtctcaggaacctctgtcttgtgcattcactcatcgtccatgctctcaccctcgtctggaggggcaggagttttgcattaagcatatccttgaagacaagaatgcacccttcaagcagtgtagttatatatcgacgaagaatggaaaaagatgtcccaatgctgccccaaagccagagaagaaagatggggtgtccttctgtgctgaacatgtccgtaggaatgccctggcacttcatgctcaaatgaagaagaccaacccagggcctgtgggtgaaacactcctgtgccagctgagctcatatgctaagacagagctggggtctcagactccagaaagtagtcgcagtgaagccagccgaatactagatgaagacagctggagtgatggggagcaggaacccattactgtggatcagacatggagaggtgaccctgacagtgaagctgatagcatagacagtgatcaagaagatcccctaaaacatgctggtgtctacacagcagaagaagtggccctgattatgcgtgaaaagctaattcgtttgcagtcgttgtatattgatcagtttaaacgacttcagcatctgctcaaggagaagaagcgccgatacttacataatcgcaaagtggaacatgaagctctaggcagtagtctcctgactggcccagagggacttttggccaaagaacgagagaacttaaagcgattaaaatgtctgcgacgataccgccagcgctatggagtggaagccttactgcataggcagttgaaggaacggagaatgctggccacagatggtgctgcccaacaggcccataccactcgttccagtcagaggtgcttggcctttgtggatgatgttcgttgttccaatcagtctcttccaatgaccagacactgccttacccatatttgtcaggatacgaatcaggttctcttcaagtgctgccagggatctgaagaggtaccctgcaacaaacctgttcctgtaagcctctctgaggatccctgctgcccactgcatttccagttgcctcctcagatgtataagcccgagcaggtactgtctgtgccagacgatctggaagccggccccatggatctgtacttgagtgctgctgagcttcagcccactgagagtttacctctggagttcagtgatgacttggatgttgtgggtgatggtatgcagtgtcctccttcacctttgctttttgatccttcactaacccttgaagatcatttagtcaaagaaattgctgaagacccagtggatattttgggccagatgcagatggctggagatgggtgcagatcccagggatctcgaaattctgagaaagcctctgcaccattgtctcagagtggattggctactgcaaatgggaagccagaacccacttctattagttgatagtttggggaaccattttactttggtggatttaaatttctcgttcttcaaagaagtatttctgatcatctctcacaaaacacaggcaacccagactaccttgtttttcttctggattgagtattatagtcaaacgtaaagccaaattttgaggacgtggaccgtgggtttcttcccactcagggcaaggaagagaaagagagataatccctatcaaagcttctgggattatttgggactatacctaaaaggaaagtgacatctttgtaatgggatttcccaagtcatggatagaaatccacttaagtagctaggtgggagctgtctttgtgagtggtgtctttgagatactgatggccctaatatcggttatctctatctgaagacctgcagtttagcttttcttcacctctacttaattgggcagtctttaacccctttccctggtgaactctggctttttatcctctgagaaaacagcccacaggactgggtcctccttatccgtcttgcttttaacctatgtaaatttctgtggttgctatcttatgtaaaatatagtaaaaatttattgtatatagtttctattaaatgttaaagaaaatgttatgaaaatatcaaacagtcacctgaattgaatgc

SEQ ID NO: 145080 - DNA, 1625 bp, Homo sapiens
  Payload ID: 8665
  Gene Symbol: KANSL2
  Gene Name: KAT8 regulatory NSL complex subunit 2
  ENST ID: ENST00000549574
  CDS Start-End: 1-1022
tcttgccaaccaatcgggggaggatcactccagtgcccaggtctcaggaacctctgtcttgtgcattcactcatcgtccatgctctcaccctcgtctggaggggcaggagttttgcattaagcatatccttgaagacaagaatgcacccttcaagcagtgtagttatatatcgacgaagaatggaaaaagatgtcccaatgctgccccaaagccagagaagaaagatggggtgtccttctgtgctgaacatgtccgtaggaatgccctggcacttcatgctcaaatgaagaagaccaacccagggcctgtgggtgaaacactcctgtgccagctgagctcatatgctaagacagagctggggtctcagactccagaaagtagtcgcagtgaagccagccgaatactagatgaagacagctggagtgatggggagcaggaacccattactgtggatcagacatggagaggtgaccctgacagtgaagctgatagcatagacagtgatcaagaagatcccctaaaacatgctggtgtctacacagcagaagaagtggccctgattatgcgtgaaaagctaattcgtttgcagtcgttgtatattgatcagtttaaacgacttcagcatctgctcaaggagaagaagcgccgatacttacataatcgcaaagtggaacatgaagctctaggcagtagtctcctgactggcccagagggacttttggccaaagaacgagagaacttaaagcgattaaaatgtctgcgacgataccgccagcgctatggagtggaagccttactgcataggcagttgaaggaacggagaatgctggccacagatggtgctgcccaacaggcccataccactcgttccagtcagaggtgcttggcctttgtggatgatgttcgttgttccaatcagtctcttccaatgaccagacactgccttacccagaaagatgcgactgccattggtgacctgttaactctttactgtggtctaatggagacagcactcgactgaaagtgaaggacccagactctagttatatttgtcaggatacgaatcaggttctcttcaagtgctgccagggatctgaagaggtaccctgcaacaaacctgttcctgtaagcctctctgaggatccctgctgcccactgcatttccagttgcctcctcagatgtataagcccgagcaggacttggatgttgtgggtgatggtatgcagtgtcctccttcacctttgctttttgatccttcactaacccttgaagatcatttagtcaaagaaattgctgaagacccagtggatattttgggccagatgcagatggctggagatgggtgcagatcccagggatctcgaaattctgagaaagcctctgcaccattgtctcagagtggattggctactgcaaatgggaagccagaacccacttctattagttgatagtttggggaaccattttactttggtggatttaaatttctcgttcttcaaagaagtatttctgatcatctctcacaaaacacaggcaacccagactaccttgtttttcttctggattgagtattatagtcaaacgtaaagccaaattttgaggacgtggaccgtgggtttcttc

SEQ ID NO: 145081 - DNA, 5253 bp, Homo sapiens
  Payload ID: 8666
  Gene Symbol: KANSL3
  Gene Name: KAT8 regulatory NSL complex subunit 3
  ENST ID: ENST00000354204
  CDS Start-End: 115-333
aggcgttaacgcgcacgcgcttagggatccggccgtggccgagcgcgcggccgtaagaccgcgggtgactagcatgcagatacccatgctctgactttctgcccctccactgacatggcccaccggggtggggagagggacttccagacttcagctcgacgcatgggcacctcgctgctcttccagctttcagtgcatgaacgggagctggacctggtttttctggatcatagctatgccaagccttggagtgcccacccagatgccagtagtgcccgccccacccgcatgctctttgtcactccccggcggcagcacgaaagtaccatatgattgttaaatacctgtgaagtatgtgtggcccggtcctatttcctcacctgtttacagtgaatcagacgtcccaatagatgtggagacggtcacatcaacgcctatgccactctatgacaatcagaaggcacgcagcgtgatgaatgagtgtgaacggcatgtcatctttgccaggactgatgcagatgcccctcctccaccagaggactgggaggagcatgtcaacaggactggctggacaatggcccagaacaagctattcaacaagatcctcaaagccctgcagtctgaccggcttgcccgcttggccaacgaaggggcttgtaatgagccagtgctgcgccgtgttgctgtggacaagtgtgcaaggagagtgcggcaggctctggcaagtgtgagctgggataccaagctgatccagtggctgcacaccacccttgtggagaccttgagtctgcccatgctggcagcctacctggatgctttgcagacgctgaaggggaagatcccaaccttgattgaccggatgcttgtgtcatccaacacaaagactggggctgcaggagctgaggccttgtctctcctactgaagaggccctgggaccctgctgtgggtgtgctttctcataacaaaccaagcaaactccctggctctccgctgattctcatcgcctcctctggtccctccagctctgtgtttcccacttcacgccgccaccgcttctggcaatctcagctgtcctgcttgggcaaggtcatccctgtagccacccatctgctgaacaatggcagtggggtaggagttctacagtgtctcgagcatatgattggggcagtgagaagcaaagtgctggagattcacagccatttcccacacaaacccattatcttgattggctggaacacaggagctttggtggcctgtcatgtgtcagtaatggagtatgtcactgcagttgtctgccttgggtttcctctgcttactgtggatggccccagaggggatgtagatgatcccctcttggatatgaagactccagtcctctttgtcattggtcagaattcccttcaatgtcaccctgaagccatggaggacttccgggagaagattcgagctgagaacagcttggtggtggttgggggagctgatgacaatctcagaataagcaaagcaaagaagaaatcagaagggttgactcagagcatggtggacagatgtattcaggatgagattgtggactttctgactggagtgctcactcgtgctgagggtcacatgggctctgaacctcgggatcaggatgctgagaagaagaagaagccccgcgatgtggcccgcagagacttggcctttgaagtccctgagcggggcagtcgacctgcctccccagctgccaagctgcccgcctcaccctcaggctcagaggatctctccagtgtgtccagcagccccacctccagtcccaagaccaaagtgaccacagtgacctctgcccagaagtccagtcagattggaagttctcagctgctgaagagacatgtgcagcggacagaagctgtgctgacccacaaacaagctcaagttcccatttcatcagaaccaccagaggaaggagagaaagaggatcttagggttcagctgaagcgacaccatccctcgagtccccttcctggcagtaagacctccaaacgaccgaagatcaaggtgtcccttatctcccaaggggacacagctggagggccttgtgctccttcccaaggaagtgctccagaagctgcaggtgggaagcccatcaccatgacactggggcaggcttcagcaggggccaaggagctcacaggacttctcaccacagccaagtccagttcttctgaaggtggagtctcagccagcccagtcccttcagtggtctccagcagcactgcacccagtgccttgcacacactgcagagccgcctggtggccacatctcctggcagctccctcccaggggccacatcagccagcagcctcctccaaggcctcagcttcagcttgcaggatatcagcagcaagacctctggccttccagcaaatccctccccaggaccagccccacaggccaccagtgtgaagttgcccacccccatgcagagcctgggtgccatcaccacgggcaccagcaccattgtccgtaccattcctgtggccaccactctctcctccttgggtgccactcctggtgggaagcccacagccatccaccagctgctgaccaatgggggcctcgctaagttggcaagcagcctccctggcctggctcagatctctaaccaagcatcaggcttgaaggtccccaccaccattactctgacacttcgtggccagccgagcaggatcactacactgagccctatgggctcaggagcagccccatccgaggagtcctcttcccaggtgctgccctccagctcacagcgcctgcctccagcaccctgaagatgctgtgtgatatgtcctccttaccaagttggtgatggctgcctcatggtgggccctggacaggtgtgtggtcctgctgagctgtccacgtgtcggaagacctgtttaagacagtcatttttgcctctccgccaactgtcttcagagaaaccattaggttaggtgatacggtgccagcaagggaagcaccatcgtccaggatctgcaaatctggttcctgggaaccccagactcctcagcagatctggctgtacatggatcagaaccacttcttcccccgcttaagctgtggtttgacccaagggtcagcatataggactgcctgctgcatttaatgaaggtgtttccttttggaagtctgtgctaccctctgcgcctagttgggaggagacatccatctggtctgggatttcgggagttagaatggaaagctctttgctaaagactggagtcatcctggcctgccaactggtggttcagagccggacgggcttgttttggacatcactgttgccttcactcagcagccacgggagagtgctccccatgcaactccaccttagaaaccacgtcagatactgagtagcttgctgactcctggaaacttctggtttttgttagtatcataatgaaggcaaagagaactaggctgtcatctttcagcctctttgacttactctagatgttgggagcagtggttgccaggtgaaacctgggccctttgtctttttcaccatgctttgggcagtttctgtatccagagagtccgcaggttcagataagctgaagaagagtaatagaacagcaaaggaagtggcttgaaggatgtgctagtaagccctgtggtttgtgcttaggtctctgctctgctacccaaggaactggtggttcagctggagataaaaagaagaatttgccaagtcagagaagaaaccccaaccccggaaaatcctctgtctccagtctctggaggtgaagcagggacaataagctaaggtagtatcttggccatcccaggaaacttgtggcattaggacgatgaaggccatgcttcagtgttttcgtttctatttcatgagactttttgtcttcctgcttacaagtgggaagatgattgacagtgactctactatgcagggctgttggtaccaacctgagccctataggtggcagtccctggagaagtggtcacagaagatggagctctgatcccctgcttacctcttcacaacacttgtgtgcaaagatagttttagatttggtttagaagctatcctccagaacaggctcccatacttagaatgtttctagttaaggtaataaattaggcaacccaagtgtgactccactcaagtgtccttttctgtaggcaggaagggcccacaacatggcttaaaatgtagtccatggttctggcccacagtacagtgtgtatctataccaggtcacctgtgttcaatctgggagccttcctggccagtctgagtggcagccagaagggagctcatagtgtctaggagtctcaggcaaggtaggtcagggtactgtgggcaggggggatgtgtgtgataggagagggtaccctaaaccccataccttccctccctgacctgaaaagctgatctcaacagggattcacacagaattaggctgtgtttttgcattagctggtaggtgactttctcaaaattcttaaattcagaaagtatttagtaaacttgaggaaggtatgaaatctggaggaggcatccaggacccaggggtttgatagctttacaggtaggatcataccacaccaaaagagcagtggacaataagactatatgagctatatgaagcttttaggaatcatttaggacagacagagccctaaacaacccattcatgacttaagttgttggctcagtgtatgctggggacaaagaaaaactaacaagccgacctgcctttatgataaattctagtgtgcttacaagggatgacttcctgaggtgtgatctgtccaccttgaagaactccacaactgaagaaggggagctgtgagaacgtggattgttctacaacttgcacagggtaacagaggaagtggctgaggcctagagtcacgttttccagttcccttcgcaaactatatttcttggaacgcgaaaggaagctttacctatttcatagaagacctggaatccataacctcagaaggcaatattattgatagaaaatgtggaaggatcaggaagttcttagattcttggatgacagatgcatgttgatgccctatggagatgtccttgtgttttgaggtcactgaggtaggaagacctgtctactcttggtttcaccactagaacagtcttgggctggatgggttatagagctgagcggctgtgatggttctgtttttacattaacaaaaacaattaaaaacaccaaaaacaaca

SEQ ID NO: 145082 - DNA, 5012 bp, Homo sapiens
  Payload ID: 8666
  Gene Symbol: KANSL3
  Gene Name: KAT8 regulatory NSL complex subunit 3
  ENST ID: ENST00000447759
  CDS Start-End: 1-282
agtgaatcagacgtcccaatagatgtggagacggtcacatcaacgcctatgccactctatgacaatcagaaggcacgcagcgtgatgaatgagtgtgaacggcatgtcatctttgccaggactgatgcagatgcccctcctccaccagaggactgggaggagcatgtcaacagggtctcactctgtcacccagactgcagtgcagtggcacgatctcagctcactacaagccttgacctccaggactcagtctccttgtggaccaccacccttctgttatgacattgccacattgccacagattgatgcttacacaccatctcttttggactggctggacaatggcccagaacaagctattcaacaagatcctcaaagccctgcagtctgaccggcttgcccgcttggccaacgaaggggcttgtaatgagccagtgctgcgccgtgttgctgtggacaagtgtgcaaggagagtgcggcaggctctggcaagtgtgagctgggataccaagctgatccagtggctgcacaccacccttgtggagaccttgagtctgcccatgctggcagcctacctggatgctttgcagacgctgaaggggaagatcccaaccttgattgaccggatgcttgtgtcatccaacacaaagactggggctgcaggagctgaggccttgtctctcctactgaagaggccctgggaccctgctgtgggtgtgctttctcataacaaaccaagcaaactccctggctctccgctgattctcatcgcctcctctggtccctccagctctgtgtttcccacttcacgccgccaccgcttctggcaatctcagctgtcctgcttgggcaaggtcatccctgtagccacccatctgctgaacaatggcagtggggtaggagttctacagtgtctcgagcatatgattggggcagtgagaagcaaagtgctggagattcacagccatttcccacacaaacccattatcttgattggctggaacacaggagctttggtggcctgtcatgtgtcagtaatggagtatgtcactgcagttgtctgccttgggtttcctctgcttactgtggatggccccagaggggatgtagatgatcccctcttggatatgaagactccagtcctctttgtcattggtcagaattcccttcaatgtcaccctgaagccatggaggacttccgggagaagattcgagctgagaacagcttggtggtggttgggggagctgatgacaatctcagaataagcaaagcaaagaagaaatcagaagggttgactcagagcatggtggacagatgtattcaggatgagattgtggactttctgactggagtgctcactcgtgctgagggtcacatgggctctgaacctcgggatcaggatgctgagaagaagaagaagccccgcgatgtggcccgcagagacttggcctttgaagtccctgagcggggcagtcgacctgcctccccagctgccaagctgcccgcctcaccctcaggctcagaggatctctccagtgtgtccagcagccccacctccagtcccaagaccaaagtgaccacagtgacctctgcccagaagtccagtcagattggaagttctcagctgctgaagagacatgtgcagcggacagaagctgtgctgacccacaaacaagctcaagttcccatttcatcagaaccaccagaggaaggagagaaagaggatcttagggttcagctgaagcgacaccatccctcgagtccccttcctggcagtaagacctccaaacgaccgaagatcaaggtgtcccttatctcccaaggggacacagctggagggccttgtgctccttcccaaggaagtgctccagaaggtgggaagcccatcaccatgacactggggcaggcttcagcaggggccaaggagctcacaggacttctcaccacagccaagtccagttcttctgaaggtggagtctcagccagcccagtcccttcagtggtctccagcagcactgcacccagtgccttgcacacactgcagagccgcctggtggccacatctcctggcagctccctcccaggggccacatcagccagcagcctcctccaaggcctcagcttcagcttgcaggatatcagcagcaagacctctggccttccagcaaatccctccccaggaccagccccacaggccaccagtgtgaagttgcccacccccatgcagagcctgggtgccatcaccacgggcaccagcaccattgtccgtaccattcctgtggccaccactctctcctccttgggtgccactcctggtgggaagcccacagccatccaccagctgctgaccaatgggggcctcgctaagttggcaagcagcctccctggcctggctcagatctctaaccaagcatcaggcttgaaggtccccaccaccattactctgacacttcgtggccagccgagcaggatcactacactgagccctatgggctcaggagcagccccatccgaggagtcctcttcccaggtgctgccctccagctcacagcgcctgcctccagcaccctgaagatgctgtgtgatatgtcctccttaccaagttggtgatggctgcctcatggtgggccctggacaggtgtgtggtcctgctgagctgtccacgtgtcggaagacctgtttaagacagtcatttttgcctctccgccaactgtcttcagagaaaccattaggttaggtgatacggtgccagcaagggaagcaccatcgtccaggatctgcaaatctggttcctgggaaccccagactcctcagcagatctggctgtacatggatcagaaccacttcttcccccgcttaagctgtggtttgacccaagggtcagcatataggactgcctgctgcatttaatgaaggtgtttccttttggaagtctgtgctaccctctgcgcctagttgggaggagacatccatctggtctgggatttcgggagttagaatggaaagctctttgctaaagactggagtcatcctggcctgccaactggtggttcagagccggacgggcttgttttggacatcactgttgccttcactcagcagccacgggagagtgctccccatgcaactccaccttagaaaccacgtcagatactgagtagcttgctgactcctggaaacttctggtttttgttagtatcataatgaaggcaaagagaactaggctgtcatctttcagcctctttgacttactctagatgttgggagcagtggttgccaggtgaaacctgggccctttgtctttttcaccatgctttgggcagtttctgtatccagagagtccgcaggttcagataagctgaagaagagtaatagaacagcaaaggaagtggcttgaaggatgtgctagtaagccctgtggtttgtgcttaggtctctgctctgctacccaaggaactggtggttcagctggagataaaaagaagaatttgccaagtcagagaagaaaccccaaccccggaaaatcctctgtctccagtctctggaggtgaagcagggacaataagctaaggtagtatcttggccatcccaggaaacttgtggcattaggacgatgaaggccatgcttcagtgttttcgtttctatttcatgagactttttgtcttcctgcttacaagtgggaagatgattgacagtgactctactatgcagggctgttggtaccaacctgagccctataggtggcagtccctggagaagtggtcacagaagatggagctctgatcccctgcttacctcttcacaacacttgtgtgcaaagatagttttagatttggtttagaagctatcctccagaacaggctcccatacttagaatgtttctagttaaggtaataaattaggcaacccaagtgtgactccactcaagtgtccttttctgtaggcaggaagggcccacaacatggcttaaaatgtagtccatggttctggcccacagtacagtgtgtatctataccaggtcacctgtgttcaatctgggagccttcctggccagtctgagtggcagccagaagggagctcatagtgtctaggagtctcaggcaaggtaggtcagggtactgtgggcaggggggatgtgtgtgataggagagggtaccctaaaccccataccttccctccctgacctgaaaagctgatctcaacagggattcacacagaattaggctgtgtttttgcattagctggtaggtgactttctcaaaattcttaaattcagaaagtatttagtaaacttgaggaaggtatgaaatctggaggaggcatccaggacccaggggtttgatagctttacaggtaggatcataccacaccaaaagagcagtggacaataagactatatgagctatatgaagcttttaggaatcatttaggacagacagagccctaaacaacccattcatgacttaagttgttggctcagtgtatgctggggacaaagaaaaactaacaagccgacctgcctttatgataaattctagtgtgcttacaagggatgacttcctgaggtgtgatctgtccaccttgaagaactccacaactgaagaaggggagctgtgagaacgtggattgttctacaacttgcacagggtaacagaggaagtggctgaggcctagagtcacgttttccagttcccttcgcaaactatatttcttggaacgcgaaaggaagctttacctatttcatagaagacctggaatccataacctcagaaggcaatattattgatagaaaatgtggaaggatcaggaagttcttagattcttggatgacagatgcatgttgatgccctatggagatgtccttgtgttttgaggtcactgaggtaggaagacctgtctactcttggtttcaccactagaacagtcttgggctggatgggttatagagctgagcggctgtgatggttctgtttttacattaacaaaaacaattaaaaacaccaaaaacaa

SEQ ID NO: 145083 - DNA, 5153 bp, Homo sapiens
  Payload ID: 8666
  Gene Symbol: KANSL3
  Gene Name: KAT8 regulatory NSL complex subunit 3
  Uniprot ID: Q9P2N6
  ENST ID: ENST00000431828
  CDS Start-End: 78-2714
gccgagcgcgcggccgtaagaccgcgggtgactagcatgcagatacccatgctctgactttctgcccctccactgacatggcccaccggggtggggagagggacttccagacttcagctcgacgcatgggcacctcgctgctcttccagctttcagtgcatgaacgggagctggacctggtttttctggatcatagctatgccaagccttggagtgcccacccagatgccagtagtgcccgccccacccgcatgctctttgtcactccccggcggcagcacgaaagtaccattgaatcagacgtcccaatagatgtggagacggtcacatcaacgcctatgccactctatgacaatcagaaggcacgcagcgtgatgaatgagtgtgaacggcatgtcatctttgccaggactgatgcagatgcccctcctccaccagaggactgggaggagcatgtcaacaggactggctggacaatggcccagaacaagctattcaacaagatcctcaaagccctgcagtctgaccggcttgcccgcttggccaacgaaggggcttgtaatgagccagtgctgcgccgtgttgctgtggacaagtgtgcaaggagagtgcggcaggctctggcaagtgtgagctgggataccaagctgatccagtggctgcacaccacccttgtggagaccttgagtctgcccatgctggcagcctacctggatgctttgcagacgctgaaggggaagatcccaaccttgattgaccggatgcttgtgtcatccaacacaaagactggggctgcaggagctgaggccttgtctctcctactgaagaggccctgggaccctgctgtgggtgtgctttctcataacaaaccaagcaaactccctggctctccgctgattctcatcgcctcctctggtccctccagctctgtgtttcccacttcacgccgccaccgcttctggcaatctcagctgtcctgcttgggcaaggtcatccctgtagccacccatctgctgaacaatggcagtggggtaggagttctacagtgtctcgagcatatgattggggcagtgagaagcaaagtgctggagattcacagccatttcccacacaaacccattatcttgattggctggaacacaggagctttggtggcctgtcatgtgtcagtaatggagtatgtcactgcagttgtctgccttgggtttcctctgcttactgtggatggccccagaggggatgtagatgatcccctcttggatatgaagactccagtcctctttgtcattggtcagaattcccttcaatgtcaccctgaagccatggaggacttccgggagaagattcgagctgagaacagcttggtggtggttgggggagctgatgacaatctcagaataagcaaagcaaagaagaaatcagaagggttgactcagagcatggtggacagatgtattcaggatgagattgtggactttctgactggagtgctcactcgtgctgagggtcacatgggctctgaacctcgggatcaggatgctgagaagaagaagaagccccgcgatgtggcccgcagagacttggcctttgaagtccctgagcggggcagtcgacctgcctccccagctgccaagctgcccgcctcaccctcaggctcagaggatctctccagtgtgtccagcagccccacctccagtcccaagaccaaagtgaccacagtgacctctgcccagaagtccagtcagattggaagttctcagctgctgaagagacatgtgcagcggacagaagctgtgctgacccacaaacaagctcaagttcccatttcatcagaaccaccagaggaaggagagaaagaggatcttagggttcagctgaagcgacaccatccctcgagtccccttcctggcagtaagacctccaaacgaccgaagatcaaggtgtcccttatctcccaaggggacacagctggagggccttgtgctccttcccaaggaagtgctccagaagctgcaggtgggaagcccatcaccatgacactggggcaggcttcagcaggggccaaggagctcacaggacttctcaccacagccaagtccagttcttctgaaggtggagtctcagccagcccagtcccttcagtggtctccagcagcactgcacccagtgccttgcacacactgcagagccgcctggtggccacatctcctggcagctccctcccaggggccacatcagccagcagcctcctccaaggcctcagcttcagcttgcaggatatcagcagcaagacctctggccttccagcaaatccctccccaggaccagccccacaggccaccagtgtgaagttgcccacccccatgcagagcctgggtgccatcaccacgggcaccagcaccattgtccgtaccattcctgtggccaccactctctcctccttgggtgccactcctggtgggaagcccacagccatccaccagctgctgaccaatgggggcctcgctaagttggcaagcagcctccctggcctggctcagatctctaaccaagcatcaggcttgaaggtccccaccaccattactctgacacttcgtggccagccgagcaggatcactacactgagccctatgggctcaggagcagccccatccgaggagtcctcttcccaggtgctgccctccagctcacagcgcctgcctccagcaccctgaagatgctgtgtgatatgtcctccttaccaagttggtgatggctgcctcatggtgggccctggacaggtgtgtggtcctgctgagctgtccacgtgtcggaagacctgtttaagacagtcatttttgcctctccgccaactgtcttcagagaaaccattaggttaggtgatacggtgccagcaagggaagcaccatcgtccaggatctgcaaatctggttcctgggaaccccagactcctcagcagatctggctgtacatggatcagaaccacttcttcccccgcttaagctgtggtttgacccaagggtcagcatataggactgcctgctgcatttaatgaaggtgtttccttttggaagtctgtgctaccctctgcgcctagttgggaggagacatccatctggtctgggatttcgggagttagaatggaaagctctttgctaaagactggagtcatcctggcctgccaactggtggttcagagccggacgggcttgttttggacatcactgttgccttcactcagcagccacgggagagtgctccccatgcaactccaccttagaaaccacgtcagatactgagtagcttgctgactcctggaaacttctggtttttgttagtatcataatgaaggcaaagagaactaggctgtcatctttcagcctctttgacttactctagatgttgggagcagtggttgccaggtgaaacctgggccctttgtctttttcaccatgctttgggcagtttctgtatccagagagtccgcaggttcagataagctgaagaagagtaatagaacagcaaaggaagtggcttgaaggatgtgctagtaagccctgtggtttgtgcttaggtctctgctctgctacccaaggaactggtggttcagctggagataaaaagaagaatttgccaagtcagagaagaaaccccaaccccggaaaatcctctgtctccagtctctggaggtgaagcagggacaataagctaaggtagtatcttggccatcccaggaaacttgtggcattaggacgatgaaggccatgcttcagtgttttcgtttctatttcatgagactttttgtcttcctgcttacaagtgggaagatgattgacagtgactctactatgcagggctgttggtaccaacctgagccctataggtggcagtccctggagaagtggtcacagaagatggagctctgatcccctgcttacctcttcacaacacttgtgtgcaaagatagttttagatttggtttagaagctatcctccagaacaggctcccatacttagaatgtttctagttaaggtaataaattaggcaacccaagtgtgactccactcaagtgtccttttctgtaggcaggaagggcccacaacatggcttaaaatgtagtccatggttctggcccacagtacagtgtgtatctataccaggtcacctgtgttcaatctgggagccttcctggccagtctgagtggcagccagaagggagctcatagtgtctaggagtctcaggcaaggtaggtcagggtactgtgggcaggggggatgtgtgtgataggagagggtaccctaaaccccataccttccctccctgacctgaaaagctgatctcaacagggattcacacagaattaggctgtgtttttgcattagctggtaggtgactttctcaaaattcttaaattcagaaagtatttagtaaacttgaggaaggtatgaaatctggaggaggcatccaggacccaggggtttgatagctttacaggtaggatcataccacaccaaaagagcagtggacaataagactatatgagctatatgaagcttttaggaatcatttaggacagacagagccctaaacaacccattcatgacttaagttgttggctcagtgtatgctggggacaaagaaaaactaacaagccgacctgcctttatgataaattctagtgtgcttacaagggatgacttcctgaggtgtgatctgtccaccttgaagaactccacaactgaagaaggggagctgtgagaacgtggattgttctacaacttgcacagggtaacagaggaagtggctgaggcctagagtcacgttttccagttcccttcgcaaactatatttcttggaacgcgaaaggaagctttacctatttcatagaagacctggaatccataacctcagaaggcaatattattgatagaaaatgtggaaggatcaggaagttcttagattcttggatgacagatgcatgttgatgccctatggagatgtccttgtgttttgaggtcactgaggtaggaagacctgtctactcttggtttcaccactagaacagtcttgggctggatgggttatagagctgagcggctgtgatggttctgtttttacattaacaaaaacaattaaaaacaccaaaaacaa

SEQ ID NO: 145084 - DNA, 1448 bp, Homo sapiens
  Payload ID: 8666
  Gene Symbol: KANSL3
  Gene Name: KAT8 regulatory NSL complex subunit 3
  ENST ID: ENST00000452268
  CDS Start-End: 100-330
cgcgcttagggatccggccgtggccgagcgcgcggccgtaagaccgcgggtgactagcatgcagatacccatgctctgactttctgcccctccactgacatggcccaccggggtggggagagggacttccagacttcagctcgacgcatgggcacctcgctgctcttccagctttcagtgcatgaacgggagctggacctggtttttctggatcatagctatgccaagccttggagtgcccacccagatgccagtagtgcccgccccacccgcatgctctttgtcactccccggcggcagcacgaaagtaccatgctctgtacaaaatgagctaagtagctaagtgaatcagacgtcccaatagatgtggagacggtcacatcaacgcctatgccactctatgacaatcagaaggcacgcagcgtgatgaatgagtgtgaacggcatgtcatctttgccaggactgatgcagatgcccctcctccaccagaggactgggaggagcatgtcaacaggactggctggacaatggcccagaacaagctattcaacaagatcctcaaagccctgcagtctgaccggcttgcccgcttggccaacgaaggggcttgtaatgagccagtgctgcgccgtgttgctgtggacaagtgtgcaaggagagtgcggcaggctctggcaagtgtgagctgggataccaagctgatccagtggctgcacaccacccttgtggagaccttgagtctgcccatgctggcagcctacctggatgctttgcagacgctgaaggggaagatcccaaccttgattgaccggatgcttgtgtcatccaacacaaagactggggctgcaggagctgaggccttgtctctcctactgaagaggccctgggaccctgctgtgggtgtgctttctcataacaaaccaagcaaactccctggctctccgctgattctcatcgcctcctctggtccctccagctctgtgtttcccacttcacgccgccaccgcttctggcaatctcagctgtcctgcttgggcaaggtcatccctgtagccacccatctgctgaacaatggcagtggggtaggagttctacagtgtctcgagcatatgattggggcagtgagaagcaaagtgctggagattcacagccatttcccacacaaacccattatcttgattggctggaacacaggagctttggtggcctgtcatgtgtcagtaatggagtatgtcactgcagttgtctgccttgggtttcctctgcttactgtggatggccccagaggggatgtagatgatcccctcttggatatgaagactccagtcctctttgtcattggtcagaattcccttcaatgtcaccctgaagccatggaggacttccgggagaagattcgagctgagaacagcttggtggtggttgggggagctgatgacaatctcag

SEQ ID NO: 145085 - DNA, 701 bp, Homo sapiens
  Payload ID: 8666
  Gene Symbol: KANSL3
  Gene Name: KAT8 regulatory NSL complex subunit 3
  ENST ID: ENST00000448075
  CDS Start-End: 184-701
agggatccggccgtggccgagcgcgcggccgtaagaccgcgggcttgtaatgagccagtgctgcgccgtgttgctgtggacaagtgtgcaaggagagtgcggcaggctctggcaagtgtgagctgggataccaagctgatccagtggctgcacaccacccttgtggagaccttgagtctgcccatgctggcagcctacctggatgctttgcagacgctgaaggggaagatcccaaccttgattgaccggatgcttgtgtcatccaacacaaagactggggctgcaggagctgaggccttgtctctcctactgaagaggccctgggaccctgctgtgggtgtgctttctcataacaaaccaagcaaactccctggctctccgctgattctcatcgcctcctctggtccctccagctctgtgtttcccacttcacgccgccaccgcttctggcaatctcagctgtcctgcttgggcaaggtcatccctgtagccacccatctgctgaacaatggcagtggggtaggagttctacagtgtctcgagcatatgattggggcagtgagaagcaaagtgctggagattcacagccatttcccacacaaacccattatcttgattggctggaacacaggagctttggtggcctgtcatgtaagtaatttctatcttatttggaggttgtcctgggatggaataccact

SEQ ID NO: 145086 - DNA, 552 bp, Homo sapiens
  Payload ID: 8666
  Gene Symbol: KANSL3
  Gene Name: KAT8 regulatory NSL complex subunit 3
  ENST ID: ENST00000416138
  CDS Start-End: 143-370
actcggtgcccgcagcgccggggcgtggaggcgttaacgcgcacgcgcttagggatccggccgtggccgagcgcgcggccgtaagaccgcgggtgactagcatgcagatacccatgctctgactttctgcccctccactgacatggcccaccggggtggggagagggacttccagacttcagctcgacgcatgggcacctcgctgctcttccagctttcagtgcatgaacgggagctggacctggtttttctggatcatagctatgccaagccttggagtgcccacccagatgccagtagtgcccgccccacccgcatgctctttgtcactccccggcggcagcacgaaagtaccatatcccaaccttgattgaccggatgcttgtgtcatccaacacaaagactggggctgcaggagctgaggccttgtctctcctactgaagaggccctgggaccctgctgtgggtgtgctttctcataacaaaccaagcaaactccctggctctccgctgattctcatcgcctcctctggtccctccagctctgtgttt

SEQ ID NO: 145087 - DNA, 1526 bp, Homo sapiens
  Payload ID: 8666
  Gene Symbol: KANSL3
  Gene Name: KAT8 regulatory NSL complex subunit 3
  ENST ID: ENST00000425656
  CDS Start-End: 94-312
ttaggatattggaattgacctaaactgaaacttttcactgcaggtgactagcatgcagatacccatgctctgactttctgcccctccactgacatggcccaccggggtggggagagggacttccagacttcagctcgacgcatgggcacctcgctgctcttccagctttcagtgcatgaacgggagctggacctggtttttctggatcatagctatgccaagccttggagtgcccacccagatgccagtagtgcccgccccacccgcatgctctttgtcactccccggcggcagcacgaaagtaccatatgattgttaaatacctgtgaagtatgtgtggcccggtcctatttcctcacctgtttacagtgaatcagacgtcccaatagatgtggagacggtcacatcaacgcctatgccactctatgacaatcagaaggcacgcagcgtgatgaatgagtgtgaacggcatgtcatctttgccaggactgatgcagatgcccctcctccaccagaggactgggaggagcatgtcaacaggactggctggacaatggcccagaacaagctattcaacaagatcctcaaagccctgcagtctgaccggcttgcccgcttggccaacgaaggggcttgtaatgagccagtgctgcgccgtgttgctgtggacaagtgtgcaaggagagtgcggcaggctctggcaagtgtgagctgggataccaagctgatccagtggctgcacaccacccttgtggagaccttgagtctgcccatgctggcagcctacctggatgctttgcagacgctgaaggggaaggtcattttgaccttttgtgggtagcatggaattcgcagatatttcttctcagtatcccaaccttgattgaccggatgcttgtgtcatccaacacaaagactggggctgcaggagctgaggccttgtctctcctactgaagaggccctgggaccctgctgtgggtgtgctttctcataacaaaccaagcaaactccctggctctccgctgattctcatcgcctcctctggtccctccagctctgtgtttcccacttcacgccgccaccgcttctggcaatctcagctgtcctgcttgggcaaggtcatccctgtagccacccatctgctgaacaatggcagtggggtaggagttctacagtgtctcgagcatatgattggggcagtgagaagcaaagtgctggagattcacagccatttcccacacaaacccattatcttgattggctggaacacaggagctttggtggcctgtcatgtgtcagtaatggagtatgtcactgcagttgtctgccttgggtttcctctgcttactgtggatggccccagaggggatgtagatgatcccctcttggatatgaagactccagtcctctttgtcattggtcagaattcccttcaatgtcaccctgaagccatggaggacttccgggagaagattcgagctgagaacagcttggtggtggttgggggagctgatgacaatctcag

SEQ ID NO: 145088 - DNA, 5028 bp, Homo sapiens
  Payload ID: 8666
  Gene Symbol: KANSL3
  Gene Name: KAT8 regulatory NSL complex subunit 3
  Uniprot ID: Q9P2N6
  ENST ID: ENST00000420155
  CDS Start-End: 100-2442
cgcgcttagggatccggccgtggccgagcgcgcggccgtaagaccgcgggtgactagcatgcagatacccatgctctgactttctgcccctccactgacatggcccaccggggtggggagagggacttccagacttcagctcgacgcatgggcacctcgctgctcttccagctttcagtgcatgaacgggagctggacctggtttttctggatcatagctatgccaagccttggagtgcccacccagatgccagtagtgcccgccccacccgcatgctctttgtcactccccggcggcagcacgaaagtaccattgaatcagacgtcccaatagatgtggagacggtcacatcaacgcctatgccactctatgacaatcagaaggcacgcagcgtgatgaatgagtgtgaacggcatgtcatctttgccaggactgatgcagatgcccctcctccaccagaggactgggaggagcatgtcaacaggactggctggacaatggcccagaacaagctattcaacaagatcctcaaagccctgcagtctgaccggcttgcccgcttggccaacgaaggggcttgtaatgagccagtgctgcgccgtgttgctgtggacaagtgtgcaaggagagtgcggcaggctctggcaagtgtgagctgggataccaagctgatccagtggctgcacaccacccttgtggagaccttgagtctgcccatgctggcagcctacctggatgctttgcagacgctgaaggggaagatcccaaccttgattgaccggatgcttgtgtcatccaacacaaagactggggctgcaggagctgaggccttgtctctcctactgaagaggccctgggaccctgctgtgggtgtgctttctcataacaaaccaagcaaactccctggctctccgctgattctcatcgcctcctctggtccctccagctctgtgtttcccacttcacgccgccaccgcttctggcaatctcagctgtcctgcttgggcaaggtcatccctgtagccacccatctgctgaacaatggcagtggggtaggagttctacagtgtctcgagcatatgattggggcagtgagaagcaaagtgctggagattcacagccatttcccacacaaacccattatcttgattggctggaacacaggagctttggtggcctgtcatgtgtcagtaatggagtatgtcactgcagttgtctgccttgggtttcctctgcttactgtggatggccccagaggggatgtagatgatcccctcttggatatgaagactccagtcctctttgtcattggtcagaattcccttcaatgtcaccctgaagccatggaggacttccgggagaagattcgagctgagaacagcttggtggtggttgggggagctgatgacaatctcagaataagcaaagcaaagaagaaatcagaagggttgactcagagcatggtggacagatgtattcaggatgagattgtggactttctgactggagtgctcactcgtgctgagggtcacatgggctctgaacctcgggatcaggatgctgagaagaagaagaagccccgcgatgtggcccgcagagacttggcctttgaagtccctgagcggggcagtcgacctgcctccccagctgccaagctgcccgcctcaccctcaggctcagaggatctctccagtgtgtccagcagccccacctccagtcccaagaccaaagtgaccacagtgacctctgcccagaagtccagtcagattggaagttctcagctgctgaagagacatgtgcagcggacagaagctgtgctgacccacaaacaagctcaagcacagtttgctgcttttctgaaacaaaatatgctggtgaggaaagctcttcctcctggcacctcctcctgtctctttgttcccatttcatcagaaccaccagaggaaggagagaaagaggatcttagggttcagctgaagcgacaccatccctcgagtccccttcctggcagtaagacctccaaacgaccgaagatcaaggtgtcccttatctcccaaggggacacagctggagggccttgtgctccttcccaaggaagtgctccagaagctgcaggtgggaagcccatcaccatgacactggggcaggcttcagcaggggccaaggagctcacaggacttctcaccacagccaagtccagttcttctgaaggtggagtctcagccagcccagtcccttcagtggtctccagcagcactgcacccagtgccttgcacacactgcagagccgcctggtggccacatctcctggcagctccctcccaggggccacatcagccagcagcctcctccaaggcctcagcttcagcttgcaggatatcagcagcaagacctctggccttccagcaaatccctccccaggaccagccccacaggcttgaaggtccccaccaccattactctgacacttcgtggccagccgagcaggatcactacactgagccctatgggctcaggagcagccccatccgaggagtcctcttcccaggtgctgccctccagctcacagcgcctgcctccagcaccctgaagatgctgtgtgatatgtcctccttaccaagttggtgatggctgcctcatggtgggccctggacaggtgtgtggtcctgctgagctgtccacgtgtcggaagacctgtttaagacagtcatttttgcctctccgccaactgtcttcagagaaaccattaggttaggtgatacggtgccagcaagggaagcaccatcgtccaggatctgcaaatctggttcctgggaaccccagactcctcagcagatctggctgtacatggatcagaaccacttcttcccccgcttaagctgtggtttgacccaagggtcagcatataggactgcctgctgcatttaatgaaggtgtttccttttggaagtctgtgctaccctctgcgcctagttgggaggagacatccatctggtctgggatttcgggagttagaatggaaagctctttgctaaagactggagtcatcctggcctgccaactggtggttcagagccggacgggcttgttttggacatcactgttgccttcactcagcagccacgggagagtgctccccatgcaactccaccttagaaaccacgtcagatactgagtagcttgctgactcctggaaacttctggtttttgttagtatcataatgaaggcaaagagaactaggctgtcatctttcagcctctttgacttactctagatgttgggagcagtggttgccaggtgaaacctgggccctttgtctttttcaccatgctttgggcagtttctgtatccagagagtccgcaggttcagataagctgaagaagagtaatagaacagcaaaggaagtggcttgaaggatgtgctagtaagccctgtggtttgtgcttaggtctctgctctgctacccaaggaactggtggttcagctggagataaaaagaagaatttgccaagtcagagaagaaaccccaaccccggaaaatcctctgtctccagtctctggaggtgaagcagggacaataagctaaggtagtatcttggccatcccaggaaacttgtggcattaggacgatgaaggccatgcttcagtgttttcgtttctatttcatgagactttttgtcttcctgcttacaagtgggaagatgattgacagtgactctactatgcagggctgttggtaccaacctgagccctataggtggcagtccctggagaagtggtcacagaagatggagctctgatcccctgcttacctcttcacaacacttgtgtgcaaagatagttttagatttggtttagaagctatcctccagaacaggctcccatacttagaatgtttctagttaaggtaataaattaggcaacccaagtgtgactccactcaagtgtccttttctgtaggcaggaagggcccacaacatggcttaaaatgtagtccatggttctggcccacagtacagtgtgtatctataccaggtcacctgtgttcaatctgggagccttcctggccagtctgagtggcagccagaagggagctcatagtgtctaggagtctcaggcaaggtaggtcagggtactgtgggcaggggggatgtgtgtgataggagagggtaccctaaaccccataccttccctccctgacctgaaaagctgatctcaacagggattcacacagaattaggctgtgtttttgcattagctggtaggtgactttctcaaaattcttaaattcagaaagtatttagtaaacttgaggaaggtatgaaatctggaggaggcatccaggacccaggggtttgatagctttacaggtaggatcataccacaccaaaagagcagtggacaataagactatatgagctatatgaagcttttaggaatcatttaggacagacagagccctaaacaacccattcatgacttaagttgttggctcagtgtatgctggggacaaagaaaaactaacaagccgacctgcctttatgataaattctagtgtgcttacaagggatgacttcctgaggtgtgatctgtccaccttgaagaactccacaactgaagaaggggagctgtgagaacgtggattgttctacaacttgcacagggtaacagaggaagtggctgaggcctagagtcacgttttccagttcccttcgcaaactatatttcttggaacgcgaaaggaagctttacctatttcatagaagacctggaatccataacctcagaaggcaatattattgatagaaaatgtggaaggatcaggaagttcttagattcttggatgacagatgcatgttgatgccctatggagatgtccttgtgttttgaggtcactgaggtaggaagacctgtctactcttggtttcaccactagaacagtcttgggctggatgggttatagagctgagcggctgtgatggttctgtttttacattaacaaaaacaattaaaaacaccaaaaac

SEQ ID NO: 145089 - DNA, 2717 bp, Homo sapiens
  Payload ID: 8666
  Gene Symbol: KANSL3
  Gene Name: KAT8 regulatory NSL complex subunit 3
  ENST ID: ENST00000444759
  CDS Start-End: 147-611
ttttactcggtgcccgcagcgccggggcgtggaggcgttaacgcgcacgcgcttagggatccggccgtggccgagcgcgcggccgtaagaccgcgggtgactagcatgcagatacccatgctctgactttctgcccctccactgacatggcccaccggggtggggagagggacttccagacttcagctcgacgcatgggcacctcgctgctcttccagctttcagtgcatgaacgggagctggacctggtttttctggatcatagctatgccaagccttggagtgcccacccagatgccagtagtgcccgccccacccgcatgctctttgtcactccccggcggcagcacgaaagtaccattgaatcagacgtcccaatagatgtggagacggtcacatcaacgcctatgccactctatgacaatcagaaggcacgcagcgtgatgaatgagtgtgaacggcatgtcatctttgccaggactgatgcagatgcccctcctccaccagaggactgggaggagcatgtcaacaggcttgtaatgagccagtgctgcgccgtgttgctgtggacaagtgtgcaaggagagtgcggcaggctctggcaagtgtgagctgggataccaagctgatccagtggctgcacaccacccttgtggagaccttgagtctgcccatgctggcagcctacctggatgctttgcagacgctgaaggggaagatcccaaccttgattgaccggatgcttgtgtcatccaacacaaagactggggctgcaggagctgaggccttgtctctcctactgaagaggccctgggaccctgctgtgggtgtgctttctcataacaaaccaagcaaactccctggctctccgctgattctcatcgcctcctctggtccctccagctctgtgtttcccacttcacgccgccaccgcttctggcaatctcagctgtcctgcttgggcaaggtcatccctgtagccacccatctgctgaacaatggcagtggggtaggagttctacagtgtctcgagcatatgattggggcagtgagaagcaaagtgctggagattcacagccatttcccacacaaacccattatcttgattggctggaacacaggagctttggtggcctgtcatgtgtcagtaatggagtatgtcactgcagttgtctgccttgggtttcctctgcttactgtggatggccccagaggggatgtagatgatcccctcttggatatgaagactccagtcctctttgtcattggtcagaattcccttcaatgtcaccctgaagccatggaggacttccgggagaagattcgagctgagaacagcttggtggtggttgggggagctgatgacaatctcagaataagcaaagcaaagaagaaatcagaagggttgactcagagcatggtggacagatgtattcaggatgagattgtggactttctgactggagtgctcactcgtgctgagggtcacatgggctctgaacctcgggatcaggatgctgagaagaagaagaagccccgcgatgtggcccgcagagacttggcctttgaagtccctgagcggggcagtcgacctgcctccccagctgccaagctgcccgcctcaccctcaggctcagaggatctctccagtgtgtccagcagccccacctccagtcccaagaccaaagtgaccacagtgacctctgcccagaagtccagtcagattggaagttctcagctgctgaagagacatgtgcagcggacagaagctgtgctgacccacaaacaagctcaagttcccatttcatcagaaccaccagaggaaggagagaaagaggatcttagggttcagctgaagcgacaccatccctcgagtccccttcctggcagtaagacctccaaacgaccgaagatcaaggtgtcccttatctcccaaggggacacagctggagggccttgtgctccttcccaaggaagtgctccagaagctgcaggtgggaagcccatcaccatgacactggggcaggcttcagcaggggccaaggagctcacaggacttctcaccacagccaagtccagttcttctgaaggtggagtctcagccagcccagtcccttcagtggtctccagcagcactgcacccagtgccttgcacacactgcagagccgcctggtggccacatctcctggcagctccctcccaggggccacatcagccagcagcctcctccaaggcctcagcttcagcttgcaggatatcagcagcaagacctctggccttccagcaaatccctccccaggaccagccccacaggccaccagtgtgaagttgcccacccccatgcagagcctgggtgccatcaccacgggcaccagcaccattgtccgtaccattcctgtggccaccactctctcctccttgggtgccactcctggtgggaagcccacagccatccaccagctgctgaccaatgggggcctcgctaagttggcaagcagcctccctggcctggctcagatctctaaccaagcatcaggcttgaaggtccccaccaccattactctgacacttcgtggccagccgagcaggatcactacactgagccctatgggctcaggagcagccccatccgaggagtcctcttcccaggtgctgccctccagctcacagcgcctgcctccagcaccctgaagatgctgtgtgatatgtcctcctt

SEQ ID NO: 145090 - DNA, 594 bp, Homo sapiens
  Payload ID: 8666
  Gene Symbol: KANSL3
  Gene Name: KAT8 regulatory NSL complex subunit 3
  ENST ID: ENST00000418735
  CDS Start-End: 92-295
ctttttggagctcctcagtccaagacttttcccagcgatcctgggtgaatcagacgtcccaatagatgtggagacggtcacatcaacgcctatgccactctatgacaatcagaaggcacgcagcgtgatgaatgagtgtgaacggcatgtcatctttgccaggactgatgcagatgcccctcctccaccagaggactgggaggagcatgtcaacaggcttgtaatgagccagtgctgcgccgtgttgctgtggacaagtgtgcaaggagagtgcggcaggctctggcaagtgtgagctgggataccaagctgatccagtggctgcacaccacccttgtggagaccttgagtctgcccatgctggcagcctacctggatgctttgcagacgctgaaggggaagatcccaaccttgattgaccggatgcttgtgtcatccaacacaaagactggggctgcaggagctgaggccttgtctctcctactgaagaggccctgggaccctgctgtgggtgtgctttctcataacaaaccaagcaaactccctggctctccgctgattctcatcgcctcctctggtccctccagctctgtg

SEQ ID NO: 145091 - DNA, 693 bp, Homo sapiens
  Payload ID: 8666
  Gene Symbol: KANSL3
  Gene Name: KAT8 regulatory NSL complex subunit 3
  ENST ID: ENST00000451819
  CDS Start-End: 58-456
actgcaggtgactagcatgcagatacccatgctctgactttctgcccctccactgacatggcccaccggggtggggagagggacttccagacttcagctcgacgcatgggcacctcgctgctcttccagctttcagtgcatgaacgggagctggacctggtttttctggatcatagctatgccaagccttggagtgcccacccagatgccagtagtgcccgccccacccgcatgctctttgtcactccccggcggcagcacgaaagtaccattgaatcagacgtcccaatagatgtggagacggtcacatcaacgcctatgccactctatgacaatcagaaggcacgcagcgtgatgaatgagtgtgaacggcatgtcatctttgccaggactgatgcagatgcccctcctccaccagaggactgggaggagcatgtcaacagatcccaaccttgattgaccggatgcttgtgtcatccaacacaaagactggggctgcaggagctgaggccttgtctctcctactgaagaggccctgggaccctgctgtgggtgtgctttctcataacaaaccaagcaaactccctggctctccgctgattctcatcgcctcctctggtccctccagctctgtgtttcccacttcacgccgccaccgcttctggcaatctcagctgtcctgcttgggcaagg

SEQ ID NO: 145092 - DNA, 2811 bp, Homo sapiens
  Payload ID: 8666
  Gene Symbol: KANSL3
  Gene Name: KAT8 regulatory NSL complex subunit 3
  ENST ID: ENST00000597150
  CDS Start-End: 89-553
atccggccgtggccgagcgcgcggccgtaagaccgcgggtgactagcatgcagatacccatgctctgactttctgcccctccactgacatggcccaccggggtggggagagggacttccagacttcagctcgacgcatgggcacctcgctgctcttccagctttcagtgcatgaacgggagctggacctggtttttctggatcatagctatgccaagccttggagtgcccacccagatgccagtagtgcccgccccacccgcatgctctttgtcactccccggcggcagcacgaaagtaccattgaatcagacgtcccaatagatgtggagacggtcacatcaacgcctatgccactctatgacaatcagaaggcacgcagcgtgatgaatgagtgtgaacggcatgtcatctttgccaggactgatgcagatgcccctcctccaccagaggactgggaggagcatgtcaacaggcttgtaatgagccagtgctgcgccgtgttgctgtggacaagtgtgcaaggagagtgcggcaggctctggcaagtgtgagctgggataccaagctgatccagtggctgcacaccacccttgtggagaccttgagtctgcccatgctggcagcctacctggatgctttgcagacgctgaaggggaagatcccaaccttgattgaccggatgcttgtgtcatccaacacaaagactggggctgcaggagctgaggccttgtctctcctactgaagaggccctgggaccctgctgtgggtgtgctttctcataacaaaccaagcaaactccctggctctccgctgattctcatcgcctcctctggtccctccagctctgtgtttcccacttcacgccgccaccgcttctggcaatctcagctgtcctgcttgggcaaggtcatccctgtagccacccatctgctgaacaatggcagtggggtaggagttctacagtgtctcgagcatatgattggggcagtgagaagcaaagtgctggagattcacagccatttcccacacaaacccattatcttgattggctggaacacaggagctttggtggcctgtcatgtgtcagtaatggagtatgtcactgcagttgtctgccttgggtttcctctgcttactgtggatggccccagaggggatgtagatgatcccctcttggatatgaagactccagtcctctttgtcattggtcagaattcccttcaatgtcaccctgaagccatggaggacttccgggagaagattcgagctgagaacagcttggtggtggttgggggagctgatgacaatctcagaataagcaaagcaaagaagaaatcagaagggttgactcagagcatggtggacagatgtattcaggatgagattgtggactttctgactggagtgctcactcgtgctgagggtcacatgggctctgaacctcgggatcaggatgctgagaagaagaagaagccccgcgatgtggcccgcagagacttggcctttgaagtccctgagcggggcagtcgacctgcctccccagctgccaagctgcccgcctcaccctcaggctcagaggatctctccagtgtgtccagcagccccacctccagtcccaagaccaaagtgaccacagtgacctctgcccagaagtccagtcagattggaagttctcagctgctgaagagacatgtgcagcggacagaagctgtgctgacccacaaacaagctcaagcacagtttgctgcttttctgaaacaaaatatgctggtgaggaaagctcttcctcctggcacctcctcctgtctctttgttcccatttcatcagaaccaccagaggaaggagagaaagaggatcttagggttcagctgaagcgacaccatccctcgagtccccttcctggcagtaagacctccaaacgaccgaagatcaaggtgtcccttatctcccaaggggacacagctggagggccttgtgctccttcccaaggaagtgctccagaagctgcaggtgggaagcccatcaccatgacactggggcaggcttcagcaggggccaaggagctcacaggacttctcaccacagccaagtccagttcttctgaaggtggagtctcagccagcccagtcccttcagtggtctccagcagcactgcacccagtgccttgcacacactgcagagccgcctggtggccacatctcctggcagctccctcccaggggccacatcagccagcagcctcctccaaggcctcagcttcagcttgcaggatatcagcagcaagacctctggccttccagcaaatccctccccaggaccagccccacaggccaccagtgtgaagttgcccacccccatgcagagcctgggtgccatcaccacgggcaccagcaccattgtccgtaccattcctgtggccaccactctctcctccttgggtgccactcctggtgggaagcccacagccatccaccagctgctgaccaatgggggcctcgctaagttggcaagcagcctccctggcctggctcagatctctaaccaagcatcaggcttgaaggtccccaccaccattactctgacacttcgtggccagccgagcaggatcactacactgagccctatgggctcaggagcagccccatccgaggagtcctcttcccaggtgctgccctccagctcacagcgcctgcctccagcaccctgaagatgctgtgtgatatgtcctccttaccaagttggtgatggctgcctcatggtgggccctggacaggtgtgtggtcctgctgagctgtccacgtgtcgg

SEQ ID NO: 145093 - DNA, 1684 bp, Homo sapiens
  Payload ID: 8667
  Gene Symbol: KATNA1
  Gene Name: katanin p60 (ATPase containing) subunit A 1
  Uniprot ID: O75449
  ENST ID: ENST00000335647
  CDS Start-End: 46-1521
taaagtgtttctttttttcttcttctttttagcttacagttgaacatgagtcttcttatgattagtgagaatgtaaaattggctcgtgaatatgcattgctgggaaactatgactctgcgatggtctattatcagggagttcttgaccaaatgaacaagtatctgtactcagtcaaagatacatacctccagcagaaatggcaacaggtttggcaggaaataaatgtggaagctaaacatgttaaagatatcatgaaaacactagagagctttaaactggacagcactcccttgaaagcggcacagcatgaccttccagcttctgagggagaagtctggtccatgcctgtacctgttgaacgaagaccctcaccaggacctagaaaacgccaatcttctcagtacagtgaccctaaatcacatggtaatcgtccaagtacaactgtcagagttcaccgttcatctgcacagaatgttcacaatgacagagggaaagctgttcgttgtcgtgaaaagaaagaacagaataaaggaagagaggaaaagaacaaatcacctgctgcagtaacagaaccagagacaaataaatttgatagtaccggatatgataaagacttagtagaagctttggaaagagatataatttcccagaatcccaatgttcgatgggatgatatcgctgatttagtagaagctaaaaagttgcttaaggaagccgtagtgttaccaatgtggatgcccgaattctttaagggcattaggagaccatggaaaggagtactgatggtcggcccacctggcacggggaagacgctccttgctaaagcagtagctacagaatgcaagacaacattcttcaatgtctcttcatcaactttgacttccaaatacagaggagaatctgagaagcttgttcgtcttctgtttgaaatggctcgattttattctccagccaccatatttattgatgagatagactccatctgtagtcgccgagggacttctgaagaacatgaagcaagcagaagggtgaaagcggagctgctggttcagatggatggtgttggaggtacttctgaaaatgatgacccttccaaaatggttatggttctggcagctactaattttccctgggatatagatgaggctttaagacgacgccttgagaaacgaatctatattcctttgccgtcagcaaaaggcagggaggagctattacgaataagtctacgtgagttggaattggctgatgatgttgaccttgcaagtatagcagaaaacatggaaggttattcaggtgcggacattaccaacgtgtgcagggatgcgtccttgatggcaatgagaaggcgcattgaaggtttgactccagaggaaatccgaaatctttccaaagaagaaatgcacatgcctacaactatggaggatttcgagatggctttaaaaaaggtttctaagtcagtgtctgctgcagacattgaaagatacgagaaatggatatttgagtttggatcatgctaaattctcacatgtaaactgtgagaaatgtgccttaagtgtttgaatattaaatgcagtaattcattgtactgagtgctatattttttttaactttcataatggtaagatttttttaaaaaaacccttatgattctgaataaaggcaatatttttaagctgaaaa

SEQ ID NO: 145094 - DNA, 1564 bp, Homo sapiens
  Payload ID: 8667
  Gene Symbol: KATNA1
  Gene Name: katanin p60 (ATPase containing) subunit A 1
  Uniprot ID: O75449
  ENST ID: ENST00000335643
  CDS Start-End: 281-1216
gggcgacgccccgcgtgcgccagagtcgccgaggtcgtccccggcaccggaagtgaccctggcgggtttgtcttcaaattctcggcgagcaggagccgcgccggcaggtggtgttgacgattgaactgggcagtactggggccgtgagcggagagcaaagtgggctggactgggtcaggccctccttcctcgctgccgggatctccactccgccaatcccctgtgcctggcgttgggcggtttcccgaggagcttgggccgccgcagcttacagttgaacatgagtcttcttatgattagtgagaatgtaaaattggctcgtgaatatgcattgctgggaaactatgactctgcgatggtctattatcagggagttcttgaccaaatgaacaagtatctgtactcagtcaaagatacatacctccagcagaaatggcaacaggtttggcaggaaataaatgtggaagctaaacatgttaaagatatcatgaaaacactagagagctttaaactggacagcactcccttgaaagcggcacagcatgaccttccagcttctgagggagaagtctggtccatgcctgtacctgttgaacgaagaccctcaccaggacctagaaaacgccaatcttctcagtacagtgaccctaaatcacatggtaatcgtccaagtacaactgtcagagttcaccgttcatctgcacagaatgttcacaatgacagagggaaagctgttcgttgtcgtgaaaagaaagaacagaataaaggaagagaggaaaagggagtactgatggtcggcccacctggcacggggaagacgctccttgctaaagcagtagctacagaatgcaagacaacattcttcaatgtctcttcatcaactttgacttccaaatacagaggagaatctgagaagcttgttcgtcttctgtttgaaatggctcgattttattctccagccaccatatttattgatgagatagactccatctgtagtcgccgagggacttctgaagaacatgaagcaagcagaagggtgaaagcggagctgctggttcagatggatggtgttggaggtacttctgaaaatgatgacccttccaaaatggttatggttctggcagctactaattttccctgggatatagatgaggctttaagacgacgccttgagaaacgaatctatattcctttgccgtcagggatgcgtccttgatggcaatgagaaggcgcattgaaggtttgactccagaggaaatccgaaatctttccaaagaagaaatgcacatgcctacaactatggaggatttcgagatggctttaaaaaaggtttctaagtcagtgtctgctgcagacattgaaagatacgagaaatggatatttgagtttggatcatgctaaattctcacatgtaaactgtgagaaatgtgccttaagtgtttgaatattaaatgcagtaattcattgtactgagtgctatattttttttaactttcataatggtaagatttttttaaaaaaacccttatgattctgaataaaggcaatatttttaagctgaaaa

SEQ ID NO: 145095 - DNA, 1984 bp, Homo sapiens
  Payload ID: 8667
  Gene Symbol: KATNA1
  Gene Name: katanin p60 (ATPase containing) subunit A 1
  Uniprot ID: O75449
  ENST ID: ENST00000367411
  CDS Start-End: 350-1825
atgcgcacgcgcggccccgggcccggccacaccctcttccgccgctcccgcccagcgacctcgctcccggggcgacgccccgcgtgcgccagagtcgccgaggtcgtccccggcaccggaagtgaccctggcgggtttgtcttcaaattctcggcgagcaggagccgcgccggcaggtggtgttgacgattgaactgggcagtactggggccgtgagcggagagcaaagtgggctggactgggtcaggccctccttcctcgctgccgggatctccactccgccaatcccctgtgcctggcgttgggcggtttcccgaggagcttgggccgccgcagcttacagttgaacatgagtcttcttatgattagtgagaatgtaaaattggctcgtgaatatgcattgctgggaaactatgactctgcgatggtctattatcagggagttcttgaccaaatgaacaagtatctgtactcagtcaaagatacatacctccagcagaaatggcaacaggtttggcaggaaataaatgtggaagctaaacatgttaaagatatcatgaaaacactagagagctttaaactggacagcactcccttgaaagcggcacagcatgaccttccagcttctgagggagaagtctggtccatgcctgtacctgttgaacgaagaccctcaccaggacctagaaaacgccaatcttctcagtacagtgaccctaaatcacatggtaatcgtccaagtacaactgtcagagttcaccgttcatctgcacagaatgttcacaatgacagagggaaagctgttcgttgtcgtgaaaagaaagaacagaataaaggaagagaggaaaagaacaaatcacctgctgcagtaacagaaccagagacaaataaatttgatagtaccggatatgataaagacttagtagaagctttggaaagagatataatttcccagaatcccaatgttcgatgggatgatatcgctgatttagtagaagctaaaaagttgcttaaggaagccgtagtgttaccaatgtggatgcccgaattctttaagggcattaggagaccatggaaaggagtactgatggtcggcccacctggcacggggaagacgctccttgctaaagcagtagctacagaatgcaagacaacattcttcaatgtctcttcatcaactttgacttccaaatacagaggagaatctgagaagcttgttcgtcttctgtttgaaatggctcgattttattctccagccaccatatttattgatgagatagactccatctgtagtcgccgagggacttctgaagaacatgaagcaagcagaagggtgaaagcggagctgctggttcagatggatggtgttggaggtacttctgaaaatgatgacccttccaaaatggttatggttctggcagctactaattttccctgggatatagatgaggctttaagacgacgccttgagaaacgaatctatattcctttgccgtcagcaaaaggcagggaggagctattacgaataagtctacgtgagttggaattggctgatgatgttgaccttgcaagtatagcagaaaacatggaaggttattcaggtgcggacattaccaacgtgtgcagggatgcgtccttgatggcaatgagaaggcgcattgaaggtttgactccagaggaaatccgaaatctttccaaagaagaaatgcacatgcctacaactatggaggatttcgagatggctttaaaaaaggtttctaagtcagtgtctgctgcagacattgaaagatacgagaaatggatatttgagtttggatcatgctaaattctcacatgtaaactgtgagaaatgtgccttaagtgtttgaatattaaatgcagtaattcattgtactgagtgctatattttttttaactttcataatggtaagatttttttaaaaaaacccttatgattctgaataaaggcaatatttttaagctg

SEQ ID NO: 145096 - DNA, 1138 bp, Homo sapiens
  Payload ID: 8667
  Gene Symbol: KATNA1
  Gene Name: katanin p60 (ATPase containing) subunit A 1
  ENST ID: ENST00000444282
  CDS Start-End: 297-1138
agcgacctcgctcccggggcgacgccccgcgtgcgccagagtcgccgaggtcgtccccggcaccggaagtgaccctggcgggtttgtcttcaaattctcggcgagcaggagccgcgccggcaggtggtgttgacgattgaactgggcagtactggggccgtgagcggagagcaaagtgggctggactgggtcaggccctccttcctcgctgccgggatctccactccgccaatcccctgtgcctggcgttgggcggtttcccgaggagcttgggccgccgcagcttacagttgaacatgagtcttcttatgattagtgagaatgtaaaattggctcgtgaatatgcattgctgggaaactatgactctgcgatggtctattatcagggagttcttgaccaaatgaacaagtatctgtactcagtcaaagatacatacctccagcagaaatggcaacaggtttggcaggaaataaatgtggaagctaaacatgttaaagatatcatgaaaacactagagagctttaaactggacagcactcccttgaaagcggcacagcatgaccttccagcttctgagggagaagtctggtccatgcctgtacctgttgaacgaagaccctcaccaggacctagaaaacgccaatcttctcagtacagtgaccctaaatcacatggtaatcgtccaagtacaactgtcagagttcaccgttcatctgcacagaatgttcacaatgacagagggaaagctgttcgttgtcgtgaaaagaaagaacagaataaaggaagagaggaaaagaacaaatcacctgctgcagtaacagaaccagagacaaataaatttgatagtaccggatatgataaagacttagtagaagctttggaaagagatataatttcccagaatcccaatgttcgatgggatgatatcgctgatttagtagaagctaaaaagttgcttaaggaagccgtagtgttaccaatgtggatgcccgaattctttaagggcattaggagaccatggaaaggagtactgatggtcggcccacctggcacggggaagacgctccttgctaaagcagtagctacagaatgcaagacaacattcttcaatgtctcttcatcaactttgacttccaa

SEQ ID NO: 145097 - DNA, 716 bp, Homo sapiens
  Payload ID: 8667
  Gene Symbol: KATNA1
  Gene Name: katanin p60 (ATPase containing) subunit A 1
  ENST ID: ENST00000420200
  CDS Start-End: 84-716
ctgacctcggtgtgtgtgtgagtgtggtgaaaatcaagtgggagggaaagtgagcaagcacctgaacaagcttacagttgaacatgagtcttcttatgattagtgagaatgtaaaattggctcgtgaatatgcattgctgggaaactatgactctgcgatggtctattatcagggagttcttgaccaaatgaacaagtatctgtactcagtcaaagatacatacctccagcagaaatggcaacaggtttggcaggaaataaatgtggaagctaaacatgttaaagatatcatgaaaacactagagagctttaaactggacagcactcccttgaaagcggcacagcatgaccttccagcttctgagggagaagtctggtccatgcctgtacctgttgaacgaagaccctcaccaggacctagaaaacgccaatcttctcagtacagtgaccctaaatcacatggtaatcgtccaagtacaactgtcagagttcaccgttcatctgcacagaatgttcacaatgacagagggaaagctgttcgttgtcgtgaaaagaaagaacagaataaaggaagagaggaaaagaacaaatcacctgctgcagtaacagaaccagagacaaataaatttgatagtaccggatatgataaagacttagtagaagctttggaaagagatataatttcccagaatcccaatgttcgatgggatgatatc

SEQ ID NO: 145098 - DNA, 7551 bp, Homo sapiens
  Payload ID: 8668
  Gene Symbol: KATNAL1
  Gene Name: katanin p60 subunit A-like 1
  Uniprot ID: Q9BW62
  ENST ID: ENST00000380615
  CDS Start-End: 169-1641
cggccgcggctgccatggcaacactacgccgccgccgccttttcacgcacgtcgcgagctaacggactcggcggcggcggcggcggcggcctgcgccccacccgcaccccatctggaccgcatcgctgaatgtgcccggacctgcgccttctgggtctctgaaagaagatgaatttggctgagatttgtgataatgcaaagaaaggaagagaatatgcccttcttggaaattacgactcatcaatggtatattaccagggggtgatgcagcagattcagagacattgccagtcagtcagagatccagctatcaaaggcaaatggcaacaggttcggcaggaattattggaggaatatgaacaagttaaaagtattgtcagcactttagaaagttttaaaattgacaagcctccagatttccctgtgtcctgtcaagatgaaccatttagagatcctgctgtttggccaccccctgttcctgcagaacacagagctccacctcagatcaggcgtcccaatcgagaagtaagacctctgaggaaagaaatggcaggagtaggagcccggggacctgtaggccgagcacatcctatatcaaagagtgaaaagccttctacaagtagggacaaggactatagagcaagagggagagatgacaagggaaggaagaatatgcaagatggtgcaagtgatggtgaaatgccaaaatttgatggtgctggttatgataaggatctggtggaagcccttgaaagagacattgtatccaggaatcctagcattcattgggatgacatagcagatctggaagaagctaagaagttgctaagggaagctgttgttcttccaatgtggatgcctgactttttcaaagggattagaaggccatggaagggtgtactgatggttggacccccaggcactggtaaaactatgctagctaaagctgttgccactgaatgtggtacaacattcttcaacgtttcgtcttctacactgacatctaaatacagaggtgaatctgagaagttagttcgtctgttgtttgagatggctagattttatgcccctaccacgatcttcattgatgagatagattctatctgcagtcgaagaggaacctctgatgaacatgaggcaagtcgcagggtcaagtctgaactgctcattcagatggatggagttggaggagctttagaaaatgatgatccttccaaaatggttatggtattggctgctactaatttcccgtgggacattgatgaagctttgcgaagaaggttagaaaaaaggatatatatacctctcccaacagcaaaaggaagagctgagcttctgaagatcaaccttcgtgaggtcgaattagatcctgatattcaactggaagatatagccgagaagattgagggctattctggtgctgacatcactaatgtttgcagggatgcctctttaatggcaatgagacggcgtatcaatggcttaagtccagaagaaatccgtgcactttctaaagaggaacttcagatgcctgttaccaaaggagactttgaattggccctaaagaaaattgctaagtctgtctctgctgcagacttggagaagtatgaaaaatggatggttgaatttggatctgcttgaatttctgtcagctctttaatttctggtatttttgttgataaaatacgaagaaattcctgcaatttttaaaaaacaagtttggaatttttttcagtggagtggttttcgcttaaaggaaaaaaaaatctaaaactgcgaagaatactaaatgtagttgagaaataattgatggcgagagtttgctagtctccctccccggctttgtgctggtattccacgtattcctgcattaatattgcacacccaaaccagtctatcagggaggctgaagcaagggcgcagtgtgatattttaggaatacagaagatttagaaatacccctatttctcatttgcagtttttttttccaattctgtgctctgtcaacatgagggacctatctatgtatgttgacttttaacatcaaaattggatttgtgtcaaacattcattgttaagagaagaatgacagtatattttggaggaaataatgaatttactaattaaacctttagaatttatgacttactgttagagtctgtcatatggttagaatttttacttccgctacccctgccatttcttctgctagctacttcataatatcttgagctttactgaggaatattctcacgctctgtggtatttgaatcattttgccaggtcatttctctgtctttagtattttttgctggtgcttcttacatttaatatggaaaggtgggaagaatattactgcattagatgtaattcttcattctagacttccaagtttgttttcacttttttgtgtgtgcgtgaaggagtctgtgtcacccaggctgtgtagtgcagtggttgatcttggctcactgcaacctctgcctcctagattcaagcaattctcctgtctcagcctcccaagtagctgggattacaggtgcgcaccaccatgcctggctgtgttttcacttttctttcaacatgttcaaccagatatatagccattatttttctcagctccagcattgtttgatttttcttgagtttgattttagtatttgagataaatacttttacattctaaacaagtccactctctgtggctaacgcaaaacaaatgaaatctttattgttttccaaacagctagtttaacaaaacagcatcatacatagtgaatgatgttcattggaaaattctaaaatttgtccttgtctaggttgagaacttttacacacactaagataaagatagaaatctgacatgctcactcaattcagcaggaattacacattagaaagaagccagaaaaataaatggcatatatccaatcacaagtaaatgatcctggcgttagtttttatgattacatgtgtctcattaggcaatttatgctttaatggtcaagcttttaaaaatttgtatttgataacatcctgaattctcagtttcgaatagtgcctactggtttaaaactaaaaataatacagctttttggacatttaaccaagatactaagaaggttttttttaaaaaaagagatttgattatttttccctgctaaaaactgtaaatgccttatgttcttttcagataacttaagtctgacctaaactccagtattcatctgatgctgtaaattgcccttctttctgagacacagattataagatgccagatcataagacatcatgattttattgtaattgaattcttcctaaaaattgagaggtttccttttattaacttttaaaataaagaaataagtagtttcattacgattattttgcaaactattgccagtcagaaatgcactttttttttccctgaagttttaggagccgtcactaaaacattagtcttgtgattgttaaaacttgtttgtaatgggttggtgcaaaagtaattgtggtttttccattactttcaatggcaaaaaccgcaattacttttgcaccagcctaacaatagttgattagttagaccttttctgggttttgtattgattatcttggtgtgcatttaattatttttctgaattcttcatggataatgacatagtaattgtgattcttttaataccagttaagcagtatttggcaacttaaacttcctgggagcctaactttactatgttaagtgagtcaggtgtgctttttatttcccttgtttctcattttgccctgtcagtggatggtagatgctttgtatatcttaaatcccttaaaggatcttaaagacatccctcaggtgttctatttaacttttattttattttattttatttatttatttattttgagactgagtcttgctctgtcgcccaggctggagtgcagtggcatgatctcggctcactgcaacttctgcctcccaggttcaagccattctcctgcctcggcctcctgagtagctgggattacagttgccgccacacccggcttatttttttgtatttttagtagaggcagagtttcaccatgttggccaggctagtctcgaactcctgacctcagatgatccgcccacattggcctcccaaagtgctgggattacaggtgtgatccaccgcacctggccctaacttttaatatacaacacacacacacacacacacacacacacacacacacacacacacacacacacacacactatttcagaagacagtgtgttgccttacccagaatgagtgctaggattacaggcgtgagacagacacacatacacacacatacacacacacagagtctttattgcagaagacagtgtgttgccttataggcgtgagacacacacacacacacacacacacacacacacacacacagtctttattgcagaagacagtgtgttgccttaccagaatgagtgcttggattacaggcgtgagccactgtgcccagccctaacttttaatgtacatcacacacacactcacactcacatacacacacacacacacactctgactgtctttattgcagaagacagtgtgttgccttacccagaatgagattgaattgttttgcttcgttttgttttgttattcagtgttgcggtagcagatgcattatcaaaggaaaaatatttggctcctttaattcctctgaaaacatgagtattttgagttctgcagcacaatgactgtaggactaagctaagtctgctttgcagatatctgatcagatagtcccttcattctgtagacgtgtattggttggtccaagacacagtgagtaggagctctgtggaccaagacaaagctggactagagagtacagttcaaacttggcagtttctctaacgactctgtatagcttctggcttctactactgaaacaagagtttagatcactgatggagaggcatagtaatctgtttgtgctttggaaaaatatataaaagtttttttcccctattttttgcactttaaatctgttttgaaattagaactgatatacatttatttgaataatgtgtaactattatggatctattttaatgaacaatttttaccatttcccaagctgcctgtttattataagcatgacatgtttactataaaccttttgcccccataatttctttttttaaaggaaattaatattagtaaaataaacacctctttaatggaagctgcaaccttctagtgatccaagtagacaatagatggtggcatcacagactttatctacacactttcgggtctgaccactacctcccacaatacctagccattttggaaggggaaaacatgcggtggtctagctgtatagctcagggcttaatttcagcttctgagattgtgatgtcatatttcactctcaaaacataggctgaaagcacgaattactcaaaaagtaagcaaaccaatacctggtgaatctatggacagtcatacacatacatcaggggaaaatgtgtgtgtacaacccaaatttacagtatgattgtcattctttgactttgttttgtatagcctgactctgttgaacatgaaattattagtactctaggttttggacagcttgagttcatttgaattccttccttaggaataagtttttatatacactgctaaatgtgtgatgagaatcataaaacactaaccagctgaggtagctgtgattcactttccccccaccctaacttgagataaaatgaaggactaggcaagtatttcatgttgtgtgagtggacttcggttccttcagtattgtctaggttattgagtctttctttgcctaatagtggattcccactcttaagataacttttattagtgataaatcagtttagggtatattctgtatgacaggcataaaatgttaagggtgaatgctggccttttccaagaaaaggccaccttaacttgtatgaggaaaaaatcctaactattctcttttttgtatctttttttccgtaactgttttgattgtatattttaaagaaaccacttaatttgtgatgcacgtaatatttgtgtgaacctgagaatatgtcacaataggaaaaagcagaaattatacttaggggacatgttaggggggtaaaaatatttaagcctcgaatgttttactgtcatctccactaactatttttacagaaaaagctaaaaactctgttgtaattattgtaagtttacttatttatacttttaaattaggcttttcatacttaaatttttttgacatttgcttttaatatttgtttcttaatgtggaaattgtgtattttaataatcaaattattaggataatagatatatttttaaacattcacctcattaacaaatagatctttgaatttttattaggttttttggctccagacaactgtttagctttaatgatatttctaaattcccagtgacttattaataaaaacaggaaaaatatttaggtaatgtcataaaatttattttacctttctcattttctgagaaaataaatgaaaaaaaccctagatattgctttattaccaacagtgtgtaggtttttgtacatatggaaatttgacacaaaaaaatagggaatttgtatagagaagtttccctcttataaaaggactcccatttgattgttcgaaactataaaatgcacttttactttaccatatctgaaatgacaaaatatcgccctttggaaaacctgactctttgcacgtgtaattcccagagtctacctcagttaaccaggcttagttttaggcaggaatgaattgaattaaattcagttcatcatctatgcagatttgtttcttttaagcacatccttccctcctgctgttgccctcctcccattaacttttctttttaatcttgaaattgtttaaaatattccatctttctttctctagcaaagtgtttgtattccaaataaggcctctgtgaaatgtctgaattacttttcccgtctttgttatggtcagcttcattatttggatgtattgcattcaaagcagcagttccaaacataacacacatctattttcttagagttttgtaaatacaaactaacctgatgacattaaaaattgtggatcctacatgttcctatgttcattctctaaaaacctgagtaactttatgaaaacacacaaacctggaaaaacatcacatttttgtcacatttttactgacaaatgtatattcatatgatggtacggcagcagggagtggcccccagttaacatggctgtgagtggacacagtgtctcgcaggatcactgcatgttatgatggcttgtaagtgcgttgttaagacttttgtttcagtgtttgtctcccagtatttgaacctaatttaaagaaaaagacgtttccaagttgtatttattaaatgtgtttttccttaccttttgtgctgctactttgctaatctcattagcttagctgtgtttgtgcataggttatatttggtaataaatttatagagtgttggttgtca

SEQ ID NO: 145099 - DNA, 1634 bp, Homo sapiens
  Payload ID: 8668
  Gene Symbol: KATNAL1
  Gene Name: katanin p60 subunit A-like 1
  Uniprot ID: Q9BW62
  ENST ID: ENST00000380617
  CDS Start-End: 102-1574
gacagaaaaaaaaatctctctttgtcttgagggggctgttgagtggtcgcggacctgggctctgtgcgttgggaaagggaagtggaggtctctgaaagaagatgaatttggctgagatttgtgataatgcaaagaaaggaagagaatatgcccttcttggaaattacgactcatcaatggtatattaccagggggtgatgcagcagattcagagacattgccagtcagtcagagatccagctatcaaaggcaaatggcaacaggttcggcaggaattattggaggaatatgaacaagttaaaagtattgtcagcactttagaaagttttaaaattgacaagcctccagatttccctgtgtcctgtcaagatgaaccatttagagatcctgctgtttggccaccccctgttcctgcagaacacagagctccacctcagatcaggcgtcccaatcgagaagtaagacctctgaggaaagaaatggcaggagtaggagcccggggacctgtaggccgagcacatcctatatcaaagagtgaaaagccttctacaagtagggacaaggactatagagcaagagggagagatgacaagggaaggaagaatatgcaagatggtgcaagtgatggtgaaatgccaaaatttgatggtgctggttatgataaggatctggtggaagcccttgaaagagacattgtatccaggaatcctagcattcattgggatgacatagcagatctggaagaagctaagaagttgctaagggaagctgttgttcttccaatgtggatgcctgactttttcaaagggattagaaggccatggaagggtgtactgatggttggacccccaggcactggtaaaactatgctagctaaagctgttgccactgaatgtggtacaacattcttcaacgtttcgtcttctacactgacatctaaatacagaggtgaatctgagaagttagttcgtctgttgtttgagatggctagattttatgcccctaccacgatcttcattgatgagatagattctatctgcagtcgaagaggaacctctgatgaacatgaggcaagtcgcagggtcaagtctgaactgctcattcagatggatggagttggaggagctttagaaaatgatgatccttccaaaatggttatggtattggctgctactaatttcccgtgggacattgatgaagctttgcgaagaaggttagaaaaaaggatatatatacctctcccaacagcaaaaggaagagctgagcttctgaagatcaaccttcgtgaggtcgaattagatcctgatattcaactggaagatatagccgagaagattgagggctattctggtgctgacatcactaatgtttgcagggatgcctctttaatggcaatgagacggcgtatcaatggcttaagtccagaagaaatccgtgcactttctaaagaggaacttcagatgcctgttaccaaaggagactttgaattggccctaaagaaaattgctaagtctgtctctgctgcagacttggagaagtatgaaaaatggatggttgaatttggatctgcttgaatttctgtcagctctttaatttctggtatttttgttgataaaatacgaagaaattcctgc

SEQ ID NO: 145100 - DNA, 566 bp, Homo sapiens
  Payload ID: 8668
  Gene Symbol: KATNAL1
  Gene Name: katanin p60 subunit A-like 1
  ENST ID: ENST00000414289
  CDS Start-End: 108-566
acagtctcagggatgagcagccgcccaagctgcagggcctcgggtcttcggcgcctctgaccctcgcaggttgctgcctttcggtgcagaaccgtctctgaaagaagatgaatttggctgagatttgtgataatgcaaagaaaggaagagaatatgcccttcttggaaattacgactcatcaatggtatattaccagggggtgatgcagcagattcagagacattgccagtcagtcagagatccagctatcaaaggcaaatggcaacaggttcggcaggaattattggaggaatatgaacaagttaaaagtattgtcagcactttagaaagttttaaaattgacaagcctccagatttccctgtgtcctgtcaagatgaaccatttagagatcctgctgtttggccaccccctgttcctgcagaacacagagctccacctcagatcaggcgtcccaatcgagaagtaagacctctgaggaaagaaatggcaggagtaggagcccggggacctgtaggccgagcacatcctatatcaaagagtgaaaagccttctacaagtagggac

SEQ ID NO: 145101 - DNA, 797 bp, Homo sapiens
  Payload ID: 8668
  Gene Symbol: KATNAL1
  Gene Name: katanin p60 subunit A-like 1
  ENST ID: ENST00000441394
  CDS Start-End: 347-797
aaactttgagcggaccgggacagaaaaaaaaatctctctttgtcttgagggggctgttgagtggtcgcggacctgggctctgtgcgttgggaaagggaagtggaggtgagcctcgggcttcccgccctgtagctgggcccgccccagttgcagcgctcagccccaccccggctgggccaccgccctgcacagtctcagggatgagcagccgcccaagctgcagggcctcgggtcttcggcgcctctgaccctcgcaggttgctgcctttcggtgcagaaccgtatgtatgtcacacattggatgtgagacctgagaaaccgtgttttaacaggtctctgaaagaagatgaatttggctgagatttgtgataatgcaaagaaaggaagagaatatgcccttcttggaaattacgactcatcaatggtatattaccagggggtgatgcagcagattcagagacattgccagtcagtcagagatccagctatcaaaggcaaatggcaacaggttcggcaggaattattggaggaatatgaacaagttaaaagtattgtcagcactttagaaagttttaaaattgacaagcctccagatttccctgtgtcctgtcaagatgaaccatttagagatcctgctgtttggccaccccctgttcctgcagaacacagagctccacctcagatcaggcgtcccaatcgagaagtaagacctctgaggaaagaaatggcaggagtaggagcccggggacctgtaggccgagcacatcctatatcaaagagtgaaaagccttctacaa

SEQ ID NO: 145102 - DNA, 2833 bp, Homo sapiens
  Payload ID: 8669
  Gene Symbol: KATNAL2
  Gene Name: katanin p60 subunit A-like 2
  Uniprot ID: Q8IYT4
  ENST ID: ENST00000245121
  CDS Start-End: 195-1595
agtaactgactacttttctcccttctctagggtcctagcacagtgtctgatggagctttcctaccagaccctgaaattcacgcatcaggcgcgggaagcggtatatcgatacagcaaatgctttggagcaagaaactaaactggggttacgacggtttgaagtttgtgacaacattgatcttgaaactattttgatggaatatgagagttattattttgtaaaatttcagaaataccccaaaattgtcaaaaagtcatcagacacagcagaaaataatttaccgcaaagaagtagagggaagaccagaaggatgatgaacgacagttgtcaaaatcttcccaagatcaatcagcagaggccccggtccaaaaccacagcggggaagacaggggacaccaaatcgctcaataaggagcatcctaatcaggaggtagttgataacactcgcctggaaagtgccaacttcggcctacatatatcaagaatccgtaaagacagtggagaggaaaatgcccacccacgaagaggccaaatcattgacttccaagggctgctcacagatgccatcaagggagcaaccagtgaacttgccttgaacaccttcgaccataatccagacccctcagaacgactgctgaaacctctgagtgcatttattggcatgaacagtgagatgcgagaattggcagccgtggtgagccgggacatttatctccataatccaaacataaagtggaatgacattattggacttgatgcagccaagcagttagtcaaagaagctgttgtgtatcctataaggtatccacagctatttacaggaattctttctccctggaaaggactactgctgtacggccctccaggtacaggaaagactttactggccaaagctgtggccactgaatgtaaaacaaccttctttaacatttctgcatccaccattgtcagcaaatggagaggggattcagaaaaactcgttcgggtgttatttgagcttgcccgctaccacgccccatccacgatcttcctggacgagctggagtcggtgatgagtcagagaggcacagcttctgggggagaacatgaaggaagcctgcggatgaagacagagttactggtgcagatggatgggctggcacgctcagaagatctcgtatttgtcttagcagcttctaacctgccgtgggagctggactgtgccatgttacgccgcctggagaagaggattctggtcgatctccccagccgggaggccaggcaggccatgatctaccactggctgcctcctgtgagcaagagcagggccttggagctgcacacagagctggagtacagtgtgctgagccaggagactgagggctactcaggctcagatattaagctcgtctgcagggaagcagccatgcggcccgtgaggaagatctttgatgcacttgaaaatcaccagtcagaaagcagcgacttacccaggatccagttggatatagtaaccactgccgactttctggatgtgctaactcacaccaagccctccgcaaagaatctggctcagagatactcagactggcaaagagagttcgagtctgtctgaaaccacatttaccctgacctggccacaaaggcaaccacaaagacctcctagtttattaatgtccgtgggagaacaaaatgattggaatggaaaagagaaaattatttttgaagactggattaacttgagccactgtattgttttggatagctgagatatatttattaacttaccattatcgatgtcagcaaaatattgagagtttcagttacatacatatatgtgctattgggtcatacaatggagatttttctgacaattagactccataaaattttaatgaacaattttctgtaatgttactcatttgtaaactttttaagaaaaagatgtacttagaaaagttgtgttggccacacacaggatgaccctgagttggggcagccaagtagaagctaagcttgacaggcactgcccagctgacagtcccagggtgaaggaggacggaagcagggaaggcaatgcagtctgtttctcattccggacaatattctgaatctcatcagctccccctaattctgactccatccagctttgtcagcagcaaacccctcccaaactaagccccactcagaaatgtcactgagcattctgatgctagagctaatagccagggtgactagcacaccatcaccatcagctgccagtctgattgttttgggttctggcccccaataacatcttttcactcttcacacctcacatccggtgtgctctgcccttctctttccattgccgcagcttctcatcagatccaaagcttaggatggggcacctaagcttcgagaacattcatcccaagtcttccctgctcttaggctcttccccctctccttaaggggttataaacaactagacgcatctctctcagaaacccacaatccgaggcatctactttcaacccttgataaattttgaaggcttctactaagtaatgccacttcttttcccccactagaacttacctatgggaaatcaccttcttttctcttccttgccttgtcttcatcatccctgcagacagactcttcaagaggaaaaacctccagaaagagacactttggatagctaagtatcccaaaggattttacccttttaaacaaaaccaaagcatttttttcggtatcgattattttgagattattctcaaatgcctctttaaacatcatttcatggaaaatgtcaaattgaaaatataccttatttaacaaattgaaaataaaaaagatttcatctca

SEQ ID NO: 145103 - DNA, 1635 bp, Homo sapiens
  Payload ID: 8669
  Gene Symbol: KATNAL2
  Gene Name: katanin p60 subunit A-like 2
  Uniprot ID: Q8IYT4
  ENST ID: ENST00000356157
  CDS Start-End: 19-1635
gtcctagcacagtgtctgatggagctttcctaccagaccctgaaattcacgcatcaggcgcgggaagcgtgcgagatgaggacagaagcacgacgaaaaaatcttctcattttgatttcgcattatttaacacaagaagggtatatcgatacagcaaatgctttggagcaagaaactaaactggggttacgacggtttgaagtttgtgacaacattgatcttgaaactattttgatggaatatgagagttattattttgtaaaatttcagaaataccccaaaattgtcaaaaagtcatcagacacagcagaaaataatttaccgcaaagaagtagagggaagaccagaaggatgatgaacgacagttgtcaaaatcttcccaagatcaatcagcagaggccccggtccaaaaccacagcggggaagacaggggacaccaaatcgctcaataaggagcatcctaatcaggaggtagttgataacactcgcctggaaagtgccaacttcggcctacatatatcaagaatccgtaaagacagtggagaggaaaatgcccacccacgaagaggccaaatcattgacttccaagggctgctcacagatgccatcaagggagcaaccagtgaacttgccttgaacaccttcgaccataatccagacccctcagaacgactgctgaaacctctgagtgcatttattggcatgaacagtgagatgcgagaattggcagccgtggtgagccgggacatttatctccataatccaaacataaagtggaatgacattattggacttgatgcagccaagcagttagtcaaagaagctgttgtgtatcctataaggtatccacagctatttacaggaattctttctccctggaaaggactactgctgtacggccctccaggtacaggaaagactttactggccaaagctgtggccactgaatgtaaaacaaccttctttaacatttctgcatccaccattgtcagcaaatggagaggggattcagaaaaactcgttcgggtgttatttgagcttgcccgctaccacgccccatccacgatcttcctggacgagctggagtcggtgatgagtcagagaggcacagcttctgggggagaacatgaaggaagcctgcggatgaagacagagttactggtgcagatggatgggctggcacgctcagaagatctcgtatttgtcttagcagcttctaacctgccgtgggagctggactgtgccatgttacgccgcctggagaagaggattctggtcgatctccccagccgggaggccaggcaggccatgatctaccactggctgcctcctgtgagcaagagcagggccttggagctgcacacagagctggagtacagtgtgctgagccaggagactgagggctactcaggctcagatattaagctcgtctgcagggaagcagccatgcggcccgtgaggaagatctttgatgcacttgaaaatcaccagtcagaaagcagcgacttacccaggatccagttggatatagtaaccactgccgactttctggatgtgctaactcacaccaagccctccgcaaagaatctggctcagagatactcagactggcaaagagagttcgagtctgtctga

SEQ ID NO: 145104 - DNA, 1023 bp, Homo sapiens
  Payload ID: 8669
  Gene Symbol: KATNAL2
  Gene Name: katanin p60 subunit A-like 2
  ENST ID: ENST00000588433
  CDS Start-End: 1-1023
ggatgatgaacgacagttgtcaaaatcttcccaagatcaatcagcagaggccccggtccaaaaccacagcggggaagacaggggacaccaaatcgctcaataaggagcatcctaatcaggaggtagttgataacactcgcctggaaagtgccaacttcggcctacatatatcaagaatccgtaaagacagtggagaggaaaatgcccacccacgaagaggccaaatcattgacttccaagggctgctcacagatgccatcaagggagcaaccagtgaacttgccttgaacaccttcgaccataatccagacccctcagaacgactgctgaaacctctgagtgcatttattggcatgaacagtgagatgcgagaattggcagccgtggtgagccggtatccacagctatttacaggaattctttctccctggaaaggactactgctgtacggccctccaggtacaggaaagactttactggccaaagctgtggccactgaatgtaaaacaaccttctttaacatttctgcatccaccattgtcagcaaatggagaggggattcagaaaaactcgttcgggtgttatttgagcttgcccgctaccacgccccatccacgatcttcctggacgagctggagtcggtgatgagtcagagaggcacagcttctgggggagaacatgaaggaagcctgcggatgaagacagagttactggtgcagatggatgggctggcacgctcagaagatctcgtatttgtcttagcagcttctaacctgccgtgggagctggactgtgccatgttacgccgcctggagaagaggattctggtcgatctccccagccgggaggccaggcaggccatgatctaccactggctgcctcctgtgagcaagagcagggccttggagctgcacacagagctggagtacagtgtgctgagccagactgagggctactcaggctcagatattaagctcgtctgcagggaagcagccatgcggcccgtgaggaagatctttgatg

SEQ ID NO: 145105 - DNA, 464 bp, Homo sapiens
  Payload ID: 8669
  Gene Symbol: KATNAL2
  Gene Name: katanin p60 subunit A-like 2
  ENST ID: ENST00000586198
  CDS Start-End: 1-387
ccacagctatttacaggaattctttctccctggaaaggactactgctgtacggccctccaggtacaggaaagactttactggccaaagctgtggccactgaatgtaaaacaaccttctttaacatttctgcatccaccattgtcagcaaatggagaggggattcagaaaaactcgttcgggtgttatttgagcttgcccgctaccacgccccatccacgatcttcctggacgagctggagtcggtgatgagtcagagaggcacagcttctgggggagaacatgaaggaagcctgcggatgaagacagagttactggtgcagatggatgggctggcacgctcagaagatctcgtatttgtcttagcagcttctaacctgccgtggtaagagaccaagagagtaaattttgaatacattttcaggagtcactaagtgcaaataaaaattttatattgaccacttca

SEQ ID NO: 145106 - DNA, 865 bp, Homo sapiens
  Payload ID: 8669
  Gene Symbol: KATNAL2
  Gene Name: katanin p60 subunit A-like 2
  ENST ID: ENST00000585469
  CDS Start-End: 200-865
aggttccttggatcgaccggtcagcccagtaactgactacttttctcccttctctagggtcctagcacagtgtctgatggagctttcctaccagaccctgaaattcacgcatcaggcgcgggaagcgggtttattgccgtaggagcagtgttattttttgttgtcatcctacctaaattttcctctgttccagtgcgagatgaggacagaagcacgacgaaaaaatcttctcattttgatttcgcattatttaacacaagaagggtatatcgatacagcaaatgctttggagcaagaaactaaactggggttacgacggtttgaagtttgtgacaacattgatcttgaaactattttgatggaatatgagagttattattttgtaaaatttcagaaataccccaaaattgtcaaaaagtcatcagacacagaaaataatttaccgcaaagaagtagagggaagaccagaaggatgatgaacgacagttgtcaaaatcttcccaagatcaatcagcagaggccccggtccaaaaccacagcggggaagacaggggacaccaaatcgctcaataaggagcatcctaatcaggaggtagttgataacactcgcctggaaagtgccaacttcggcctacatatatcaagaatccgtaaagacagtggagaggaaaatgcccacccacgaagaggccaaatcattgacttccaagggctgctcacagatgccatcaagggagcaaccagtgaacttgccttgaacaccttcgaccataatccagacccctcagaacgactgctgaaacctctgagtgcatttattggcatgaacagtgagatgcgagaattggcagccgtggtgagccgg

SEQ ID NO: 145107 - DNA, 994 bp, Homo sapiens
  Payload ID: 8669
  Gene Symbol: KATNAL2
  Gene Name: katanin p60 subunit A-like 2
  ENST ID: ENST00000591522
  CDS Start-End: 1-465
gaaaaactcgttcgggtgttatttgagcttgcccgctaccacgccccatccacgatcttcctggacgagctggagtcggtgatgagtcagagaggcacagcttctgggggagaacatgaaggaagcctgcggatgaagacagagttactggtgcagatggatgggctggcacgctcagaagatctcgtatttgtcttagcagcttctaacctgccgtgcttgaaagccattgcactccagcctggcgacagagcaagactccgtctcaaaaaaaaaaaaagtgtactagtccattttcatgctgctggtgaagacatatccaagactgggaagaaaaaaaaattaactggacttacagtttcacatggatggggagcctcagaatcatggcggggggcaaaagacacttcttatatggtggcagcaagagaaaatgaggaagacgcaagaagcggaaacccctgataaaaccatcagaccttgtgagacttattcactaccatgagaacagcatgcgtggtggaaactgctcacgattcaaattatctcctactgggtccctcccacaacacgtgggaattatgcgattacaattcaagatgagatttgggtggggacacagagccaaaccatatcaagaagtttaaggaaatggcctatggatgcaaaatcacataaacttggcctgacagttttgggaggagtaaaagtgagtgtctgaaagggcggttatttgcactgggcacccaggaagggccactggtgctaagttcaccaatgtaatgaagtgaggggtcattcactccagaaggactgagaattttggaagaattaatgtacttagagtgcccaacttattgtcagcaataatttactcactggcaagatcggactgaataattcatgttacaactgcaatcagaatactcatgattgctggttgttagttggtttttgtaccccaaattaagtcgcataaaattacttccttttc

SEQ ID NO: 145108 - DNA, 1348 bp, Homo sapiens
  Payload ID: 8669
  Gene Symbol: KATNAL2
  Gene Name: katanin p60 subunit A-like 2
  ENST ID: ENST00000592005
  CDS Start-End: 674-991
gccgggcccgtcacgtgaacggcgcgggagctccgcctccgacgcgccgaagccccgcccctagcggtgccccctgcccacccgcgcgaccgccttccgcccgcgccttcagtccgcgcggcgacagcgcccgcccgcgcctgccccggcgtgctgccccgcggcttggccccgctcggccccaggtcgtgccttccctccccggcggaggcccctgcggactgcctagagctgggtcgcaactgaggcgttatccgcgggcctggcctcgggaagtggcggggaggaagaagaggcggccgggacgcgtgacaggagcattcgggaagattcttacggtgcccttcacgcggtgcctatggacggagaaagccgccgcaaataaaaccatcccccagagtagttgtggcggaataatctaaatatgggtgttggattgaggaaacttgaatatttttgtatcctgaagggagaaatggatgaagaagaaatggatgaagaagaccgaagataatgatgaagggataatttggaataggattcacagcaagagagacagaagggaaagacattgaagaaacagactagttaacacatgaaaaaaatagagcagaggaaaacacgtccatgtttttccacgtctaatgagaacagggtcctagcacagtgtctgatggagctttcctaccagaccctgaaattcacgcatcaggcgcgggaagcggtgttatttgagcttgcccgctaccacgccccatccacgatcttcctggacgagctggagtcggtgatgagtcagagaggcacagcttctgggggagaacatgaaggaagcctgcggatgaagacagagttactggtgcagatggatgggctggcacgctcagaagatctcgtatttgtcttagcagcttctaacctgccgtgtaaccacatgcatttttgggctccaggaagaagctgtcctccctgcctgcaatcaaggtcttgattgtgccttcactagatcaacatttttccaaaagcagtctgccacagcttgaaagccattgcactccagcctggcgacagagcaagactccgtctcaaaaaaaaaaaaagtgtactagtccattttcatgctgctggtgaagacatatccaagactgggaagaaaaaaaaattaactggacttacagtttcacatggatggggagcctcagaatcatggcggggggcaaaagacacttcttatatggtggcagcaagagaaaatgaggaagacgcaagaagcggaaacccctgataaaaccatcagaccttgtgagacttattcactaccatgagaacagcatgcgtggtggaaact

SEQ ID NO: 145109 - DNA, 2664 bp, Homo sapiens
  Payload ID: 8670
  Gene Symbol: KATNB1
  Gene Name: katanin p80 (WD repeat containing) subunit B 1
  Uniprot ID: Q9BVA0
  ENST ID: ENST00000379661
  CDS Start-End: 393-2360
gggctctgagccggaggttttgttgtgagggtcggttgtcaagcagcggccaatcaaggcaggggatggaggcaagtgggggtcgcgcctggagcggagcctcggcctccggagccgcagctgcagccctgtattgagctgagatggctcgagcctaacattccatgatccaggatcgtgacagatgtgcacaggctgctgctgttgctgctgtgggtaatttggaaccacgaggcaccccagggccagaagacgaggcattctgtctgcctggatgtgtgggaactctctgccaacttgattggtggatctggggggggatccacccccaccccacgaggaaagcacagtttattttgtgggtggggcttcaggtgccagccagctgaaggatggccacccctgtggtcaccaagacagcctggaagttgcaagagatcgtcgcgcatgccagcaacgtgtcctcactggtgctgggcaaagcctccgggcggctgctggctacaggcggggatgactgccgcgtcaacctgtggtccatcaacaagcccaactgcatcatgagcctgacgggccacacatccccagtggagagcgtccgcctcaacacccccgaggagctcatcgtggccggctctcagtcgggctccatccgtgtctgggacctggaagctgccaaaattcttcgcacactcatgggacacaaagccaacatctgcagcctggatttccacccgtacggcgagtttgtagcctctggttcccaggacacaaacatcaagctctgggacatcaggaggaaaggctgtgtcttccgatacagggggcacagccaggccgtgcggtgtctccggttcagccccgatgggaagtggttggcgtcggccgcagatgaccacaccgtgaagctctgggatctcactgccggcaagatgatgtctgagttccctggtcacacggggcctgtcaacgtggtcgagtttcaccccaacgagtacctcctggcctccggcagctctgacaggacaatccgcttctgggacctggagaagttccaggtggtgagctgcatcgaaggggagcctgggcccgtcaggagcgtcctcttcaacccagacggctgctgcctgtacagcggctgccaggactcactgcgtgtctacggctgggaacctgagcggtgctttgatgtggtcctcgtcaactggggcaaggtggccgacctggccatctgcaatgaccagttgataggtgtggccttctcccagagcaacgtctcctcctacgtggtggatctgacgcgtgtcaccaggactggcacggtggcccgggaccctgtgcaggaccaccggcccctggcacagccactgcccaaccccagcgcccccctccggcgcatctatgagcggcccagcacaacctgcagcaagcctcagagggtgaagcagaactcagagagcgagcgccgcagccccagcagcgaggatgaccgggacgagcgcgagtcccgcgcggagatccagaacgccgaggactacaacgagatcttccagcccaagaacagcatcagtcggacgccaccccggagaagtgagcccttccctgcacccccagaggacgacgcagccacagcaaaggaggcagcaaagcccagccctgccatggatgtgcagttcccggtgccaaatctggaggtcctgccccggcccccagtggttgcttccacacctgcacccaaggctgagcctgccatcatccctgccacccggaacgagcccatcgggctgaaggcctccgacttcctgcccgccgtgaagatcccccagcaggccgagctggtggacgaggatgccatgtcacagatccgcaaaggccacgacaccatgtgtgtggtgctcaccagccgccacaagaacctggacactgtgcgggctgtgtggaccatgggcgacatcaagacgtcggtggactccgctgtggccatcaacgacctgtcggtggtggtggacctcctgaacatcgtcaaccagaaagcctccctgtggaagctggacctgtgcaccaccgtcctgccacagattgagaagcttctgcagagcaagtatgagagctacgtccagacgggctgcacctccctgaagctgatcctgcagcggtttctgcccctcatcacagacatgctggcggccccaccctctgtgggtgtggatatcagcagggaggagaggctgcataagtgccggctctgctacaagcagcttaagagcatcagcggcctggtcaagagcaagtcaggcctgagcggccgccatggcagtaccttccgcgagctgcacctgctcatggccagtctggactgaggaaagcagtgggcaggggcgctcggcagcccacagggcctggcctcagcccccactcctgttccttgtgcacccactggcccatgagcctctgcctggcccctgctgctgtcctgtggccgtcctggaggaggtgatgctggtccctggccacctctacagccctgaactcttgagacaactctctccagcaatagctgcccagctttgcccaactgttgcttcttggggcagcgaactgagccctggggctgctgctgtaatttataaggcaaattttattaaatttgtaactattcccagg

SEQ ID NO: 145110 - DNA, 728 bp, Homo sapiens
  Payload ID: 8670
  Gene Symbol: KATNB1
  Gene Name: katanin p80 (WD repeat containing) subunit B 1
  ENST ID: ENST00000566726
  CDS Start-End: 104-728
ggggatggaggcaagtgggggtcgcgcctggagcggagcctcggcctccggagccgcagctgcagccctgtattgagctgagatggctcgagcctaacattccatgatccaggatcgtgacagatgtgcacaggctgctgctgttgctgctgtggaagagatcgtcgcgcatgccagcaacgtgtcctcactggtgctgggcaaagcctccgggcggctgctggctacaggcggggatgactgccgcgtcaacctgtggtccatcaacaagcccaactgcatcatgagcctgacgggccacacatccccagtggagagcgtccgcctcaacacccccgaggagctcatcgtggccggctctcagtcgggctccatccgtgtctgggacctggaagctgccaaaattcttcgcacactcatgggacacaaagccaacatctgcagcctggatttccacccgtacggcgagtttgtagcctctggttcccaggacacaaacatcaagctctgggacatcaggaggaaaggctgtgtcttccgatacagggggcacagccaggccgtgcggtgtctccggttcagccccgatgggaagtggttggcgtcggccgcagatgaccacaccgtgaagctctgggatctcactgccggcaagatgatgtctgagttccctggtcacacggggcctgtcaacgtggtcgagtttcaccccaacgagtacctcctgg

SEQ ID NO: 145111 - DNA, 853 bp, Homo sapiens
  Payload ID: 8670
  Gene Symbol: KATNB1
  Gene Name: katanin p80 (WD repeat containing) subunit B 1
  ENST ID: ENST00000562592
  CDS Start-End: 222-853
gccggaggttttgttgtgagggtcggttgtcaagcagcggccaatcaaggcaggggatggaggcaagtgggggtcgcgcctggagcggagcctcggcctccggagccgcagctgcagccctgtattgagctgagatggctcgagcctaacattccatgatccaggatcgtgacagatgtgcacaggctgctgctgttgctgctgtgccagccagctgaaggatggccacccctgtggtcaccaagacagcctggaagttgcaagagatcgtcgcgcatgccagcaacgtgtcctcactggtgctgggcaaagcctccgggcggctgctggctacaggcggggatgactgccgcgtcaacctgtggtccatcaacaagcccaactgcatcatgagcctgacgggccacacatccccagtggagagcgtccgcctcaacacccccgaggagctcatcgtggccggctctcagtcgggctccatccgtgtctgggacctggaagctgccaaaattcttcgcacactcatgggacacaaagccaacatctgcagcctggatttccacccgtacggcgagtttgtagcctctggttcccaggacacaaacatcaagctctgggacatcaggaggaaaggctgtgtcttccgatacagggggcacagccaggccgtgcggtgtctccggttcagccccgatgggaagtggttggcgtcggccgcagatgaccacaccgtgaagctctgggatctcactgccggcaagatgatgtctgagttccctggtcacacggggcctgtcaacgtggtcgagtttcaccccaacgagtacctcctggcctccggcagctctgacag

SEQ ID NO: 145112 - DNA, 622 bp, Homo sapiens
  Payload ID: 8670
  Gene Symbol: KATNB1
  Gene Name: katanin p80 (WD repeat containing) subunit B 1
  ENST ID: ENST00000569627
  CDS Start-End: 272-622
tgcagccctgtattgagctgagatggctcgagcctaacattccatgatccaggatcgtgacagatgtgcacaggctgctgctgttgctgctgtgggtaatttggaaccacgaggcaccccagggccagaagacgaggcattctgtctgcctggatgtgtgggaactctctgccaacttgattggtggatctggggggggatccacccccaccccacgaggaaagcacagtttattttgtgggtggggcttcaggtgccagccagctgaaggatggccacccctgtggtcaccaagacagcctggaagttgcaagagatcgtcgcgcatgccagcaacgtgtcctcactggtgctgggcaaagcctccgggcggctgctggctacaggcggggatgactgccgcgtcaacctgtggtccatcaacaagcccaactgcatcatgagcctgacgggccacacatccccagtggagagcgtccgcctcaacacccccgaggagctcatcgtggccggctctcagtcgggctccatccgtgtctgggacctggaagctgccaaaactctgggacatcaggaggaaaggctgtgtcttccgatacagggggcacagccaggccgtgcg

SEQ ID NO: 145113 - DNA, 827 bp, Homo sapiens
  Payload ID: 8670
  Gene Symbol: KATNB1
  Gene Name: katanin p80 (WD repeat containing) subunit B 1
  ENST ID: ENST00000563462
  CDS Start-End: 1-827
cccgcgcggagatccagaacgccgaggactacaacgagatcttccagcccaagaacagcatcagtcggacgccaccccggagaagtgagcccttccctgcacccccagaggacgacgcagccacagcaaaggaggcagcaaagcccagccctgccatggatgtgcagttcccggtgccaaatctggaggtcctgccccggcccccagtggttgcttccacacctgcacccaaggctgagcctgccatcatccctgccacccggaacgagcccatcgggctgaaggcctccgacttcctgcccgccgtgaagatcccccagcaggccgagctggtggacgaggatgccatgtcacagatccgcaaaggccacgacaccatgtgtgtggtgctcaccagccgccacaagaacctggacactgtgcgggctgtgtggaccatgggcgacatcaagggccacactgtcccccactgccccacccctgacggtgctctgtttgcacagacgtcggtggactccgctgtggccatcaacgacctgtcggtggtggtggacctcctgaacatcgtcaaccagaaagcctccctgtggaagctggacctgtgcaccaccgtcctgccacagattgagaagcttctgcagagcaagtatgagagctacgtccagacgggctgcacctccctgaagctgatcctgcagcggtttctgcccctcatcacagacatgctggcggccccaccctctgtgggtgtggatatcagcagggaggagaggctgcataagtgccggctctgctacaagcagcttaagagcatcagcggcctggtc

SEQ ID NO: 145114 - DNA, 619 bp, Homo sapiens
  Payload ID: 8670
  Gene Symbol: KATNB1
  Gene Name: katanin p80 (WD repeat containing) subunit B 1
  ENST ID: ENST00000566785
  CDS Start-End: 383-619
ctggcctctgggaggagtttctttttccttacgttccaaatcaccctacctgaggtgccccctctgcagattcccaaacctaatttgcagtgcagcttctgactctggtggctttgccctgtattgagctgagatggctcgagcctaacattccatgatccaggatcgtgacagatgtgcacaggctgctgctgttgctgctgtgggtaatttggaaccacgaggcaccccagggccagaagacgaggcattctgtctgcctggatgtgtgggaactctctgccaacttgattggtggatctggggggggatccacccccaccccacgaggaaagcacagtttattttgtgggtggggcttcaggtgccagccagctgaaggatggccacccctgtggtcaccaagacagcctggaagttgcaagagatcgtcgcgcatgccagcaacgtgtcctcactggtgctgggcaaagcctccgggcggctgctggctacaggcggggatgactgccgcgtcaacctgtggtccatcaacaagcccaactgcatcatgagcctgacgggccacacatccccagtggagagcgtccgcctcaacacccccgaggagctcatcgtg

SEQ ID NO: 145115 - DNA, 2723 bp, Homo sapiens
  Payload ID: 8671
  Gene Symbol: KATNBL1
  Gene Name: katanin p80 subunit B-like 1
  Uniprot ID: Q9H079
  ENST ID: ENST00000256544
  CDS Start-End: 144-1058
gcgcgcgcggccgcgtttgaatggccctgagtgggactcggcccagaagccgagggactctctaggctgccgggcgctggtcgtcagcgccgaggctgggctgaggcgccgcggtaccatgaggcgccggtacttaagagattatggcatcagaaacccacaatgttaaaaaacggaacttttgtaataagattgaggatcatttcattgatcttcctagaaaaaagatctctaatttcactaataagaacatgaaggaggttaagaaatctccaaaacagttggctgcttacataaatagaacagttggacaaactgtgaaaagcccagataaacttcgtaaagtgatctatcgcagaaagaaagttcatcatccctttccaaatccttgttacagaaaaaaacagtcccctggaagtgggggctgtgacatggcaaataaagaaaatgaactggcttgtgcaggccacctgcctgaaaaattacaccatgatagtcgaacatatttggttaactccagtgattctggttcttcacagacagaaagcccatcatcaaaatatagtgggtttttttctgaggtttctcaggaccatgaaacaatggcccaagttttgttcagcaggaatatgagattgaatgtagctttaactttctggagaaagagaagtataagtgaacttgtagcttatttgttgaggatagaagatcttggcgttgtggtagattgccttcctgtgctcaccaattgtttacaggaagaaaaacaatatatctcacttggctgctgtgttgacttgttgcctctagtaaagtcactacttaaaagcaaatttgaagaatatgttatagttggtttaaactggcttcaagcagtcattaaaaggtggtggtcagaactatcatccaaaacagaaattataaatgatggaaatattcaaattttaaaacaacaattaagtggattatgggaacaggaaaaccatcttactttggttccaggatatactggtaatatagctaaggatgtagatgcttatttattacagttacattgagagatttcatctactaaagagcatttggtttttcaaaacatccctgaactgtataatttacaaaaaaaaaaagtctcgtctgagaactgtgaactgtggaagaaatcaaaactattttttcttttaaaaagccacgtaatgaaaccactaatgaaatcccagcaatctgcttcacattgaagtggaaaaatatccaaaaggagcagcttcaatttcattgaggtgaaagtgcactatgaagattgttcacctttgctgcatttgggagttatatggttatttggtaacattaagaactactggattttaatgcaatcctgcataaaaatataatttatactatgtgaaaaaataagacaggacttaccactaggaaccaccaagaccaatcatcattaacttttttaagattgtgttttattaaaaaaaaaaaacacttaaatgtgtgcagctattttcttatgttgaaaagactgaaagtttaaaacatgaaaaaaatcaatattaaacattttttgttcacactgagatactgtgtatgtaaaatgccttaattattaataagccaatgtgttatgataccaatatctgttttaaaaaactaaaaccaaccatgcttctggcatgataaaatcatggaattaaatcaggggtttacattcttgtagagtgttcttgaaacactctctgcaccatttttaaaacttgagaatagttttagtatctctgatattttttgccagaatcatcatgtcatgtatgaatgtgttatccctatctaaggaaaaaggtgaatatgtttttgtatgaatgtttaactggaaatgtccatggacttggctaatttatatttactttttattgtacatagatttctaatatttttcattcctgtatcatttaaacttccttcatttgagtaaattcactaaatatttctattttttgcttttttaaattctgattttatatgaattctaattctttttcactacatatgttttaaagagttacatacagtgatttagaatggtttacagttaatgctgatcttgtattttaaattccaacactttgtgtcactacctcctctaatggttagtatgatatgctagcagactgtatgaggtctttttttaaaataccacttttagtgtcagtgaaccaaattctggaatgtcttaacagctctaaatcttacttgtcttgaaaatgattggggtttaataccactgctggtggttcacacatcatcccatccttaatatgcctgacaggcatctgagcaaaggtttttagtaattgaatttctctgcagtagtccttcaagcacttgaatgtaaacctttagcatttattcgtttaatgactactgatacgaatctcaagcagatttcttgctcttaaaagttatgtttcactgagttctggttttgtgtagctatattttatatagctagatattcctcacagtgaacatgaattgtaataattggttatttccttaagtctttagattataataatttcagattattgcacgtctgtgatttgagaggtgagttatttaagaggccagttttcaggacatgggaatttgaattgtaaacctgttatctctgtgaaacttttaacatgataaaatataacctttctttgtgctta

SEQ ID NO: 145116 - DNA, 797 bp, Homo sapiens
  Payload ID: 8671
  Gene Symbol: KATNBL1
  Gene Name: katanin p80 subunit B-like 1
  ENST ID: ENST00000557877
  CDS Start-End: 262-797
gccgggcgctggtcgtcagcgccgaggctgggctgaggcgccgcggtaccatgaggcgccgctcgccctctgtaggctgcatccactgtccagccagtcccagtgagatgaaccaggtacctcagttggaaatgcagaaatcacccgtcttctgtgttgatcaccctgggagctgcagaccggagctgttcctattataatggccatcttggaatggacttgccatctctacttcttgatgtccttggtacttaagagattatggcatcagaaacccacaatgttaaaaaacggaacttttgtaataagattgaggatcatttcattgatcttcctagaaaaaagatctctaatttcactaataagaacatgaaggaggttaagaaatctccaaaacagttggctgcttacataaatagaacagttggacaaactgtgaaaagcccagataaacttcgtaaagtgatctatcgcagaaagaaagttcatcatccctttccaaatccttgttacagaaaaaaacagtcccctggaagtgggggctgtgacatggcaaataaagaaaatgaactggcttgtgcaggccacctgcctgaaaaattacaccatgatagtcgaacatatttggttaactccagtgattctggttcttcacagacagaaagcccatcatcaaaatatagtgggtttttttctgaggtttctcaggaccatgaaacaatggcccaagttttgttcagcaggaatatgagattgaatgtagctttaactttctggagaaagagaagtataagtga

SEQ ID NO: 145117 - DNA, 884 bp, Homo sapiens
  Payload ID: 8671
  Gene Symbol: KATNBL1
  Gene Name: katanin p80 subunit B-like 1
  ENST ID: ENST00000561270
  CDS Start-End: 1-507
aaaagcccagataaacttcgtaaagtgatctatcgcagaaagaaagttcatcatccctttccaaatccttgttacagaaaaaaacagtcccctggaagtgggggctgtgacatggcaaataaagaaaatgaactggcttgtgcaggccacctgcctgaaaaattacaccatgatagtcgaacatatttggttaactccagtgattctggttcttcacagacagaaagcccatcatcaaaatatagtgggtttttttctgaggtttctcaggaccatgaaacaatggcccaagttttgttcagcaggaatatgagattgaatgtagctttaactttctggagaaagagaagtataagtgaacttgtagcttatttgttgagaaatattcaaattttaaaacaacaattaagtggattatgggaacaggaaaaccatcttactttggttccaggatatactggtaatatagctaaggatgtagatgcttatttattacagttacattgagagatttcatctactaaagagcatttggtttttcaaaacatccctgaactgtataatttacaaaaaaaaaaagtctcgtctgagaactgtgaactgtggaagaaatcaaaactattttttcttttaaaaagccacgtaatgaaaccactaatgaaatcccagcaatctgcttcacattgaagtggaaaaatatccaaaaggagcagcttcaatttcattgaggtgaaagtgcactatgaagattgttcacctttgctgcatttgggagttatatggttatttggtaacattaagaactactggattttaatgcaatcctgcataaaaatataatttatactatgtgaaaaaataagacaggacttaccactaggaac

SEQ ID NO: 145118 - DNA, 572 bp, Homo sapiens
  Payload ID: 8671
  Gene Symbol: KATNBL1
  Gene Name: katanin p80 subunit B-like 1
  ENST ID: ENST00000559464
  CDS Start-End: 456-572
tgttctttccgtcttcacaataaatcttgctgttgctcactgtttgggtccgcatcacctttaagagctggaacacttgccacgaaggtcctccggcttcattcttgaattcggccagactacgaacccaccggaaggaagaaactccggacacatcggaaggaacaaactctggaccacgaacccaccagagggaagaaactctggacacaccatttttgagagctgtaacagcgtgaaggtccacgacttcattcttgagtggttataaactgttttcaccttcaagattcttgagagataactacacataccctttgccatagtgggaatgactgtgtagtagtaactggaggagaaagtttctttgtacacaactatgctttgattttcaagaggaggaatgaaattgcctcgtaaaattacagagttaaatacaatgtacttaagagattatggcatcagaaacccacaatgttaaaaaacggaacttttgtaataagattgaggatcatttcattgatcttcctagaaaaaagatctctaatttcactaataagaacatgaaggag

SEQ ID NO: 145119 - DNA, 555 bp, Homo sapiens
  Payload ID: 8671
  Gene Symbol: KATNBL1
  Gene Name: katanin p80 subunit B-like 1
  ENST ID: ENST00000561371
  CDS Start-End: 1-334
aagcaaatttgaagaatatgttatagttggtttaaactggcttcaagcagtcattaaaaggtggtggtcagaactatcatccaaaacagaaattataaatgatggaaatattcaaattttaaaacaacaattaagtggattatgggaacaggaaaaccatcttactttggttccaggatatactggtaatatagctaagaaattgaaagaagagggccgggcaaggtggctcatgcctgtaatcccagtactttgggaggccaaggtgggcagatcacgagctcaggagatcgagaccatcccggccaacatggtgaaaccccatctctactaaaacacaaaaaattagccgggcgtggtggtgcacacctgtagtcccagctacttgggaggctgaggctggagaatcacttgaaccctggaggtggaggttgcagagagccaagatcacgccactgcacttcagcctggtgacagagcaagactctgtctcaaaaaaaagagaaagaaattgaaagaggctattgtcaagctgggctcaagtgaatatagcac

SEQ ID NO: 145120 - DNA, 733 bp, Homo sapiens
  Payload ID: 8671
  Gene Symbol: KATNBL1
  Gene Name: katanin p80 subunit B-like 1
  ENST ID: ENST00000559760
  CDS Start-End: 1-459
gtttctcaggaccatgaaacaatggcccaagttttgttcagcaggaatatgagattgaatgtagctttaactttctggagaaagagaagtataagtgaacttgtagcttatttgttgaggatagaagatcttggcgttgtggtagattgccttcctgtgctcaccaattgtttacaggaagaaaaacaatatatctcacttggctgctgtgttgacttgttgcctctagtaaagtcactacttaaaagcaaatttgaagaatatgttatagttggtttaaactggcttcaagcagtcattaaaaggtggtggtcagaactatcatccaaaacagaaattataaatgatggaaatattcaaattttaaaacaacaattaagtggattatgggaacaggaaaaccatcttactttggttccaggatatactggtaatatagctaaggtcctctgcgtgtaactgtgaccttggcagcaagcacaggaattggccattgaacatgtttcatgtacagcccctgaaatgctatgctagaggatatttacagagggttttaatcagagaaaagtatttgaaaaaattttgagaatccaataaggacagcatcagaaaacaagacgaggaactcaggaaacaagggataagaaacataattaaatggttttggagattaagttttacttttgctaatgttatgctttttgagaaggtaaactatttaaatcacagtgaa

SEQ ID NO: 145121 - DNA, 436 bp, Homo sapiens
  Payload ID: 8671
  Gene Symbol: KATNBL1
  Gene Name: katanin p80 subunit B-like 1
  ENST ID: ENST00000559515
  CDS Start-End: 214-436
gcgcgcggccgcgtttgaatggccctgagtgggactcggcccagaagccgagggactctctaggctgccgggcgctggtcgtcagcgccgaggctgggctgaggcgccgcggtaccatgaggcgccgaaactatgggatgatggtgagaatttcacagcaggaaagattgggaagtttaaggatctgaacaggagttaggtacttaagagattatggcatcagaaacccacaatgttaaaaaacggaacttttgtaataagattgaggatcatttcattgatcttcctagaaaaaagatctctaatttcactaataagaacatgaaggaggttaagaaatctccaaaacagttggctgcttacataaatagaacagttggacaaactgtgaaaagcccagataaacttcgtaaagtgatctatcgcagaaagaaag

SEQ ID NO: 145122 - DNA, 853 bp, Homo sapiens
  Payload ID: 8671
  Gene Symbol: KATNBL1
  Gene Name: katanin p80 subunit B-like 1
  ENST ID: ENST00000560108
  CDS Start-End: 323-853
gcgcgcgcggccgcgtttgaatggccctgagtgggactcggcccagaagccgagggactctctaggctgccgggcgctggtcgtcagcgccgaggctgggctgaggcgccgcggtaccatgaggcgccgtggttataaactgttttcaccttcaagattcttgagagataactacacataccctttgccatagtgggaatgactgtgtagtagtaactggaggagaaagtttctttgtacacaactatgctttgattttcaagaggaggaatgaaattgcctcgtaaaattacagagttaaatacaatgtacttaagagattatggcatcagaaacccacaatgttaaaaaacggaacttttgtaataagattgaggatcatttcattgatcttcctagaaaaaagatctctaatttcactaataagaacatgaaggaggttaagaaatctccaaaacagttggctgcttacataaatagaacagttggacaaactgtgaaaagcccagataaacttcgtaaagtgatctatcgcagaaagaaagttcatcatccctttccaaatccttgttacagaaaaaaacagtcccctggaagtgggggctgtgacatggcaaataaagaaaatgaactggcttgtgcaggccacctgcctgaaaaattacaccatgatagtcgaacatatttggttaactccagtgattctggttcttcacagacagaaagcccatcatcaaaatatagtgggtttttttctgaggtttctcaggaccatgaaacaatggcccaagttttgttcagcaggaatatgagattgaatgtagctttaactttctggagaaagagaagtata

SEQ ID NO: 145123 - DNA, 562 bp, Homo sapiens
  Payload ID: 8671
  Gene Symbol: KATNBL1
  Gene Name: katanin p80 subunit B-like 1
  ENST ID: ENST00000559462
  CDS Start-End: 318-562
agctatcccggcgggccgcgcgcgcggccgcgtttgaatggccctgagtgggactcggcccagaagccgagggactctctaggctgccgggcgctggtcgtcagcgccgaggctgggctgaggcgccgcggtaccatgaggcgccggttaagaaatctccaaaacagttggctgcttacataaatagaacagttggacaaactgtgaaaagcccagataaacttcgtaaagtgatctatcgcagaaagaaagttcatcatccctttccaaatccttgttacagaaaaaaacagtcccctggaagtgggggctgtgacatggcaaataaagaaaatgaactggcttgtgcaggccacctgcctgaaaaattacaccatgatagtcgaacatatttggttaactccagtgattctggttcttcacagacagaaagcccatcatcaaaatatagtgggtttttttctgaggtttctcaggaccatgaaacaatggcccaagttttgttcagcaggaatatgagattgaatgtagctttaactttctggagaaagagaagtataag

SEQ ID NO: 145124 - DNA, 597 bp, Homo sapiens
  Payload ID: 8671
  Gene Symbol: KATNBL1
  Gene Name: katanin p80 subunit B-like 1
  ENST ID: ENST00000560310
  CDS Start-End: 218-597
atgctcttgcgaccactccaggcacgattggcacccttctgcagaagttaagaaatctccaaaacagttggctgcttacataaatagaacagttggacaaactgtgaaaagcccagataaacttcgtaaagtgatctatcgcagaaagaaagttcatcatccctttccaaatccttgttacagaaaaaaacagtcccctggaagtgggggctgtgacatggcaaataaagaaaatgaactggcttgtgcaggccacctgcctgaaaaattacaccatgatagtcgaacatatttggttaactccagtgattctggttcttcacagacagaaagcccatcatcaaaatatagtgggtttttttctgaggtttctcaggaccatgaaacaatggcccaagttttgttcagcaggaatatgagattgaatgtagctttaactttctggagaaagagaagtataagtgaacttgtagcttatttgttgaggatagaagatcttggcgttgtggtagattgccttcctgtgctcaccaattgtttacaggaagaaaaacaatatatctcacttggctgctgtgttgacttgttgcctctagt

SEQ ID NO: 145125 - DNA, 1913 bp, Homo sapiens
  Payload ID: 8672
  Gene Symbol: KAZALD1
  Gene Name: Kazal-type serine peptidase inhibitor domain 1
  Uniprot ID: Q96I82
  ENST ID: ENST00000370200
  CDS Start-End: 327-1241
ggctgggggaaatgacccgggagggtcccatgcggctacataaaattggcagccttagaactagtgggaaggcgggtgcgcgaagtcgaggggcggagagagggggccggaggagctgctttctgaatccaagttcgtgggctctctcagaagtcctcaggacggagcagaggtggccggcgggcccggctgactgcgcctctgctttctttccataaccttttctttcggactcgaatcacggctgctgcgaagggtctagttccggacactagggtgcccgaacgcgctgatgccccgagtgctcgcagggcttcccgctaaccatgctgccgccgccgcggcccgcagctgccttggcgctgcctgtgctcctgctactgctggtggtgctgacgccgcccccgaccggcgcaaggccatccccaggcccagattacctgcggcgcggctggatgcggctgctagcggagggcgagggctgcgctccctgccggccagaagagtgcgccgcgccgcggggctgcctggcgggcagggtgcgcgacgcgtgcggctgctgctgggaatgcgccaacctcgagggccagctctgcgacctggaccccagtgctcacttctacgggcactgcggcgagcagcttgagtgccggctggacacaggcggcgacctgagccgcggagaggtgccggaacctctgtgtgcctgtcgttcgcagagtccgctctgcgggtccgacggtcacacctactcccagatctgccgcctgcaggaggcggcccgcgctcggcccgatgccaacctcactgtggcacacccggggccctgcgaatcggggccccagatcgtgtcacatccatatgacacttggaatgtgacagggcaggatgtgatctttggctgtgaagtgtttgcctaccccatggcctccatcgagtggaggaaggatggcttggacatccagctgccaggggatgacccccacatctctgtgcagtttaggggtggaccccagaggtttgaggtgactggctggctgcagatccaggctgtgcgtcccagtgatgagggcacttaccgctgccttggccgcaatgccctgggtcaagtggaggcccctgctagcttgacagtgctcacacctgaccagctgaactctacaggcatcccccagctgcgatcactaaacctggttcctgaggaggaggctgagagtgaagagaatgacgattactactaggtccagagctctggcccatgggggtgggtgagcggctatagtgttcatccctgctcttgaaaagacctggaaaggggagcagggtcccttcatcgactgctttcatgctgtcagtagggatgatcatgggaggcctatttgactccaaggtagcagtgtggtaggatagagacaaaagctggaggagggtagggagagaagctgagaccaggaccggtggggtacaaaggggcccatgcaggagatgccctggccagtaggacctccaacaggttgtttcccaggctggggtgggggcctgagcagacacagaggtgcaggcaccaggattctccacttcttccagccctgctgggccacagttctaactgcccttcctcccaggccctggttcttgctatttcctggtccccaacgtttatctagcttgtttgccctttccccaaactcatcttccagaacttttccctctctcctaagccccagttgcacctactaactgcagtcccttttgctgtctgccgtcttttgtacaagagagagaacagcggagcatgacttagttcagtgcagagagataggtgaggccagctcgagatcttataccactctgtattggacaaaggctagcacagggctaggcaccaataaagatttctaatgatgcacaga

SEQ ID NO: 145126 - DNA, 3838 bp, Homo sapiens
  Payload ID: 8673
  Gene Symbol: KAZN
  Gene Name: kazrin, periplakin interacting protein
  Uniprot ID: Q674X7
  ENST ID: ENST00000361144
  CDS Start-End: 236-1483
agccgttcccacgtgagaggctccgcggccgaattcctcgcgtgcagcaggcgcggaccgcccggcgtccggccggactgagagccctggtccggcgcgcgccgccggccgggcgggaggcgggggcgggctcggctgcgccccgatgcggcggcgacctccgggtctgtgagcccggcgcgcgccgtcggagcccctcgcgcagccgctggtagcgtccccccgggcacccggcatgcgggcggccgactcgggctcgtgggagcgcgtccgccagctcgcggcgcagggcgagccggcgccttcctgcggggcgggggccgggcccgcgcggcccccgggacccgcagcctgcgagcagtgcgtggacgcggcggggcccggcgatcggccccgcgccggggttccccgggtccgagcggatggcgactgcagccagcccgtgctcctgcgggaagaagtgtcgcggctccaggaggaagttcaccttctccggcagatgaaggagatgttggcgaaggacctggaggagtcgcagggcggcaagtcctctgaggtcctctcggccaccgagctcagggtccagctggcccagaaggagcaggagctagccagagccaaagaagccttgcaggccatgaaagctgatcggaagcgcttaaagggcgagaagacagacctggtgagccagatgcagcagctgtatgccacactggagagccgcgaggagcagctccgagacttcatccgcaactatgagcagcaccgcaaggagagcgaggatgcggtcaaagcgctggccaaggagaaggacctgctggagcgtgagaagtgggagctgcggcgccaagccaaggaggccacagaccacgccacggcactgcgctcccagctggacctcaaggacaaccggatgaaggagctggaggccgagctggccatggccaaacagtccttagctacgctgaccaaggacgtccccaagcggcattccctcgccatgccgggcgagacggtgctcaatggcaaccaggagtgggtggtgcaggcggacctcccgctgaccgcagccatccggcagagtcaacagactctctaccactcacacccccctcaccctgcggaccggcaagcggtcagggtgagcccctgccactcccggcagccctctgtcatctccgacgcatctgccgccgaaggcgaccggtcgtccacaccgagcgacatcaactcccctcgacaccggacacactccctctgcaacggcgacagtcccggcccagttcagaagaacctgcacaaccctattgtacagtcactagaggatcttgaagaccaaaaacggaaaaagaagaaagagaagatgggattcggctccatctcccgcgtcttcgccagagggaagcagcggaagtccctcgaccccggcctctttgatggtaccgcccctgattattacatagaggaggacgcggactggtgatacgcgctcccctgcgcctgctgcccgcaggcgtgtctgtgcgtgtgggcgtgtgtgcaagcgagcgtgggtgcgcgtgtggccgtgcgtggggtgcgtgtgcacgtgtgcgctggcacacatgggtgctgggtgtggccgagcgcctctaacaagtgaaaacacgagtgtgaacctctctcccctgcgtcgccacctctgtaattgatgtacataccgcaaaccgtgtgtgaacctgtcaactctctgtcgtctttggagcgatacagttgtgttgttaatctggtttattatttttcttcagtgtttggtttttctttttctttttgtttggttcgtcggtttgtttttgtttttgtttttttccccctttctcctcccctcctcctttttatgaaacttgaaaacttgaaggactgctgtgtatttgtaaataacaaaactattgtgcactctgtgcttgtaaatgtccctcgtccaaaccgctactcctggagcccgtctggcagaggatgtggtctgtttttgatgtcccccctcccgcccccctggtgtgaacgtgtgggaccagaccctgtcctgggggtgcgcccaagtcactttaaccacaaaacgccatcgtcgtcagggtaagctctgctctctacaaagactcgcgagccgggccaaggggccttgtcttggctgggtttgtcagaggtcaaaccggctcttttaaacggcctaccagtttttaaattgcattgccgtttctttctttatgaaaaaaaagaaaaaaagaaaattgtttcatttaatttatttgcacaaatgctgaaaacttattctatctaaattattacataaatattggaatgtctatttttccatggggtgggcgggaggtgggtgtctctgttgacttgtctgttctgttaccatgctgctacccaactgtgcaaagtagtttagggtggccagaacccagggaccattggatttcaaagcttgctttttctgttggttcttctctctccttctctctctgtctctcccattctcctgcccatgcatgaaaggatcctccaccttcttcccacccagagctccctccaggcctttctctatatatttatttatctgacatacagaacacgactttagtgagcagagtgctgacagtcatggtccccttctttgggtctgtcttttgagagaggttgagttcagggcaagacagcctgccacacatccaagggtacgaccagtgggaccctggcctgagtctgttctccgaggggcctccagcagcttctgttcctccctgcagctgtgtctttcttgtcctgggtttaggatgcaggtgggccaggcaggtgttgttaggggaggcacccacttcaaaaggagggccacagtggggacacagagtccagcacctgagccctccaccctccccattctggttggttccatcagccacacttagaatctcccaggatcccttggactccgtcccccaacttgtcacagcagcctgagcctacccaccccaggagacaagagctggcaggaacatctgcctatatggggggtggcgttggccccaaagaggcttcaccagcaaaggaactgtgtgtattttaatgccaggggacggaggatgtgtgagctgttcagcaaggtctgcccaaggcctaaaactcaatttccttattcttttgcttctgctcgtccttaacaactaacagctcaacccacacctctagacaacagtagtcgtgctttctgctaacggtgacattttcagctcttaaaaagaagcaaggagattttcaaatgctagagtatctctatcagaaggcataggacattgtgtccaaagtctcaagaacaaacaacactttccttctgacctggtccaaaagtcagcaaacagcaagcaggcagaggccctcataaggacttttctgtcctcctttgaccaaactgtttaaccgagcctaggggtgacggggagcgacccaagctggcatctttctctacggagacagattttagaaaatacttttcttgcccatgaatttcttttctggttgatttttatcattttccctttacttacaagaaaataagattgcaaccactcctgctaatgatttagtagttccttttcatttcagtttttgtaaattaggagataattctaagagttactaaaggatgatttatttaagagaactacgtcaaatagcgaatgagttatgggtaacattagacgaaaataacctttcccgtgggaaaggtttctcgaaggcatggatgcaaatataaaatattaaaaaaaatctaaataaagcttattttaaaatatga

SEQ ID NO: 145127 - DNA, 800 bp, Homo sapiens
  Payload ID: 8673
  Gene Symbol: KAZN
  Gene Name: kazrin, periplakin interacting protein
  ENST ID: ENST00000376028
  CDS Start-End: 302-800
gggagagggaaggtcaggcttgcctcctgttcacaaggacaacctctgtctcccttgtggcggcttctatgaaggtggggactccaggctttctctcgtctgctttttggatgccttcaagagaggccagttagaggatatcaattgtggcaattccccagagccctcatcagatggcattagcccgtcatgtgctgcagtggcacccagtttggaggaaattcggaaccagaagagtgtgacagtgctcctgcgggaagaagtgtcgcggctccaggaggaagttcaccttctccggcagatgaaggagatgttggcgaaggacctggaggagtcgcagggcggcaagtcctctgaggtcctctcggccaccgagctcagggtccagctggcccagaaggagcaggagctagccagagccaaagaagccttgcaggccatgaaagctgatcggaagcgcttaaagggcgagaagacagacctggtgagccagatgcagcagctgtatgccacactggagagccgcgaggagcagctccgagacttcatccgcaactatgagcagcaccgcaaggagagcgaggatgcggtcaaagcgctggccaaggagaaggacctgctggagcgtgagaagtgggagctgcggcgccaagccaaggaggccacagaccacgccacggcactgcgctcccagctggacctcaaggacaaccggatgaaggagctggaggccgagctggccatggccaaacagtccttagctacgctgaccaaggacgtccccaagcggcattccctcg

SEQ ID NO: 145128 - DNA, 6030 bp, Homo sapiens
  Payload ID: 8673
  Gene Symbol: KAZN
  Gene Name: kazrin, periplakin interacting protein
  Uniprot ID: Q674X7
  ENST ID: ENST00000376030
  CDS Start-End: 295-2622
gcgcccgcccgccggggtctcggcgatcgctgctcctcctcctccttctcctcctcttttttctcctccgcctcctccccccgccgcctcgccaccgccgcggctagggctggaggcgccgctgtcattcctgtgccggaggaaccggcgctgccggtgcctgggggtcggggcgcgggcgaagccgggccgcggaggacacaacaggtagagccgggggtgcccggccgcgcgccccccgcgcatcatgcagctctttgtcacctctctcgcccccaggccaaaatcctgagcatgatggaagacaataagcagctcgcgctccgcatcgatggggcggtccagtcggccagccaggaggtgaccaacctgcgagccgaactcacggccaccaaccggagactggcggaactgagcggcggcggcggccccggcccgggcccgggagccgcggccagcgcctcggcggcgggggactcggcggcgacgaacatggagaacccccagcttggagcgcaagtgctcctgcgggaagaagtgtcgcggctccaggaggaagttcaccttctccggcagatgaaggagatgttggcgaaggacctggaggagtcgcagggcggcaagtcctctgaggtcctctcggccaccgagctcagggtccagctggcccagaaggagcaggagctagccagagccaaagaagccttgcaggccatgaaagctgatcggaagcgcttaaagggcgagaagacagacctggtgagccagatgcagcagctgtatgccacactggagagccgcgaggagcagctccgagacttcatccgcaactatgagcagcaccgcaaggagagcgaggatgcggtcaaagcgctggccaaggagaaggacctgctggagcgtgagaagtgggagctgcggcgccaagccaaggaggccacagaccacgccacggcactgcgctcccagctggacctcaaggacaaccggatgaaggagctggaggccgagctggccatggccaaacagtccttagctacgctgaccaaggacgtccccaagcggcattccctcgccatgccgggcgagacggtgctcaatggcaaccaggagtgggtggtgcaggcggacctcccgctgaccgcagccatccggcagagtcaacagactctctaccactcacacccccctcaccctgcggaccggcaagcggtcagggtgagcccctgccactcccggcagccctctgtcatctccgacgcatctgccgccgaaggcgaccggtcgtccacaccgagcgacatcaactcccctcgacaccggacacactccctctgcaacggcgacagtcccggcccagttcagaagaacctgcacaaccctattgtacagtcactagaggatcttgaagaccaaaaacggaaaaagaagaaagagaagatgggattcggctccatctcccgcgtcttcgccagagggaagcagcggaagtccctcgaccccggcctctttgatgactcggacagccagtgcagccccacgcggcagagcctcagcctgtcggaaggcgaggagcagatggaccggctgcagcaggtggagctggtgaggaccacccctatgtcccactggaaggcgggcaccgtccaggcctggctggaggtggtgatggccatgcctatgtacgtcaaggcctgcacggagaacgtgaagagcgggaaggtgctgctgagcctgagtgacgaggacctgcagctgggccttggggtgtgcagctccctgcaccggcgcaagctgcgcctggccatcgaggactaccgtgatgccgaggcaggccgcagcctgtccaaagctgccgagctggaccatcactgggtggccaaggcctggctgaatgacattggcctgtcccagtactcccaggcctttcagaaccacctggttgatgggcggatgctgaattccctgatgaagcgagacctggagaagcacctgaacgtgtccaagaagttccaccaggtcagcatcctgctggggatcgagctgctgtaccaagtgaacttcagcagggaggccctccaggagcgccgggcccgctgcgagacgcagaacattgaccccgtggtgtggaccaaccagcgggtgctcaagtgggttcgagacatcgacctgaaggagtacgcagacaacctgaccaacagcggcgtccatggtgctgtgctggtgctggagcccacattcaatgccgaggccatggccactgccctgggcatccccagtgggaagcacatcctccggagacacctggcagaggagatgagcgccgtcttccacccagccaactccacaggcatccgggaggctgagcgttttggaacgccccctggcagggcctccagcgtcacgcgggcaggaaaggaggagaacagcagcggtctcaagtacaaggctggccggctgcccctggggaagataggaaggggcttcagcagcaaagatcccgatttccatgatgactatggctctcttcaaaacgaagattgcggagacgatgacccccagagcaggctggaacagtgccgtctggaaggctacaacagcctggaggtcaccaacgtgtaaggaactggtggctccaccagacccaacgtgagagacccaggaaggaagagaagccagatggccccaggtgtcgttctcactgtacatagcggccgcaggctgaggatgtcccttgctcctgggcaaaatcccgatggactctgcggtttcagctccacagcgcccaggagagagaagacaccagcccacctgtcttgggtgggccatggactttcctgttcagctggagatgggcccagaggacctgtcacagtgtccggccctgcctccatccaggatacacaggctccacctcagagtgaccgtcactgtggagcagccaagcagtccctggagccttaaacggagctgccaaggtgggaggaggcccacagttccctaaaacacccttccggcgggagcaggggggaccccaaccccacaccccagcgcccagtgcattggcagagccgggtgcaggaagtgctgcctcttgccgagacgtcggacagggcgggggttggggaactctcggctacagcatcttacccttgactgagaacttgggtcctgacttggctcactgaatctctcttgggagaatgcaaaatccttccacctgaaaagctctgtgacacatgggggtggacgtattgaagagctgtttgccgatccacccaggagtggctacgctgagtggggagccggtgaatgatccgtgcaggagtggggcttagcagccacatttctaggagatgcagatatcctatcaccagaatgaaagctattgggacaacaggatcggggatgaccgacggccccatatggtgaatctctggcctgtggtttggctttactgagattccaaaccccactatctgcactccgtgacagtggtatggagtgtggcaatgagtttggggtctggggcagggaaatgcttgacattgttaacccaacaaacctttgttgtgatgtccctgtcacctgaaacataggtgacatagctcaccaatgtcctaaccgagacacaaactccacagagcaaaatcatttggtattggtggggagaaccccagcccttttcttgacctgccactgttatgctgtgtggcttcttcccagtggcctcacctctctgtgcctcgatgtcttcatctacgatacttctggttccctcccagggacatcgtgaggattaacacttgctaatatctgtaacacaatttgtaacctctcaggagacaatgggaagttatggggtagctaatttcccatttacaacacagaaatgatatagagctagttcgctccaactctttaggttgaagcagtgtgcaaaaggaagaaaagaaatgtttaatgttcagacctgccaagagcctccaacagggctcaagaaacatataaatcccatgagcacagccttgaaaaccagtttgactcaagccttcgggcctcagttcattgaccagatgacagccacgtgatgattagggaaggacggatgcattgcgattctgcttacacatcgggttatcaaagcgagtcacttgttggaaccatgatgctcgacctccttcaaggccgtttgcactggggcttgagtttccaagattcacaacaggtgtcagcctctgagaaccctcaaagcgtgtgttcttcaacctggcaaattgtttcctctcatgggggaagccgagctctgatgaacttgagaattacacctctctcatgccgaagaccgtggtgttccccctaatgacataaacgcagcctttcttgctgtctgagaccaaatgtctagttggtagacaggtggatgtttggcctcctaagggcacacttctgatcctgggccccaggtggtgaatctctggcatgtggcttggctttgttgagactccaaattccattatcttcatgacattcggcctcatccatagggtcctgaagctgcagtccacagctcagaaaggagaggtgagacctccctccaacctggtgccacaggtctctcccaagccacatccagcctggatgacctgggaccccagaaactgccgtttgggaggcagcaacagcaacgtgcccaggcaggcagttattcccacagagtgagccagaattgtagcagggcacttgaatgcagagctgatgatttgaaaccaacgttcacccaacttgtcagaaatggcacttacatggttcgatcttgctggagacaagtggacaattgggggtcactggcagagacagtattgcccaaaatgttcacagcaggaggccagcaggcctgaggcaacacgggcaaccgcgaatgcctcttttggtttaaattatgccatcacaaccctctttcacccatgaggctccccatccctgacagccaggtgagcatttggagctggtttctcaacatgaggatgggttggttgttaaattaacaacctccacagtatcagattgagtgagctttgtctgctggaaaaacctgaaacgtcaactctgcttcaaggtcggcaagaagaacagaaggcggagacttggcagagagactcaagctgattgtcacaggctacagaggggccagctccagaacagtgaccagctacatcctgtccaagcagcccgagtgtggtcttggtccctgcagggcaatgtgggcatctggacctggggacgatgtggatgcacttcttggaaagctgttgtagcttgtgcctgtgggtggagaaggcacctgcctggtagactctcagctttctgacccccaggagcctctgcgaggcccctttgtccttggctgagccggacctttcttttggaaatctgtctgtctgttggcatcgctgttttcagaccccaggctgcagaggaggggagaagccacacaacaatctggacccaataaagtggagagaagggcgtctctacacagcccggccagcgtggagggccccaggacagggacccaaaagcttgacgtcactgaacagggctgggtactggcagaacaggaagatttggccagaggtgacctcagtgttccctccaggggcatccaggcccctctgacctggggagaagaaggcccatgctcaggcccacctccctcttcccatcagagcccatgcgtcctgggcaccaccacttccactctgcttttcgaggctccggagggctcttcctgctgtgaaaggaaaggagaagaaagcctgtgggcaatggcaacctctgagtctggcattcttgccaatggctggccagcgaggagaatctcccgagccctgacacacaaaggcattttgtggctgcagaggaaatgggttggctctgaacaaagatgcagtttctagggccgtggccccaaatcgcttccccgagagtgaattttaacactgtaacaataaatactactgcacagca

SEQ ID NO: 145129 - DNA, 1295 bp, Homo sapiens
  Payload ID: 8673
  Gene Symbol: KAZN
  Gene Name: kazrin, periplakin interacting protein
  Uniprot ID: Q674X7
  ENST ID: ENST00000400797
  CDS Start-End: 312-1295
gcatcagcagctgtctgccagtgttgacggagggctcatgggtgccaggccgcttgctggggctttttatctgtcctcaggcattggcacagcagccctgggagatgaatactattgtgatcttcattctccacacaaggacagggaagtgacgtgccagggtcaaacaactacccaaggacagagccaggatttgaaccaggccatccagttccagaaccactgctcttcactgtcattgtggccattttacagtgctcctgcgggaagaagtgtcgcggctccaggaggaagttcaccttctccggcagatgaaggagatgttggcgaaggacctggaggagtcgcagggcggcaagtcctctgaggtcctctcggccaccgagctcagggtccagctggcccagaaggagcaggagctagccagagccaaagaagccttgcaggccatgaaagctgatcggaagcgcttaaagggcgagaagacagacctggtgagccagatgcagcagctgtatgccacactggagagccgcgaggagcagctccgagacttcatccgcaactatgagcagcaccgcaaggagagcgaggatgcggtcaaagcgctggccaaggagaaggacctgctggagcgtgagaagtgggagctgcggcgccaagccaaggaggccacagaccacgccacggcactgcgctcccagctggacctcaaggacaaccggatgaaggagctggaggccgagctggccatggccaaacagtccttagctacgctgaccaaggacgtccccaagcggcattccctcgccatgccgggcgagacggtgctcaatggcaaccaggagtgggtggtgcaggcggacctcccgctgaccgcagccatccggcagagtcaacagactctctaccactcacacccccctcaccctgcggaccggcaagcggtcagggtgagcccctgccactcccggcagccctctgtcatctccgacgcatctgccgccgaaggcgaccggtcgtccacaccgagcgacatcaactcccctcgacaccggacacactccctctgcaacggcgacagtcccggcccagttcagaagaacctgcacaaccctattgtacagtcactagaggatcttgaagaccaaaaacggaaaaagaagaaagagaagatgggattcggctccatctcccgcgtcttcgccagagggaagcagcggaagtccctcgaccccggcctctttgatggtaccgcccctgattattacatagaggaggacgcggactggtga

SEQ ID NO: 145130 - DNA, 3643 bp, Homo sapiens
  Payload ID: 8673
  Gene Symbol: KAZN
  Gene Name: kazrin, periplakin interacting protein
  Uniprot ID: Q674X7
  ENST ID: ENST00000400798
  CDS Start-End: 302-1285
gggagagggaaggtcaggcttgcctcctgttcacaaggacaacctctgtctcccttgtggcggcttctatgaaggtggggactccaggctttctctcgtctgctttttggatgccttcaagagaggccagttagaggatatcaattgtggcaattccccagagccctcatcagatggcattagcccgtcatgtgctgcagtggcacccagtttggaggaaattcggaaccagaagagtgtgacagtgctcctgcgggaagaagtgtcgcggctccaggaggaagttcaccttctccggcagatgaaggagatgttggcgaaggacctggaggagtcgcagggcggcaagtcctctgaggtcctctcggccaccgagctcagggtccagctggcccagaaggagcaggagctagccagagccaaagaagccttgcaggccatgaaagctgatcggaagcgcttaaagggcgagaagacagacctggtgagccagatgcagcagctgtatgccacactggagagccgcgaggagcagctccgagacttcatccgcaactatgagcagcaccgcaaggagagcgaggatgcggtcaaagcgctggccaaggagaaggacctgctggagcgtgagaagtgggagctgcggcgccaagccaaggaggccacagaccacgccacggcactgcgctcccagctggacctcaaggacaaccggatgaaggagctggaggccgagctggccatggccaaacagtccttagctacgctgaccaaggacgtccccaagcggcattccctcgccatgccgggcgagacggtgctcaatggcaaccaggagtgggtggtgcaggcggacctcccgctgaccgcagccatccggcagagtcaacagactctctaccactcacacccccctcaccctgcggaccggcaagcggtcagggtgagcccctgccactcccggcagccctctgtcatctccgacgcatctgccgccgaaggcgaccggtcgtccacaccgagcgacatcaactcccctcgacaccggacacactccctctgcaacggcgacagtcccggcccagttcagaagaacctgcacaaccctattgtacagtcactagaggatcttgaagaccaaaaacggaaaaagaagaaagagaagatgggattcggctccatctcccgcgtcttcgccagagggaagcagcggaagtccctcgaccccggcctctttgatggtaccgcccctgattattacatagaggaggacgcggactggtgatacgcgctcccctgcgcctgctgcccgcaggcgtgtctgtgcgtgtgggcgtgtgtgcaagcgagcgtgggtgcgcgtgtggccgtgcgtggggtgcgtgtgcacgtgtgcgctggcacacatgggtgctgggtgtggccgagcgcctctaacaagtgaaaacacgagtgtgaacctctctcccctgcgtcgccacctctgtaattgatgtacataccgcaaaccgtgtgtgaacctgtcaactctctgtcgtctttggagcgatacagttgtgttgttaatctggtttattatttttcttcagtgtttggtttttctttttctttttgtttggttcgtcggtttgtttttgtttttgtttttttccccctttctcctcccctcctcctttttatgaaacttgaaaacttgaaggactgctgtgtatttgtaaataacaaaactattgtgcactctgtgcttgtaaatgtccctcgtccaaaccgctactcctggagcccgtctggcagaggatgtggtctgtttttgatgtcccccctcccgcccccctggtgtgaacgtgtgggaccagaccctgtcctgggggtgcgcccaagtcactttaaccacaaaacgccatcgtcgtcagggtaagctctgctctctacaaagactcgcgagccgggccaaggggccttgtcttggctgggtttgtcagaggtcaaaccggctcttttaaacggcctaccagtttttaaattgcattgccgtttctttctttatgaaaaaaaagaaaaaaagaaaattgtttcatttaatttatttgcacaaatgctgaaaacttattctatctaaattattacataaatattggaatgtctatttttccatggggtgggcgggaggtgggtgtctctgttgacttgtctgttctgttaccatgctgctacccaactgtgcaaagtagtttagggtggccagaacccagggaccattggatttcaaagcttgctttttctgttggttcttctctctccttctctctctgtctctcccattctcctgcccatgcatgaaaggatcctccaccttcttcccacccagagctccctccaggcctttctctatatatttatttatctgacatacagaacacgactttagtgagcagagtgctgacagtcatggtccccttctttgggtctgtcttttgagagaggttgagttcagggcaagacagcctgccacacatccaagggtacgaccagtgggaccctggcctgagtctgttctccgaggggcctccagcagcttctgttcctccctgcagctgtgtctttcttgtcctgggtttaggatgcaggtgggccaggcaggtgttgttaggggaggcacccacttcaaaaggagggccacagtggggacacagagtccagcacctgagccctccaccctccccattctggttggttccatcagccacacttagaatctcccaggatcccttggactccgtcccccaacttgtcacagcagcctgagcctacccaccccaggagacaagagctggcaggaacatctgcctatatggggggtggcgttggccccaaagaggcttcaccagcaaaggaactgtgtgtattttaatgccaggggacggaggatgtgtgagctgttcagcaaggtctgcccaaggcctaaaactcaatttccttattcttttgcttctgctcgtccttaacaactaacagctcaacccacacctctagacaacagtagtcgtgctttctgctaacggtgacattttcagctcttaaaaagaagcaaggagattttcaaatgctagagtatctctatcagaaggcataggacattgtgtccaaagtctcaagaacaaacaacactttccttctgacctggtccaaaagtcagcaaacagcaagcaggcagaggccctcataaggacttttctgtcctcctttgaccaaactgtttaaccgagcctaggggtgacggggagcgacccaagctggcatctttctctacggagacagattttagaaaatacttttcttgcccatgaatttcttttctggttgatttttatcattttccctttacttacaagaaaataagattgcaaccactcctgctaatgatttagtagttccttttcatttcagtttttgtaaattaggagataattctaagagttactaaaggatgatttatttaagagaactacgtcaaatagcgaatgagttatgggtaacattagacgaaaataacctttcccgtgggaaaggtttctcgaaggcatggatgcaaatataaaatattaaaaaaaatctaaataaagcttattttaaaatatgatcg

SEQ ID NO: 145131 - DNA, 1475 bp, Homo sapiens
  Payload ID: 8673
  Gene Symbol: KAZN
  Gene Name: kazrin, periplakin interacting protein
  Uniprot ID: Q674X7
  ENST ID: ENST00000503743
  CDS Start-End: 210-1475
ggggtctcggcgatcgctgctcctcctcctccttctcctcctcttttttctcctccgcctcctccccccgccgcctcgccaccgccgcggctagggctggaggcgccgctgtcattcctgtgccggaggaaccggcgctgccggtgcctgggggtcggggcgcgggcgaagccgggccgcggaggacacaacaggccaaaatcctgagcatgatggaagacaataagcagctcgcgctccgcatcgatggggcggtccagtcggccagccaggaggtgaccaacctgcgagccgaactcacggccaccaaccggagactggcggaactgagcggcggcggcggccccggcccgggcccgggagccgcggccagcgcctcggcggcgggggactcggcggcgacgaacatggagaacccccagcttggagcgcaagtgctcctgcgggaagaagtgtcgcggctccaggaggaagttcaccttctccggcagatgaaggagatgttggcgaaggacctggaggagtcgcagggcggcaagtcctctgaggtcctctcggccaccgagctcagggtccagctggcccagaaggagcaggagctagccagagccaaagaagccttgcaggccatgaaagctgatcggaagcgcttaaagggcgagaagacagacctggtgagccagatgcagcagctgtatgccacactggagagccgcgaggagcagctccgagacttcatccgcaactatgagcagcaccgcaaggagagcgaggatgcggtcaaagcgctggccaaggagaaggacctgctggagcgtgagaagtgggagctgcggcgccaagccaaggaggccacagaccacgccacggcactgcgctcccagctggacctcaaggacaaccggatgaaggagctggaggccgagctggccatggccaaacagtccttagctacgctgaccaaggacgtccccaagcggcattccctcgccatgccgggcgagacggtgctcaatggcaaccaggagtgggtggtgcaggcggacctcccgctgaccgcagccatccggcagagtcaacagactctctaccactcacacccccctcaccctgcggaccggcaagcggtcagggtgagcccctgccactcccggcagccctctgtcatctccgacgcatctgccgccgaaggcgaccggtcgtccacaccgagcgacatcaactcccctcgacaccggacacactccctctgcaacggcgacagtcccggcccagttcagaagaacctgcacaaccctattgtacagtcactagaggatcttgaagaccaaaaacggaaaaagaagaaagagaagatgggattcggctccatctcccgcgtcttcgccagagggaagcagcggaagtccctcgaccccggcctctttgatggtaccgcccctgattattacatagaggaggacgcggactggtga

SEQ ID NO: 145132 - DNA, 3154 bp, Homo sapiens
  Payload ID: 8674
  Gene Symbol:
  Gene Name: KCNE1B
  ENST ID: ENST00000618699
  CDS Start-End: 201-599
gggctgtctgtggcctcagcgctcggcaggcgcgcactcagctccacacccggctctctcggcatctcagacccggtttcacacaatcatcaggtgagccgaggatccattggaggaaggcattatctgtatccagaggaaatagccaaggatattcagaggtgtgcctgggaagtttgagctgcagcagtggaaccttaatgcccaggatgatcctgtctaacaccacagcggtgacgccctttctgaccaagctgtggcaggagacagttcagcagggtggcaacatgtcgggcctggcccgcaggtccccccgcagcggtgacggcaagctggaggccctctacgtcctcatggtactgggattcttcggcttcttcaccctgggcatcatgctgagctacatccgctccaagaagctggagcactcgaacgacccattcaacgtctacatcgagtccaatgcctggcaagagaaggacaaggcctatgtccaggcccgggtcctggagagctacaggtcgtgctatgtcgttgaaaaccatctggccatagaacaacccaacacacaccttcctgagacgaagccttccccatgaaccccaccactggctaaaactggacacatcctgcctggcaacctgattttctaatcacattcctctcatactctttattgtgatggataccactggatttctttttggctgttgtaaggggtggggggtggattaatgacactgtttcactgtttctctaaaatcacgttcttttgtgatagactgtcagtggttcccccatatctgtccctgccttgctaaatttagcagaatccctgaggacatggcctctgagaatagcagctgcatttcccagactcccttgcagctagcaaggttgtgtgactaagccctggccagtaggcatggaagtgaagactgtaatgtccaagtaatccttggaaagaaaagaacgtgcccttaactaactttgtcctgcttcccagtggctggatgtggaggaggtggagagcagttatgagactgggaaagaatggggcactcaaagagccacacacatctgggcctgggcgacgtggatcctccttaccacccaccaggccagatttacaggagagagaaatccactccactcttccttaagccactgttattctgatctctgttaaggtcgcagaatcaatgcccttactgatacacctaccttataggactgaacctaaaggcatgacatttccatacttgtcacaagcacacactgattctgcccttgtcacttctgtgctcactcttgtggctctatcctcctcctgcccttccgccttccactcctcccttgcacccatcctgcacacatctccctgaaaacacacaggcacatacactcatatacatagacacacatacacacctcaatctagaaagaacttgctttgtacagggctgagatggaggagaaaaaaatgcccccttcagaatgcataccaaggggaaggtgctcggtcactgtgggagcagggaaaggtgcccccactccccgagagccaggggaaggagtggctctgggcagagagggacacatagcactggggtggcaggtccttttgaggtgatgggccggttttgtgagatgaattgtatcccccaaaaagacaggtaccttcaatgtgacctaattgggaaatagagtctttgcagatgatctagttgagatgaggtcattggggtgggccctcacccaatatgactggagtccttatcggaagagggaaattcagacacagatgcatagggagggcaccatgccgtgacagaggcagagggtgcagtgacacagccacaaaccaaggaaggccgaggatggatgcgcatccccatcccaagaagtcgggaagaagccaggaaggctcctctcccacaggtttcagaggaagcacagccctgcttgaattcaaacttttggcctccagaactgtgagtcagtacctgttgttgaagccacccagcttaggatactctggcagcctactgccatacagtattgggatactatagtgagcccatgcagcacctctcacccacccagagatggagctgctctgccttccagcggggcacccggaggggctgccccagcagatagagagggcctccgttctgccacctgccttgaaagggtctccagctgccatatgtagcattggagtcctctgcaatgcgacatcctgaaagctcagctgcctgggcattcctgaagagtatggaatatttaaatgaaacatatttttttaaaacctgcgcataagataaaagcagcccgtgtgcatcttgggccatcctcaaatggacagacttggtcttgtgaggttccagtccttgtttcacataataaacactggcatggctcagcccctgagttaccacagtccttgagatgagtggttctttgggttacaaagtcctctgaaagtctagtgagagctgtgatctttgccccacccgaataatgcatatggacaccacaccttgcctgccgtgtccaggattcatgaccagtagcagcccagctatgcctgccacgtctcacggcccctgtgtaagccagacccttcttaggcagttgcatattcccagactgaggcagggcaggtttgcagagagagacccagagtgcacgtgacccgcagtgtgatccctggcacgcactgactttgatattccaggcacacggactggctatttatcaccacttctttttccccactaagattcctgtgccttttaaggcagagggagatccctatggcgttagtcttcccaggccttaaagggcccttgtcttcactcacaaacctcttatctcttcttctccttcctctacattttaaagggggagagggaaaagtaaccgggagacaaattgagccacatattttcagacacttgttaccatattttaaaatctggcttcacatacacagagtctttgctatgcaccatgtactgttctaagcttcttaaaaatagaatctcaattattattttgcaggcaatactctgtgcattcattagctaggacaacaatgcatttgcagtagtgagatttcgttaaaaaattaaagccatttactatg

SEQ ID NO: 145133 - DNA, 3149 bp, Homo sapiens
  Payload ID: 8674
  Gene Symbol:
  Gene Name: KCNE1B
  ENST ID: ENST00000622690
  CDS Start-End: 202-591
agtggcttcccccctggcaacctcaaactcccgcaggaaggaaaaatccctctgctttctctggccagtttcacacaatcatcaggtgagccgaggatccattggaggaaggcattatctgtatccagaggaaatagccaaggatattcagaggtgtgcctgggaagtttgagctgcagcagtggaaccttaatgcccaggatgatcctgtctaacaccacagcggtgacgccctttctgaccaagctgtggcaggagacagttcagcagggtggcaacatgtcgggcctggcccgcaggtccccccgcagcggtgacggcaagctggaggccctctacgtcctcatggtactgggattcttcggcttcttcaccctgggcatcatgctgagctacatccgctccaagaagctggagcactcgaacgacccattcaacgtctacatcgagtccaatgcctggcaagagaaggacaaggcctatgtccaggcccgggtcctggagagctacaggtcgtgctatgtcgttgaaaaccatctggccatagaacaacccaacacacaccttcctgagacgaagccttccccatgaaccccaccactggctaaaactggacacatcctgcctggcaacctgattttctaatcacattcctctcatactctttattgtgatggataccactggatttctttttggctgttgtaaggggtggggggtggattaatgacactgtttcactgtttctctaaaatcacgttcttttgtgatagactgtcagtggttcccccatatctgtccctgccttgctaaatttagcagaatccctgaggacatggcctctgagaatagcagctgcatttcccagactcccttgcagctagcaaggttgtgtgactaagccctggccagtaggcatggaagtgaagactgtaatgtccaagtaatccttggaaagaaaagaacgtgcccttaactaactttgtcctgcttcccagtggctggatgtggaggaggtggagagcagttatgagactgggaaagaatggggcactcaaagagccacacacatctgggcctgggcgacgtggatcctccttaccacccaccaggccagatttacaggagagagaaatccactccactcttccttaagccactgttattctgatctctgttaaggtcgcagaatcaatgcccttactgatacacctaccttataggactgaacctaaaggcatgacatttccatacttgtcacaagcacacactgattctgcccttgtcacttctgtgctcactcttgtggctctatcctcctcctgcccttccgccttccactcctcccttgcacccatcctgcacacatctccctgaaaacacacaggcacatacactcatatacatagacacacatacacacctcaatctagaaagaacttgctttgtacagggctgagatggaggagaaaaaaatgcccccttcagaatgcataccaaggggaaggtgctcggtcactgtgggagcagggaaaggtgcccccactccccgagagccaggggaaggagtggctctgggcagagagggacacatagcactggggtggcaggtccttttgaggtgatgggccggttttgtgagatgaattgtatcccccaaaaagacaggtaccttcaatgtgacctaattgggaaatagagtctttgcagatgatctagttgagatgaggtcattggggtgggccctcacccaatatgactggagtccttatcggaagagggaaattcagacacagatgcatagggagggcaccatgccgtgacagaggcagagggtgcagtgacacagccacaaaccaaggaaggccgaggatggatgcgcatccccatcccaagaagtcgggaagaagccaggaaggctcctctcccacaggtttcagaggaagcacagccctgcttgaattcaaacttttggcctccagaactgtgagtcagtacctgttgttgaagccacccagcttaggatactctggcagcctactgccatacagtattgggatactatagtgagcccatgcagcacctctcacccacccagagatggagctgctctgccttccagcggggcacccggaggggctgccccagcagatagagagggcctccgttctgccacctgccttgaaagggtctccagctgccatatgtagcattggagtcctctgcaatgcgacatcctgaaagctcagctgcctgggcattcctgaagagtatggaatatttaaatgaaacatatttttttaaaacctgcgcataagataaaagcagcccgtgtgcatcttgggccatcctcaaatggacagacttggtcttgtgaggttccagtccttgtttcacataataaacactggcatggctcagcccctgagttaccacagtccttgagatgagtggttctttgggttacaaagtcctctgaaagtctagtgagagctgtgatctttgccccacccgaataatgcatatggacaccacaccttgcctgccgtgtccaggattcatgaccagtagcagcccagctatgcctgccacgtctcacggcccctgtgtaagccagacccttcttaggcagttgcatattcccagactgaggcagggcaggtttgcagagagagacccagagtgcacgtgacccgcagtgtgatccctggcacgcactgactttgatattccaggcacacggactggctatttatcaccacttctttttccccactaagattcctgtgccttttaaggcagagggagatccctatggcgttagtcttcccaggccttaaagggcccttgtcttcactcacaaacctcttatctcttcttctccttcctctacattttaaagggggagagggaaaagtaaccgggagacaaattgagccacatattttcagacacttgttaccatattttaaaatctggcttcacatacacagagtctttgctatgcaccatgtactgttctaagcttcttaaaaatagaatctcaattattattttgcaggcaatactctgtgcattcattagctaggacaacaatgcatttgcagtagtgagatttcgttaaaaaattaaagccatttactatgatc

SEQ ID NO: 145134 - DNA, 736 bp, Homo sapiens
  Payload ID: 8674
  Gene Symbol:
  Gene Name: KCNE1B
  ENST ID: ENST00000617668
  CDS Start-End: 466-736
ctcttctcccctgggttcagctgggggccttacggaactccagggtgctggaggccccgttggtctccatttgcaggtgtctcgctcagcgcagctgcccagagccctgtgtcctgagtgatttccagtagattagcagctctgggtctaagcttttaagaaaaaaaaaaaattgcactacccttcagtaggggcagcattcacatctcacacccaggcagaagcagaaacggccaggaatccaccccactttctgggcctgacaaggccacagtttgagaacgttcagcacaggccaagcatcagatggattttgaacatctctggctcctaccatttctgcctccaccatccctttactcactgtgcaagctacaaaagctgaggggacaggaacaaggatgatttctgatggcatatttagaggtgtgcctgggaagtttgagctgcagcagtggaaccttaatgcccaggatgatcctgtctaacaccacagcggtgacgccctttctgaccaagctgtggcaggagacagttcagcagggtggcaacatgtcgggcctggcccgcaggtccccccgcagcggtgacggcaagctggaggccctctacgtcctcatggtactgggattcttcggcttcttcaccctgggcatcatgctgagctacatccgctccaagaagctggagcactcgaacgacccattcaacgtctacatcgagtccaatgcctggc

SEQ ID NO: 145135 - DNA, 811 bp, Homo sapiens
  Payload ID: 8674
  Gene Symbol:
  Gene Name: KCNE1B
  ENST ID: ENST00000623803
  CDS Start-End: 224-622
gtctgtggcctcagcgctcggcaggcgcgcactcagctccacacccggctctctcggcatctcagacccgggaaaaatccctctgctttctctggccagtttcacacaatcatcaggtgagccgaggatccattggaggaaggcattatctgtatccagaggaaatagccaaggatattcagaggtgtgcctgggaagtttgagctgcagcagtggaaccttaatgcccaggatgatcctgtctaacaccacagcggtgacgccctttctgaccaagctgtggcaggagacagttcagcagggtggcaacatgtcgggcctggcccgcaggtccccccgcagcggtgacggcaagctggaggccctctacgtcctcatggtactgggattcttcggcttcttcaccctgggcatcatgctgagctacatccgctccaagaagctggagcactcgaacgacccattcaacgtctacatcgagtccaatgcctggcaagagaaggacaaggcctatgtccaggcccgggtcctggagagctacaggtcgtgctatgtcgttgaaaaccatctggccatagaacaacccaacacacaccttcctgagacgaagccttccccatgaaccccaccactggctaaaactggacacatcctgcctggcaacctgattttctaatcacattcctctcatactctttattgtgatggataccactggatttctttttggctgttgtaaggggtggggggtggattaatgacactgtttcactgtttctctaaaatcacgttcttttgtgatagactgtca

SEQ ID NO: 145136 - DNA, 2060 bp, Homo sapiens
  Payload ID: 8675
  Gene Symbol: KDELC1
  Gene Name: KDEL (Lys-Asp-Glu-Leu) containing 1
  Uniprot ID: Q6UW63
  ENST ID: ENST00000376004
  CDS Start-End: 338-1846
cttggctggaacctgagacggattcgctcccaaatgatgctccagtggcaggagcaactcaagttcatcattgtcctgagagagaggagcagcgcggttctcggccgggacagcagaacgccaggggaccctcacctgggcgcgccggggcacgggctttgattgtcctggggtcgcggagacccgcgcgcctgccctgcacgccgggcggcaacctttgcagtcgcgttggctgctgcgatcggccggcgggtccctgccgaaggctcggctgcttctgtccacctcttacacttcttcatttatcggtggatcatttcgagagtccgtcttgtaaatgtttggcactttgctactttattgcttctttctggcgacagttccagcactcgccgagaccggcggagaaaggcagctgagcccggagaagagcgaaatatggggacccgggctaaaagcagacgtcgtccttcccgcccgctatttctatattcaggcagtggatacatcagggaataaattcacatcttctccaggcgaaaaggtcttccaggtgaaagtctcagcaccagaggagcaattcactagagttggagtccaggttttagaccgaaaagatgggtccttcatagtaagatacagaatgtatgcaagctacaaaaatctgaaggtggaaattaaattccaagggcaacatgtggccaaatccccatatattttaaaagggccggtttaccatgagaactgtgactgtcctctgcaagatagtgcagcctggctacgggagatgaactgccctgaaaccattgctcagattcagagagatctggcacatttccctgctgtggatccagaaaagattgcagtagaaatcccaaaaagatttggacagaggcagagcctatgtcactacaccttaaaggataacaaggtttatatcaagactcatggtgaacatgtaggttttagaattttcatggatgccatactactttctttgactagaaaggtgaagatgccagatgtggagctctttgttaatttgggagactggcctttggaaaaaaagaaatccaattcaaacatccatccgatcttttcctggtgtggctccacagattccaaggatatcgtgatgcctacgtacgatttgactgattctgttctggaaaccatgggccgggtaagtctggatatgatgtccgtgcaagctaacacgggtcctccctgggaaagcaaaaattccactgccgtctggagagggcgagacagccgcaaagagagactcgagctggttaaactcagtagaaaacacccagaactcatagacgctgctttcaccaactttttcttctttaaacacgatgaaaacctgtatggtcccattgtgaaacatatttcattttttgatttcttcaagcataagtatcaaataaatatcgatggcactgtagcagcttatcgcctgccatatttgctagttggtgacagtgttgtgctgaagcaggattccatctactatgaacatttttacaatgagctgcagccctggaaacactacattccagttaagagcaacctgagcgatctgctagaaaaacttaaatgggcgaaagatcacgatgaagaggccaaaaagatagcaaaagcaggacaagaatttgcaagaaataatctcatgggcgatgacatattctgttattatttcaaacttttccaggaatatgccaatttacaagtgagtgagccccaaatccgagagggcatgaaaagggtagaaccacagactgaggacgacctcttcccttgtacttgccataggaaaaagaccaaagatgaactctgatatgcaaaataacttctattagaataatggtgctctgaagactcttcttaactaaaaagaagaatttttttaagtattaattccatggacaatataaaatctgtgtgattgtttgcagtatgaagacacatttctacttatgcagtattctcatgactgtactttaaagtacatttttagaattttataataaaaccacctttattttaaagga

SEQ ID NO: 145137 - DNA, 4312 bp, Homo sapiens
  Payload ID: 8676
  Gene Symbol: KDELC2
  Gene Name: KDEL (Lys-Asp-Glu-Leu) containing 2
  Uniprot ID: Q7Z4H8
  ENST ID: ENST00000323468
  CDS Start-End: 67-1590
ggtccgcggcgctgccggcccctcctcgccgccgcggagctggaccgcagttgtgccccgccgaccatgcgccgcctcccgcgggccctgctgctgcagctgcgcctcgccctgctggtggccgcgggggccccggaggtgctggtcagcgcgccgcggagcctggtgtgggggcccgggctgcaggcggccgtcgtcctgccggtccgctatttctacctgcaggcggtcaactcggagggccagaacctcactcgctctcccgcaggtgaaacaccattcaaagtcgtagtcaaatctctttcacctaaagagttggtccggatacatgtccctaaacctttggacaggaatgatggaacatttttgatgagatataggatgtatgaaactgtcgatgaaggcctgaagatagaggtcctttatggtgatgaacatgtggctcagtctccctatattttgaaaggaccagtgtaccatgagtactgtgagtgtccggaagatcctcaggcctggcagaagactctttcttgtccaaccaaggaaccacagattgcaaaagattttgcttcctttcccagcatcaatctccagcaaatgctaaaagaagtccccaaaaggtttggggatgagagaggtgccattgttcattacacgattctcaataaccatgtttaccggagatctttagggaaatacacagacttcaagatgttctctgatgagattttgttatcattgacaagaaaggtccttctcccagatttagaattttatgttaatcttggagattggcccttggagcatcgaaaagtcaatggaacccctagccccatacctatcatttcatggtgtggctctctggattcaagagatgttgtccttccaacgtatgacatcacccactccatgcttgaagccatgcggggtgttacaaatgatctcctctctattcagggaaatacagggccttcctggatcaataaaacagagagagctttcttcagaggtagagacagccgagaggagaggctccagttggtacagctgtccaaagaaaatcctcagctactagatgcaggaattacaggatatttctttttccaagagaaagaaaaggagcttggaaaagccaagttgatgggtttctttgatttctttaagtacaagtatcaagtaaatgtggatgggaccgtggctgcttacagatatccatatctcatgctgggcgacagtctggttttaaagcaggactcgccatattatgaacatttctacatggcactagaaccttggaagcattatgttccaattaaaagaaatctgagtgatttattagagaaagttaaatgggctaaggaaaatgatgaagaagccaagaagattgcaaaagaaggacagttgatggctagggacctactacagccacacaggctttactgctactattaccaagtactgcagaaatatgccgagcgccagtccagcaaacccgaagtacgtgatggaatggaacttgttcctcagccagaagatagcacagccatctgccagtgccacaggaaaaagccttcaagagaagaactttgagtcagcccagaatcacactcctgtgtatcccggctacactttaaggaaagattgaatctaagctgtgaaggacagtatagaagactgcaccaagtggactagttctcccggtggctttatatatgtagatggatatagcagtactggttgagtatccctcatctgaaatgcttaggaccaggagtgtttcaggcttcagattttttaagatttgggaatatttgcatgtacataatgaggtatcttggggatgagatccaagtctaaacacaaaattcatttatattttatatataccttgttcacataccctgaaggtaattttatataatatttttaataatttgtgcatgaaacaaagtttgtatacattgaactgtcagaaagcaaaggtgtcactatcttagcgacccaagtggtggtgtcagcactcaaaaagttttggattttggggtatttcagattttagatttttgtatgaggaatgttcaacctgtatttgaacaagcattaccaaatatcattgaatattaatatcttttgcgtaaaaactgctattatcagcatcatagtttctctaaaaagaaaacttggggatcatagccgatagagagacttgctaaaatataaatcagcctctgcaaaactgtttacatatttattggtttacatattttattggtttatttctatcccctgttcactttttctcttccacttccaattatgaagagaaaatatttgttcagggttgtccccccgccccccgtcactgcataatttctcctcttacaagctgcttttggctttcattaataacagcttccttttagaaggtctgataaggatatttaaggaagaagagaatgactctgttattaaaggtggcatggagactgtggagggaatattttttaaagcactactcatatcctttaaactaaattttgccaaagcccgagacaacattaaggagaaattgtaccttaagttagtaattccaaatctatctgagttgtatacccatcaaagacaatacagttattaacatagatgaaggtatgctataggcatcattcattatctctatattgaataggtgaaagataactgtagtcaggtgaaaggcattcattatttttaagctgaaaaggggatccttgaaaacactgaaaacctctacaacaatcttcaggaagcctgctatcttgggattcactaataataggccaagaacaaaggcaagcatccattcctcactccaccacttttctatttcagtgggtgtcgttgctacgatgaagactttggaaatttcctttctcttttaggacagggtcaggatttaggactcatagcctgaaagctcattacatactccttgtaaccatcagtccaaggttcagttcactaaagtgcatgttctaaaacaagagctatcctcattccaaattttaaaatatgtactctggccggttgcagtggctcacgcctgtaatcccagcactttggcaggccgagatgggcggatcttttgaggtcaggagtttgagaccagcctggccaacatggtgaaaccccgtctctactaaaaatacaaaaattagccaggcatggtggcatttgcctgtaatcccagctactcgggaggctgaggcaggagaatcacttgaacctgggaggcagaggttgcagtgagctgagattacaccactgcactccagcctgggtgacagagtgagactccatctcaaaaactgaaaataaaaataaaaatatgtattctcctaactgaaatatttacttaatctggaaaacaatgtaactatttttaaagtggttacatctattcttgctgaagaacaataaacagaattttttgactaagcataaccaaatttcagaacagtctaatcaatgccaagtatccaaggcaaactctaatacccatccattgtgcaaaaccacaagcacgcaagtattaaataagagcaagctgtcctgagcccatacctaatgaatttgtgtcttaaatattgtacattgtgtttgaggcttgtcaaaactgggattatggcaagaaaggttgcctaactcatacctttctgcctcaaattccaggtgctaaaggctaatggcattttaaacatcttacatttttaaaaatttatattgcctctgccaaacaggcctaatagttaaaagcaagttgagacaaaccaggcagattcagtgtgtggaacaggaaggatgtgctttaaaaaaaggtggaatccctcaaaaaattctatagggagacagcagccttaatctacataattcttcatctcgccaattcagccgcagcctttaaagagttagtgttaatggctttctggtttgaaaacaaaaatgcatctatgtggttgaaagtttgggaggagattcaccaatatctgaggagaagatggagtgaagggaattcttactttttgctttatacctttctataatatttagatttttttttactgtaagtatggatcaaattgcaaaataaagaaaaatgccaaccttagaaaagacaataaatgcacaaaagatataaacaggaacagcaaatatttatattttttccattttgctctttttaaatctatgtttagaactttatatcttgggacttatgtatatatataccttttaaataaaataaattttctaaataaaaagttgaaaaaga

SEQ ID NO: 145138 - DNA, 4374 bp, Homo sapiens
  Payload ID: 8676
  Gene Symbol: KDELC2
  Gene Name: KDEL (Lys-Asp-Glu-Leu) containing 2
  Uniprot ID: Q7Z4H8
  ENST ID: ENST00000434945
  CDS Start-End: 304-1659
tatagtcccagctactcatggggctgatgcaggttgaggcaggaggttcatgagcccaggaggttggagctgtaatgagctaggattctgcctctgcactcctagctggatgacagagcaagaccctgtctcaaaaaagaaaaaaaaaaaaaaaagaatgcatgaaccagacatgacagttcctggcctcaaagatcttccaaaggaaatgatttttttttaaccaccaatgctgcaggaaaaagcaacatatttaagttatccaataacacctatccaataattgtaaatcattatcatgacatggtagagttgtttatatttcttttccttttaggtgaaacaccattcaaagtcgtagtcaaatctctttcacctaaagagttggtccggatacatgtccctaaacctttggacaggaatgatggaacatttttgatgagatataggatgtatgaaactgtcgatgaaggcctgaagatagaggtcctttatggtgatgaacatgtggctcagtctccctatattttgaaaggaccagtgtaccatgagtactgtgagtgtccggaagatcctcaggcctggcagaagactctttcttgtccaaccaaggaaccacagattgcaaaagattttgcttcctttcccagcatcaatctccagcaaatgctaaaagaagtccccaaaaggtttggggatgagagaggtgccattgttcattacacgattctcaataaccatgtttaccggagatctttagggaaatacacagacttcaagatgttctctgatgagattttgttatcattgacaagaaaggtccttctcccagatttagaattttatgttaatcttggagattggcccttggagcatcgaaaagtcaatggaacccctagccccatacctatcatttcatggtgtggctctctggattcaagagatgttgtccttccaacgtatgacatcacccactccatgcttgaagccatgcggggtgttacaaatgatctcctctctattcagggaaatacagggccttcctggatcaataaaacagagagagctttcttcagaggtagagacagccgagaggagaggctccagttggtacagctgtccaaagaaaatcctcagctactagatgcaggaattacaggatatttctttttccaagagaaagaaaaggagcttggaaaagccaagttgatgggtttctttgatttctttaagtacaagtatcaagtaaatgtggatgggaccgtggctgcttacagatatccatatctcatgctgggcgacagtctggttttaaagcaggactcgccatattatgaacatttctacatggcactagaaccttggaagcattatgttccaattaaaagaaatctgagtgatttattagagaaagttaaatgggctaaggaaaatgatgaagaagccaagaagattgcaaaagaaggacagttgatggctagggacctactacagccacacaggctttactgctactattaccaagtactgcagaaatatgccgagcgccagtccagcaaacccgaagtacgtgatggaatggaacttgttcctcagccagaagatagcacagccatctgccagtgccacaggaaaaagccttcaagagaagaactttgagtcagcccagaatcacactcctgtgtatcccggctacactttaaggaaagattgaatctaagctgtgaaggacagtatagaagactgcaccaagtggactagttctcccggtggctttatatatgtagatggatatagcagtactggttgagtatccctcatctgaaatgcttaggaccaggagtgtttcaggcttcagattttttaagatttgggaatatttgcatgtacataatgaggtatcttggggatgagatccaagtctaaacacaaaattcatttatattttatatataccttgttcacataccctgaaggtaattttatataatatttttaataatttgtgcatgaaacaaagtttgtatacattgaactgtcagaaagcaaaggtgtcactatcttagcgacccaagtggtggtgtcagcactcaaaaagttttggattttggggtatttcagattttagatttttgtatgaggaatgttcaacctgtatttgaacaagcattaccaaatatcattgaatattaatatcttttgcgtaaaaactgctattatcagcatcatagtttctctaaaaagaaaacttggggatcatagccgatagagagacttgctaaaatataaatcagcctctgcaaaactgtttacatatttattggtttacatattttattggtttatttctatcccctgttcactttttctcttccacttccaattatgaagagaaaatatttgttcagggttgtccccccgccccccgtcactgcataatttctcctcttacaagctgcttttggctttcattaataacagcttccttttagaaggtctgataaggatatttaaggaagaagagaatgactctgttattaaaggtggcatggagactgtggagggaatattttttaaagcactactcatatcctttaaactaaattttgccaaagcccgagacaacattaaggagaaattgtaccttaagttagtaattccaaatctatctgagttgtatacccatcaaagacaatacagttattaacatagatgaaggtatgctataggcatcattcattatctctatattgaataggtgaaagataactgtagtcaggtgaaaggcattcattatttttaagctgaaaaggggatccttgaaaacactgaaaacctctacaacaatcttcaggaagcctgctatcttgggattcactaataataggccaagaacaaaggcaagcatccattcctcactccaccacttttctatttcagtgggtgtcgttgctacgatgaagactttggaaatttcctttctcttttaggacagggtcaggatttaggactcatagcctgaaagctcattacatactccttgtaaccatcagtccaaggttcagttcactaaagtgcatgttctaaaacaagagctatcctcattccaaattttaaaatatgtactctggccggttgcagtggctcacgcctgtaatcccagcactttggcaggccgagatgggcggatcttttgaggtcaggagtttgagaccagcctggccaacatggtgaaaccccgtctctactaaaaatacaaaaattagccaggcatggtggcatttgcctgtaatcccagctactcgggaggctgaggcaggagaatcacttgaacctgggaggcagaggttgcagtgagctgagattacaccactgcactccagcctgggtgacagagtgagactccatctcaaaaactgaaaataaaaataaaaatatgtattctcctaactgaaatatttacttaatctggaaaacaatgtaactatttttaaagtggttacatctattcttgctgaagaacaataaacagaattttttgactaagcataaccaaatttcagaacagtctaatcaatgccaagtatccaaggcaaactctaatacccatccattgtgcaaaaccacaagcacgcaagtattaaataagagcaagctgtcctgagcccatacctaatgaatttgtgtcttaaatattgtacattgtgtttgaggcttgtcaaaactgggattatggcaagaaaggttgcctaactcatacctttctgcctcaaattccaggtgctaaaggctaatggcattttaaacatcttacatttttaaaaatttatattgcctctgccaaacaggcctaatagttaaaagcaagttgagacaaaccaggcagattcagtgtgtggaacaggaaggatgtgctttaaaaaaaggtggaatccctcaaaaaattctatagggagacagcagccttaatctacataattcttcatctcgccaattcagccgcagcctttaaagagttagtgttaatggctttctggtttgaaaacaaaaatgcatctatgtggttgaaagtttgggaggagattcaccaatatctgaggagaagatggagtgaagggaattcttactttttgctttatacctttctataatatttagatttttttttactgtaagtatggatcaaattgcaaaataaagaaaaatgccaaccttagaaaagacaataaatgcacaaaagatataaacaggaacagcaaatatttatattttttccattttgctctttttaaatctatgtttagaactttatatcttgggacttatgtatatatataccttttaaataaaataaattttctaaataaaaagttg

SEQ ID NO: 145139 - DNA, 3241 bp, Homo sapiens
  Payload ID: 8676
  Gene Symbol: KDELC2
  Gene Name: KDEL (Lys-Asp-Glu-Leu) containing 2
  Uniprot ID: Q7Z4H8
  ENST ID: ENST00000530529
  CDS Start-End: 17-1246
aaatcattatcatgacatggtagagttgtttatatttcttttccttttaggtgaaacaccattcaaagtcgtagtcaaatctctttcacctaaagagttggtccggatacatgtccctaaacctttggacaggaatgatggaacatttttgatgagatataggatgtatgaaactgtcgatgaaggcctgaagatagaggtcctttatggtgatgaacatgtggctcagtctccctatattttgaaaggaccagtgtaccatgagtactgtgagtgtccggaagatcctcaggcctggcagaagactctttcttgtccaaccaaggaaccacagattgcaaaagattttgcttcctttcccagcatcaatctccagcaaatgctaaaagaagtccccaaaaggtttggggatgagagaggtgccattgttcattacacgattctcaataaccatgtttaccggagatctttagggaaatacacagacttcaagatgttctctgatgagattttgttatcattgacaagaaaggtccttctcccagatttagaattttatgttaatcttggagattggcccttggagcatcgaaaagtcaatggaacccctagccccatacctatcatttcatggtgtggctctctggattcaagagatgttgtccttccaacgtatgacatcacccactccatgcttgaagccatgcggggtgttacaaatgatctcctctctattcagggaaatacagggccttcctggatcaataaaacagagagagctttcttcagaggtagagacagccgagaggagaggctccagttggtacagctgtccaaagaaaatcctcagctactagatgcaggaattacaggatatttctttttccaagagaaagaaaaggagcttggaaaagccaagttgatgggtttctttgatttctttaagtacaagtatcaagtaaatgtggatgggaccgtggctgcttacagatatccatatctcatgctgggcgacagtctggttttaaagcaggactcgccatattatgaacatttctacatggcactagaaccttggaagcattatgttccaattaaaagaaatctgagtgatttattagagaaagttaaatgggctaagagtttcactctgtcgcccaggctggaatgcagtggcacgatctccactcactgcaacctctgcctcccgggttcaaggaatttcgtgcctcagcctcctgagtagctgggattacaggaaaatgatgaagaagccaagaagattgcaaaagaaggacagttgatggctagggacctactacagccacacaggctttactgctactattaccaagtactgcagaaatatgccgagcgccagtccagcaaacccgaagtacgtgatggaatggaacttgttcctcagccagaagatagcacagccatctgccagtgccacaggaaaaagccttcaagagaagaactttgagtcagcccagaatcacactcctgtgtatcccggctacactttaaggaaagattgaatctaagctgtgaaggacagtatagaagactgcaccaagtggactagttctcccggtggctttatatatgtagatggatatagcagtactggttgagtatccctcatctgaaatgcttaggaccaggagtgtttcaggcttcagattttttaagatttgggaatatttgcatgtacataatgaggtatcttggggatgagatccaagtctaaacacaaaattcatttatattttatatataccttgttcacataccctgaaggtaattttatataatatttttaataatttgtgcatgaaacaaagtttgtatacattgaactgtcagaaagcaaaggtgtcactatcttagcgacccaagtggtggtgtcagcactcaaaaagttttggattttggggtatttcagattttagatttttgtatgaggaatgttcaacctgtatttgaacaagcattaccaaatatcattgaatattaatatcttttgcgtaaaaactgctattatcagcatcatagtttctctaaaaagaaaacttggggatcatagccgatagagagacttgctaaaatataaatcagcctctgcaaaactgtttacatatttattggtttacatattttattggtttatttctatcccctgttcactttttctcttccacttccaattatgaagagaaaatatttgttcagggttgtccccccgccccccgtcactgcataatttctcctcttacaagctgcttttggctttcattaataacagcttccttttagaaggtctgataaggatatttaaggaagaagagaatgactctgttattaaaggtggcatggagactgtggagggaatattttttaaagcactactcatatcctttaaactaaattttgccaaagcccgagacaacattaaggagaaattgtaccttaagttagtaattccaaatctatctgagttgtatacccatcaaagacaatacagttattaacatagatgaaggtatgctataggcatcattcattatctctatattgaataggtgaaagataactgtagtcaggtgaaaggcattcattatttttaagctgaaaaggggatccttgaaaacactgaaaacctctacaacaatcttcaggaagcctgctatcttgggattcactaataataggccaagaacaaaggcaagcatccattcctcactccaccacttttctatttcagtgggtgtcgttgctacgatgaagactttggaaatttcctttctcttttaggacagggtcaggatttaggactcatagcctgaaagctcattacatactccttgtaaccatcagtccaaggttcagttcactaaagtgcatgttctaaaacaagagctatcctcattccaaattttaaaatatgtactctggccggttgcagtggctcacgcctgtaatcccagcactttggcaggccgagatgggcggatcttttgaggtcaggagtttgagaccagcctggccaacatggtgaaaccccgtctctactaaaaatacaaaaattagccaggcatggtggcatttgcctgtaatcccagctactcgggaggctgaggcaggagaatcacttgaacctgggaggcagaggttgcagtgagctgagattacaccactgcactccagcctgggtgacagagtgagactccatctc

SEQ ID NO: 145140 - DNA, 568 bp, Homo sapiens
  Payload ID: 8676
  Gene Symbol: KDELC2
  Gene Name: KDEL (Lys-Asp-Glu-Leu) containing 2
  ENST ID: ENST00000530318
  CDS Start-End: 1-481
tgaagccatgcggggtgttacaaatgatctcctctctattcagggaaatacagggccttcctggatcaataaaacagagagagctttcttcagaggtagagacagccgagaggagaggctccagttggtacagctgtccaaagaaaatcctcagctactagatgcaggaattacaggatatttctttttccaagagaaagaaaaggagcttggaaaagccaagttgatgggtttctttgatttctttaaggaaaatgatgaagaagccaagaagattgcaaaagaaggacagttgatggctagggacctactacagccacacaggctttactgctactattaccaagtactgcagaaatatgccgagcgccagtccagcaaacccgaagtacgtgatggaatggaacttgttcctcagccagaagatagcacagccatctgccagtgccacaggaaaaagccttcaagagaagaactttgagtcagcccagaatcacactcctgtgtatcccggctacactttaaggaaagattgaatctaagctgtgaaggacagtatagaagactg

SEQ ID NO: 145141 - DNA, 1557 bp, Homo sapiens
  Payload ID: 8677
  Gene Symbol: KDELR1
  Gene Name: KDEL (Lys-Asp-Glu-Leu) endoplasmic reticulum protein retention receptor 1
  Uniprot ID: P24390
  ENST ID: ENST00000330720
  CDS Start-End: 196-834
ctcttcccggctccagctccgccgccagctccagcctttgctccccctcccaaagtcccctccccggagcggagcgcacctagggtccctcttccgtccccccagcccagctacccgttcagaccagcagcctcggggggcacccccccgccagcctgcctccctcccgctcagccctgccagggttccccagccatgaatctcttccgattcctgggagacctctcccacctcctcgccatcatcttgctactgctcaaaatctggaagtcccgctcgtgcgccggaatttcagggaagagccaggtcctgtttgctgtggtgttcactgcccgatatctggacctcttcaccaactacatctcactctacaacacgtgtatgaaggtggtctacatagcctgctccttcaccacggtctggttgatttatagcaagttcaaagctacttacgatgggaaccatgacacgttcagagtggagttcctggtcgttcccacagccattctggcgttcctggtcaatcatgacttcacccctctggagatcctctggaccttctccatctacctggagtcagtggccatcttgccgcagctgttcatggtgagcaagaccggcgaggcggagaccatcaccagccactacttgtttgcgctaggcgtttaccgcacgctctatctcttcaactggatctggcgctaccatttcgagggcttcttcgacctcatcgccattgtggcaggcctggtccagacagtcctctactgcgatttcttctacctctatatcaccaaagtcctaaaggggaagaagttgagtttgccggcatagccccggtcctctccatctctctcctcggcagcagcgggaggcagaggaaggcggcagaagatgaagagctttcccatccaggggtgacttttttaagaacccacctcttgtgctccccatcccgcctcctgccgggtttcagggggacagtggaggatccaggtcttggggagctcaggacttgggctgtttgtagttttttgccttttagacaagaaaaaaaaatctttccactctttagtttttgattctgatgactcgtttttcttctactctgtggccccaatttttataaagtgtttttgagtgtcctatgggccggggcagggtccaagatcttttcccttccccaggcccctcggctccctcccagatcccacccccagccccactggttgccaaacactaaatctgccgacacccatctgccccacctcctgccatggccatgaaccgcgacccccactaaatttctagattggggatagggagaaagggaggcccaggaaggtctcccctgattttttttcatagtaatttttttccccagagtttgaattttttggtcttctcctggttttttggcaaattaggggggcccggggctcaagtgcgggaagggggctggcccgaggatcccatggctctcacaccatgtttttgtacagaactgatggttgaatctttgttctcttgaaataaacagaagaaaatgaaaccttt

SEQ ID NO: 145142 - DNA, 1594 bp, Homo sapiens
  Payload ID: 8677
  Gene Symbol: KDELR1
  Gene Name: KDEL (Lys-Asp-Glu-Leu) endoplasmic reticulum protein retention receptor 1
  Uniprot ID: P24390
  ENST ID: ENST00000597017
  CDS Start-End: 427-879
agactgcgggaggaccctgaggggccaggggtagccatgaggcctagtctgggacggagcctcgggctggagtagcttcgggggcctgggctgccccctggctgtggtccgtgggaaagggccctgctcaggcggggcgggctggggaggcctccggggacagctgcactccagagctgcctccaggctggtcccgggcgccctgccttagtttattgcccatgcagcccacccccagcttcctctctccttctgtctgtctgtctgtctgtctgtctctctctctctctctgtctctctctctctctctttctctgtctctggaccacaggaatttcagggaagagccaggtcctgtttgctgtggtgttcactgcccgatatctggacctcttcaccaactacatctcactctacaacacgtgtatgaaggtggtctacatagcctgctccttcaccacggtctggttgatttatagcaagttcaaagctacttacgatgggaaccatgacacgttcagagtggagttcctggtcgttcccacagccattctggcgttcctggtcaatcatgacttcacccctctggagatcctctggaccttctccatctacctggagtcagtggccatcttgccgcagctgttcatggtgagcaagaccggcgaggcggagaccatcaccagccactacttgtttgcgctaggcgtttaccgcacgctctatctcttcaactggatctggcgctaccatttcgagggcttcttcgacctcatcgccattgtggcaggcctggtccagacagtcctctactgcgatttcttctacctctatatcaccaaagtcctaaaggggaagaagttgagtttgccggcatagccccggtcctctccatctctctcctcggcagcagcgggaggcagaggaaggcggcagaagatgaagagctttcccatccaggggtgacttttttaagaacccacctcttgtgctccccatcccgcctcctgccgggtttcagggggacagtggaggatccaggtcttggggagctcaggacttgggctgtttgtagttttttgccttttagacaagaaaaaaaaatctttccactctttagtttttgattctgatgactcgtttttcttctactctgtggccccaatttttataaagtgtttttgagtgtcctatgggccggggcagggtccaagatcttttcccttccccaggcccctcggctccctcccagatcccacccccagccccactggttgccaaacactaaatctgccgacacccatctgccccacctcctgccatggccatgaaccgcgacccccactaaatttctagattggggatagggagaaagggaggcccaggaaggtctcccctgattttttttcatagtaatttttttccccagagtttgaattttttggtcttctcctggttttttggcaaattaggggggcccggggctcaagtgcgggaagggggctggcccgaggatcccatggctctcacaccatgtttttgtacagaactgatggttgaatctttgttctcttgaaataaacagaagaaaatg

SEQ ID NO: 145143 - DNA, 815 bp, Homo sapiens
  Payload ID: 8677
  Gene Symbol: KDELR1
  Gene Name: KDEL (Lys-Asp-Glu-Leu) endoplasmic reticulum protein retention receptor 1
  ENST ID: ENST00000600980
  CDS Start-End: 154-815
ccccctcccaaagtcccctccccggagcggagcgcacctagggtccctcttccgtccccccagcccagctacccgttcagaccagcagcctcggggggcacccccccgccagcctgcctccctcccgctcagccctgccagggttccccagccatgaatctcttccgattcctgggagacctctcccacctcctcgccatcatcttgctactgctcaaaatctggaagtcccgctcgtgcgccggaatttcagggaagagccaggtcctgtttgctgtggtgttcactgcccgatatctggacctcttcaccaactacatctcactctacaacacgtgtatgaaggtggtctacatagcctgctccttcaccacggtctggttgatttatagcaagttcaaagctacttacgatgggaaccatgacacgttcagagtggagttcctggtcgttcccacagccattctggcgttcctggtcaatcatgacttcacccctctggaggaagataggcctgggtggccagatgtgctgatcttttcaacagaagccataattcaggagttttcagatcctctggaccttctccatctacctggagtcagtggccatcttgccgcagctgttcatggtgagcaagaccggcgaggcggagaccatcaccagccactacttgtttgcgctaggcgtttaccgcacgctctatctcttcaactggatctggcgctaccatttcgagggcttcttcgacctcatcgccattgtggcaggcctggtccagacagtcctctactgcgatttcttctacctctata

SEQ ID NO: 145144 - DNA, 2884 bp, Homo sapiens
  Payload ID: 8678
  Gene Symbol: KDELR2
  Gene Name: KDEL (Lys-Asp-Glu-Leu) endoplasmic reticulum protein retention receptor 2
  Uniprot ID: P33947
  ENST ID: ENST00000258739
  CDS Start-End: 186-824
ggcggggcctggccccgctctcccagggtgccccgcgcgcgcgcgcgccggcagttcggccacgtccctggccacgtcgcgggcgatctcgccatcttcgccgcttcctctcaggggccgccgcctcctgagccgcccagccccggggccgccgcgctgcgccgaccgccaccgccgccgccgccatgaacattttccggctgactggggacctgtcccacctggcggccatcgtcatcctgctgctgaagatctggaagacgcgctcctgcgccggtatttctgggaaaagccagcttctgtttgcactggtcttcacaactcgttacctggatctttttacttcatttatttcattgtataacacatctatgaaggttatctaccttgcctgctcctatgccacagtgtacctgatctacctgaaatttaaggcaacctacgatggaaatcatgataccttccgagtggagtttctggtggtccctgtgggaggcctctcatttttagttaatcacgatttctctcctcttgagatcctctggaccttctccatctacctggagtccgtggctatccttccgcagctatttatgatcagcaagactggggaggccgagaccatcaccacccactacctgttcttcctgggcctctatcgtgctttgtatcttgtcaactggatctggcgcttctactttgagggcttctttgacctcattgctgtggtggccggcgtagtccagaccatcctatactgtgacttcttctacttgtacattacaaaagtactcaagggaaagaagctcagtttgccagcataagtgccaaagaccatcaccagcatctgtccttcagggtgctcggacagaattcttaccacagcaaaggcataagatgcttgatacggaaaatcagaaacttaactcttttgttgcagatagtcatcagtggctctgtaaaaacgcagaggaaaagagccagaaggtttctgtttaatgcatcttgccttatctttttttattactgtgtacaaagatttttttacacaaagaaacttaatgctgtattaataaattcagtgtgtagcttcaattgggatagttccaaaagtgaagattttgtgaggaataagtgcaaattttttttttattttaaaaaattctttgaaactcttaagtctttgtgtctgcaatgaaattgtactccttgacagttgatagattatatattcttccatccctcaaacttgcattccactatatttattttttggcaaaagatgagctgtatttgtttgaaatctgagacactatgttcaattggatgtatctgttcaaatttattcccacgtgacgtggaagtccttcgttggatgtcacaacactacatttaaggttggtaaggatgacttggaggtccatggttttcattaccaacattttaagattctgaatgtcgatggagtctcactgaagagtcaccaaaggtgcctgccctcctcccctgctgggaagtgtcagttggagactgtcccaagggtgctgaagaatccagtggcaggggttctggctgctttccatctgagtgtgggatgggaggggtgttcatgatcatttggatatagcaatctactctgagaaatggaacacaaggagttacctatcactttcacttataattccaaaagatgactacaaccatgtccatgctcagattcaaacagttttccatatcacttttgggtggtaagatgatttaattacagttttttttttaattggcagcaccactaaccattccttacattcttttttgtatgtgtggttttctttttatttaacccgcagccgacatcgtagtttcttgttttgttttgttttacagagctgttgcatgacttatgttaccatcctaaaaaacactatattaaacatggaataaattgtctttttatgaattaggctttttgaacatcctgtgttgggatttttttgtttttcaattggcaacaaaagctctgtagggctgcagacatttaaagttcacataatcatctgtaagacattatgtattttgtggaaatactagaatttttttcctgattttgccattatatggatttgctattttttgattaatgcaaaagtatatgactttgttttttatgtgatacaccataaatattaaagtgttgaatactaacagtgctgactacaagaaggatgtagtattttggctttctgcattacaacgtcttctggaggaagggagcaggatgggtttcatttgtatctagtgtgtgtcttaacatctttctaaatcggcagtgtaactgcatagtttaacttcctgtctgtctccctcattttactcttccctccttgtcttatgttttggcttttgtgtatcagagcatctttctttgcagcatcctagtcttgcttcagtttctgtggtctcttttcatcctgcttgaagattcggagtgtggaaggaggctaggaagtctggtgcagtaggtgagcagacctcttgctgcccagcccagggtgggtggggcgcacacctgtctttgtgcatgcaaatctgatacacctggcgcatcctctggagagcacaacgcatggaaaggtctggaagctctgtgtagccattccttctgcagtcatcctacccaagtaaaagtaaccttggctatgttaccaccgttttggtcacccaggaggacatcttagcaagggtgcctgcgagggagtgtgggactgggcctcatcctcgccggcgttggaaaccaaggccttgtatgccacgccttatgaagcactgtttcacagttactttcacttcccgaataaaggttaccaggtaattaatattttta

SEQ ID NO: 145145 - DNA, 583 bp, Homo sapiens
  Payload ID: 8678
  Gene Symbol: KDELR2
  Gene Name: KDEL (Lys-Asp-Glu-Leu) endoplasmic reticulum protein retention receptor 2
  ENST ID: ENST00000382267
  CDS Start-End: 93-209
atcttcgccgcttcctctcaggggccgccgcctcctgagccgcccagccccggggccgccgcgctgcgccgaccgccaccgccgccgccgccatgaacattttccggctgactggggacctgtcccacctggcggccatcgtcatcctgctgctgaagatctggaagacgcgctcctgcgccggcctcgcctgtctccttggaacataactgagatccgggaagtaagcaaaaccaaaaagacctttgaacagttaagatgggtgttacaaagtccatgtgccagtgtgtttgacttggaggttatctctcagttgatacatagttctgagaggttcaactgtatgatttccagtgacagcaaataactgctgcagtttgggtatttctgggaaaagccagcttctgtttgcactggtcttcacaactcgttacctggatctttttacttcatttatttcattgtataacacatctatgaaggttatctaccttgcctgctcctatgccacagtgtacctgatctacctgaaatttaaggcaacctacgatggaaatcatgataccttccgagtggagtttct

SEQ ID NO: 145146 - DNA, 655 bp, Homo sapiens
  Payload ID: 8678
  Gene Symbol: KDELR2
  Gene Name: KDEL (Lys-Asp-Glu-Leu) endoplasmic reticulum protein retention receptor 2
  Uniprot ID: P33947
  ENST ID: ENST00000490996
  CDS Start-End: 1-561
atgaacattttccggctgactggggacctgtcccacctggcggccatcgtcatcctgctgctgaagatctggaagacgcgctcctgcgccggtatttctgggaaaagccagcttctgtttgcactggtcttcacaactcgttacctggatctttttacttcatttatttcattgtataacacatctatgaaggttatctaccttgcctgctcctatgccacagtgtacctgatctacctgaaatttaaggcaacctacgatggaaatcatgataccttccgagtggagtttctggtggtccctgtgggaggcctctcatttttagttaatcacgatttctctcctcttgagtactcaagggaaagaagctcagtttgccagcataagtgccaaagaccatcaccagcatctgtccttcagggtgctcggacagaattcttaccacagcaaaggcataagatgcttgatacggaaaatcagaaacttaactcttttgttgcagatagtcatcagtggctctgtaaaaacgcagaggaaaagagccagaaggtttctgtttaatgcatcttgccttatctttttttattactgtgtacaaagatttttttacacaaagaaacttaatgctgtattaataaattcagtgtgtagcttc

SEQ ID NO: 145147 - DNA, 1728 bp, Homo sapiens
  Payload ID: 8679
  Gene Symbol: KDELR3
  Gene Name: KDEL (Lys-Asp-Glu-Leu) endoplasmic reticulum protein retention receptor 3
  Uniprot ID: O43731
  ENST ID: ENST00000216014
  CDS Start-End: 173-817
ccggccaagagtgcgtgggcggcggcgcgcgggtgcgatcgcggagctgtgaggcgcaggcagggctctggggcacctagagaccggggccggagacgtggcagccgccctgcccgccagaaagtttcctagaagtttgctgggcgcgggcgcacgactgactggctggaccatgaacgtgttccgaatcctcggcgacctgagccacctcctggccatgatcttgctgctggggaagatctggaggtccaagtgctgcaagggcatctctgggaagagccagatcctgtttgctctcgtcttcaccaccaggtacctggacctgttcaccaacttcatctccatctacaacacagtaatgaaggtggtttttctcctctgtgcctatgttacagtgtacatgatatatgggaaattccgtaaaacttttgacagtgagaatgacacattccgcctggagtttcttctggtcccagtcattggcctttccttccttgaaaactacagtttcactctgctggagatcctctggactttctctatctatctggaatcagtggctatcctgccccagctcttcatgatcagcaagactggagaggctgagaccataactactcactacctgttctttctgggtctgtaccgggcactctacctggctaactggatcaggcggtaccagactgagaatttctatgaccaaattgcagtcgtgtctggagtagtacaaaccatcttctactgtgacttcttctacttgtatgtgaccaaagtccttaagggaaagaagttaagtcttccaatgccaatctgaggaccttcagagacagtctacgccttaacaagcacatgaaggaaactattttgaatgttctctttggcaacttatccataatttgggatcaaatgttaaaaccagaaaagtgtttagtgtggatttcagcaaaacctgatcatcccacccagaagaccttctcatcaatagatcgcccttaaagacccattgtaaggtcataaaaaacctcggccacctgcacaaagatggtgcctcactgcaacaagaaaccttaaggtgtcttaccgacgaaataaaaaacataaatgattgttctccaaggcctgagggcaagactcatgatgagcaagtcaaccccaatctggaacaatgtccctcctcttagaatgtcccaactaaagaccagttaaaatattagggtacgttcttgtgaatttccactttccaggtagatgaccaaatttaggtggtcaagatataaaggtgtcagctagttttaagtgtgaaacttatttcactttcacactgccttcaggccagaagcaaaccaaatttaccaggtttggctggaggagttttgtgactcatcttttactggtttgaattttttcaaaccagtggctgatacctgccttgtacttagtaccttaataccaataacctaatggtacttaggcgagtaccatttgcacaatcactgttttacttatgagcagatacagatatatccaaacccttacctactaggtatcctgctagggttttcaattccaattcttgtattaagttttttcctttcagttttaggtgcgaaagtaatcagtcaatccaatatcccccatctttgtcttgaaacaaaaactgttttaagacgtctacgttgaattattcagagaattaagcaataaaagctcacaccttattgtcaa

SEQ ID NO: 145148 - DNA, 931 bp, Homo sapiens
  Payload ID: 8679
  Gene Symbol: KDELR3
  Gene Name: KDEL (Lys-Asp-Glu-Leu) endoplasmic reticulum protein retention receptor 3
  Uniprot ID: O43731
  ENST ID: ENST00000409006
  CDS Start-End: 157-819
gggcggcggcgcgcgggtgcgatcgcggagctgtgaggcgcaggcagggctctggggcacctagagaccggggccggagacgtggcagccgccctgcccgccagaaagtttcctagaagtttgctgggcgcgggcgcacgactgactggctggaccatgaacgtgttccgaatcctcggcgacctgagccacctcctggccatgatcttgctgctggggaagatctggaggtccaagtgctgcaagggcatctctgggaagagccagatcctgtttgctctcgtcttcaccaccaggtacctggacctgttcaccaacttcatctccatctacaacacagtaatgaaggtggtttttctcctctgtgcctatgttacagtgtacatgatatatgggaaattccgtaaaacttttgacagtgagaatgacacattccgcctggagtttcttctggtcccagtcattggcctttccttccttgaaaactacagtttcactctgctggagatcctctggactttctctatctatctggaatcagtggctatcctgccccagctcttcatgatcagcaagactggagaggctgagaccataactactcactacctgttctttctgggtctgtaccgggcactctacctggctaactggatcaggcggtaccagactgagaatttctatgaccaaattgcagtcgtgtctggagtagtacaaaccatcttctactgtgacttcttctacttgtatgtgaccaaaggtaggtcctgggatgacagcaatgctgacactggcctaaggagttactcatccatttaataagtattccagcagatacagatgtgaacagtcaagtctctgccatccacaatgcttgtgttctaatgcaagaagacaaatattttcaataaagaaacaaatgccataaaaa

SEQ ID NO: 145149 - DNA, 2691 bp, Homo sapiens
  Payload ID: 8680
  Gene Symbol: KLHDC1
  Gene Name: kelch domain containing 1
  Uniprot ID: Q8N7A1
  ENST ID: ENST00000359332
  CDS Start-End: 91-1311
gttcgtgcgtggagcagtcggggctggaggcgaggccgccgggcgggcaggggttgtggcgcggcaagcggcgggccagcgacggcgcgaatggcggactctcagctgttctgtgtggcggaggaacgcagcggccactgcgccgtggtggacggaaacttcctctacgtgtgggggggctacgtgtctattgaagacaatgaagtatatttgcctaatgatgaaatttggacctatgatattgatagtgggttgtggagaatgcacctcatggaaggagaactcccagcctccatgtcaggaagctgtggtgcttgcattaatggaaagctgtacatttttggaggatatgatgacaaaggatacagcaatcgactttattttgttaatttacgaacaagagatgaaacctacatttgggagaaaatcaccgactttgaagggcaaccacctacaccacgtgataaactttcctgctgggtatataaagacagactaatatattttggtggttatgggtgtaggagacacagtgaactccaagactgttttgatgttcatgatgcatcttgggaagagcagatattctggggatggcataatgatgtccacatatttgacacaaagacacagacttggtttcaaccagaaattaaaggtggagttccaccacagccacgagccgcgcatacatgtgcagttcttggaaataagggttatatctttggcggacgtgttctgcaaactaggatgaatgatttgcactatctaaacctagacacctggacttggtctggaaggattactattaatggagaaagcccaaaacatcggtcatggcatactttaacacctatagctgatgataaacttttcctatgtggtggactaagtgcagataatatcccattaagtgatggttggattcataatgtcacaacaaattgttggaaacaacttacacatttacctaaaacaagacctaggttatggcacacagcctgtttgggaaaagaaaatgaaataatggtatttggtgggagcaaagatgacttacttgccttggatacaggtcactgtaatgatttattgatctttcaaacacagccttattcactactcaggtcatgccttgactgcattggtaaaaattctatcatgttagaaagtcagatatctttattacctcctaaacttctgcaacaagtactcaaaaaaataacattttgggctgcagctaatcaccgagaagaacaaagagtccaaaaagaagaaacagaaaataaatatcagtggatcagtagcaattaaattgttatatactttacatatttagtatgttttaactttttaatcagactatacatttacactcccaaattgcaggctttatttaaaggataaaatttaaaggataaaaaaacagtcactctgttaagtgactatatgccatgggatatatggaaaaaagatattaatgcagattaatttatatttgtaaacaaatttccttacaaactgcagaacaaatattctttctgaaagtaagtacagttataacagattttaaatcaatgtgtattctttactggaaagattacatacatttgagaataagaaattactctcaagaacttcagaaatctgcaacataattttataaatatataaatacatgtatgtatgtcaaaacactacatatacactttcagaaagaataaactttctcaagtcattttaaagttacctaacgttcttcttgaataactaatacagtgggtcaaatattataaaataggcaaacaccaaaatggtattaaatattgaactcctgaccttttcgacacttacctagtaaagtattcttaggcatcatcataacttttcctcacctttattcgaatagaggaataaatgtcttcagttgtctctccattacccctaagttattagtttgtctagtttatatataaagaccatgttttaaagtacataaagtggaggtttatttatcatacaggctttgaaacattaagaagcagtatttttattaactttttgagacatattaaaatacattttgccttagaagactgcttctaaagtaatttttgtaagtaatgagatgggatggtaatctagtaatttgactttatagaaatccctcagtttggcccccaccattctacagagttgtactcaagacagatactgaaaaaatctaataccttcccttgtattttcagcattaccatctatacagaaatggaacactgtatctttatattcctaaaaatggtacttttggcataattaagaaatttttcttcatattatcacaatcatgcccttccattgaattattaattacaattaattactaaaaagcttggtatgtaaaattattctccacaatattaccatgcaagttatctctgaaatttaaaatgttaaagaaaaacatttctatattgaaatatatataatttataatgaaaattatagtagtttgtagtatttcattgaattttagagagatatttcatatatatgtactgtattttggatgtgtaaagcttctatgtattgaaatatttttttacgttttatttattgtacaaagtgtatataattactgttttcttttttgtcagtgtaaagcagtcattagaattgattatacaaaaaata

SEQ ID NO: 145150 - DNA, 1360 bp, Homo sapiens
  Payload ID: 8680
  Gene Symbol: KLHDC1
  Gene Name: kelch domain containing 1
  ENST ID: ENST00000556392
  CDS Start-End: 91-381
gttcgtgcgtggagcagtcggggctggaggcgaggccgccgggcgggcaggggttgtggcgcggcaagcggcgggccagcgacggcgcgaatggcggactctcagctgttctgtgtggcggaggaacgcagcggccactgcgccgtggtggacggaaacttcctctacgtgtgggggggctacgtgtctattgaagacaatgaagtatatttgcctaatgatgaaatttggacctatgatattgatagtgggttgtggagaatgcacctcatggaaggagaactcccagcctccatgtcaggaagctgtggtgcttgcattaatggaaagctgtacatttttggaggatatgatgacaaaggatacagcaatcgaagatgaaacctacatttgggagaaaatcaccgactttgaagggcaaccacctacaccacgtgataaactttcctgctgggtatataaagacagactaatatattttggtggttatgggtgtaggagacacagtgaactccaagactgttttgatgttcatgatgcatcttgggaagagcagatattctggggatggcataatgatgtccacatatttgacacaaagacacagacttggtttcaaccagaaattaaaggtggagttccaccacagccacgagccgcgcatacatgtgcagttcttggaaataagggttatatctttggcggacgtgttctgcaaactaggatgaatgatttgcactatctaaacctagacacctggacttggtctggaaggattactattaatggagaaagcccaaaacatcggtcatggcatactttaacacctatagctgatgataaacttttcctatgtggtggactaagtgcagataatatcccattaagtgatggttggattcataatgtcacaacaaattgttggaaacaacttacacatttacctaaaacaagacctaggttatggcacacagcctgtttgggaaaagaaaatgaaataatggtatttggtgggagcaaagatgacttacttgccttggatacaggtcactgtaatgatttattgatctttcaaacacagccttattcactactcaggtcatgccttgactgcattggtaaaaattctatcatgttagaaagtcagatatctttattacctcctaaacttctgcaacaagtactcaaaaaaataacattttgggctgcagctaatcaccgagaagaacaaagagtccaaaaagaagaaacagaaaataaatatcagtggatcagtagcaattaaattgttatatactttacatatttagtatgttttaactttttaatcagactatacatttacactcccaaattgcag

SEQ ID NO: 145151 - DNA, 655 bp, Homo sapiens
  Payload ID: 8680
  Gene Symbol: KLHDC1
  Gene Name: kelch domain containing 1
  ENST ID: ENST00000557128
  CDS Start-End: 67-655
tggaggcgaggccgccgggcgggcaggggttgtggcgcggcaagcggcgggccagcgacggcgcgaatggcggactctcagctgttctgtgtggcggaggaacgcagcggccactgcgccgtggtggacggaaacttcctctacgtgtgggggggctacgtggaagagcagatattctggggatggcataatgatgtccacatatttgacacaaagacacagacttggtttcaaccagaaattaaaggtggagttccaccacagccacgagccgcgcatacatgtgcagttcttggaaataagggttatatctttggcggacgtgttctgcaaactaggatgaatgatttgcactatctaaacctagacacctggacttggtctggaaggattactattaatggagaaagcccaaaacatcggtcatggcatactttaacacctatagctgatgataaacttttcctatgtggtggactaagtgcagataatatcccattaagtgatggttggattcataatgtcacaacaaattgttggaaacaacttacacatttacctaaaacaagacctaggttatggcacacagcctgtttgggaaaagaaaatgaaataatggtatttggtgggagcaaagatgacttacttgccttgg

SEQ ID NO: 145152 - DNA, 1447 bp, Homo sapiens
  Payload ID: 8680
  Gene Symbol: KLHDC1
  Gene Name: kelch domain containing 1
  ENST ID: ENST00000555704
  CDS Start-End: 91-294
gttcgtgcgtggagcagtcggggctggaggcgaggccgccgggcgggcaggggttgtggcgcggcaagcggcgggccagcgacggcgcgaatggcggactctcagctgttctgtgtggcggaggaacgcagcggccactgcgccgtggtggacggaaacttcctctacgtgtgggggggctacgtgatggagtctcgctcttgcccaggctggagtgcagtggcgcgatctcggctcactgcaacctccgcctcccaggttcaaccaattctcctgcctcagcctcccgagtagctgggactacaggtgcttcccaccatgcccagtctattgaagacaatgaagtatatttgcctaatgatgaaatttggacctatgatattgatagtgggttgtggagaatgcacctcatggaaggagaactcccagcctccatgtcaggaagctgtggtgcttgcattaatggaaagctgtacatttttggaggatatgatgacaaaggatacagcaatcgactttattttgttaatttacgaacaagagatgaaacctacatttgggagaaaatcaccgactttgaagggcaaccacctacaccacgtgataaactttcctgctgggtatataaagacagactaatatattttggtggttatgggtgtaggagacacagtgaactccaagactgttttgatgttcatgatgcatcttggggtggagttccaccacagccacgagccgcgcatacatgtgcagttcttggaaataagggttatatctttggcggacgtgttctgcaaactaggatgaatgatttgcactatctaaacctagacacctggacttggtctggaaggattactattaatggagaaagcccaaaacatcggtcatggcatactttaacacctatagctgatgataaacttttcctatgtggtggactaagtgcagataatatcccattaagtgatggttggattcataatgtcacaacaaattgttggaaacaacttacacatttacctaaaacaagacctaggttatggcacacagcctgtttgggaaaagaaaatgaaataatggtatttggtgggagcaaagatgacttacttgccttggatacaggtcactgtaatgatttattgatctttcaaacacagccttattcactactcaggtcatgccttgactgcattggtaaaaattctatcatgttagaaagtcagatatctttattacctcctaaacttctgcaacaagtactcaaaaaaataacattttgggctgcagctaatcaccgagaagaacaaagagtccaaaaagaagaaacagaaaataaatatcagtggatcagtagcaattaaattgttatatactttacatatttagtatgttttaactttttaatcagactatacatttacactcccaaattgcaggcttt

SEQ ID NO: 145153 - DNA, 645 bp, Homo sapiens
  Payload ID: 8680
  Gene Symbol: KLHDC1
  Gene Name: kelch domain containing 1
  ENST ID: ENST00000553274
  CDS Start-End: 76-645
agtcggggctggaggcgaggccgccgggcgggcaggggttgtggcgcggcaagcggcgggccagcgacggcgcgaatggcggactctcagctgttctgtgtggcggaggaacgcagcggccactgcgccgtggtggacggaaacttcctctacgtgtgggggggctacgtgtctattgaagacaatgaagtatatttgcctaatgatgaaatttggacctatgatattgatagtgggttgtggagaatgcacctcatggaaggagaactcccagcctccatgtcaggaagctgtggtgcttgcattaatggaaagctgtacatttttggaggatatgatgacaaaggatacagcaatcgactttattttgttaatttacgaacaagagatgaaacctacatttgggagaaaatcaccgactttgaagggcaaccacctacaccacgtgataaactttcctgctgggtatataaagacaggaagagcagatattctggggatggcataatgatgtccacatatttgacacaaagacacagacttggtttcaaccagaaattaaaggtggagttccaccacagccacgagccgcgcatacatgtgcagttcttggaaataagggttatatctttggcggacgtgttc

SEQ ID NO: 145154 - DNA, 6437 bp, Homo sapiens
  Payload ID: 8681
  Gene Symbol: KLHDC10
  Gene Name: kelch domain containing 10
  Uniprot ID: Q6PID8
  ENST ID: ENST00000335420
  CDS Start-End: 135-1463
tggtctctggtgggaccgggcgctgcccccttcccctgtctcctgggtctctggaggagcccaggaaggaggctccgctggttccgctgggtcaggcgctgacgggaccgggctgcggcaatcgttagcgggtcatgtcggccgcccagggctgggacaggaaccgccggaggggaggaggcgccgccggcgctggtggcggaggtagcggggccggcgggggcagtgggggcagcgggggtcgggggactggccagctcaaccgcttcgtgcaactctccgggcggccgcacctgccaggtaagaagaaaatacgatgggacccagttaggaggcgcttcattcagtcctgtcccatcataaggatccctaacaggtttttgagaggccacagacctccaccagcacgaagtggacatcgttgtgtggcagataataccaacctatatgtgtttggaggttataacccagattatgatgaatcgggagggcctgataatgaagactatcctctcttcagggaactctggaggtatcattttgctacaggagtatggcaccagatgggcacagatggctacatgccccgggaattggcatctatgtcacttgtgctgcatggaaacaacctgttagtatttggaggtacgggcatcccatttggagagagcaacggcaatgacgtccatgtgtgtaatgtgaagtataagagatgggctttgctcagctgtcgggggaagaaacccagtcgtatatatggacaggctatggccatcatcaatggctccctttatgtctttggaggtacaaccggctatatttacagcacagacctgcacaagttagatctcaataccagagagtggacacaactgaaaccaaacaacctatcctgtgatctaccagaagagagataccgacatgaaattgcacatgacgggcagaggatttacatcttgggaggtggtacttcctggacagcatattccttaaacaagatccatgcatacaaccttgaaacgaatgcctgggaggaaattgcaacaaaaccccatgaaaaaataggctttcctgcagcccgaaggtgtcacagttgtgttcaaataaaaaatgatgtatttatttgtgggggctataatggagaggtgatcctgggagatatctggaagttgaatctgcagactttccaatgggtgaagctcccagctaccatgccagagccagtttattttcactgtgcagctgttacaccagctggttgcatgtacattcatggaggagtggtgaacatccatgaaaacaaacggactgggtcattgtttaagatctggctggtggtacctagcctgctggaactggcatgggagaagctgcttgcggccttccctaaccttgcaaacctctcccgaacacaacttctgcaccttggactcacacagggactcatcgaacgcttgaaatgaggatttctggactgttcattgatactggaaatgttaatttaaagagactcctttatttatgggcagtgtagaatgtgctacaaagaggattggttaccctgatcaaggccttatttagaaaatacatcagatgcctttctgtaaattggtttttcagtttatggacatctcactttcccacgtgcttccttctttgcttctgttcctcctgacccattacatgcacatgtactcacatactccctcttccttctcgatggagttaagggaaagcctgaaagtaccttaataatgttattaatcaagacagattcctttttaaaggaattctgaatagttccatgtcatacaatattctagaaattaaaacatcatcaacataaagaaaaatgaaattaaaaaatttttacatctagcaacagcaacaaccacaaatttaggggaagctgagaaggctaaccttgggaatcttgcaggttatacttaaacctagatgtttaacttagtgttttcaagatgtgtctaactgagtagtagctgggtctgatggcagcagtgcttgccatcttgttgcacagataactcaaacctaccctttggctttgaaggaaggttaagcagcccagcaactcttggttagtgatttctttctcatcctcatggtgccagcagtggttagagttggtttgtcaaaagacttacgtgtgtgtcgtggtcgtgctctttgttgttgctcttagaaattatggcaccaagaatgtttcaaacggaaaaacttgtggtggccaaagttcttcattctggcagttttgaaactctcttatgcttattaatggttttaaatatctctttgacttcttcatggggaattgtagaccctaagtatgtggtgtaaatgccatgtaacatgaacacaagctcccgagggaggccagagaagagccaggcagagaaaacctgcatcctctgggcttgttaacttggcttccactcgggctgtggtctttggctatcatcttggccatttccttttgagaacttgtttcttttctaatctctgggccaggtacctgccattttctcaggcagttggtccttgatttttcccttagcttgttgccttcttttccgtctgctttaatgtgcatggtgctgtgaataattgtctagtaattggatacaaggtcttgggggtaaagccacaggtcatccttcctgaagaaccaagtatcatttaaaaactagcatgaggaaggaatgaaactgagtagcattcattttgtgtgtgtgaaattttagttctggtttgtttgatttgttttttttttaattctaaaaagaatgacataaattttcactcgctttgccatctggctgctaggggagctgagcaagaggctcaccatgcgcatgtgtaagccgcaggtgtactcaaggtgctgaaggcgtgcaaggggcagcgctggtcctcccggggccaactcacagcaggagactcgcatgggagagttggaacacatctttcctttaagtgcctcttttttcacctagcttttaaagttattctttgtccttcatctcagaagggatctctttagcttatgtgtggatttaaaatgacctttgagctacggttaaaaagctaccatctggtgttcagttctgggaaagagaaaaccgtagcctccagacatgctcctgatttctaggccttatcataccatcccctctgtgatgggttgagttcatggagcctgtattctgggaagtcttataataaccacgcacctgtgaacgtgggtcctttctggggagtgaggaatgtgggagagaggcagaaaaaggagcagctcctctaggggcccatcctcccacatcttgccattaccagtctgtgtagcacttaacctcctgccaccactgccaggcttgctcctccgttctctcccagagcaagtcagtctgagcagctccattagtccaaaacagagctttgctgcatgacttcagcctggcctctggatatttggtggaaatatattctaaattgaacaagccaggctgtccagggtggcaagaggatttttgacctggatttatacagggaccaaagactgaatgctcagcctctgtgcttagactttcatggtccttaggatagaagtgagtctctagccctgctacaccagagagctgaagagagatgtggtctggttccatccatacttgctggcatcctttgttaagccttctgagggcagtcttctttgaggtagaccttggaggcctgacatcgaagacctgtgtgttttattttcataaaagtatatatccttggtctaaagtgtcttcttttaatataacactagtaaaaatgacatggtatgaccagcactgagtgctatagaaccacacatgtgtacatgttctggatgccaaatgagactgtgtgtaaatgactaagtgtagataactagaaattagataggggtcatcaggcgtttcggtatacctataaccagcactcggaattcctgacactgtttacttgatttaggaaagtttatgcctgctgcttctctgcctctttgaggtactcccagccgtcttactacagtcctgtaaatttaagtgcaatatatagaaacatatggatatatacagattatatatagggtgtaactataaagcaggtagactacttttttgcatcttggggaagtgagctcattactttaggttcaaattatgccaagaattttagatgtgatcagctggcttaagccaactcatgtcatgataaagctggattttcaagtccatgttttcttactccaactcttagagactcattgttccttaggtttgttagagttgagattttttttctccctgtcatctttgtactctctcatgtttgcatgtcttacattttgttgccggagaacaaggaagtccatctgtaaggagtttcctaaacggagaattaaaacctagtatttaacactaaccattctcctatgtatatactaatttatctgggaatgtaatactttattaaatgaagaaaatgatgctttcttcatttaatattttccacatcctggaaaaactataaactgacacagaataggttgaaatcttaactggggctaaacaaaaccctttccattggcagaatctccttttttcagggccataatgacatgatgtaaaaatttgctttaaaccattcatgcccttaaatagctagattttaaagcataataagcatattaacatttttaagcaaaagatacgttaacagtgacctttggttatccacagtagcaagagtaaagcacagatcattgaaatccatagataatcagtgaatcaactttcctaccaaacaatagattcatttacatttctttttcctccctatcctttcctgtaagcacctgtttttccatggaatggggttaatgagtaggtagaaaaggaaaaggaataatcagtaggagctgacaaccagtgaccatataagcagctgattgcctgtaattagtcaggctgaacaattagagttgaatgctgaaattaggaaccacaggtggtaatcctgagtagatgtagctcttcagcgtcatctcctgccctgagctccaggccatctctctaaccaccaaagaactcttagtacctacgggaaggaaaagctgtgtgcgacacagaggaaactccattatttgaacacatttctttggctcttgacaaatacttgcttttcctctaatcttgcaagagctatggctcttctattttccaatcacacagcttggcatgtaggaaaggttgaatgatcctctaagactgtgttggtcttcgtattctgtaaaacccattttttttttgtggtcttacagatgtttagaaagtggcacaggttactgaattgtctacctgccagcattctgatatagcacaaaaagctattttcctttattttttgtattattttttatttttctggcattgagctctagggtggatgagggtttatggtcctctgatcataagctccattctaaaaactggtcactgttagctgaaattgctttggttccccaaatgccttggaactccagacgcacccgcagggcctgaggtaggcttcatagagttctaggacttccgtgtgcgttgccaccagatcctgcccagcaatggcctttcccttctaaggtcattagattcagccaaaagcgacctcttctctagtccggtgttacgaacagaagttctgagttgtgctacaaaagtagttccatctttttggtgtaattttcatgtttttaatttgaaaaaaaaaaaaaaaaaaaaacaactttttataagttttttaagggccctgcttagtcagtgtacagggtggagtcagaggcagttttcagaaaaaaacaaaaaacaatttcaccaagcggtagtaattgttgttttactagttatacatttagaatataaaggaggcatcagaaaacacactctctaaagccacttccttgtgcacagagtctgcacagggagagcacaggcatctccctggaaaagcacctgccaatgacgaatttcatggaagaacctaggcaagaaaggaagcctctttctgagacacagtctctgagaggtgagcctagctttgctcttcctacagggtatgcttgggccatacacaatgctcgccttactttaaagctattttgccacagtcctgttaaatagtgtggacgtccttttgcagtctggtgtgcatgccatatgatcaggacagcttttccactttactcggtttcctacaagcaagtaggaaatacagtgaatttaccctaaaatgtccaatctgtatttatgtaccttgtcagtgttttgctgttggttttctaaaacaatctgatcaataaatcttatccaaatcaatttggttcaagttca

SEQ ID NO: 145155 - DNA, 772 bp, Homo sapiens
  Payload ID: 8681
  Gene Symbol: KLHDC10
  Gene Name: kelch domain containing 10
  ENST ID: ENST00000468226
  CDS Start-End: 339-772
ccgcttcgtgcaactctccgggcggccgcacctgccaggaatagattcctagaagtggaatagctgggtcaaagggtaagaagaaaatacgatgggacccagttaggaggcgcttcattcagtcctgtcccatcataaggatccctaacaggtttttgagaggccacagacctccaccagcacgaagtggacatcgttgtgtggcagataataccaacctatatgtgtttggaggttataacccagattatgatgaatcgggagggcctgataatgaagactatcctctcttcagggaactctggaggtatcattttgctacaggagtatggcaccagatgggcacagatggctacatgccccgggaattggcatctatgtcacttgtgctgcatggaaacaacctgttagtatttggaggtacgggcatcccatttggagagagcaacggcaatgacgtccatgtgtgtaatgtgaagtataagagatgggctttgctcagctgtcgggggaagaaacccagtcgtatatatggacaggctatggccatcatcaatggctccctttatgtctttggaggtacaaccggctatatttacagcacagacctgcacaagttagatctcaataccagagagtggacacaactgaaaccaaacaacctatcctgtgatctaccagaagagagataccgacatgaaattgcacatgacgggcagaggatttacatcttgggaggtggtacttcctggacagcatattccttaaacaa

SEQ ID NO: 145156 - DNA, 503 bp, Homo sapiens
  Payload ID: 8681
  Gene Symbol: KLHDC10
  Gene Name: kelch domain containing 10
  ENST ID: ENST00000463413
  CDS Start-End: 95-503
tcctgggtctctggaggagcccaggaaggaggctccgctggttccgctgggtcaggcgctgacgggaccgggctgcggcaatcgttagcgggtcatgtcggccgcccagggctgggacaggaaccgccggaggggaggaggcgccgccggcgctggtggcggaggtagcggggccggcgggggcagtgggggcagcgggggtcgggggactggccagctcaaccgcttcgtgcaactctccgggcggccgcacctgccaggccacagacctccaccagcacgaagtggacatcgttgtgtggcagataataccaacctatatgtgtttggaggttataacccagattatgatgaatcgggagggcctgataatgaagactatcctctcttcagggaactctggaggtatcattttgctacaggagtatggcaccagatgggcacagatggctacatgccccgggaattggcatctatgtcacttgtgctgcatggaaacaacc

SEQ ID NO: 145157 - DNA, 5514 bp, Homo sapiens
  Payload ID: 8682
  Gene Symbol: KLHDC2
  Gene Name: kelch domain containing 2
  Uniprot ID: Q9Y2U9
  ENST ID: ENST00000298307
  CDS Start-End: 862-2082
agaggcggcgcccggcaggggcggcaggagctcaggagaggcccccggggatcgggctgggccccacgtgagagctaagcgactgccctcgcgcccgcagaacagcagggcctgcatcgactctaaggcgagaccagaaacttgctagtggagcaattctggtgcccctgcccgggctgtgaaccctctgagatcatccctcaatcaaacgaatagaaatcctcgggaagaaaaaaaaaattgcggcaatccggctaaaattcagcagctttcagggaccgattcaggacattatccctgtggttccctcagtgaaaggagactcgaagcgcgactagaagtcgccgggccccatagatctgcggtgcccaggccgtaggcggaggcgcgggcagaggcggcggcggcggcggcggcggctggaggacccggcgctgggggcgctgagcggcagcctcgcttccggagctcggcgggcggcgtcagcggaacgggcggcttccggccgcggcgtaaacaaggccgtggactgcaggaggcggggcagacgggctgcaatagggagccggcccgacgcggaccgcttccctgcagtgccccgagtcccgggcccgcgccgccgccgcccggctccgctcgcggcccctctgtctgcaggcgtgccccggcggcggcggagagccgtcctcggccgaggaggctgggaaacgcgagcgcaggcggcagagaggcctcaacgccgtccctttcgccaccgccttttccttgcctcgcgccgctgtgcatttctctccttttcctttgtttttttggcccctcgcgggtgtgggcattgttggttagcaaaagtgcagcctcaagatggctgatggcaacgaggatctgcgggctgacgacttgcctgggccagccttcgagagctatgagtccatggagcttgcctgccccgctgagcgcagcggccacgtagccgtcagcgacgggcgccacatgttcgtctggggcggctacaagagtaatcaagtcagaggattatatgacttttatctgcctagagaagaactatggatctacaacatggagactggaagatggaaaaaaatcaacactgaaggtgatgttcctccttctatgtcaggaagctgtgctgtgtgtgtagacagggtgctgtacttgtttggaggacaccattcaagaggcaataccaataagttctacatgctggattcaaggtctacagacagagtgttacagtgggaaagaattgattgccaaggaattcctccatcatcaaaggacaaacttggtgtctgggtatataaaaacaagttaatattttttggagggtatggatatttgcctgaagataaagtattgggaacttttgaattcgatgaaacatctttttggaattcaagtcatccaagaggatggaatgatcatgtacatattttagatactgaaacatttacctggagccagcctataactactggtaaagcaccttcacctcgtgctgcccatgcctgtgcaactgtcggaaatagaggcttcgtgtttggaggcagatatcgagatgctagaatgaatgatcttcactatcttaatctggatacatgggagtggaatgaattaattccacaaggcatatgcccagttggtcgatcttggcactcactaacaccagtttcttcagatcatctttttctctttggaggatttaccactgataaacagccactaagtgatgcctggacttactgcatcagtaaaaatgaatggatacaatttaatcatccatataccgaaaaaccaaggttatggcacacagcttgtgccagcgatgaaggagaagtaattgtttttggtggatgtgccaacaacttgcttgtccatcacagagctgcacacagtaatgaaatactaatattttcagttcaaccaaaatctcttgtacggctaagcttagaagcagtcatttgctttaaagaaatgttagccaactcatggaactgccttccaaaacacttacttcacagtgttaatcagaggtttggtagtaacaacacttctggatcttaaggcttcataaataatgcctatgatcaccttgcatggacagcaatcctgtaaacatcacagagtggcatcatttgtataattatatgcattgttgtagtttgcacctgttggttttaatgtgcatgtgaatggcctagagaacctatttttgtgtctaaagtttacaataaatgtatttaacaccagtagctgtcctctattaaagtaaagtaatggttgggctttttaccctgaagaatggttgctacattttcttttcagtaacttcaggatatgtatctgtagaaacattatagtcttaccatcatcaaaatgctgaagtcattttttgaaaacattatagatttttttttttttaatggcaagagtagtctatagttatgtaacctagtgttgtaaatacaatataataaaggtttttttttttaaacattaatattcacattatgacgaagctggaaaaacaaagtgtggagggaccaacaactgttcagtactttgaccttaatgcttcagtgtaggggctggagcaagtggtcatgctgaatacaggcaggtgctgtccagtcaattaaaaagtttttttttaattaataggttttatagctcatgaaggaatggaaataatgatgacatcattttccattctgttaagagacagaggaaaagtgggttagagtctttagtggtaagcctaaaatgcgcttctggtattataggttaagatactctaacgtgctatattggtaattaattactaaaggtggaaattaaaatggtacagaactgaatcagattacaaggaaaaaattaagatcaaacctgaaggtctacaaatgaatagaaatgattaagctgagtcatgagaattattacttatattttacattttggtctaatatttttttctgacaagtatcaatgaaagcagaagaaaatccactccaatacttagttttcaagacacaatcctaaatatttaaaccccttgtagctggcctataatatatatatattagatgttatatacagtagacttaccaagtcaatagtttaagcaatcaagccacttcactgttcagtttctttacatcatgaaatgaatacttggtattaacctcccaaatttcaagaaaatgtagaataactacagatgtatataattagcatttaactgtccacaaatactttaggaaatcctatcatagtgtttcctctatataaaactgggaaaaaaacaagaattaagtccttttggtgaatatagcaaggcaatgtttagttcatttggcctgtaatatatatattagatgttatatacagtagacttaccaagtcaatagtttaagcaatcaagccacttcactgttcagtttctttacatcatgaaatgaatacttggtattaacctcccaaatttcaagaaaatgtagaataactacagatgtatattaattagcatttaactgtccacaaatacttttggaaatcctatcatagacagtgtttcctctatataaaactgggaaaaaacaagaagtaagtccttttggtgaatatagcaaggcaatgtttagttcatttttataatgcggaaatcctgatacatggtgctttcatctttgaacttccaaaaggctataaaattggctcttctcaaatattttagaatttcatttcagctatttcctttttacgttcagaagattgggtgcagacactttcactttgccaggaatgtttcttgataaatctgtgtcctaaaaaaagaaaattgctgaatatcttcacatcctgtatggtcaatcatgtttcttttatgacaaaaacgaaaaacatttccaaacttttagctgagatggttttactgcttctaataagacagcattttctactaaaataacaaaaaactgctaacattttaaattgtactgtcagtctccacattccttttctgaaggagaactttacctttacgctgcggaataagtctttttctcttgctgttgcttctttggaatgcatgaaactattcaaggctgtttttgcagctgtaaatacaaaaaagagtaagaataatctactgttaagtcactgaactgtttaaaatcataattcaaaaaaacaaatttaaataccttttccctttttctgcactccaggagtaagtttcactttatatctttaaaaaggaattacatgtgttactaaatagacgttacaaaacaattcacaaaagccattctgtcaactaatggtaacttacttgtagtttgtcatggtggtgtaaggggcacatattggaatggcaaacagtagtacatcttcaggatgtggctggcctgtcaaagaatcaaataggttttcctaaaaagggaaaataacagttacaaaggcaatttataccgccctttacaaaaaatgctaaaacacttgaattagtatctcaacatattttttatcttttcctgatatacataccatctaagctggaacagtggtacttaaactctgcttcatagttccaaagagttgaagaccaatgtttaaatatattctttactacttaatttttgcctagcataataagtaatgagaacaataattttcaaaatcctacctacagttacatttaagagaaagaaggcccaggagcagtggttcacgcctataatcctaggactctggaaggctcaggctgaggcgggtggatcgcttgagcccaggagttcaagaccagcctaagcaacatggagaaacaccatctctacaaaaaatataaaagttagctgggtatagtgggtgcctgtagtcccagctactcggaagactgagggggggaggatcacctgagcccaggaggtagacgttgtggagagccatgatcctgtcactgcactgggtgacaccagcctgggtgacagagaccctgtctcaaaaaaaaaaaaaaaaggaaaaaaactattggatattacctgagttgcagaaacctgctgtggattaaaatgatgcaataataaccacaaatagatttaagtcctatcacatggaaatgggactaataccttggctataccactatttctcgtcctggggagattctgccctcagaagacaatgggcaatgtctagagatagttttcgttgacacgatgaggggtgagaaggaataggtaggggctgctactgggatctagtgggtaaaggccgaggatgtcgctaaacattttataatgaatgggacagaccccacaacaaagaattaaccaacccctaatgttaatagtgccaaagttgagaaaccctgggctagaacagccttctctcttacccattattaaggagaaatcccagagttcttatttgctgtgctgcctgtgagattgcccccatttattttacaatatgaataaacttagatttaggacagaa

SEQ ID NO: 145158 - DNA, 1696 bp, Homo sapiens
  Payload ID: 8682
  Gene Symbol: KLHDC2
  Gene Name: kelch domain containing 2
  Uniprot ID: Q9Y2U9
  ENST ID: ENST00000555739
  CDS Start-End: 340-1089
ccgtggactgcaggaggcggggcagacgggctgcaatagggagccggcccgacgcggaccgcttccctgcagtgccccgagtcccgggcccgcgccgccgccgcccggctccgctcgcggcccctctgtctgcaggcgtgccccggcggcggcggagagccgtcctcggccgaggaggctgggaaacgcgagcgcaggcggcagagaggcctcaacgccgtccctttcgccaccgccttttccttgcctcgcgccgctgtgcatttctctccttttcctttgtttttttggcccctcgcgggtgtgggcattgttggttagcaaaagtgcagcctcaagatggctgatggcaacgaggatctgcgggctgacgacttgcctgggccagccttcgagagctatgagtccatggagcttgcctgccccgctgagcgcagcggccacgtagccgtcagcgacgggcgccacatgttcgtctggggcggctacaagagtaatcaagtcagaggattatatgacttttatctgcctagagaagaactatggatctacaacatggagactggaagatggaaaaaaatcaacactgaaggtgatgttcctccttctatgtcaggaagctgtgctgtgtgtgtagacagggtgctgtacttgtttggaggacaccattcaagaggcaataccaataagttctacatgctggattcaaggtctacagacagagtgttacagtgggaaagaattgattgccaaggaattcctccatcatcaaaggacaaacttggtgtctgggtatataaaaacaagttaatattttttggagggtatggatatttgcctgaagataaagtattgggaacttttgaattcgatgaaacatctttttggaattcaagtcatccaagaggatggaatgatcatgtacatattttagatactgaaacatttacctggagccagcctataactactggtaaagcaccttcacctcgtgctgcccatgcctgtgcaactgtcggaaatagaggcttcgtgtttggaggcagatatcgagtaagtattcaaacgacttcaatgacttgcttttgaattcttcaaaatgataacttaattatccttttttaggatgctagaatgaatgatcttcactatcttaatctggatacatgggagtggaatgaattaattccacaaggcatatgcccagttggtcgatcttggcactcactaacaccagtttcttcagatcatctttttctctttggaggatttaccactgataaacagccactaagtgatgcctggacttactgcatcagtaaaaatgaatggatacaatttaatcatccatataccgaaaaaccaaggcacacagtaatgaaatactaatattttcagttcaaccaaaatctcttgtacggctaagcttagaagcagtcatttgctttaaagaaatgttagccaactcatggaactgccttccaaaacacttacttcacagtgttaatcagaggtttggtagtaacaacacttctggatcttaaggcttcataaataatgcctatgatcaccttgcatggacagcaatcctgtaaacatcacagagtggcatcatttgtataattatatgcattgttgtagtttgcacctgttggttttaatgtgcatgtgaatggcctagagaacctatttttgt

SEQ ID NO: 145159 - DNA, 1565 bp, Homo sapiens
  Payload ID: 8682
  Gene Symbol: KLHDC2
  Gene Name: kelch domain containing 2
  ENST ID: ENST00000557247
  CDS Start-End: 302-1225
gggagccggcccgacgcggaccgcttccctgcagtgccccgagtcccgggcccgcgccgccgccgcccggctccgctcgcggcccctctgtctgcaggcgtgccccggcggcggcggagagccgtcctcggccgaggaggctgggaaacgcgagcgcaggcggcagagaggcctcaacgccgtccctttcgccaccgccttttccttgcctcgcgccgctgtgcatttctctccttttcctttgtttttttggcccctcgcgggtgtgggcattgttggttagcaaaagtgcagcctcaagatggctgatggcaacgaggatctgcgggctgacgacttgcctgggccagccttcgagagctatgagtccatggagcttgcctgccccgctgagcgcagcggccacgtagccgtcagcgacgggcgccacatgttcgtctggggcggctacaagagtaatcaagtcagaggattatatgacttttatctgcctagagaagaactatggatctacaacatggagactggaagatggaaaaaaatcaacactgaaggtgatgttcctccttctatgtcaggaagctgtgctgtgtgtgtagacagggtgctgtacttgtttggaggacaccattcaagaggcaataccaataagttctacatgctggattcaaggtctacagacagagtgttacagtgggaaagaattgattgccaaggaattcctccatcatcaaaggacaaacttggtgtctgggtatataaaaacaagttaatattttttggagggtatggatatttgcctgaagataaagtattgggaacttttgaattcgatgaaacatctttttggaattcaagtcatccaagaggatggaatgatcatgtacatattttagatactgaaacatttacctggagccagcctataactactggtaaagcaccttcacctcgtgctgcccatgcctgtgcaactgtcggaaatagaggcttcgtgtttggaggcagatatcgagatgctagaatgaatgatcttcactatcttaatctggatacatgggagtggaatgaattaattccacaaggcatatgcccagttggtcgatcttggcactcactaacaccagtttcttcagatcatctttttctctttggaggatttaccactgataaacagccactaagttatggcacacagcttgtgccagcgatgaaggagaagtaattgtttttggtggatgtgccaacaacttgcttgtccatcacagagctgctaagcttagaagcagtcatttgctttaaagaaatgttagccaactcatggaactgccttccaaaacacttacttcacagtgttaatcagaggtttggtagtaacaacacttctggatcttaaggcttcataaataatgcctatgatcaccttgcatggacagcaatcctgtaaacatcacagagtggcatcatttgtataattatatgcattgttgtagtttgcacctgttggttttaatgtgcatgtgaatggcctagagaacctatttttgtgtctaaagtttacaata

SEQ ID NO: 145160 - DNA, 1756 bp, Homo sapiens
  Payload ID: 8682
  Gene Symbol: KLHDC2
  Gene Name: kelch domain containing 2
  Uniprot ID: Q9Y2U9
  ENST ID: ENST00000555443
  CDS Start-End: 302-1051
gggagccggcccgacgcggaccgcttccctgcagtgccccgagtcccgggcccgcgccgccgccgcccggctccgctcgcggcccctctgtctgcaggcgtgccccggcggcggcggagagccgtcctcggccgaggaggctgggaaacgcgagcgcaggcggcagagaggcctcaacgccgtccctttcgccaccgccttttccttgcctcgcgccgctgtgcatttctctccttttcctttgtttttttggcccctcgcgggtgtgggcattgttggttagcaaaagtgcagcctcaagatggctgatggcaacgaggatctgcgggctgacgacttgcctgggccagccttcgagagctatgagtccatggagcttgcctgccccgctgagcgcagcggccacgtagccgtcagcgacgggcgccacatgttcgtctggggcggctacaagagtaatcaagtcagaggattatatgacttttatctgcctagagaagaactatggatctacaacatggagactggaagatggaaaaaaatcaacactgaaggtgatgttcctccttctatgtcaggaagctgtgctgtgtgtgtagacagggtgctgtacttgtttggaggacaccattcaagaggcaataccaataagttctacatgctggattcaaggtctacagacagagtgttacagtgggaaagaattgattgccaaggaattcctccatcatcaaaggacaaacttggtgtctgggtatataaaaacaagttaatattttttggagggtatggatatttgcctgaagataaagtattgggaacttttgaattcgatgaaacatctttttggaattcaagtcatccaagaggatggaatgatcatgtacatattttagatactgaaacatttacctggagccagcctataactactggtaaagcaccttcacctcgtgctgcccatgcctgtgcaactgtcggaaatagaggcttcgtgtttggaggcagatatcgagtaagtattcaaacgacttcaatgacttgcttttgaattcttcaaaatgataacttaattatccttttttaggatgctagaatgaatgatcttcactatcttaatctggatacatgggagtggaatgaattaattccacaaggcatatgcccagttggtcgatcttggcactcactaacaccagtttcttcagatcatctttttctctttggaggatttaccactgataaacagccactaagtgatgcctggacttactgcatcagtaaaaatgaatggatacaatttaatcatccatataccgaaaaaccaaggttatggcacacagcttgtgccagcgatgaaggagaagtaattgtttttggtggatgtgccaacaacttgcttgtccatcacagagctgcacacagtaatgaaatactaatattttcagttcaaccaaaatctcttgtacggctaagcttagaagcagtcatttgctttaaagaaatgttagccaactcatggaactgccttccaaaacacttacttcacagtgttaatcagaggtttggtagtaacaacacttctggatcttaaggcttcataaataatgcctatgatcaccttgcatggacagcaatcctgtaaacatcacagagtggcatcatttgtataattatatgcattgttgtagtttgcacctgttggttttaatgtgcatgtgaatggcctagagaacctatttttgtgtctaaagtt

SEQ ID NO: 145161 - DNA, 1641 bp, Homo sapiens
  Payload ID: 8682
  Gene Symbol: KLHDC2
  Gene Name: kelch domain containing 2
  ENST ID: ENST00000554589
  CDS Start-End: 316-1389
gacgggctgcaatagggagccggcccgacgcggaccgcttccctgcagtgccccgagtcccgggcccgcgccgccgccgcccggctccgctcgcggcccctctgtctgcaggcgtgccccggcggcggcggagagccgtcctcggccgaggaggctgggaaacgcgagcgcaggcggcagagaggcctcaacgccgtccctttcgccaccgccttttccttgcctcgcgccgctgtgcatttctctccttttcctttgtttttttggcccctcgcgggtgtgggcattgttggttagcaaaagtgcagcctcaagatggctgatggcaacgaggatctgcgggctgacgacttgcctgggccagccttcgagagctatgagtccatggagcttgcctgccccgctgagcgcagcggccacgtagccgtcagcgacgggcgccacatgttcgtctggggcggctacaagagtaatcaagtcagaggattatatgacttttatctgcctagagaagaactatggatctacaacatggagactggaagatggaaaaaaatcaacactgaaggtgatgttcctccttctatgtcaggaagctgtgctgtgtgtgtagacagggtgctgtacttgtttggaggacaccattcaagaggcaataccaataagttctacatgctggattcaaggtctacagacagagtgttacagtgggaaagaattgattgccaaggaattcctccatcatcaaaggacaaacttggtgtctgggtatataaaaacaagttaatattttttggagggtatggatatttgcctgaagataaagtattgggaacttttgaattcgatgaaacatctttttggaattcaagtcatccaagaggatggaatgatcatgtacatattttagatactgaaacatttacctggagccagcctataactactggtaaagcaccttcacctcgtgctgcccatgcctgtgcaactgtcggaaatagaggcttcgtgtttggaggcagatatcgagatgctagaatgaatgatcttcactatcttaatctggatacatgggagtggaatgaattaattccacaaggcatatgcccagttggtcgatcttggcactcactaacaccagtttcttcagatcatctttttctctttggaggatttaccactgataaacagccactaagtgatgcctggacttactgcatcagtaaaaatgaatggatacaatttaatcatccatataccgaaaaaccaaggttatggcacacagcttgtgccagcgatgaaggagaagtaattgtttttggtggatgtgccaacaacttgcttgtccatcacagagctgctaagcttagaagcagtcatttgctttaaagaaatgttagccaactcatggaactgccttccaaaacacttacttcacagtgttaatcagaggtttggtagtaacaacacttctggatcttaaggcttcataaataatgcctatgatcaccttgcatggacagcaatcctgtaaacatcacagagtggcatcatttgtataattatatgcattgttgtagtttgcacctgttggttttaatgtgcatgtgaatggcctagagaacctatttttgtgtctaa

SEQ ID NO: 145162 - DNA, 1903 bp, Homo sapiens
  Payload ID: 8683
  Gene Symbol: KLHDC3
  Gene Name: kelch domain containing 3
  ENST ID: ENST00000244670
  CDS Start-End: 592-1338
agaatctctcctacgcccctgcccactcctcagccctctcgtccctcaggaaacgtatggactacaagtcccgaaatgcctccggcacttagctacgactgcacgtgcgcgcacagctgcccgccggaagaaccgagcttggctgtgtttatctcgttggggactaaggcgtcggttggcgcgcaacgggttctaggctgcaggcagctcgaggacccgcggccccgccccggctcggcctggcagatagcagaggcagcaggccgtgccgggggggcatgttgctgtaaccagtggcccaggggatgttacggtggacagtgcacctggagggcgggccccgcagggtgaaccatgctgcagtggctgtcgggcatcgggtatactccttcgggggttactgctctggtgaagactatgagacactgcgtcagatagatgtgcacattttcaatgcagtgtccttgcgttggacaaagctgcccccggtgaagtctgccatccgtgggcaagctcctgtggtaccctacatgcgctatggacactcaaccgtcctcatcgacgacacagtcctcctttggggcgggcggaatgacaccgaaggggcctgcaatgtgctctatgcctttgacgtcagcggactgtttttccaatgacattcacaagctagataccagcaccatgacatggactcttatctgtacaaagggcagccctgcacgctggagggacttccactcagccacaatgctgggaagtcacatgtatgtctttgggggccgtgccgaccgctttgggccattccattccaacaatgagatttactgcaaccgcattcgagtctttgacaccagaactgaggcttggctggactgtcccccgactccagtgctgcctgaggggcgccggagccactcggcctttggctacaatggggagctgtacatctttggtggttataatgcaaggctgaaccggcacttccatgacctctggaagtttaatcctgtgtcctttacctggaaaaagattgaaccgaaggggaaggggccatgtccccgccggcgccagtgctgctgtattgttggtgacaagattgtcctctttgggggtaccagtccatctcctgaggaaggcctgggagatgaatttgaccttatagatcattctgacttacacattttggactttagccctagtctgaagactctgtgcaaactggccgtgattcagtataacctagaccagtcctgtttgcctcatgatatcaggtgggagctgaatgccatgaccaccaacagcaatatcagtcgccccatcgtctcctcccatgggtaggaggaagtttctgccacctcccctcctgagcctgctgtcatcttcactgcccctgcccatctgtcacccacctgctcctttgacccctggacttggtatacctccatgtggagttgttgggcgagaggtgttctctgtgctgtgaattcagtggggagctgtagcggggtgggggctaggttcctccccccttgggccgagggccccttccccttggtgctctgtccccatccacctcctttcagctgctcctgggcctcagctctgcccagggccagccaggttctgctgggaagggaagggaatggggagaagggagaagcaagcagtgtctgagcctcaggagcttccccctccccctttgcctatcccctcccctctgcttgagccttgagccttgactgggagctgaaaggagttgcagctgttggcatgagacctccttctccccgtcttggggaggtggggaccagcagataaatcccacccttccttgagctgtcgctgtactctgaagttcagccagctcagattttataaaaattaattaaaatctccaaacgtg

SEQ ID NO: 145163 - DNA, 1909 bp, Homo sapiens
  Payload ID: 8683
  Gene Symbol: KLHDC3
  Gene Name: kelch domain containing 3
  Uniprot ID: Q9BQ90
  ENST ID: ENST00000326974
  CDS Start-End: 196-1344
gcacagctgcccgccggaagaaccgagcttggctgtgtttatctcgttggggactaaggcgtcggttggcgcgcaacgggttctaggctgcaggcagctcgaggacccgcggccccgccccggctcggcctggcagatagcagaggcagcaggccgtgccgggggggcatgttgctgtaaccagtggcccaggggatgttacggtggacagtgcacctggagggcgggccccgcagggtgaaccatgctgcagtggctgtcgggcatcgggtatactccttcgggggttactgctctggtgaagactatgagacactgcgtcagatagatgtgcacattttcaatgcagtgtccttgcgttggacaaagctgcccccggtgaagtctgccatccgtgggcaagctcctgtggtaccctacatgcgctatggacactcaaccgtcctcatcgacgacacagtcctcctttggggcgggcggaatgacaccgaaggggcctgcaatgtgctctatgcctttgacgtcaatacgcacaagtggttcacaccccgagtgtcagggacagttcctggggcccgggatggacattcagcctgtgtcctaggcaagatcatgtacatttttgggggctacgagcagcaggcggactgtttttccaatgacattcacaagctagataccagcaccatgacatggactcttatctgtacaaagggcagccctgcacgctggagggacttccactcagccacaatgctgggaagtcacatgtatgtctttgggggccgtgccgaccgctttgggccattccattccaacaatgagatttactgcaaccgcattcgagtctttgacaccagaactgaggcttggctggactgtcccccgactccagtgctgcctgaggggcgccggagccactcggcctttggctacaatggggagctgtacatctttggtggttataatgcaaggctgaaccggcacttccatgacctctggaagtttaatcctgtgtcctttacctggaaaaagattgaaccgaaggggaaggggccatgtccccgccggcgccagtgctgctgtattgttggtgacaagattgtcctctttgggggtaccagtccatctcctgaggaaggcctgggagatgaatttgaccttatagatcattctgacttacacattttggactttagccctagtctgaagactctgtgcaaactggccgtgattcagtataacctagaccagtcctgtttgcctcatgatatcaggtgggagctgaatgccatgaccaccaacagcaatatcagtcgccccatcgtctcctcccatgggtaggaggaagtttctgccacctcccctcctgagcctgctgtcatcttcactgcccctgcccatctgtcacccacctgctcctttgacccctggacttggtatacctccatgtggagttgttgggcgagaggtgttctctgtgctgtgaattcagtggggagctgtagcggggtgggggctaggttcctccccccttgggccgagggccccttccccttggtgctctgtccccatccacctcctttcagctgctcctgggcctcagctctgcccagggccagccaggttctgctgggaagggaagggaatggggagaagggagaagcaagcagtgtctgagcctcaggagcttccccctccccctttgcctatcccctcccctctgcttgagccttgagccttgactgggagctgaaaggagttgcagctgttggcatgagacctccttctccccgtcttggggaggtggggaccagcagataaatcccacccttccttgagctgtcgctgtactctgaagttcagccagctcagattttataaaaattaattaaaatctccaaacgtg

SEQ ID NO: 145164 - DNA, 1494 bp, Homo sapiens
  Payload ID: 8683
  Gene Symbol: KLHDC3
  Gene Name: kelch domain containing 3
  ENST ID: ENST00000332245
  CDS Start-End: 154-1323
ctcgttggggactaaggcgtcggttggcgcgcaacgggttctaggctgcaggcagctcgaggacccgcggccccgccccggctcggcctggcagatagcagaggcagcaggccgtgccgggggggcatgttgctgtaaccagtggcccaggggatgttacggtggacagtgcacctggagggcgggccccgcagggtgaaccatgctgcagtggctgtcgggcatcgggtatactccttcgggggttactgctctggtgaagactatgagacactgcgtcagatagatgtgcacattttcaatgcagtgtccttgcgttggacaaagctgcccccggtgaagtctgccatccgtgggcaagctcctgtggtaccctacatgcgctatggacactcaaccgtcctcatcgacgacacagtcctcctttggggcgggcggaatgacaccgaaggggcctgcaatgtgctctatgcctttgacgtcaatacgcacaagtggttcacaccccgagtgtcagggacagttcctggggcccgggatggacattcagcctgtgtcctaggcaagatcatgtacatttttgggggctacgagcagcaggcggactgtttttccaatgacattcacaagctagataccagcaccatgacatggactcttatctgtacaaagggcagccctgcacgctggagggacttccactcagccacaatgctgggaagtcacatgtatgtctttgggggccgtgccgaccgctttgggccattccattccaacaatgagatttactgcaaccgcattcgagtctttgacaccagaactgaggcttggctggactgtcccccgactccagtgctgcctgaggggcgccggagccactcggcctttggctacaatggggagctgtacatctttggtggttataatgcaaggctgaaccggcacttccatgacctctggaagtttaatcctgtgtcctttacctggaaaaagattgaaccgaaggggaaggggccatgtccccgccggcgccagtgctgctgtattgttggtgacaagattgtcctctttgggggtaccagtccatctcctgaggaaggcctgggagatgaatttgaccttatagatcattctgacttacacattttggactttagccctagtctgaagactctgtgcaaactggccgtgattcagtataacctagaccagtcctgtttgcctcatgatatcaggtgggagctgaatgccatgaccaccaacagcaatatcagtcgccccatcgtctcctccccctttgcctatcccctcccctctgcttgagccttgagccttgactgggagctgaaaggagttgcagctgttggcatgagacctccttctccccgtcttggggaggtggggaccagcagataaatcccacccttccttgagctgtcgctgtactctgaagttcagccagctcagattttataaaaattaattaaaatctcc

SEQ ID NO: 145165 - DNA, 1663 bp, Homo sapiens
  Payload ID: 8684
  Gene Symbol: KLHDC4
  Gene Name: kelch domain containing 4
  Uniprot ID: Q8TBB5
  ENST ID: ENST00000353170
  CDS Start-End: 10-1401
cccggcaagatgggcaagaagggcaagaaggagaagaagggccgcggcgcggagaagacggccgccaagatggagaagaaggtgtctaagcgctcgcggaaggaggagacttttttgtataacgagctctatgtctacaataccagaaaggacacctggaccaaagttgacatccccagtccacctccgaggcgctgtgctcaccaggcggtggtagtgcctcaaggtggcggacagctgtgggtctttggaggggagtttgcctctcccaacggagagcagttctaccactacaaggatctctgggtcctgcatttggccaccaagacctgggaacaagtcaaatcaacaggcggtccttcgggtcggagtggacatcggatggtggcctggaagagacaattgatcctgtttggtggcttccatgaaagtacacgggattacatctactacaacgacgtgtatgcctttaatctggacaccttcacatggagcaagctgtccccgtcagggacggggcccacacccagatcaggctgccagatgtccgtcactccccagggcggcatcgtcgtctatgggggctactcgaaacagagagttaagaaagacgtggacaagggcacacggcactcagacatgttcctgctgaagccagaggacggaagagaagacaagtgggtttggactcggatgaacccttcgggggtcaagcccaccccacggtctggcttttccgtggccatggccccgaatcaccagacactgttcttcgggggtgtctgtgacgaggaagaggaggagagcctgtcgggcgagttcttcaacgatctgtacttctacgacgccaccaggaaccgttggtttgagggacagctgaagggacccaagtctgaaaagaagaaacgcaggcggggcagaaaagaggagcccgaaggtggtagcaggccggcgtgtgggggagctggcacccaggggcctgtgcagctggtcaaggaggtggtggccgaggatggcaccgtggtcaccattaagcaggtgctcaccgcgccaggctcggcggggcagccccggtctgaggacgaagacagccttgaggaggccggcagccccgcacctgggccgtgtccacgctccaacgccatgctggctgtgaagcatggggtgctctacgtctatgggggcatgtttgaggccggcgaccgccaggtcaccctcagcgacctgcactgcctggacctgcacaggatggaggcgtggaaggccttggtggagatggacccagaaactcaggagtggctggaggagacggactcggaagaggacagtgaggaggttgagggcgccgagggtggggtcgacgacgaagacagcggagaggagagcggtgcggaggactgagagcccctgccaggggcgcctggcaagtgctgtgcccacgtccgcccaggacccagccgtgttgagtgaagctcttggggccagcgtgcgtcctgacgcacaggagagagctgaaggtgggtggcccaggccagggtgtgaactttctcccatggtttagtctctgacgcggcactgggccggaagttcaactgagtgcagtgcaggtggattccctcagcagcctgtgtgttgtgtgaaataaattggacttgaaacaaga

SEQ ID NO: 145166 - DNA, 1886 bp, Homo sapiens
  Payload ID: 8684
  Gene Symbol: KLHDC4
  Gene Name: kelch domain containing 4
  Uniprot ID: Q8TBB5
  ENST ID: ENST00000270583
  CDS Start-End: 60-1622
gcggagagcgcgggccgttttctttcctggtgtcccgtcgcggcttgggacccggcaagatgggcaagaagggcaagaaggagaagaagggccgcggcgcggagaagacggccgccaagatggagaagaaggtgtctaagcgctcgcggaaggaggaggaagacctggaagcgctcatagcccatttccagacactcgatgccaagaggactcagactgtggaacttccgtgccccccaccctcaccaaggttaaatgcctccctctcggttcatcctgagaaagatgagttaatcctttttggaggtgaatatttcaacggccaaaaaacttttttgtataacgagctctatgtctacaataccagaaaggacacctggaccaaagttgacatccccagtccacctccgaggcgctgtgctcaccaggcggtggtagtgcctcaaggtggcggacagctgtgggtctttggaggggagtttgcctctcccaacggagagcagttctaccactacaaggatctctgggtcctgcatttggccaccaagacctgggaacaagtcaaatcaacaggcggtccttcgggtcggagtggacatcggatggtggcctggaagagacaattgatcctgtttggtggcttccatgaaagtacacgggattacatctactacaacgacgtgtatgcctttaatctggacaccttcacatggagcaagctgtccccgtcagggacggggcccacacccagatcaggctgccagatgtccgtcactccccagggcggcatcgtcgtctatgggggctactcgaaacagagagttaagaaagacgtggacaagggcacacggcactcagacatgttcctgctgaagccagaggacggaagagaagacaagtgggtttggactcggatgaacccttcgggggtcaagcccaccccacggtctggcttttccgtggccatggccccgaatcaccagacactgttcttcgggggtgtctgtgacgaggaagaggaggagagcctgtcgggcgagttcttcaacgatctgtacttctacgacgccaccaggaaccgttggtttgagggacagctgaagggacccaagtctgaaaagaagaaacgcaggcggggcagaaaagaggagcccgaaggtggtagcaggccggcgtgtgggggagctggcacccaggggcctgtgcagctggtcaaggaggtggtggccgaggatggcaccgtggtcaccattaagcaggtgctcaccgcgccaggctcggcggggcagccccggtctgaggacgaagacagccttgaggaggccggcagccccgcacctgggccgtgtccacgctccaacgccatgctggctgtgaagcatggggtgctctacgtctatgggggcatgtttgaggccggcgaccgccaggtcaccctcagcgacctgcactgcctggacctgcacaggatggaggcgtggaaggccttggtggagatggacccagaaactcaggagtggctggaggagacggactcggaagaggacagtgaggaggttgagggcgccgagggtggggtcgacgacgaagacagcggagaggagagcggtgcggaggactgagaagagcccctgccaggggcgcctggcaagtgctgtgcccacgtccgcccaggacccagccgtgttgagtgaagctcttggggccagcgtgcgtcctgacgcacaggagagagctgaaggtgggtggcccaggccagggtgtgaactttctcccatggtttagtctctgacgcggcactgggccggaagttcaactgagtgcagtgcaggtggattccctcagcagcctgtgtgttgtgtgaaataaattggacttgaaacaag

SEQ ID NO: 145167 - DNA, 1821 bp, Homo sapiens
  Payload ID: 8684
  Gene Symbol: KLHDC4
  Gene Name: kelch domain containing 4
  Uniprot ID: Q8TBB5
  ENST ID: ENST00000347925
  CDS Start-End: 87-1556
ctccgccccacgagcacctgtttccgagcggagagcgcgggccgttttctttcctggtgtcccgtcgcggcttgggacccggcaagatgggcaagaagggcaagaaggagaagaagggccgcggcgcggagaagacggccgccaagatggagaagaaggtgtctaagcgctcgcggaaggaggaggaagacctggaagcgctcatagcccatttccagacactcgatgccaagaggactcagactgtggaacttccgtgccccccaccctcaccaaggttaaatgcctccctctcggttcatcctgagaaagatgagttaatcctttttggaggtgaatatttcaacggccaaaaaacttttttgtataacgagctctatgtctacaataccagaaaggacacctggaccaaagttgacatccccagtccacctccgaggcgctgtgctcaccaggcggtggtagtgcctcaaggtggcggacagctgtgggtctttggaggggagtttgcctctcccaacggagagcagttctaccactacaaggatctctgggtcctgcatttggccaccaagacctgggaacaagtcaaggattacatctactacaacgacgtgtatgcctttaatctggacaccttcacatggagcaagctgtccccgtcagggacggggcccacacccagatcaggctgccagatgtccgtcactccccagggcggcatcgtcgtctatgggggctactcgaaacagagagttaagaaagacgtggacaagggcacacggcactcagacatgttcctgctgaagccagaggacggaagagaagacaagtgggtttggactcggatgaacccttcgggggtcaagcccaccccacggtctggcttttccgtggccatggccccgaatcaccagacactgttcttcgggggtgtctgtgacgaggaagaggaggagagcctgtcgggcgagttcttcaacgatctgtacttctacgacgccaccaggaaccgttggtttgagggacagctgaagggacccaagtctgaaaagaagaaacgcaggcggggcagaaaagaggagcccgaaggtggtagcaggccggcgtgtgggggagctggcacccaggggcctgtgcagctggtcaaggaggtggtggccgaggatggcaccgtggtcaccattaagcaggtgctcaccgcgccaggctcggcggggcagccccggtctgaggacgaagacagccttgaggaggccggcagccccgcacctgggccgtgtccacgctccaacgccatgctggctgtgaagcatggggtgctctacgtctatgggggcatgtttgaggccggcgaccgccaggtcaccctcagcgacctgcactgcctggacctgcacaggatggaggcgtggaaggccttggtggagatggacccagaaactcaggagtggctggaggagacggactcggaagaggacagtgaggaggttgagggcgccgagggtggggtcgacgacgaagacagcggagaggagagcggtgcggaggactgagaagagcccctgccaggggcgcctggcaagtgctgtgcccacgtccgcccaggacccagccgtgttgagtgaagctcttggggccagcgtgcgtcctgacgcacaggagagagctgaaggtgggtggcccaggccagggtgtgaactttctcccatggtttagtctctgacgcggcactgggccggaagttcaactgagtgcagtgcaggtggattccctcagcagcctgtgtgttgtgtgaaataaattggacttgaaacaaga

SEQ ID NO: 145168 - DNA, 4444 bp, Homo sapiens
  Payload ID: 8684
  Gene Symbol: KLHDC4
  Gene Name: kelch domain containing 4
  ENST ID: ENST00000446344
  CDS Start-End: 78-953
gcagatgagcagagtcctgctagagaggtcagctcagcgtccaggagggggcgcctgcccccgaggaggccacggacatgcctgggaagttgctgccggagaagtgtgctctgatgtggctacatttggggacgcgggctccccagaggcccaagcgagaaagccgggggttcccaggctgggggtgcaggacgggccaggcactgccctgcagggcccgcccccctgcccctgcaccctcacacccatcttcctctctcagcctgaccccagggcctgggagcccccggcagaccggccctccttgccaaacagtggctgccctttatggactcggcgcctggcagagccactgtggaggaggagttggctgtcatggtcaggggaggcagcccttgggttgtcaaggttggtggtcaacgttgaacccatatctgctggaatctcccggtctgttccacacacgatcatgcgggaagctctgggacccgaaggctgttctgatctcgggggtcacaagttctcacagcagcctggggtcaccagggaccagacccggcgttagcctctgtaaggagctgcctggctgctgggctgagctttgttgcaggcccaggaagatgaccaagaaggacagagcagagccccatctaccactgctgggagggcccgagggagcacgtgcacagcagagccccatcctccactccctgggctcgaagaggcttcctcggtgtggatggcagctgttaacgagcagtggtggtgcagctggaggcctctgtcccatggggcacagacgggagaaggatggcggacgggtgtgcacgcttgggaggacgggcgggcggcataggcctgagcaggtggcatgggcgcacgagaagggtgtgtctgagacaggatgtttatcccaaatgccaggagtggacgaggcggacgagtggcagtgaggtaggcatgtgaggttgttgcctggcccactctgccgaccccagaaacccagcggcctgggcccagcacccggctacacatggggtgagctcacgcccacactgtggcctgtgcccgtcacggggctgcttgcttctcctaggcttgggaacaagctggcatgaacgctgtggccgcattcacagctcaggcacttccactttgggtttcatgaagaaacagacttaaagagcatttgttcctaatgggtgggctgaagcttgggaggagcattcagcttctctccacagtatggcttcacctgttcctgagcgccctgctaccctcttgctaacctgggtggctgaggtcctctgctttggtggcgttgacttcccgtctgcagccagcgccaggtgccagcccccgcctctgctcatcgggaagcgctggcctgcaggtgctttgtggttgccacggacccttgttctgtccctttccagcacccaccccccacgcgctgtgcattccgtagttcattttcaaggcagggggcacatggtgaaaatacagcctggctttttttcaacaaatgcagctgcactcttccttgcttgttttgaaggctgagccagcaacctccttggcacctggggacagtcgcttcctcagtttctgcgtaccgactgcctcacctgacacgcggcctgggcgcgagagaagccaaccaggtgcctgagttgactgactccttccgccctccagcttcctccctccgccctccaacctcctccctccaccctccaacctcctccctccgccctccaacctcctccctctgccctgcaacctcctcccctctgccctccaacctcctccctccgccctccaatctcctccctctgccctgcatcctcctcccctccgccctccaacctcctccctccgccctccaacctcctccctccgccctccaacctcctccctccgccctctgccctcctccctctgccctccagcgttctccctcctccctccaccctgtttcctccctccacctcttctctcctccctccaccctcttccttctaccctcttccctctgccctcttcttctgccctcctccctccaccctctttcctccctcctccctccaccctctgccctcctccctctaccccctgccctcctccctccgccttatctggaatcggggtcttggtcctgggctggaggcagaccctggcccgggcgaggttaaaggtactgcaggagggcggcatcatgatgtcctgaagcttgttgcgcccggtgctgtcggccggctgaaggcagaaacagtcacagcacctgcagctatggaaggcgacgactgaaaatctaataggcaccttgatgtcaagtttccaagaccaaaggcaagaacagtcagatcaaacttcggaagagtcagagaaagtgagcatgacctagaggagggagacggtccttccgctgtctcctgcagagcgtctgtcgcacgtatgaggtgaaatccgcactgtcccatgaagactgtgaggggagttgccacccgcacacggcccaggagcgccagcagcttggggaccaccacaggcctcagggtctcttcagtccgacgggtccagctgtcgataaaacctcccggggaaggagtaaaggacaaccaagaacctgaactgcaaaagtatgaaaaacatttcatttccctcgagttctccacactttaggtctgcagcgccttgggggtgactgatggccctccgtgagacgcggtggccatgtgcttctacaagtgaaaaggagcaagtgtggttagagcctggagtatggacgtcccggggaccgctggcccatggcctggcttggggccttacaggggagcgagctgagtgaatgcaggggagggcccgtctttctacagtgtgtatcttgtttttgagacagactcactctgtcgtccaggctggagtgcagtggcgcgatctctgctcactgcaacctctgcctcccgggttcaagcgattctcctgcctcagcctcctcagtagctgggattacaggcacctgccaccacgcctggctaatttttgtattttttttttagtagagatggggtttcactatgttggtcaggctggcctcgagctcctgacctcaggtgatccacctgccttggcctcccaaagtgctgggattacaggcatgagccaccgcgcccggccctgccctgcttttctacatcaccactgtcttgtcagttagctcggctcaggcattgcatgcctgatctgtatctttgggaatcctgtgaggtaatggttctagatccaaaagaatggataaagagactgtttcagttcccgaaattatccaggcacattctgtgcgctactgaacttcagaaagcaccagtccatccagtgtgcagaggctggtaagtaaaacaggccagccgtgggcacagacagtttcaccagaggccccggggcagagggtcttctccagctcttccagggcggggctcatctgttcctgggccagaggtggacctgtctgcaggcttgtaagggtggggagacgccagcctggcccatgggctgtccacacccaccccccgcagaccgcgctgctgtctgcaggggatgccaccacttcctcctggcctcgggtgcacaggtgaaacatgaagaagctattggggcggaaaatggctctcaccaggctgctctcgggttaatgaaaactcgtcaaattctccatgcagcagcagccagccgggcacatgctgtcctgccctgcccgactgtgtgcagggaagcaggtcccctgggcctgggcggagggactgcgtgcctgtcagggaaggccgaggctccggacaggcgggaagcagccttctgcttaatcaccccatgtggaaaccaattaaagattcgattctctcagacccggggcattttagccttggttgaatcctcctggaattcacagggaagtggctttgccctctgccctcgctgctggaaggcaaggggccgttctcgccttggttttctaggttgtgttgcggcaggagctgactgcccctaggcctagatctctgcacaacttcgctcagggacacctgcctctgtgcatgtctcatggtgtgaatgtgtttcctgctcacaggtaccgttttgtgtcatgcagttactggaatgtacaaaagcagctgtgatctttgtgagagctgcacagagcaggagtctgagagctgcacagagcaggagtctttatttggttcacttctggtctgcagcaaccacttgctactaaaagatggaaaagatgtacaaaaatgtcacagccctttagaaagcgacattatcagaaatgtatgaccttcagtcctccctccctctcctatgcccccaccagaccaggcggcgagaaggaacagggagtgaacatgtaacggaaaacaataaaactgaatttaactgg

SEQ ID NO: 145169 - DNA, 528 bp, Homo sapiens
  Payload ID: 8684
  Gene Symbol: KLHDC4
  Gene Name: kelch domain containing 4
  ENST ID: ENST00000563845
  CDS Start-End: 72-206
acctgtttccgagcggagagcgcgggccgttttctttcctggtgtcccgtcgcggcttgggacccggcaagatgggcaagaagggcaagaaggagaagaagggccgcggcgcggagaagacggccgccaagatggagaagaaggtgtctaagcgctcgcggaaggaggagagggcaaataatcatcacagcagccctgagcagtgagcagcagatggttaagtgaagaaggcactggagccacggggtatcccgtagcagctgatggcggccatcacggttgtctccttccctctggtcctcagcccggggtctgcaggaggatccgtcctgaccttggggttgagtgttctgcggctgctgctcatggattccctaaccggggccagttttatggcctgccgtgcgccaggcacagctccctgggctttactcctcacgagcaggaagacctggaagcgctcatagcccatttccagacactcgatgccaagaggactcagactgtggaacttccgtgccccccacc

SEQ ID NO: 145170 - DNA, 563 bp, Homo sapiens
  Payload ID: 8684
  Gene Symbol: KLHDC4
  Gene Name: kelch domain containing 4
  ENST ID: ENST00000564396
  CDS Start-End: 72-332
acctgtttccgagcggagagcgcgggccgttttctttcctggtgtcccgtcgcggcttgggacccggcaagatgggcaagaagggcaagaaggagaagaagggccgcggcgcggagaagacggccgccaagatggagaagaaggtgtctaagcgctcgcggaaggaggaggaagacctggaagcgctcatagcccatttccagacactcgatgccaagaggactcagactgtggaacttccgtgccccccaccctcaccaaggttaaatgcctccctctcggttcatcctgagaaagatgagttaatcctttttggagacttttttgtataacgagctctatgtctacaataccagaaaggacacctggaccaaagttgacatccccagtccacctccgaggcgctgtgctcaccaggcggtggtagtgcctcaaggtggcggacagctgtgggtctttggaggggagtttgcctctcccaacggagagcagttctaccactacaaggatctctgggtcctgcatttggccaccaagacctgggaacaagtcaaatcaacagg

SEQ ID NO: 145171 - DNA, 560 bp, Homo sapiens
  Payload ID: 8684
  Gene Symbol: KLHDC4
  Gene Name: kelch domain containing 4
  ENST ID: ENST00000569747
  CDS Start-End: 78-395
acgagcacctgtttccgagcggagagcgcgggccgttttctttcctggtgtcccgtcgcggcttgggacccggcaagatgggcaagaagggcaagaaggagaagaagggccgcggcgcggagaagacggccgccaagatggagaagaaggtgtctaagcgctcgcggaaggaggaggaagacctggaagcgctcatagcccatttccagacactcgatgccaagaggactcagactgtggaacttccgtgccccccaccctcaccaaggttaaatgcctccctctcggttcatcctgagaaagatgagttaatcctttttggagaaaggacacctggaccaaagttgacatccccagtccacctccgaggcgctgtgctcaccaggcggtggtagtgcctcaaggtggcggacagctgtgggtctttggaggggagtttgcctctcccaacggagagcagttctaccactacaaggatctctgggtcctgcatttggccaccaagacctgggaacaagtcaaatcaacaggcggtccttcgggtcggagtggacatcgga

SEQ ID NO: 145172 - DNA, 1065 bp, Homo sapiens
  Payload ID: 8684
  Gene Symbol: KLHDC4
  Gene Name: kelch domain containing 4
  ENST ID: ENST00000562261
  CDS Start-End: 62-1065
gagcggagagcgcgggccgttttctttcctggtgtcccgtcgcggcttgggacccggcaagatgggcaagaagggcaagaaggagaagaagggccgcggcgcggagaagacggccgccaagatggagaagaaggtgtctaagcgctcgcggaaggaggaggcggtggtagtgcctcaaggtggcggacagctgtgggtctttggaggggagtttgcctctcccaacggagagcagttctaccactacaaggatctctgggtcctgcatttggccaccaagacctgggaacaagtcaaatcaacaggcggtccttcgggtcggagtggacatcggatggtggcctggaagagacaattgatcctgtttggtggcttccatgaaagtacacgggattacatctactacaacgacgtgtatgcctttaatctggacaccttcacatggagcaagctgtccccgtcagggacggggcccacacccagatcaggctgccagatgtccgtcactccccagggcggcatcgtcgtctatgggggctactcgaaacagagagttaagaaagacgtggacaagggcacacggcactcagacatgttcctgctgaagccagaggacggaagagaagacaagtgggtttggactcggatgaacccttcgggggtcaagcccaccccacggtctggcttttccgtggccatggccccgaatcaccagacactgttcttcgggggtgtctgtgacgaggaagaggaggagagcctgtcgggcgagttcttcaacgatctgtacttctacgacgccaccaggaaccgttggtttgagggacagctgaagggacccaagtctgaaaagaagaaacgcaggcggggcagaaaagaggagcccgaaggtggtagcaggccggcgtgtgggggagctggcacccaggggcctgtgcagctggtcaaggaggtggtggccgaggatggcaccgtggtcaccattaagcaggtgctcaccgcgccaggctcggcggggcagccccggtctgaggacgaagacagccttgaggaggccggcagccc

SEQ ID NO: 145173 - DNA, 1757 bp, Homo sapiens
  Payload ID: 8684
  Gene Symbol: KLHDC4
  Gene Name: kelch domain containing 4
  ENST ID: ENST00000562155
  CDS Start-End: 40-339
tctttcctggtgtcccgtcgcggcttgggacccggcaagatgggcaagaagggcaagaaggagaagaagggccgcggcgcggagaagacggccgccaagatggagaagaaggtgtctaagcgctcgcggaaggaggaggaagacctggaagcgctcatagcccatttccagacactcgatgccaagaggactcagactgtggaacttccgtgccccccaccctcaccaagacttttttgtataacgagctctatgtctacaataccagaaaggacacctggaccaaagttgacatccccagtccacctccgaggcgctgtgctcaccaggcggtggtagtgcctcaaggtggcggacagctgtgggtctttggaggggagtttgcctctcccaacggagagcagttctaccactacaaggatctctgggtcctgcatttggccaccaagacctgggaacaagtcaaatcaacaggcggtccttcgggtcggagtggacatcggatggtggcctggaagagacaattgatcctgtttggtggcttccatgaaagtacacgggattacatctactacaacgacgtgtatgcctttaatctggacaccttcacatggagcaagctgtccccgtcagggacggggcccacacccagatcaggctgccagatgtccgtcactccccagggcggcatcgtcgtctatgggggctactcgaaacagagagttaagaaagacgtggacaagggcacacggcactcagacatgttcctgctgaagccagaggacggaagagaagacaagtgggtttggactcggatgaacccttcgggggtcaagcccaccccacggtctggcttttccgtggccatggccccgaatcaccagacactgttcttcgggggtgtctgtgacgaggaagaggaggagagcctgtcgggcgagttcttcaacgatctgtacttctacgacgccaccaggaaccgttggtttgagggacagctgaagggacccaagtctgaaaagaagaaacgcaggcggggcagaaaagaggagcccgaaggtggtagcaggccggcgtgtgggggagctggcacccaggggcctgtgcagctggtcaaggaggtggtggccgaggatggcaccgtggtcaccattaagcaggtgctcaccgcgccaggctcggcggggcagccccggtctgaggacgaagacagccttgaggaggccggcagccccgcacctgggccgtgtccacgctccaacgccatgctggctgtgaagcatggggtgctctacgtctatgggggcatgtttgaggccggcgaccgccaggtcaccctcagcgacctgcactgcctggacctgcacaggatggaggcgtggaaggccttggtggagatggacccagaaactcaggagtggctggaggagacggactcggaagaggacagtgaggaggttgagggcgccgagggtggggtcgacgacgaagacagcggagaggagagcggtgcggaggactgagagcccctgccaggggcgcctggcaagtgctgtgcccacgtccgcccaggacccagccgtgttgagtgaagctcttggggccagcgtgcgtcctgacgcacaggagagagctgaaggtgggtggcccaggccagggtgtgaactttctcccatggtttagtctctgacgcggcactgggccggaagttcaactgagtgcagtgcaggtggattccctcagcagcctgtgtgttg

SEQ ID NO: 145174 - DNA, 584 bp, Homo sapiens
  Payload ID: 8684
  Gene Symbol: KLHDC4
  Gene Name: kelch domain containing 4
  ENST ID: ENST00000568338
  CDS Start-End: 103-219
atttctgtgcgccgagctccgccccacgagcacctgtttccgagcggagagcgcgggccgttttctttcctggtgtcccgtcgcggcttgggacccggcaagatgggcaagaagggcaagaaggagaagaagggccgcggcgcggagaagacggccgccaagatggagaagaaggtgtctaagcgctcgcggaaggaggagacctggaagcgctcatagcccatttccagacactcgatgccaagaggactcagactgtggaacttccgtgccccccaccctcaccaagatggaatcttgctctgtcgccaggctggagtgcaatggcatgatctcagctcactgcaacccccaactcccaggttcaagtggttctcctgcctcagcctcccgagtagctgggaccataggttaaatgcctccctctcggttcatcctgagaaagatgagttaatcctttttggaggtgaatatttcaacggccaaaaaacttttttgtataacgagctctatgtctacaataccagaaaggacacctggaccaaagttgacatccccagtccacctccgaggcgctgtgctca

SEQ ID NO: 145175 - DNA, 4572 bp, Homo sapiens
  Payload ID: 8684
  Gene Symbol: KLHDC4
  Gene Name: kelch domain containing 4
  Uniprot ID: Q8TBB5
  ENST ID: ENST00000567298
  CDS Start-End: 83-1645
gccccacgagcacctgtttccgagcggagagcgcgggccgttttctttcctggtgtcccgtcgcggcttgggacccggcaagatgggcaagaagggcaagaaggagaagaagggccgcggcgcggagaagacggccgccaagatggagaagaaggtgtctaagcgctcgcggaaggaggaggaagacctggaagcgctcatagcccatttccagacactcgatgccaagaggactcagactgtggaacttccgtgccccccaccctcaccaaggttaaatgcctccctctcggttcatcctgagaaagatgagttaatcctttttggaggtgaatatttcaacggccaaaaaacttttttgtataacgagctctatgtctacaataccagaaaggacacctggaccaaagttgacatccccagtccacctccgaggcgctgtgctcaccaggcggtggtagtgcctcaaggtggcggacagctgtgggtctttggaggggagtttgcctctcccaacggagagcagttctaccactacaaggatctctgggtcctgcatttggccaccaagacctgggaacaagtcaaatcaacaggcggtccttcgggtcggagtggacatcggatggtggcctggaagagacaattgatcctgtttggtggcttccatgaaagtacacgggattacatctactacaacgacgtgtatgcctttaatctggacaccttcacatggagcaagctgtccccgtcagggacggggcccacacccagatcaggctgccagatgtccgtcactccccagggcggcatcgtcgtctatgggggctactcgaaacagagagttaagaaagacgtggacaagggcacacggcactcagacatgttcctgctgaagccagaggacggaagagaagacaagtgggtttggactcggatgaacccttcgggggtcaagcccaccccacggtctggcttttccgtggccatggccccgaatcaccagacactgttcttcgggggtgtctgtgacgaggaagaggaggagagcctgtcgggcgagttcttcaacgatctgtacttctacgacgccaccaggaaccgttggtttgagggacagctgaagggacccaagtctgaaaagaagaaacgcaggcggggcagaaaagaggagcccgaaggtggtagcaggccggcgtgtgggggagctggcacccaggggcctgtgcagctggtcaaggaggtggtggccgaggatggcaccgtggtcaccattaagcaggtgctcaccgcgccaggctcggcggggcagccccggtctgaggacgaagacagccttgaggaggccggcagccccgcacctgggccgtgtccacgctccaacgccatgctggctgtgaagcatggggtgctctacgtctatgggggcatgtttgaggccggcgaccgccaggtcaccctcagcgacctgcactgcctggacctgcacaggatggaggcgtggaaggccttggtggagatggacccagaaactcaggagtggctggaggagacggactcggaagaggacagtgaggaggttgagggcgccgagggtggggtcgacgacgaagacagcggagaggagagcggtgcggaggactgaggctgtgacaaaccctgtgcccacgctgcctccactgccgggagactcagggctgggggagacatgccctggtcaccactgcggagactcagggctgggggagacatgccctgcacgtttcctgctcgaaaaccaggagagcctccacgtgccgactagctctgtccacacatccattgcgcagctctgcagcggaaggaccttcagtaaagacgctgcctgaccccagggcctgggagcccccggcagaccggccctccttgccaaacagtggctgccctttatggactcggcgcctggcagagccactgtggaggaggagttggctgtcatggtcaggggaggcagcccttgggttgtcaaggttggtggtcaacgttgaacccatatctgctggaatctcccggtctgttccacacacgatcatgcgggaagctctgggacccgaaggctgttctgatctcgggggtcacaagttctcacagcagcctggggtcaccagggaccagacccggcgttagcctctgtaaggagctgcctggctgctgggctgagctttgttgcaggcccaggaagatgaccaagaaggacagagcagagccccatctaccactgctgggagggcccgagggagcacgtgcacagcagagccccatcctccactccctgggctcgaagaggcttcctcggtgtggatggcagctggagtggacgaggcggacgagtggcagtgaggtaggcatgtgaggttgttgcctggcccactctgccgaccccagaaacccagcggcctgggcccagcacccggctacacatggggctgagccagcaacctccttggcacctggggacagtcgcttcctcagtttctgcgtaccgactgcctcacctgacacgcggcctgggcgcgagagaagccaaccagagcgtctgtcgcacgtatgaggtgaaatccgcactgtcccatgaagactgtgaggggagttgccacccgcacacggcccaggagcgccagcagcttggggaccaccacaggcctcagggtctcttcagtccgacgggtccagctgtcgataaaacctcccggggaaggagtaaaggacaaccaagaacctgaactgcaaaagtatgaaaaacatttcatttccctcgagttctccacactttaggtctgcagcgccttgggggtgactgatggccctccgtgagacgcggtggccatgtgcttctacaagtgaaaaggagcaagtgtggttagagcctggagtatggacgtcccggggaccgctggcccatggcctggcttggggccttacaggggagcgagctgagtgaatgcaggggagggcccgtctttctacagtgtgtatcttgtttttgagacagactcactctgtcgtccaggctggagtgcagtggcgcgatctctgctcactgcaacctctgcctcccgggttcaagcgattctcctgcctcagcctcctcagtagctgggattacaggcacctgccaccacgcctggctaatttttgtattttttttttagtagagatggggtttcactatgttggtcaggctggcctcgagctcctgacctcaggtgatccacctgccttggcctcccaaagtgctgggattacaggcatgagccaccgcgcccggccctgccctgcttttctacatcaccactgtcttgtcagttagctcggctcaggcattgcatgcctgatctgtatctttgggaatcctgtgaggtaatggttctagatccaaaagaatggataaagagactgtttcagttcccgaaattatccaggcacattctgtgcgctactgaacttcagaaagcaccagtccatccagtgtgcagaggctggtaagtaaaacaggccagccgtgggcacagacagtttcaccagaggccccggggcagagggtcttctccagctcttccagggcggggctcatctgttcctgggccagaggtggacctgtctgcaggcttgtaagggtggggagacgccagcctggcccatgggctgtccacacccaccccccgcagaccgcgctgctgtctgcaggggatgccaccacttcctcctggcctcgggtgcacaggtgaaacatgaagaagctattggggcggaaaatggctctcaccaggctgctctcgggttaatgaaaactcgtcaaattctccatgcagcagcagccagccgggcacatgctgtcctgccctgcccgactgtgtgcagggaagcaggtcccctgggcctgggcggagggactgcgtgcctgtcagggaaggccgaggctccggacaggcgggaagcagccttctgcttaatcaccccatgtggaaaccaattaaagattcgattctctcagacccggggcattttagccttggttgaatcctcctggaattcacagggaagtggctttgccctctgccctcgctgctggaaggcaaggggccgttctcgccttggttttctaggttgtgttgcggcaggagctgactgcccctaggcctagatctctgcacaacttcgctcagggacacctgcctctgtgcatgtctcatggtgtgaatgtgtttcctgctcacaggtaccgttttgtgtcatgcagttactggaatgtacaaaagcagctgtgatctttgtgagagctgcacagagcaggagtctgagagctgcacagagcaggagtctttatttggttcacttctggtctgcagcaaccacttgctactaaaagatggaaaagatgtacaaaaatgtcacagccctttagaaagcgacattatcagaaatgtatgaccttcagtcctccctccctctcctatgcccccaccagaccaggcggcgagaaggaacagggagtgaacatgtaacggaaaacaataaaactgaatttaactg

SEQ ID NO: 145176 - DNA, 564 bp, Homo sapiens
  Payload ID: 8684
  Gene Symbol: KLHDC4
  Gene Name: kelch domain containing 4
  ENST ID: ENST00000566561
  CDS Start-End: 72-206
acctgtttccgagcggagagcgcgggccgttttctttcctggtgtcccgtcgcggcttgggacccggcaagatgggcaagaagggcaagaaggagaagaagggccgcggcgcggagaagacggccgccaagatggagaagaaggtgtctaagcgctcgcggaaggaggagagggcaaataatcatcacagcagccctgagcagtgagcagcagatggttaagtgaagaaggcactggagccacggggtatcccgtagcagctgatggcggccatcacggttgtctccttccctctggtcctcagcccggggtctgcaggaggatccgtcctgaccttggggttgagtgttctgcggctgctgctcatggattccctaaccggggccagttttatggcctgccgtgcgccaggcacagctccctgggctttactcctcacgagcagatggagtcctgctctgtcacccagagcaagtgtcgcagtggcatgatctcagctcattgcaacctctgcctcccaggctcaagcaattctcctgcctcagcctcccgagtagtttggga

SEQ ID NO: 145177 - DNA, 562 bp, Homo sapiens
  Payload ID: 8684
  Gene Symbol: KLHDC4
  Gene Name: kelch domain containing 4
  ENST ID: ENST00000561825
  CDS Start-End: 42-562
tttctttcctggtgtcccgtcgcggcttgggacccggcaagatgggcaagaagggcaagaaggagaagaagggccgcggcgcggagaagacggccgccaagatggagaagaaggtgtctaagcgctcgcggaaggaggagcccggggtctgcaggaggatccgtcctgaccttggggttgagtgttctgcggctgctgctcatggattccctaaccggggccagttttatggcctgccgtgcgccaggcacagctccctgggctttactcctcacgagcaggaagacctggaagcgctcatagcccatttccagacactcgatgccaagaggactcagactgtggaacttccgtgccccccaccctcaccaaggttaaatgcctccctctcggttcatcctgagaaagatgagttaatcctttttggaggtgaatatttcaacggccaaaaaacttttttgtataacgagctctatgtctacaataccagaaaggacacctggaccaaagttgacatccccagtccacctccgaggcgctgtgctcaccaggcggtggtagt

SEQ ID NO: 145178 - DNA, 1422 bp, Homo sapiens
  Payload ID: 8684
  Gene Symbol: KLHDC4
  Gene Name: kelch domain containing 4
  ENST ID: ENST00000622456
  CDS Start-End: 646-1422
atttctgtgcgccgagctccgccccacgagcacctgtttccgagcggagagcgcgggccgttttctttcctggtgtcccgtcgcggcttgggacccggcaagatgggcaagaagggcaagaaggagaagaagggccgcggcgcggagaagacggccgccaagatggagaagaaggtgtctaagcgctcgcggaaggaggaggaagacctggaagcgctcatagcccatttccagacactcgatgccaagaggactcagactgtggaacttccgtgccccccaccctcaccaaggttaaatgcctccctctcggttcatcctgagaaagatgagttaatcctttttggaggtgaatatttcaacggccaaaaaacttttttgtataacgagctctatgtctacaataccagaaaggacacctggaccaaagttgacatccccagtccacctccgaggcgctgtgctcaccaggcggtggtagtgcctcaaggtggcggacagctgtgggtctttggaggggagtttgcctctcccaacggagagcagttctaccactacaaggatctctgggtcctgcatttggccaccaagacctgggaacaagtcaaatcaacaggcggtccttcgggtcggagtggacatcggatggtggcctggaagagacaattgatcctgtttggtggcttccatgaaagtacacgggattacatctactacaacgacgtgtatgcctttaatctggacaccttcacatggagcaagctgtccccgtcagggacggggcccacacccagatcaggctgccagatgtccgtcactccccagggcggcatcgtcgtctatgggggctactcgaaacagagagttaagaaagacgtggacaagggcacacggcactcagacatgttcctgctgaagccagaggacggaagagaagacaagtgggtttggactcggatgaacccttcgggggtcaagcccaccccacggtctggcttttccgtggccatggccccgaatcaccagacactgttcttcgggggtgtctgtgacgaggaagaggaggagagcctgtcgggcgagttcttcaacgatctgtacttctacgacgccaccaggaaccgttggtttgagggacagctgaagaaactcaggagtggctggaggagacggactcggaagaggacagtgaggaggttgagggcgccgagggtggggtcgacgacgaagacagcggagaggagagcggtgcggaggactgagagcccctgccaggggcgcctggcaagtgctgtgcccacgtccgcccaggacccagccgtgttgagtgaagctcttggggccagcgtgcgtcctgacgcacaggagagagctgaaggtgggtggcccaggccagggtgtgaactttctcccatggtttag

SEQ ID NO: 145179 - DNA, 5145 bp, Homo sapiens
  Payload ID: 8685
  Gene Symbol: KLHDC7A
  Gene Name: kelch domain containing 7A
  Uniprot ID: Q5VTJ3
  ENST ID: ENST00000400664
  CDS Start-End: 1-2334
atgttccccagaggagcagaggcccaggactggcatttggatatgcagctgaccggcaaggtggtgctgtcagccgctgccctgctcctggtgactgtggcctacaggctgtacaagtcgaggcctgccccagcccagcggtggggtgggaatggccaggcagaagccaaggaggaagcagagggctcagggcagcctgctgtacaggaggcttctcctggggtgctcctgagggggccaagacgtcggaggagcagcaagcgggctgaagcaccacagggctgcagctgtgagaatccaagaggcccctatgtcctggtcacgggggccacttccacagacaggaagccccagagaaaaggctcaggtgaggagcggggcgggcagggctcggactctgagcaggtgcctccttgctgccccagccaggaaaccagaacagctgttggcagtaaccctgaccctccccatttcccccgcttgggcagcgaaccgaagagctccccagctggactcattgcagcagccgacggcagctgtgccggtggtgagccttctccatggcaggacagtaaaccccgtgagcatccaggactggggcaactagaacctccccactgtcactacgtggctcccttgcaaggcagcagtgacatgaaccagagctgggtcttcacccgtgtgataggggtcagcagagaagaggctggggctctcgaggctgcctccgatgttgacctgaccctgcatcagcaggagggcgcccccaactcctcctataccttctcatccatagcccgcgtccgaatggaggagcatttcatacagaaggcggagggggttgagccccggctcaagggcaaggtgtacgactactatgtggaatctacctctcaggccatcttccagggcaggctggctcccaggacagcagccctgactgaggttccatcccctaggccaccgccagggtccctgggaacaggggctgcctcgggaggccaagccggtgacacaaagggtgcagccgaaagagccgcctccccgcagacagggccgtggccctccacccgaggcttcagccggaaggagagccttctgcagatagcggagaacccagagctgcagctgcagccagatggcttccggctccccgctccaccctgcccagacccgggcgccctgcctggcttaggcagaagcagccgggagccccatgtgcagccggtggccgggaccaatttcttccatatcccgctcacccctgcttcagccccacaggtccgcctggatctgggcaattgctatgaggtgctgaccttggccaagaggcagaacctggaggccctgaaagaggcggcctacaaggtgatgagcgaaaactacctgcaggtgctgcgcagcccggacatctacgggtgcctgagcggggcagagcgcgagctgatcctgcagcgccggctccggggccgccagtacctggtggtggctgacgtgtgccccaaggaagactccggcggcctctgttgctatgacgatgagcaggatgtctggcgcccgctggctcgcatgccccccgaggccgtgtcccggggctgtgccatctgcagtctcttcaattatctcttcgtggtgtccggctgccaggggcccgggcaccagccctccagccgcgtcttctgctacaacccgctcacggggatctggagcgaggtgtgcccgctgaaccaggcccggccgcactgccggctggtggccctggacgggcacctgtatgccatcggcggagagtgtctgaactcggtggagcgttacgacccccgcctggaccgctgggactttgccccgccgctccccagtgacacgttcgccctggcgcacacggccacggtgcgtgccaaggaaatcttcgtcaccggcggctcgctgcgcttcctgctgttccgcttctctgcgcaggagcagcgctggtgggccggccccaccgggggcagcaaggaccgcacggccgagatggtggcggtcaacggctttctctaccgctttgacctcaaccgcagcctgggcatcgccgtgtaccgctgcagcgccagcacccggctctggtacgagtgcgccacgtaccggacgccttacccggatgccttccagtgcgccgtggtggacaacctcatctactgcgtgggacgccggagcaccctctgcttcctagcagactctgtctcacccaggtttgtgcccaaggagctgcggagtttcccggccccgcagggcaccctcctgcccaccgtcctgaccttgcccacccccgatttgcctcagaccagggtctagcagtccctcaactgagctcctcatgcaaagctgggggccaccgggctccactgccagccgtccctctgggggccatttctaggcaaacaggcaacccaggaatgtggccatcaagaggtgaattccggtcctttctcctcccctagctggggagagagggatcttagatgagtcttacccttcatgggctgcagaggccccactgcagaaaagaggaccaggagctggtgttccaaggcagaaggcattcatgtcttcagggatgaccgcccttgcttcaactctgaattcttggggggatacaccgggaccccaccaaagcttagggggcatagtctttttgcaatcacaattctaggagccagttgaccccagcagcccctcgctagttgctctggagaggggttggctctctgagccatcagtgccccttcctaaacatcagccactgggccccacctccacagttcccagaagcaccgggacacacaggtgggaaagatggaggcaggtgacttgggcagggccaggaaggagccgagggagccccaggggccctggccagagggagtggtggtttgaaaagtagaacagctgaagctggggccagcctaggagactcttgcttgcgagaaaatataccaaagcccacattacttttctccttattggaagaaagagaagcagccattgtaccaagctatcttctggtggaggtctgctaaggatacacggaggtctcagcaaagggaagaaactatgtgatccaagggccaccctgctcctcggccctgcccatgttaactgaccattgcactcattctcagatctgtagccgtcttcctgtctggaagctggggcaaccaccaccagtcagcacttcagggtgacagcataatttgccctccttgtgccaggtacggtcacctggtttgccgcattcacattttcaggtggatgaccaagcggaggaactagaagagtctagtgaagcatccagagactggatctcctttcacatctggtttgataaactccgaatgaaggagacccccagcctcaggaaagcacctgtccttccaggagggacgggagagagcctgacccagtgtattaccacagcccttgttccacctctgagggagacagtgacagatgggaaggcagtgatgctcttggtcccagccagaagccaggggagatgggaggtacaccagagcagggcctgacaaggaagaaaataaggatgctttggacctcagtgtccttgtcttgaaaatgggaaggacaattcatgtccctgtctgccctggggataaatgagaggataaaagagaaagttcttcccagtttcccaggtggtcccagctagatcctgtgtccacggaagctgctggtgcccaggctgtgggtcttgttggaagaagcaggactggaacaaaggatgaaaaggaggttggcatggacataagaggagagcttgcactggaccaccgaagaccaccatccctggtctgggctctggcaccaggctctgccagtggcagctcagaggccacagggtgacattggccacacccccaccccacttccctggcctgggcctcgaaagatgaagcaactgaatttattcttaaatcagagaccaggaagggaaagtcagctggggccatggctaccttcttgggagagtgacccctgaacccagccaaggccacattcaagctcagtgtcaacactaggcatgaacctccaagggacctgtgggctggggcagaatggcttcagtgacaagactcaaaggaggcactagcattgtgctgctggactgggggaaggacttgcttgggaggagaactctacataggagctgggggcaggtggacctagatccaaccttcaacccctagtgaggggccaggcagaggacaaggcaacaactaagctaggtaaagttctggaaagtttccaagcccaggaggaacaaggaccactctggaaaaacattccaaagcccattgcatacctgtggtagagactaggggagtgattccagggataagacggacaaatgtgttccaggccccagctgatggtgggtgtggtcttcataatgagaggtggagctgagatttgggcctgggctgggaagaggagtacacagtccatctgatccacctctcttatggttccattggcaaaatcattcatcagtcgtcctatcttttcctggcgagcgctcacaatggcttcataagtgtttcaatacagtgtcccaggcagtcactacctatagattagagctgatgtgctggcctggggctctagagctgggcttcaggaagaatgtggtcagggccatcagggtggaacaaggtagctcaagaccttggaaagacaccctgagggcacaatcgtccttgcagtttaagatgacactttaaaaataaattctttcctaatgatggcttgagtcctgccactcaatgggagcatcagcggaacccgtagcatcttatttggaattgacattctctattgtaattttgttcctgtttatttttaagttttctttttgtttcactggaaaggaaagatgatgctctgttttaaacattaaaagtatacaagttgctttgttacaataaaactaaatatgtacacacaccaaaaaaaaaaaaaaatgatcaggatgcattcattcactcctgaaataaacatttacagaatatttggactgggcagtgttctaggtgctggagatgcagcagatccctgccttaatggagctcacattctagcaaaggaaaa

SEQ ID NO: 145180 - DNA, 2991 bp, Homo sapiens
  Payload ID: 8686
  Gene Symbol: KLHDC7B
  Gene Name: kelch domain containing 7B
  Uniprot ID: Q96G42
  ENST ID: ENST00000395676
  CDS Start-End: 135-1919
ccacctcagccccaaccccaaccccagccgcatcccctgccccagctgacgggtcaaagcctcaggagagtgtggctctccccaggcgctaccaggaggggcaggtctcagccagctggggaaaccttattgccatggttcttagaagccaccccttccccaggcaagacaggccccaagggagtgtcccgagggcggttcccgggagccccgtgggtcccagcacttccacacactctgaggacagacacggcccctcttcttcagtggggacagtcatagggacaggtacagggggcctggttgaggctggaggtcagccacagccaagaagctccgagaccaacggatcgcccagcccagaccctcccccaggcctaagaggagagggaaccagggagaaaagtctagacccgctgccccaagccgcgatgcccaggggccccgcacagccccccgcgcagaggccgcctggccccgcggcctcctcctctgcgaggcgctcacagccggtaccccagctacggaaacgcagcaggtgcgaaatcgccccgagctcggagcaggaggtcaggccggccgcctcgggggaccctcaaggggaggcgccgggggaggggggcagccctgccggccgcagcggggcgctcacggaaaagcaggaggaggcccggaagctcatggtgtttctgcagaggcccgggggttggggggtggtggaggggccccggaagcccagctcccgggccctggagcccgccacggcggcagccctgcggcggcggctggacctgggcagttgcctggacgtgctggcctttgcccagcagcacggagagcccggcctggcgcaggagacctacgcgctgatgagcgacaacctgctgcgagtgctgggagacccgtgcctctaccgccggctgagcgcggccgaccgcgagcgcatcctcagcctgcggaccggccggggccgggcggtgctgggcgtcctcgtactgcccagcctctaccaggggggccgctcagggctccccaggggccctcgtggcgaggagcctcctgcggcggcccctgtgtccctgcctctacctgcgcacctgcatgtgttcaacccccgggagaacacctggcggcccctgacccaggtgcccgaggaggccccgcttcggggctgcggtctctgcaccatgcacaactacctgtttctggcggggggcatccgtggctccggtgccaaggccgtctgctccaacgaggtcttctgctacaaccctctgaccaacatctggagccaggttcggcccatgcagcaggcccgagcccagctcaagctggtggccctggacgggctgctctatgccatcggtggcgaatgcctgtacagcatggagtgctacgacccgcgaacagacgcctggaccccacgcgcgccactccccgcaggcaccttccctgtggcccacgaggctgtggcctgccgtggggacatctacgtcaccgggggtcacctcttctaccgcctgctcaggtacagccccgtgaaggatgcttgggacgagtgcccatacagtgccagccaccggcgttccagcgacatcgtggcactggggggcttcctgtaccgcttcgacctgctgcggggcgtgggcgccgccgtgatgcgctacaacacagtgaccggctcctggagcagggctgcctccctgcccctgcccgcccccgccccactgcactgcaccaccctgggcaacaccatttactgcctcaacccccaggtcactgccaccttcacggtctctggggggactgcccagttccaggccaaggagctgcagcccttccccttggggagcaccggggtcctcagtccattcatcctgactctgccccctgaggaccggctgcagacctcactctgagtggcaggcagagaaccaaagctgcttcgctgctctccagggagaccctcctgggatgggcctgagaggccggggctcagggaaggggctgggatcggaacttcctgctcttgtttctggacaactttccccttctgctttaaaggttgtcgattattttgaagcccagactccctcagcctctttctgcccctcactccacacccagactgtttcctgactcaattccgtacctacttacagaccctctcagcttgctgacacccccctgtctgtgggactccctattccctagagccagggactgatgcgtctccacagacaaggacttggctcgctggagctctgctgagccgagagaggagggggtagaaaacattcacacttcctatgctctgtcagcaggacagggagcaaaaacgtccccaggcaacgccctcgcctctgggactttctgcctgtcctaaggcctccccaggtaccaaccccgtagctatctgggtctgtttggcactgtggattctcaagggcctagaacccttgcctctgaaactggtccgctggtgcagccctgctgtctgcagctcctgcccatacccccagcccacaccaggccaggcccactccgggctcaccaccctctgcagccttgtggggctctcccagcccctccagaagcccaccccacttctcgccaacccccgatctctaaatgaggcctgagcgtcaccctagttctgcccctttttagctgtgtagacttggacgagacatttgacttccctttctccttgtctataaaatgtggacagtggacgtctgtcacccaagagagttgtgggagacaagatcacagctatgagcacctcgcacggtgtccaggatgcacagcacaatccatgatgcgttttctccccttacgcactttgaaacccatgctagaaaagtgaatacatctgactgtgctccactccaacctccagcctggatgtccctgtctgggccctttttctgttttttattctatgttcagcaccactggcaccaaatacattttaattcaccgaaagca

SEQ ID NO: 145181 - DNA, 2928 bp, Homo sapiens
  Payload ID: 8687
  Gene Symbol: KLHDC8A
  Gene Name: kelch domain containing 8A
  Uniprot ID: Q8IYD2
  ENST ID: ENST00000367155
  CDS Start-End: 569-1621
ctttgcagctgagactgggtggagggagaggcgcggagacactggggctctgacgagctggctgaggccctctcagtaggggggtcacgcctcctggaactcagggaccccaagtttctgtgcattcagggcggggctggccccatgccctgtgcataggggcctggctgcatcccagtcgatcagccagaggcagcagcagtggactcatcaattgtggaggaagccctggggaccctggggaccttgccgactctattcccagccagctcctaggacaagcctcagagccaacacccgctcgaccctctcccggcccctccccttctttgtcttttgcagatgatcgccgggtgtcgatccttttccctccagtcagggccaggcgtggacgccgccggaccgctgagactcggggcacggtgaagcactggccggggtctggctgggtccggcgctcgggagccagatggaggtggcgataggggccgtgggagccggcgccaagtagccggtggacccccgcgctcgcacctctcccggcgcccgggcgctccccaaggctgccatggaggtgcctaacgtcaaggacttccagtggaagcgcctggcgccactgcccagccgccgggtctactgctccctgctggagaccgggggccaggtctatgccatcgggggatgtgacgacaacggcgtccccatggactgcttcgaggtctactccccggaggccgaccagtggaccgccttgccccggctgcccacagcccgggcgggggtggccgtcaccgccctggggaagcggatcatggtgattgggggcgtgggcaccaatcagctgcccctgaaggtcgtggagatgtacaacatcgatgagggcaagtggaagaagaggagcatgctgcgtgaggccgccatgggcatttctgtcacggccaaagattaccgagtatatgcggcaggcgggatgggcctggacctacgtccacacaaccacctccaacactatgacatgctgaaggacatgtgggtgtccctagcacccatgcccaccccgagatatgctgccacctccttcctccgaggctccaagatctacgtgctggggggacgacagtccaagtacgcggtcaacgctttcgaggtctttgacatcgagactcgctcctggaccaagtttcccaacattccctataagcgggccttctccagctttgtgaccctggacaaccacttgtacagcctaggaggcctgcggcaaggtcgcctctaccggcagcccaagttcctgcggacgatggacgtgttcgacatggaacaggggggatggctgaagatggaacgatcgttcttcctcaagaagcggcgggcagattttgtggctggctctctgagtggacgggtcatagtggctgggggacttgggaatcaacccactgtcctggagacggcggaagcattccacccagggaagaacaaatgggagatcctccctgccatgcccacaccccgctgtgcctgctccagcatagtcgtcaagaactgcctcctcgccgtgggaggtgtcaaccagggtctgagtgacgcagtggaggccctgtgtgtctctgactcctagctgtctctgggctcagtacctttgccctggaccatatcacttcactcttaacatgaggaatgatcttgtccaagcagtcggggctacttccaagaatgtcagctcctgttagcaaccagtggagtctggccttggggctctaagttgacctctctatagctccaaatcctaccaatctcagaaaactgtaagaggcacagatgactccaccagctgcagagctgactctgaagagagtcttcacttactgcacaggcaaagaaaggcacaggaatatttcctacctctccctcctgtgagtcccacctccccccacccccatctccaggaggcaggtagagcagttctgaccgagaggatagactgctgttgctgtctttccccagctctgaactagttttaaggtagcttaggatgaaaaatggagaatgattgggggttccaaaccactttcttctcccttggcttatatctcttcaccatttggtggtcaactgtgggcctaccctggacctcatctactcagcgagaattggacatgaagctagaggcagctgccttggaagggaagtcaggctcacttggacagcccaggccatggcaggaagaatcccttcctcttggggtccttgatgggcatgtgtgatggggaaggagcagtctcccagccctgggtctgctccccacatctctcctaattccacttcaccttttgccaccccctccccaccagaggcctagcccttttgtcaccgaaggcccccagagtgtttctgtgtgaaaccctctcatttacactgtggcatcaaaatccacaaaagatggattaattgcactctggttaatagcagcagcacaatgattaaaatctatattcctatcttctctagcaccctggtgtggggatggggcggaagggtgtcttgaggggcagggaggaccccataaaacaatccctcctgcattctcaggctaaatagggcccccagtgactacctgttcttggctgtcccctctgaagagctctgccttctcacagccaccaccagttgccccactcccaggaaaacagcacatgttcttcttctcctgccttgagactgcgtgttagtcttccattcataactcatcagcagctcagtccttcttatgtctagtctcagttcattcagccaaagctcatttttgtcctatccaaagtagaaagggttcttttagaaaacttgaagaatgtgcctcctcttagcatctgtttctgactcccagttatttttaaaataaatgatgaataaaatgcctgccctgaa

SEQ ID NO: 145182 - DNA, 3177 bp, Homo sapiens
  Payload ID: 8687
  Gene Symbol: KLHDC8A
  Gene Name: kelch domain containing 8A
  Uniprot ID: Q8IYD2
  ENST ID: ENST00000367156
  CDS Start-End: 818-1870
ttctctcccatctggcagaggagtccggctccctaaatcttctttttgttgatgatcgccgggtgtcgatccttttccctccagtcagatgaggacactcagattcaaggacataagtgactggtgcataatcacacagctaggaggtggctgcaccaggattcagatgcagcctgtctgatgctgaccacatggtctgtggggtgctgcagaaagaaaactgcataaagaaggtgatcctggcctcggggagttcctggtgtgtgcctccagccagcgtggtaccctgcagagggcactccgacaaggtgagcgcttccgcggcggggcttctgtacagaggtcacagcacgctgtgtcccgggacgcacgcggattcctgcacaggtgtggtggctgcggatggggacggagcggagcaggctcgccggcctcctccccggcggcggctccgcttctccttcctgctgttcacttcatctcctcatctgcatgtgtgacagcggcgcgcggactggggaaggacagagcgccctctccccggctcccgtgcagcggggcgggggctccgggctccccagtgatgcgtcgtctgcgcctcgccgccgcgctccccgggcctggcagcggccaggcgtggacgccgccggaccgctgagactcggggcacggtgaagcactggccggggtctggctgggtccggcgctcgggagccagatggaggtggcgataggggccgtgggagccggcgccaagtagccggtggacccccgcgctcgcacctctcccggcgcccgggcgctccccaaggctgccatggaggtgcctaacgtcaaggacttccagtggaagcgcctggcgccactgcccagccgccgggtctactgctccctgctggagaccgggggccaggtctatgccatcgggggatgtgacgacaacggcgtccccatggactgcttcgaggtctactccccggaggccgaccagtggaccgccttgccccggctgcccacagcccgggcgggggtggccgtcaccgccctggggaagcggatcatggtgattgggggcgtgggcaccaatcagctgcccctgaaggtcgtggagatgtacaacatcgatgagggcaagtggaagaagaggagcatgctgcgtgaggccgccatgggcatttctgtcacggccaaagattaccgagtatatgcggcaggcgggatgggcctggacctacgtccacacaaccacctccaacactatgacatgctgaaggacatgtgggtgtccctagcacccatgcccaccccgagatatgctgccacctccttcctccgaggctccaagatctacgtgctggggggacgacagtccaagtacgcggtcaacgctttcgaggtctttgacatcgagactcgctcctggaccaagtttcccaacattccctataagcgggccttctccagctttgtgaccctggacaaccacttgtacagcctaggaggcctgcggcaaggtcgcctctaccggcagcccaagttcctgcggacgatggacgtgttcgacatggaacaggggggatggctgaagatggaacgatcgttcttcctcaagaagcggcgggcagattttgtggctggctctctgagtggacgggtcatagtggctgggggacttgggaatcaacccactgtcctggagacggcggaagcattccacccagggaagaacaaatgggagatcctccctgccatgcccacaccccgctgtgcctgctccagcatagtcgtcaagaactgcctcctcgccgtgggaggtgtcaaccagggtctgagtgacgcagtggaggccctgtgtgtctctgactcctagctgtctctgggctcagtacctttgccctggaccatatcacttcactcttaacatgaggaatgatcttgtccaagcagtcggggctacttccaagaatgtcagctcctgttagcaaccagtggagtctggccttggggctctaagttgacctctctatagctccaaatcctaccaatctcagaaaactgtaagaggcacagatgactccaccagctgcagagctgactctgaagagagtcttcacttactgcacaggcaaagaaaggcacaggaatatttcctacctctccctcctgtgagtcccacctccccccacccccatctccaggaggcaggtagagcagttctgaccgagaggatagactgctgttgctgtctttccccagctctgaactagttttaaggtagcttaggatgaaaaatggagaatgattgggggttccaaaccactttcttctcccttggcttatatctcttcaccatttggtggtcaactgtgggcctaccctggacctcatctactcagcgagaattggacatgaagctagaggcagctgccttggaagggaagtcaggctcacttggacagcccaggccatggcaggaagaatcccttcctcttggggtccttgatgggcatgtgtgatggggaaggagcagtctcccagccctgggtctgctccccacatctctcctaattccacttcaccttttgccaccccctccccaccagaggcctagcccttttgtcaccgaaggcccccagagtgtttctgtgtgaaaccctctcatttacactgtggcatcaaaatccacaaaagatggattaattgcactctggttaatagcagcagcacaatgattaaaatctatattcctatcttctctagcaccctggtgtggggatggggcggaagggtgtcttgaggggcagggaggaccccataaaacaatccctcctgcattctcaggctaaatagggcccccagtgactacctgttcttggctgtcccctctgaagagctctgccttctcacagccaccaccagttgccccactcccaggaaaacagcacatgttcttcttctcctgccttgagactgcgtgttagtcttccattcataactcatcagcagctcagtccttcttatgtctagtctcagttcattcagccaaagctcatttttgtcctatccaaagtagaaagggttcttttagaaaacttgaagaatgtgcctcctcttagcatctgtttctgactcccagttatttttaaaataaatgatgaataaaatgcctgccctgaa

SEQ ID NO: 145183 - DNA, 2931 bp, Homo sapiens
  Payload ID: 8687
  Gene Symbol: KLHDC8A
  Gene Name: kelch domain containing 8A
  Uniprot ID: Q8IYD2
  ENST ID: ENST00000539253
  CDS Start-End: 545-1597
tttgcataactggcagcgttgcaaaggacagcccctttctctcttccctccattctctcccatctggcagaggagtccggctccctaaatcttctttttgttgatgatcgccgggtgtcgatccttttccctccagtcagatgaggacactcagattcaaggacataagtgactggtgcataatcacacagctaggaggtggctgcaccaggattcagatgcagcctgtctgatgctgaccacatggtctgtggggtgctgcagaaagaaaactgcataaagaaggtgatcctggcctcggggagttcctggtgtgtgcctccagccagcgtggtaccctgcagagggcactccgggccaggcgtggacgccgccggaccgctgagactcggggcacggtgaagcactggccggggtctggctgggtccggcgctcgggagccagatggaggtggcgataggggccgtgggagccggcgccaagtagccggtggacccccgcgctcgcacctctcccggcgcccgggcgctccccaaggctgccatggaggtgcctaacgtcaaggacttccagtggaagcgcctggcgccactgcccagccgccgggtctactgctccctgctggagaccgggggccaggtctatgccatcgggggatgtgacgacaacggcgtccccatggactgcttcgaggtctactccccggaggccgaccagtggaccgccttgccccggctgcccacagcccgggcgggggtggccgtcaccgccctggggaagcggatcatggtgattgggggcgtgggcaccaatcagctgcccctgaaggtcgtggagatgtacaacatcgatgagggcaagtggaagaagaggagcatgctgcgtgaggccgccatgggcatttctgtcacggccaaagattaccgagtatatgcggcaggcgggatgggcctggacctacgtccacacaaccacctccaacactatgacatgctgaaggacatgtgggtgtccctagcacccatgcccaccccgagatatgctgccacctccttcctccgaggctccaagatctacgtgctggggggacgacagtccaagtacgcggtcaacgctttcgaggtctttgacatcgagactcgctcctggaccaagtttcccaacattccctataagcgggccttctccagctttgtgaccctggacaaccacttgtacagcctaggaggcctgcggcaaggtcgcctctaccggcagcccaagttcctgcggacgatggacgtgttcgacatggaacaggggggatggctgaagatggaacgatcgttcttcctcaagaagcggcgggcagattttgtggctggctctctgagtggacgggtcatagtggctgggggacttgggaatcaacccactgtcctggagacggcggaagcattccacccagggaagaacaaatgggagatcctccctgccatgcccacaccccgctgtgcctgctccagcatagtcgtcaagaactgcctcctcgccgtgggaggtgtcaaccagggtctgagtgacgcagtggaggccctgtgtgtctctgactcctagctgtctctgggctcagtacctttgccctggaccatatcacttcactcttaacatgaggaatgatcttgtccaagcagtcggggctacttccaagaatgtcagctcctgttagcaaccagtggagtctggccttggggctctaagttgacctctctatagctccaaatcctaccaatctcagaaaactgtaagaggcacagatgactccaccagctgcagagctgactctgaagagagtcttcacttactgcacaggcaaagaaaggcacaggaatatttcctacctctccctcctgtgagtcccacctccccccacccccatctccaggaggcaggtagagcagttctgaccgagaggatagactgctgttgctgtctttccccagctctgaactagttttaaggtagcttaggatgaaaaatggagaatgattgggggttccaaaccactttcttctcccttggcttatatctcttcaccatttggtggtcaactgtgggcctaccctggacctcatctactcagcgagaattggacatgaagctagaggcagctgccttggaagggaagtcaggctcacttggacagcccaggccatggcaggaagaatcccttcctcttggggtccttgatgggcatgtgtgatggggaaggagcagtctcccagccctgggtctgctccccacatctctcctaattccacttcaccttttgccaccccctccccaccagaggcctagcccttttgtcaccgaaggcccccagagtgtttctgtgtgaaaccctctcatttacactgtggcatcaaaatccacaaaagatggattaattgcactctggttaatagcagcagcacaatgattaaaatctatattcctatcttctctagcaccctggtgtggggatggggcggaagggtgtcttgaggggcagggaggaccccataaaacaatccctcctgcattctcaggctaaatagggcccccagtgactacctgttcttggctgtcccctctgaagagctctgccttctcacagccaccaccagttgccccactcccaggaaaacagcacatgttcttcttctcctgccttgagactgcgtgttagtcttccattcataactcatcagcagctcagtccttcttatgtctagtctcagttcattcagccaaagctcatttttgtcctatccaaagtagaaagggttcttttagaaaacttgaagaatgtgcctcctcttagcatctgtttctgactcccagttatttttaaaataaatgatgaataaaatgcctgccctgaagggttctggaggagtcaggtatcactc

SEQ ID NO: 145184 - DNA, 566 bp, Homo sapiens
  Payload ID: 8687
  Gene Symbol: KLHDC8A
  Gene Name: kelch domain containing 8A
  ENST ID: ENST00000607173
  CDS Start-End: 330-566
tttgcataactggcagcgttgcaaaggacagcccctttctctcttccctccattctctcccatctggcagaggagtccggctccctaaatcttctttttgttgatgatcgccgggtgtcgatccttttccctccagtcagggccaggcgtggacgccgccggaccgctgagactcggggcacggtgaagcactggccggggtctggctgggtccggcgctcgggagccagatggaggtggcgataggggccgtgggagccggcgccaagtagccggtggacccccgcgctcgcacctctcccggcgcccgggcgctccccaaggctgccatggaggtgcctaacgtcaaggacttccagtggaagcgcctggcgccactgcccagccgccgggtctactgctccctgctggagaccgggggccaggtctatgccatcgggggatgtgacgacaacggcgtccccatggactgcttcgaggtctactccccggaggccgaccagtggaccgccttgccccggctgcccacagcccgggcgggggtggccgtcaccgccctggggaag

SEQ ID NO: 145185 - DNA, 948 bp, Homo sapiens
  Payload ID: 8687
  Gene Symbol: KLHDC8A
  Gene Name: kelch domain containing 8A
  ENST ID: ENST00000491471
  CDS Start-End: 751-948
cggagacactggggctctgacgagctggctgaggccctctcagtaggggggtcacgcctcctggaactcagggaccccaagtttctgtgcattcagggcggggctggccccatgccctgtgcataggggcctggctgcatcccagtcgatcagccagaggcagcagcagtggactcatcaattgtggaggaagccctggggaccctggggaccttgccgactctattcccagccagctcctaggacaagcctcagagccaacacccgctcgaccctctcccggcccctccccttctttgtcttttgcagatgatcgccgggtgtcgatccttttccctccagtcagatgaggacactcagattcaaggacataagtgactggtgcataatcacacagctaggaggtggctgcaccaggattcagatgcagcctgtctgatgctgaccacatggtctgtggggtgctgcagaaagaaaactgcataaagaaggtgatcctggcctcggggagttcctggtgtgtgcctccagccagcgtggtaccctgcagagggcactccgggccaggcgtggacgccgccggaccgctgagactcggggcacggtgaagcactggccggggtctggctgggtccggcgctcgggagccagatggaggtggcgataggggccgtgggagccggcgccaagtagccggtggacccccgcgctcgcacctctcccggcgcccgggcgctccccaaggctgccatggaggtgcctaacgtcaaggacttccagtggaagcgcctggcgccactgcccagccgccgggtctactgctccctgctggagaccgggggccaggtctatgccatcgggggatgtgacgacaacggcgtccccatggactgcttcgaggtctactccccggaggccgaccagtggaccgccttgccccggctgccc

SEQ ID NO: 145186 - DNA, 606 bp, Homo sapiens
  Payload ID: 8687
  Gene Symbol: KLHDC8A
  Gene Name: kelch domain containing 8A
  ENST ID: ENST00000606181
  CDS Start-End: 80-606
gtcttgctgtacctgtgagctaagccaggggcatgtatggcctttcttcttagattaccgagtatatgcggcaggcgggatgggcctggacctacgtccacacaaccacctccaacactatgacatgctgaaggacatgtgggtgtccctagcacccatgcccaccccgagatatgctgccacctccttcctccgaggctccaagatctacgtgctggggggacgacagtccaagtacgcggtcaacgctttcgaggtctttgacatcgagactcgctcctggaccaagtttcccaacattccctataagcgggccttctccagctttgtgaccctggacaaccacttgtacagcctaggaggcctgcggcaaggtcgcctctaccggcagcccaagttcctgcggacgatggacgtgttcgacatggaacaggggggatggctgaagatggaacgatcgttcttcctcaagaagcggcgggcagattttgtggctggctctctgagtggacgggtcatagtggctgggggacttgggaatcaacccactgtcctggagacggcggaagcattccacccagggaagaacaaatgggagatcctccc

SEQ ID NO: 145187 - DNA, 1022 bp, Homo sapiens
  Payload ID: 8687
  Gene Symbol: KLHDC8A
  Gene Name: kelch domain containing 8A
  ENST ID: ENST00000460687
  CDS Start-End: 288-938
cttttgcagatgatcgccgggtgtcgatccttttccctccagtcagatgaggacactcagattcaaggacataagtgactggtgcataatcacacagctaggaggtggctgcaccaggattcagatgcagcctgtctgatgctgaccacatggtctgtggggtgctgcagaaagaaaactgcataaagaaggtgatcctggcctcggggagttcctggtgtgtgcctccagccagcgtggtaccctgcagagggcactccgattaccgagtatatgcggcaggcgggatgggcctggacctacgtccacacaaccacctccaacactatgacatgctgaaggacatgtgggtgtccctagcacccatgcccaccccgagatatgctgccacctccttcctccgaggctccaagatctacgtgctggggggacgacagtccaagtacgcggtcaacgctttcgaggtctttgacatcgagactcgctcctggaccaagtttcccaacattccctataagcgggccttctccagctttgtgaccctggacaaccacttgtacagcctaggaggcctgcggcaaggtcgcctctaccggcagcccaagttcctgcggacgatggacgtgttcgacatggaacaggggggatggctgaagatggaacgatcgttcttcctcaagaagcggcgggcagattttgtggctggctctctgagtggacgggtcatagtggctgggggacttgggaatcaacccactgtcctggagacggcggaagcattccacccagggaagaacaaatgggagatcctccctgccatgcccacaccccgctgtgcctgctccagcatagtcgtcaagaactgcctcctcgccgtgggaggtgtcaaccagggtctgagtgacgcagtggaggccctgtgtgtctctgactcctagctgtctctgggctcagtacctttgccctggaccatatcacttcactcttaacatgaggaatgatcttgtccaagcagtcggggc

SEQ ID NO: 145188 - DNA, 523 bp, Homo sapiens
  Payload ID: 8687
  Gene Symbol: KLHDC8A
  Gene Name: kelch domain containing 8A
  ENST ID: ENST00000607826
  CDS Start-End: 275-523
agtgatgcgtcgtctgcgcctcgccgccgcgctccccgggcctggcagcggccaggcgtggacgccgccggaccgctgagactcggggcacggtgaagcactggccggggtctggctgggtccggcgctcgggagccagatggaggtgcctaacgtcaaggacttccagtggaagcgcctggcgccactgcccagccgccgggtctactgctccctgctggagaccgggggccaggtctatgccatcgggggatgtgacgacaacggcgtccccatggactgcttcgaggtctactccccggaggccgaccagtggaccgccttgccccggctgcccacagcccgggcgggggtggccgtcaccgccctggggaagcggatcatggtgattgggggcgtgggcaccaatcagctgcccctgaaggtcgtggagatgtacaacatcgatgagggcaagtggaagaagaggagcatgctgcgtgaggccgccatgggcatttctgtcacggccaaagattaccga

SEQ ID NO: 145189 - DNA, 571 bp, Homo sapiens
  Payload ID: 8687
  Gene Symbol: KLHDC8A
  Gene Name: kelch domain containing 8A
  ENST ID: ENST00000606887
  CDS Start-End: 493-571
ttctctcccatctggcagaggagtccggctccctaaatcttctttttgttgatgatcgccgggtgtcgatccttttccctccagtcagatgaggacactcagattcaaggacataagtgactggtgcataatcacacagctaggaggtggctgcaccaggattcagatgcagcctgtctgatgctgaccacatggtctgtggggtgctgcagaaagaaaactgcataaagaaggtgatcctggcctcggggagttcctggtgtgtgcctccagccagcgtggtaccctgcagagggcactccgggccaggcgtggacgccgccggaccgctgagactcggggcacggtgaagcactggccggggtctggctgggtccggcgctcgggagccagatggaggtggcgataggggccgtgggagccggcgccaagtagccggtggacccccgcgctcgcacctctcccggcgcccgggcgctccccaaggctgccatggaggtgcctaacgtcaaggacttccagtggaagcgcctggcgccactgcccagccgccgggtctactgctccctgc

SEQ ID NO: 145190 - DNA, 1959 bp, Homo sapiens
  Payload ID: 8688
  Gene Symbol: KLHDC8B
  Gene Name: kelch domain containing 8B
  Uniprot ID: Q8IXV7
  ENST ID: ENST00000332780
  CDS Start-End: 210-1274
agccccagccagatcccgcgtcaacggaggcggaacggcggaccccgtaccctggcagcatcggagcaccggcgggtgaaggcaaggtccctggactggtcatatacctcttgtggccctggcagaatcaagatgaggccctgtcatgcctccccagtgaggcctacagtctgagcagacagcatggcctgccactggcagtgaacaccatgtctgcaggaggtggccgggcctttgcttggcaagtgttcccccccatgcccacttgccgggtctatggcacagtggcacaccaagatgggcacctgctggtgttggggggttgtggccgggctggactgcccctggacactgctgagacactggacatggcctcgcacacatggctggcactggcacccctgcccactgcccgggctggtgcagctgcggtagttctgggcaagcaggtgctagtggtgggtggtgtggatgaggtccagagcccggtagctgctgtagaggccttcctgatggatgagggccgctgggagcgtcgggccaccctccctcaagcagccatgggggttgcaactgtggagagagatggtatggtgtatgctctggggggaatgggccctgacacggccccccaggcccaggtacgtgtgtatgagccccgtcgggactgctggctttcgctaccctccatgcccacaccctgctatggggcctccaccttcctgcacgggaacaagatctatgtcctggggggccgccagggcaagctcccggtgactgcttttgaagcctttgatctggaggcccgtacatggacccggcatccaagcctacccagccgtcgggcctttgctggctgcgccatggctgaaggcagcgtctttagcctgggtggcctgcagcagcctgggccccacaacttctactctcgcccacactttgtcaacactgtggagatgtttgacctggagcatgggtcctggaccaaattgccccgcagcctgcgcatgagggataagagggcagactttgtggttgggtcccttgggggccacattgtggccattgggggccttggaaaccagccatgtcctttgggctctgtggagagctttagccttgcacggcggcgctgggaggcattgcctgccatgcccactgcccgctgctcctgctctagtctgcaggctgggccccggctgtttgttattgggggtgtggcccagggccccagtcaagccgtggaggcactgtgtctgcgtgatggggtctgaaggcttggtgggagctgtccactggagcagctcattgccagaggcagctatttctatggctccttttgctgctgaggacactcactgtggctctgtgggatgagagaggcatgggggtgagcacttgaaacactgccttggggccttgggttaggggagcctttgtctttagtgcaggacacacatatgcttacacctacctttatcaccattcgttcatgaatcatgcctagctccatccttgccctgggacctactaggccttccatccaactgggaaatggggagaagcaaagctggcctcatgctcttcagggtcagttcctatctggagttgaccaggcctaccccagttgccattcctgaaaaatctcagctgccaggctgcctttagggtccctgcagacccaggagagttgagagggtgggggacacagagagaatagagaggatgtgggaactgccagagggccggagcgcaggagttcaagtggaggaatgctggctttgagccctctacactgctggttgtatgaccttggacaagtcacttcacctctctgtgcctcagcatcctcatctataaatggggatctctgaaaccttcctaccctacctacctcacagggctgttgtgaggacccagggagtttggatgtggaagtaaaagtgctgctaaaaccta

SEQ ID NO: 145191 - DNA, 1314 bp, Homo sapiens
  Payload ID: 8689
  Gene Symbol: KLHDC9
  Gene Name: kelch domain containing 9
  Uniprot ID: Q8NEP7
  ENST ID: ENST00000368011
  CDS Start-End: 143-1192
cgggacttgaggtgggaaccccggctggcgtccggtagggggaggttcccggggaagcccgcggaaggcgaggtgcctggcctgccatgtaggggctcgttccaagccgcagaccccaccgccctccctctccccggggcccatggcggtggccgtgcccccgggtcgggccgcaggctcaggctgggcctggaggccagtggcgcgggacgcgcttttggctagagctttccattcatgcaccgaactgcggggacggttctatctcgtaggtggtctcctagcaggaggagcgagagagcccagcagcgatacggtggttttcgacccagctaggggccaggccgtacgattgggagcccggggcagccccccgcgcagtcaccacgacgcggcacccgtggacgggcgttggctctgcgtggtgggcggctgggacgggtctcgccgcttggccacagtgaccgcactggacacagagcgcggtgtgtgggaggcgtggacagggacccctggtgactgcccccccgccggcctcagtagtcacacctgcacccgaatctctgaccgagagctgcaggtggctggccgggagggcggtatccacactcagcgacgctatggaagcatctacacattaaggctggaccccagcgcccgcacctattgctacaagcaagaaggctgccacacagcctcacgctcaggtcactgtgcggccctgctccaaactcctggaccccatccaggtcatcagctattgctctttggaggttgcaacttagctgaaccagaagtagctgggcattggagtcatgggaaaattaaggaggaaccacctgttgctcctcatttgatggaacagcttgcaaggcttgtgagcagtgggcaggggtcccagaaggggccccatggactacggcatcactcatgttctgtggtcgggccctttgctgtgctgtttggtggagaaactctgaccagagctagagacaccatctgcaatgatctctacatctatgatactcgcacatctcctcctttgtggttccacttcccctgtgcagatcgtgggatgaaacgcatgggccatcgcacctgcctttggaatgatcagctttacctggttgggggttttggtgaggatggcaggacagccagtccacaggtttgcatcctggactttatctaaatagtgccaagacacatcactaagcctcgttttgttttgctttgttgcaaacctataaagcgttatcaccagagctatctgcttcacttcaaatgcttattaaatttcaatctgagactcaa

SEQ ID NO: 145192 - DNA, 1333 bp, Homo sapiens
  Payload ID: 8689
  Gene Symbol: KLHDC9
  Gene Name: kelch domain containing 9
  Uniprot ID: Q8NEP7
  ENST ID: ENST00000392192
  CDS Start-End: 143-1009
cgggacttgaggtgggaaccccggctggcgtccggtagggggaggttcccggggaagcccgcggaaggcgaggtgcctggcctgccatgtaggggctcgttccaagccgcagaccccaccgccctccctctccccggggcccatggcggtggccgtgcccccgggtcgggccgcaggctcaggctgggcctggaggccagtggcgcgggacgcgcttttggctagagctttccattcatgcaccgaactgcggggacggttctatctcgtaggtggtctcctagcaggaggagcgagagagcccagcagcgatacggtggttttcgacccagctaggggccaggccgtacgattgggagcccggggcagccccccgcgcagtcaccacgacgcggcacccgtggacgggcgttggctctgcgtggtgggcggctgggacgggtctcgccgcttggccacagtgaccgcactggacacagagcgcggtgtgtgggaggcgtggacagggacccctggtgactgcccccccgccggcctcagtagtcacacctgcacccgaatctctgaccgagagctgcaggtggctggccgggagggcggtatccacactcagcgacgctatggaagcatctacacattaaggctggaccccagcgcccgcacctattgctacaagcaagaaggctgccacacagcctcacgctcaggtcactgtgcggccctgctccaaactcctggaccccatccaggtcatcagctattgctctttggaggttgcaacttagctgaaccagaagtagctgggcattggagtcatgggaaaattaagtcctttctttctccccaaggaggaaccacctgttgctcctcatttgatggaacagcttgcaaggcttgtgagcagtgggcaggggtcccagaaggggccccatggactacggcatcactcatgttctgtggtcgggccctttgctgtgctgtttggtggagaaactctgaccagagctagagacaccatctgcaatgatctctacatctatgatactcgcacatctcctcctttgtggttccacttcccctgtgcagatcgtgggatgaaacgcatgggccatcgcacctgcctttggaatgatcagctttacctggttgggggttttggtgaggatggcaggacagccagtccacaggtttgcatcctggactttatctaaatagtgccaagacacatcactaagcctcgttttgttttgctttgttgcaaacctataaagcgttatcaccagagctatctgcttcacttcaaatgcttattaaatttcaatctgagactcaa

SEQ ID NO: 145193 - DNA, 6710 bp, Homo sapiens
  Payload ID: 8690
  Gene Symbol: KBTBD11
  Gene Name: kelch repeat and BTB (POZ) domain containing 11
  Uniprot ID: O94819
  ENST ID: ENST00000320248
  CDS Start-End: 967-2838
agcccacccgcctggctgcgcgtcccgggcccggcggctgaagaggagccgcggcgaggaacaagagtgtggtgagaggacgcggaaacacctgatatcccagcaaaggaagctgcagaggaagggtcctgccccgtgagcgaggacagcctccaggagcacagcggcttctcctaacatccccctggcagtgaattacggatgaccccgtatatgaggaggtgtggatgccgacacacggggagagctcctgagaccagcacacaggaccagtgtcctccccgtgaccttgcagttgtgtagccacaagtgggagccacagagaaggagagcccataaggggactcttttcaagacacggtgttaaatcaaggctctgaagttggggccacagccggtctcagctttctgtgttctgggggcgcggtgatatgacagcatgtgaagtgagtgggtgagcacggactcctgagagcgagggcgcacccaatacctggttatctggtactgcagagagacacctagtcagccagcgttgcaaagagggatagctagtcactcaggctgcagagagagacacctggtcacccaggctgcagaaacaaccgcagtcaactgcagctccagtcattgctggatgttggctgacgcggtcctggcgccagctggagatccattcaccaagactttctgggcagatttaaagtggctggggttcagaagttcagcaagtcggacacacccctcctcgctggagaggagagggcaaaggcgaggcgggggagcagcgtgtgagattccccccttcacacacacaacaacaaagcgtggacacacagaagtgaaatctgatcgcgtgccaggaaaagctgtgaggctggaaaccccggagtaaggctcgaccttggccagacctgcaggctgcggaaccgggggcgcgcgggcgcagcgcagcacagcccggccatggagcacgcggtggccccctgcgtcctctacccagggactgagcccggggctgccggggagagcgagagcgagggcgccgcgtccccggcgcagacaccctgcagtctcggcgcgtccctgtgcttcagctccggggaagagtccccgccgcagtccctcgcctcagcggcggaaggcgcggccacctccccgccctccagcggtggcccgcgggtggtggagcggcagtgggaggccggcagcgcgggcgccgcgtccccggaggagctcgcgtcccctgaggagcgcgcgtgcccggaagagcccgcggcgccgtcccccgaaccgcgcgtttggcttgaggaccccgcgtcccccgaggagcccggggagcccgcgcccgtacccccggggttcggggcggtgtacggggagccggacctggtgctggaggtgtcggggcgccggctgcgcgcgcacaaggcggtgctggcggcgcgcagcgactacttccgcgcgcgcgcgtcgcgggacgtgctgcgggtgcagggagtgagcctgacggcgctgcggctgctcctcgccgacgcctacagcgggcgcatggcgggcgtgcggcccgacaacgtggccgaggtggtggccggcgcgcgccgcctgcagctgcccggcgccgcgcagcgcgccaccgacgccgtggggccgcagctgagcctggccaactgctacgaggtcctgagcgcggccaagcggcagcggctgaacgagctgcgcgacgccgcctactgcttcatgagcgaccactatctggaggtgctgcgcgagcccgccgtgttcggccgcctgtcgggcgcagagcgggacctgctgctgcgccgccgcctgcgcgccggccgcgcccacctcttggccgcggcgctcgggccggcgggggagcgcgcgggcagccggcctcagagcccctcgggggacgcggacgcgcgcggggacgcggccgtctactgcttccacgcggcggccggagagtggcgcgagctgacgcggctgcccgagggcgcgccggcgcggggctgcggcctgtgcgtcctctacaactacctcttcgtggcgggcggcgtggcgcccgcgggccccgacggccgcgcgcgcccgtccgaccaggtcttctgctacaacccggccacggacagctggagcgccgtgaggcccctgcgccaggcgcgctcgcagctgcggctgctggccctggacggtcacctctacgccgtgggcggcgagtgcctgctcagcgtggagcgctacgacccgcgcgccgaccgctgggcccccgtggcgccgctgccccggggcgccttcgccgtggcgcatgaggccaccacctgccacggcgagatctacgtgtccgggggctccctcttctatcgcctgctcaagtatgacccgcggcgcgacgagtggcaggagtgcccgtgcagcagcagccgcgagcgctcggccgacatggtggctctcgacggcttcatctaccgcttcgatctgagcggcagccgcggcgaggcgcaggcggcggggccgagcggggtcagcgtgtcccgataccactgcctggccaagcagtggagcccgtgcgtcgcgcccctgcgcctccccggcggccccacgggcctgcagcccttccgctgcgccgccctggacggcgccatctactgcgtgagccgcgcgggcacctggcgcttccagcctgcccgggaaggcgaggccggcggcgacgcaggccagggcggcggcttcgaggcgctgggcgcccccttggacgtccggggtgtgctcatcccgttcgctctcagcctgcctgagaagccgccccgaggggagcagggcgccccgtaggccggcggggtcggcgggcgtctccctcggcaggggtttgcggggcccaggtccctttgggcccgcggaggaggacgtggtggggagtcggggccgctggccacgctggtggtttggacacttcgaaggagccccgaggacgctctcagggccgctttcgctttgctttccttttgcttgtctttgcttctgggggtggatgccttgagacccaggaggtgtgcggatgggtcccttgacagacaggacacagagaaggctgtgggatccaaagggtcagcctcagggtacagtgggggttcctgaggcagcctgcagccggccccggggtgtcccgaaccccgcagagcaccgaggctgtgcgcaggagcctgggaccctcaagtaggtcgccgcgaactatcgggggaagcacgcagagagggtcacgccttttatttttggcttgagatttaaaattataactgataagtaaagctctttctgatttagttgaaaatttcgtaccatgtgctcgctttggttggctcaactccaaaaagagtaatttaataagcattaaaggtaaaatctttgattaccagtaaggtttcttgttcaatatgcattggaagtatttccttccccacaccattgctactcaaactcacatgcctagagcagctccgtctcactgttggaccgagggggctttcatattttcagttgaaaggatgttaactgatgtagcgatgatttaccattatttaaattttaagtcttcagtggctaaatgtgaccaaacagcacatcataagtaggaaaaacttaccagggtgcttgtctatctaaaaagcaatctttgatagtccactctgtatgcccagccgctttcataatctggaacgagataaaatattcctaaaaagcggggaaaatcattttgctttgacagttctataaaaaaaagtgtaggcacattttaaacccactgtatatgatgttttcaatgtggatcgtgtagttctgatgagggagattaatttttacaatcagtattctaagtgtggccgagtgacagtgggcatagatttataacaaggaagtgacgtgcttatcaccatagatttgcaagtaaactgcatgtatttaattgtattgaattgagttccaaaataccctaatagaattaacacgaggctcactgcattgacagggtatgaggattaaaaacaaatcagttgggtcgtttctcatttaacattttacttttcaagtgtgtatacagaggacttactattatgactttgaggatgagatccatgctcacaaatagaggcgaacatttgaactccgaatccaacccattttcttactgtaagaggaaaagttactggaacgtaactagttgaaatcctgcctactttaatattatttgtttgttaatccagtaatgggaactgccatctctgtagaaatcagtgggtaattgaaaaataggttatgctttttaaagagtctgtggttatgagaggtctcagttaagtgtgtttagaagtgatcagcttgaaccttatgcatgactcgggggctggaatttatgatctgggttacggtatgttctggggacgtgtctgcttgcccatggttactcatgaactgaggggatagcttggcaacttggttaatcatcttgggaaagaaaaacagacttcatatcgcctgacttgattggccttttataggagtatactggagaaatggttgtagaaacagtatttacagcaaaaggaaacaaataatgttcattttaagcaatgtaccattcacactgtcctgccttttcctctagaattttattaatggtagaaatttttatatgaaatgggaccaggaccaggctaatattttcagtccttaaatatcaaactcatatgctgttatcactgtgattttacttgtgaaatcattcctgtaatgtttattgtttgaaaatgaaatattgaaattaggcttccagagtaacactgtccccggaaaaggatatgagaagtggtggatgttggatgggggtggttgcacagtcctgtgcggttcccatggctttccagcgtttcatttagtgaaggaatgctcacactagatgtagcacagcttcctgtggggcccggcagcaaagccccaggtgctccctgtcacctcacaacaaaatgcactaagaaacgtaaagaataagaggaattaatacccaccattaaaggatgtccggccaacctattgtggaaatttatagaatagtatacaccacagttctgaatagtgatatcacataaaaatacatactagaggacctgccacgccatgagcagtgtttttgctttttgggggccagtccctggggtgtggagccgctagggtttgcacccatgaaacagagaaaagccacaccctccaaggtgtggctttcattttgggactgctgcagggagggcagaggcattgctgagactgcctggcaacggctgatgccccaggtaggaccttttccaattcaaagtggtgttctaagtctgcgtccaacactgtgtaggaaaaaggttggtgcaaaaatattcctggtcatccacccattaaaatagttagatgaggctattgccttgatgacagctgtccacactcctcatgaaattaacccgtatgccggggcatttccaaatgtctgactcgtgaaattaacccatacgcaggggcctttccaaatgtctgaaaaggcagtggtgtcttttggggaaaatgttatgcatggaagcctgaccttttgcttagttgacagcaatcccttctgtattgccaatcaaggttcatttgagatgcagaggaatgagcttgagccttcctccttttccttccggttttattcttcctcttgggaacatccctccactccgcactgcttcctgcagctttgtagagctggatttggaacttcgggatttggtttctgagtctgtggaggcaccgacttctgctgtaagaaaatgaatgttgtggaaattctttggctacttaactaaaactcgtgactgtataagtttggctacaaataagtaagaaattaatcatctgctctgtttctgctaatttctggtgtcacttcagtaattctggtagcagccgttgaatctgtcagtctcttaggtaacttcctgtaaacgatttggaaataggatgttttcaacgttcttttgtcttttgctgaagtcaggatagattcaagacataatctcttgtaagatctaaatagagcaaatgtaaacaaaagtgcatttttgtattcttgttaattttagatgctttcctagcttacaaaaagttctgtttttgggttaaaaatcaatcaactttctgatatttccccttctgcaatgttattgttcataagaaaacacgagctgaaaatggaaatctgcagttgtttcagttgtcttgaatttctttcagtggccacatcatttccacgttttccacatccgggaggaagcctggactgtgcagccttcgggcacccggcacagacactgtgctggcaggagcttcagacacgccaagtggatggatttggattgaacgcatatgaaacaggagacgggttctcatgtgagatcaaagctcctccaaagcctgttcaagctctaagcgattctcaaatgttaccatttattaaaggtaaactacacctgttgaaggccaagttcagggcagctgttgtgatctgtgtagttaatgtatttattaatgcttgacttttaaaatcctgggcataaatagtgcagagcctcgtatgtttgtcagttcatgccgagatgaaataaatcacgcagaaagtgccagtc

SEQ ID NO: 145194 - DNA, 6710 bp, Homo sapiens; identical to SEQ ID NO: 145193
  Payload ID: 8690
  Gene Symbol: KBTBD11
  Gene Name: kelch repeat and BTB (POZ) domain containing 11
  Uniprot ID: O94819
  ENST ID: ENST00000617214
  CDS Start-End: 967-2838

SEQ ID NO: 145195 - DNA, 4121 bp, Homo sapiens
  Payload ID: 8691
  Gene Symbol: KBTBD12
  Gene Name: kelch repeat and BTB (POZ) domain containing 12
  Uniprot ID: Q3ZCT8
  ENST ID: ENST00000343941
  CDS Start-End: 141-737
agtgtgtgtcaaaaatatatgatggaccacatggatgcctccaactgtttaggtatctattattttgcaaagcagattggagctgaagatttatctgatcgatcaaagaaatatttatatcagcactttgccgaggtatcatgatagaggaaaccagttttgggaaaagttatgcacagctgaatttcgagaactctatgctctggatggatcttcctgatgaagaacctgatcgattaagcaacaaactgttgcagtatgaccccagccaagatcaatggagtgtgcgggcacccatgaagtactctaagtaccgattcagtacagctgtagtcaacagtgagatttatgttttgggtggcattggctgtgtaggtcaagacaagggccaggttcgaaaatgccttgacgtggtggagatctacaacccagatggggacttttggcgagagggccctcccatgccaagtcccctcctctcactccgcaccaattccaccaatgcaggggcagtggatgggaaactctatgtctgcgggggattccatggagcagatcgccatgaggttatctccaaagaaatattggaactggacccatgggaaaaccagtggaatgttgtagccatcaacgtcctcatgcatgacagctatgatgtctgcctagtagccaggatgaatccccgagacctcatccccccgccttcagatttggtggaagaaggcaatgagcactaaggtgaccttgctggaggacctcctgctgttctgcaaacaaggccttcagaacggagagggcccacagcatctctgtcatgccagtcatgtgcactgcatgcgtagtggcctgtgtgtgaagaagcagtgtgtgctgggcactgggtggggagcatggggagtctcccttcagggacttcccagcctgatagggtaaataagacactacaaagaagaggtgatgacggccacaggaggggcacagggccacaggagagcagcagagggagggtctcactctgctggggacccatgaacagcactgccaaggagcagaccttttattgggtccccaaaaggatgaggaggaagtggtcccatgggtgcagtcaatgatgagttcatggaaacagccaagcaagggcccagagacagaaagctcgtgcctgtctgcagtatcctggctgggccagattgcctggggcacagggtttgtggtcaaggctggaaaagtaggttgtagctagatgaccaacgcctgaaagaatgaggagttggacctggtctgtaagccagggaattgtctcaaaatcgtgcattaagggagacttctctctgtgctctgttccagcttcagtcttataaacactgaccattctccttcagaatccccttctactgaagcaacgccacccagcagcagggctagctgtactaccagcccctaacaaccaaggcactcaagccagaccacagtggccaagaatcctgccctgggctgactctgtccgggacagggatgtggggttctgcagcctggtccactccggggctggcagggagtgtcctggagtgggctgacccaggctgcctttgcccacctctcagacacatacaaccatctgcagggtagtcctggctgaacaggactcgcccaagccacccaagccagggacagagaaggctctggctgaggacaggggaagaagcatctcctccagctgctgccaaccccatggcccggcctttgcaataaagatggagccacccacttcagcccacaattgagcataatcagaagacagtcactcccaaaatatatgttagaaataacatttaaatgacacatgggaagtccgtctatcttacttcccgtctctaattctggaagcacagtggattcaatgagggcatcttcatagctcttcttcagcaacttctccaaagagtttcacattgcacaaggctcttttggaagcaggagtggtcagtaaattcagagggagacaaaccctaagtagagacagctttctttggtgctgagctgtgtgattgtgatgaccgctagcctgtgcccctaggttccagctgcccaccaggcaggacaggcaggtcttgccaaaactggagcctgttggaaacctatttctgccaccaaggagagggaccaggagacccagcgtaggttggccccaagtaggctcaactcgggagggtgggggtcccgcctttctcttcgcacttgtgccccaagtgcactcacagtacctggcatgtgggtgacctcttgggtggccggcatggggcagtgtttctcaatcagagggcctgggccccgagcacgtccaggaatctgagttaaagtgagcttactctttccccagtggatgatcatgatctgtgcattctttttcttgctacaaagatgttcctcctagctgctgtgttggctgtcggcggccagggttgaggacggcctccacagggcctccacttccctccattcctcttcacatagtcactccacctgctccacctgcttgaaaagtccagaaagctgccgcgtctccctggctcaaggaggccttgttggcatgtcatggcacatctcctagatgttttgggttcaagatctgggttccagcccccgctctgctacttagctaaccatgtgaacttgggcaagatgacctttctaaagcctcatttccctcatatgcagagtgggaaggaaaatattaatacatactttatagggttggtatgaggattaagtgctgagcaaagtgcctgtgaaatcctgaaataataagcatgttttagctgccattattatcatcactgtcattatcattgcagtcagcacttcccaaagcaaggtgcccaaaacagactcagtgctttagggaagtggggcagatgtgcatatggcttgtgacggttctttctttttttttttttttttgagacggagtctctctctctcgccaggctggagtgcagtgcagtggcacgatctcagcccactgcaacctccgcctcccaggttcaagtgattctcctgcctcagcctcccaagtagctgggattacaggcgcccaccaccacacccagctaatttttgtatttttagtagagacggggtttcaccatgttggccaggatggtctcaatctcttgacctcgtgatctgcccgcctcggcctcccaaagtgctgggattacaggcatgagcccctgcacctggctgagatggttcttaatttcccataccctgttgcttggctcctccagttggcggctgagagttaagcaagggtttactcggatctgaggcccccgatgccctcaatggacacattcaggaccctgtggcagctcagcagaggcacctgagggtcacgctaggtgagaccatcgcccgcctgtgggaggcaagataagtgggtaaacatcattcctgtctaatgcgaggtctgggcagtgtcccagtggaactttccagagagtgccaagggaggaccgagaaggggcatgacctctgctggagccaggagggcagtgaccaggagctggcttagcactgaagggaagcaggcatcaagggcaggatttctcaaacttcttctgaggaatccccgaggtcgaaaccggtgcttcacagatttcagatgtctgatcttgatttttctttgattccatacaacagattgcttgcctgggttagtgcttattttaagttcttggtgcttcttgtctgacttctgtatttgcaattaaaaacaacatgaccctccccacctgcagccagatatcgttagaaattcaacttcgaaatatattcctatcactcctgttttcactttaatagaaggctgttgcagtactgcatgatgggctcttataaaacttctactatctgctaattcttatctttgtgacaggattgtttgacactgagcaaggaaacacaataaggaagtaatttggatgctaggctggcagaagcctgcagctgtcaaccacagcctgccccagtgtgttcaacacggtggcattgttctccctgacttcataatgagcaaatgtttcacatttgaacttaaggaataaatttttactaat

SEQ ID NO: 145196 - DNA, 4302 bp, Homo sapiens
  Payload ID: 8691
  Gene Symbol: KBTBD12
  Gene Name: kelch repeat and BTB (POZ) domain containing 12
  ENST ID: ENST00000407609
  CDS Start-End: 222-914
atattgggcagtggcctcagtcaggcccgctggccgccctgccacacggtagcgtccaagccaggtcgtggcccagcgagtggggacgcgccccgaaccaggcagcaccttcgtatcatgatagaggaaaccagttttgggaaaagttatgcacagctgaatttcgagaactctatgctctgggcagtattcataatgacctttatgttataggaggacagatgaaaattaaaaaccagtatcttattacaaactgtgttgataagtactctgtagaacgggacaattggaaaagggtgtctccccttccactgcaattggcatgtcatgctgtagtgacagtgaataataaactttatgtaattggaggctggacccctcagatggatcttcctgatgaagaacctgatcgattaagcaacaaactgttgcagtatgaccccagccaagatcaatggagtgtgcgggcacccatgaagtactctaagtaccgattcagtacagctgtagtcaacagtgagatttatgttttgggtggcattggctgtgtaggtcaagacaagggccaggttcgaaaatgccttgacgtggtggagatctacaacccagatggggacttttggcgagagggccctcccatgccaagtcccctcctctcactccgcaccaattccaccaatgcaggggcagtggatgggaaactctatgtctgcgggggattccatggagcagatcgccatgaggttatctccaaagaaatattggaactggacccatgggaaaaccagtggaatgttgtagccatcaacgtcctcatgcatgacagctatgatgtctgcctagtagccaggatgaatccccgagacctcatccccccgccttcagatttggtggaagaaggcaatgagcactaaggtgaccttgctggaggacctcctgctgttctgcaaacaaggccttcagaacggagagggcccacagcatctctgtcatgccagtcatgtgcactgcatgcgtagtggcctgtgtgtgaagaagcagtgtgtgctgggcactgggtggggagcatggggagtctcccttcagggacttcccagcctgatagggtaaataagacactacaaagaagaggtgatgacggccacaggaggggcacagggccacaggagagcagcagagggagggtctcactctgctggggacccatgaacagcactgccaaggagcagaccttttattgggtccccaaaaggatgaggaggaagtggtcccatgggtgcagtcaatgatgagttcatggaaacagccaagcaagggcccagagacagaaagctcgtgcctgtctgcagtatcctggctgggccagattgcctggggcacagggtttgtggtcaaggctggaaaagtaggttgtagctagatgaccaacgcctgaaagaatgaggagttggacctggtctgtaagccagggaattgtctcaaaatcgtgcattaagggagacttctctctgtgctctgttccagcttcagtcttataaacactgaccattctccttcagaatccccttctactgaagcaacgccacccagcagcagggctagctgtactaccagcccctaacaaccaaggcactcaagccagaccacagtggccaagaatcctgccctgggctgactctgtccgggacagggatgtggggttctgcagcctggtccactccggggctggcagggagtgtcctggagtgggctgacccaggctgcctttgcccacctctcagacacatacaaccatctgcagggtagtcctggctgaacaggactcgcccaagccacccaagccagggacagagaaggctctggctgaggacaggggaagaagcatctcctccagctgctgccaaccccatggcccggcctttgcaataaagatggagccacccacttcagcccacaattgagcataatcagaagacagtcactcccaaaatatatgttagaaataacatttaaatgacacatgggaagtccgtctatcttacttcccgtctctaattctggaagcacagtggattcaatgagggcatcttcatagctcttcttcagcaacttctccaaagagtttcacattgcacaaggctcttttggaagcaggagtggtcagtaaattcagagggagacaaaccctaagtagagacagctttctttggtgctgagctgtgtgattgtgatgaccgctagcctgtgcccctaggttccagctgcccaccaggcaggacaggcaggtcttgccaaaactggagcctgttggaaacctatttctgccaccaaggagagggaccaggagacccagcgtaggttggccccaagtaggctcaactcgggagggtgggggtcccgcctttctcttcgcacttgtgccccaagtgcactcacagtacctggcatgtgggtgacctcttgggtggccggcatggggcagtgtttctcaatcagagggcctgggccccgagcacgtccaggaatctgagttaaagtgagcttactctttccccagtggatgatcatgatctgtgcattctttttcttgctacaaagatgttcctcctagctgctgtgttggctgtcggcggccagggttgaggacggcctccacagggcctccacttccctccattcctcttcacatagtcactccacctgctccacctgcttgaaaagtccagaaagctgccgcgtctccctggctcaaggaggccttgttggcatgtcatggcacatctcctagatgttttgggttcaagatctgggttccagcccccgctctgctacttagctaaccatgtgaacttgggcaagatgacctttctaaagcctcatttccctcatatgcagagtgggaaggaaaatattaatacatactttatagggttggtatgaggattaagtgctgagcaaagtgcctgtgaaatcctgaaataataagcatgttttagctgccattattatcatcactgtcattatcattgcagtcagcacttcccaaagcaaggtgcccaaaacagactcagtgctttagggaagtggggcagatgtgcatatggcttgtgacggttctttctttttttttttttttttgagacggagtctctctctctcgccaggctggagtgcagtgcagtggcacgatctcagcccactgcaacctccgcctcccaggttcaagtgattctcctgcctcagcctcccaagtagctgggattacaggcgcccaccaccacacccagctaatttttgtatttttagtagagacggggtttcaccatgttggccaggatggtctcaatctcttgacctcgtgatctgcccgcctcggcctcccaaagtgctgggattacaggcatgagcccctgcacctggctgagatggttcttaatttcccataccctgttgcttggctcctccagttggcggctgagagttaagcaagggtttactcggatctgaggcccccgatgccctcaatggacacattcaggaccctgtggcagctcagcagaggcacctgagggtcacgctaggtgagaccatcgcccgcctgtgggaggcaagataagtgggtaaacatcattcctgtctaatgcgaggtctgggcagtgtcccagtggaactttccagagagtgccaagggaggaccgagaaggggcatgacctctgctggagccaggagggcagtgaccaggagctggcttagcactgaagggaagcaggcatcaagggcaggatttctcaaacttcttctgaggaatccccgaggtcgaaaccggtgcttcacagatttcagatgtctgatcttgatttttctttgattccatacaacagattgcttgcctgggttagtgcttattttaagttcttggtgcttcttgtctgacttctgtatttgcaattaaaaacaacatgaccctccccacctgcagccagatatcgttagaaattcaacttcgaaatatattcctatcactcctgttttcactttaatagaaggctgttgcagtactgcatgatgggctcttataaaacttctactatctgctaattcttatctttgtgacaggattgtttgacactgagcaaggaaacacaataaggaagtaatttggatgctaggctggcagaagcctgcagctgtcaaccacagcctgccccagtgtgttcaacacggtggcattgttctccctgacttcataatgagcaaatgtttcacatttgaacttaaggaataaatttttactaataaaa

SEQ ID NO: 145197 - DNA, 5268 bp, Homo sapiens
  Payload ID: 8691
  Gene Symbol: KBTBD12
  Gene Name: kelch repeat and BTB (POZ) domain containing 12
  Uniprot ID: Q3ZCT8
  ENST ID: ENST00000405256
  CDS Start-End: 4-1875
atcatggagtgcaagattgagggaaaagaaaaataccaacatagcttgaatttactgaataaaattcagaacatgaaagaattagcagaaatgattgatgtggtactcacagcagaaggagagaaatttccttgccacagactggtcctggctgcatttagcccttatttcaaagctatgttcacctgtggactacttgaatgtaatcaaagggaagtcatactttatgacatcacagcagaaagtgtgtcggtgttattaaattacatgtacaatgcagctttggagatcaataatgccaatgtacagactgtagctatggctgcctattttatgcagatggaagaagtcttcagtgtgtgtcaaaaatatatgatggaccacatggatgcctccaactgtttaggtatctattattttgcaaagcagattggagctgaagatttatctgatcgatcaaagaaatatttatatcagcactttgccgaggtgagcttacatgaagaaatactagaaatcgaagtgcaccaatttttgacacttattaaatcagatgatcttaacatatccagagaagagagcattctggacttagttctgagatgggtaaatcataacaaagaattgcgtacagtgcatcttgttgagcttttgaagcaagtcagattggaacttgtaaatccttcttttttaagacaagccctaagaaggaacacaatgcttctgtgtgatgcagattgtgttgacataattcaaaatgcattcaaagccatcaagacaccccaacagcactctctaaatctgcgctatggtatggagactaccagtcttctgctttgcattggcaacaattcttcaggaatcagatcaagacataggagctatggggatgccagtttttgttatgatcctgtatcacggaaaacctatttcatctcatctcccaagtacggagagggtttaggaactgtgtgtactggtgttgtcatggaaaataatactataattgtggctggagaagcaagtgcctctaaactctctagacaaaagaacaagaatgttgaaatttataggtatcatgatagaggaaaccagttttgggaaaagttatgcacagctgaatttcgagaactctatgctctgggcagtattcataatgacctttatgttataggaggacagatgaaaattaaaaaccagtatcttattacaaactgtgttgataagtactctgtagaacgggacaattggaaaagggtgtctccccttccactgcaattggcatgtcatgctgtagtgacagtgaataataaactttatgtaattggaggctggacccctcagatggatcttcctgatgaagaacctgatcgattaagcaacaaactgttgcagtatgaccccagccaagatcaatggagtgtgcgggcacccatgaagtactctaagtaccgattcagtacagctgtagtcaacagtgagatttatgttttgggtggcattggctgtgtaggtcaagacaagggccaggttcgaaaatgccttgacgtggtggagatctacaacccagatggggacttttggcgagagggccctcccatgccaagtcccctcctctcactccgcaccaattccaccaatgcaggggcagtggatgggaaactctatgtctgcgggggattccatggagcagatcgccatgaggttatctccaaagaaatattggaactggacccatgggaaaaccagtggaatgttgtagccatcaacgtcctcatgcatgacagctatgatgtctgcctagtagccaggatgaatccccgagacctcatccccccgccttcagatttggtggaagaaggcaatgagcactaaggtgaccttgctggaggacctcctgctgttctgcaaacaaggccttcagaacggagagggcccacagcatctctgtcatgccagtcatgtgcactgcatgcgtagtggcctgtgtgtgaagaagcagtgtgtgctgggcactgggtggggagcatggggagtctcccttcagggacttcccagcctgatagggtaaataagacactacaaagaagaggtgatgacggccacaggaggggcacagggccacaggagagcagcagagggagggtctcactctgctggggacccatgaacagcactgccaaggagcagaccttttattgggtccccaaaaggatgaggaggaagtggtcccatgggtgcagtcaatgatgagttcatggaaacagccaagcaagggcccagagacagaaagctcgtgcctgtctgcagtatcctggctgggccagattgcctggggcacagggtttgtggtcaaggctggaaaagtaggttgtagctagatgaccaacgcctgaaagaatgaggagttggacctggtctgtaagccagggaattgtctcaaaatcgtgcattaagggagacttctctctgtgctctgttccagcttcagtcttataaacactgaccattctccttcagaatccccttctactgaagcaacgccacccagcagcagggctagctgtactaccagcccctaacaaccaaggcactcaagccagaccacagtggccaagaatcctgccctgggctgactctgtccgggacagggatgtggggttctgcagcctggtccactccggggctggcagggagtgtcctggagtgggctgacccaggctgcctttgcccacctctcagacacatacaaccatctgcagggtagtcctggctgaacaggactcgcccaagccacccaagccagggacagagaaggctctggctgaggacaggggaagaagcatctcctccagctgctgccaaccccatggcccggcctttgcaataaagatggagccacccacttcagcccacaattgagcataatcagaagacagtcactcccaaaatatatgttagaaataacatttaaatgacacatgggaagtccgtctatcttacttcccgtctctaattctggaagcacagtggattcaatgagggcatcttcatagctcttcttcagcaacttctccaaagagtttcacattgcacaaggctcttttggaagcaggagtggtcagtaaattcagagggagacaaaccctaagtagagacagctttctttggtgctgagctgtgtgattgtgatgaccgctagcctgtgcccctaggttccagctgcccaccaggcaggacaggcaggtcttgccaaaactggagcctgttggaaacctatttctgccaccaaggagagggaccaggagacccagcgtaggttggccccaagtaggctcaactcgggagggtgggggtcccgcctttctcttcgcacttgtgccccaagtgcactcacagtacctggcatgtgggtgacctcttgggtggccggcatggggcagtgtttctcaatcagagggcctgggccccgagcacgtccaggaatctgagttaaagtgagcttactctttccccagtggatgatcatgatctgtgcattctttttcttgctacaaagatgttcctcctagctgctgtgttggctgtcggcggccagggttgaggacggcctccacagggcctccacttccctccattcctcttcacatagtcactccacctgctccacctgcttgaaaagtccagaaagctgccgcgtctccctggctcaaggaggccttgttggcatgtcatggcacatctcctagatgttttgggttcaagatctgggttccagcccccgctctgctacttagctaaccatgtgaacttgggcaagatgacctttctaaagcctcatttccctcatatgcagagtgggaaggaaaatattaatacatactttatagggttggtatgaggattaagtgctgagcaaagtgcctgtgaaatcctgaaataataagcatgttttagctgccattattatcatcactgtcattatcattgcagtcagcacttcccaaagcaaggtgcccaaaacagactcagtgctttagggaagtggggcagatgtgcatatggcttgtgacggttctttctttttttttttttttttgagacggagtctctctctctcgccaggctggagtgcagtgcagtggcacgatctcagcccactgcaacctccgcctcccaggttcaagtgattctcctgcctcagcctcccaagtagctgggattacaggcgcccaccaccacacccagctaatttttgtatttttagtagagacggggtttcaccatgttggccaggatggtctcaatctcttgacctcgtgatctgcccgcctcggcctcccaaagtgctgggattacaggcatgagcccctgcacctggctgagatggttcttaatttcccataccctgttgcttggctcctccagttggcggctgagagttaagcaagggtttactcggatctgaggcccccgatgccctcaatggacacattcaggaccctgtggcagctcagcagaggcacctgagggtcacgctaggtgagaccatcgcccgcctgtgggaggcaagataagtgggtaaacatcattcctgtctaatgcgaggtctgggcagtgtcccagtggaactttccagagagtgccaagggaggaccgagaaggggcatgacctctgctggagccaggagggcagtgaccaggagctggcttagcactgaagggaagcaggcatcaagggcaggatttctcaaacttcttctgaggaatccccgaggtcgaaaccggtgcttcacagatttcagatgtctgatcttgatttttctttgattccatacaacagattgcttgcctgggttagtgcttattttaagttcttggtgcttcttgtctgacttctgtatttgcaattaaaaacaacatgaccctccccacctgcagccagatatcgttagaaattcaacttcgaaatatattcctatcactcctgttttcactttaatagaaggctgttgcagtactgcatgatgggctcttataaaacttctactatctgctaattcttatctttgtgacaggattgtttgacactgagcaaggaaacacaataaggaagtaatttggatgctaggctggcagaagcctgcagctgtcaaccacagcctgccccagtgtgttcaacacggtggcattgttctccctgacttcataatgagcaaatgtttcacatttgaacttaaggaataaatttttactaataaaagatca

SEQ ID NO: 145198 - DNA, 5727 bp, Homo sapiens
  Payload ID: 8691
  Gene Symbol: KBTBD12
  Gene Name: kelch repeat and BTB (POZ) domain containing 12
  Uniprot ID: Q3ZCT8
  ENST ID: ENST00000405109
  CDS Start-End: 468-2339
agtagggtacgggacgcgcgcggggagaccctgtgcagcgacaccggggctgtagtcgccgtctggaaccagcgcgggaataggtgcgcaggcgcacagtggctggagggcagcggcggcgtggtctcgggccacttccaagcagagggcagcacctgtcccctcggaggcgctgccagcgccctccctcctcctccgcagggcgcgggacctctatttatatcgcccagccagcacaggcccatattgggcagtggcctcagtcaggcccgctggccgccctgccacacggtagcgtccaagccaggtcgtggcccagcgagtggggacgcgccccgaaccaggcagcaccttcaaatgtttcctgacatctttgtagcttcatgagtaatcagacatgcaaatagcccctcaggaatcaagctacacttaaagaagacttagttggaaactttggagagtagatcatggagtgcaagattgagggaaaagaaaaataccaacatagcttgaatttactgaataaaattcagaacatgaaagaattagcagaaatgattgatgtggtactcacagcagaaggagagaaatttccttgccacagactggtcctggctgcatttagcccttatttcaaagctatgttcacctgtggactacttgaatgtaatcaaagggaagtcatactttatgacatcacagcagaaagtgtgtcggtgttattaaattacatgtacaatgcagctttggagatcaataatgccaatgtacagactgtagctatggctgcctattttatgcagatggaagaagtcttcagtgtgtgtcaaaaatatatgatggaccacatggatgcctccaactgtttaggtatctattattttgcaaagcagattggagctgaagatttatctgatcgatcaaagaaatatttatatcagcactttgccgaggtgagcttacatgaagaaatactagaaatcgaagtgcaccaatttttgacacttattaaatcagatgatcttaacatatccagagaagagagcattctggacttagttctgagatgggtaaatcataacaaagaattgcgtacagtgcatcttgttgagcttttgaagcaagtcagattggaacttgtaaatccttcttttttaagacaagccctaagaaggaacacaatgcttctgtgtgatgcagattgtgttgacataattcaaaatgcattcaaagccatcaagacaccccaacagcactctctaaatctgcgctatggtatggagactaccagtcttctgctttgcattggcaacaattcttcaggaatcagatcaagacataggagctatggggatgccagtttttgttatgatcctgtatcacggaaaacctatttcatctcatctcccaagtacggagagggtttaggaactgtgtgtactggtgttgtcatggaaaataatactataattgtggctggagaagcaagtgcctctaaactctctagacaaaagaacaagaatgttgaaatttataggtatcatgatagaggaaaccagttttgggaaaagttatgcacagctgaatttcgagaactctatgctctgggcagtattcataatgacctttatgttataggaggacagatgaaaattaaaaaccagtatcttattacaaactgtgttgataagtactctgtagaacgggacaattggaaaagggtgtctccccttccactgcaattggcatgtcatgctgtagtgacagtgaataataaactttatgtaattggaggctggacccctcagatggatcttcctgatgaagaacctgatcgattaagcaacaaactgttgcagtatgaccccagccaagatcaatggagtgtgcgggcacccatgaagtactctaagtaccgattcagtacagctgtagtcaacagtgagatttatgttttgggtggcattggctgtgtaggtcaagacaagggccaggttcgaaaatgccttgacgtggtggagatctacaacccagatggggacttttggcgagagggccctcccatgccaagtcccctcctctcactccgcaccaattccaccaatgcaggggcagtggatgggaaactctatgtctgcgggggattccatggagcagatcgccatgaggttatctccaaagaaatattggaactggacccatgggaaaaccagtggaatgttgtagccatcaacgtcctcatgcatgacagctatgatgtctgcctagtagccaggatgaatccccgagacctcatccccccgccttcagatttggtggaagaaggcaatgagcactaaggtgaccttgctggaggacctcctgctgttctgcaaacaaggccttcagaacggagagggcccacagcatctctgtcatgccagtcatgtgcactgcatgcgtagtggcctgtgtgtgaagaagcagtgtgtgctgggcactgggtggggagcatggggagtctcccttcagggacttcccagcctgatagggtaaataagacactacaaagaagaggtgatgacggccacaggaggggcacagggccacaggagagcagcagagggagggtctcactctgctggggacccatgaacagcactgccaaggagcagaccttttattgggtccccaaaaggatgaggaggaagtggtcccatgggtgcagtcaatgatgagttcatggaaacagccaagcaagggcccagagacagaaagctcgtgcctgtctgcagtatcctggctgggccagattgcctggggcacagggtttgtggtcaaggctggaaaagtaggttgtagctagatgaccaacgcctgaaagaatgaggagttggacctggtctgtaagccagggaattgtctcaaaatcgtgcattaagggagacttctctctgtgctctgttccagcttcagtcttataaacactgaccattctccttcagaatccccttctactgaagcaacgccacccagcagcagggctagctgtactaccagcccctaacaaccaaggcactcaagccagaccacagtggccaagaatcctgccctgggctgactctgtccgggacagggatgtggggttctgcagcctggtccactccggggctggcagggagtgtcctggagtgggctgacccaggctgcctttgcccacctctcagacacatacaaccatctgcagggtagtcctggctgaacaggactcgcccaagccacccaagccagggacagagaaggctctggctgaggacaggggaagaagcatctcctccagctgctgccaaccccatggcccggcctttgcaataaagatggagccacccacttcagcccacaattgagcataatcagaagacagtcactcccaaaatatatgttagaaataacatttaaatgacacatgggaagtccgtctatcttacttcccgtctctaattctggaagcacagtggattcaatgagggcatcttcatagctcttcttcagcaacttctccaaagagtttcacattgcacaaggctcttttggaagcaggagtggtcagtaaattcagagggagacaaaccctaagtagagacagctttctttggtgctgagctgtgtgattgtgatgaccgctagcctgtgcccctaggttccagctgcccaccaggcaggacaggcaggtcttgccaaaactggagcctgttggaaacctatttctgccaccaaggagagggaccaggagacccagcgtaggttggccccaagtaggctcaactcgggagggtgggggtcccgcctttctcttcgcacttgtgccccaagtgcactcacagtacctggcatgtgggtgacctcttgggtggccggcatggggcagtgtttctcaatcagagggcctgggccccgagcacgtccaggaatctgagttaaagtgagcttactctttccccagtggatgatcatgatctgtgcattctttttcttgctacaaagatgttcctcctagctgctgtgttggctgtcggcggccagggttgaggacggcctccacagggcctccacttccctccattcctcttcacatagtcactccacctgctccacctgcttgaaaagtccagaaagctgccgcgtctccctggctcaaggaggccttgttggcatgtcatggcacatctcctagatgttttgggttcaagatctgggttccagcccccgctctgctacttagctaaccatgtgaacttgggcaagatgacctttctaaagcctcatttccctcatatgcagagtgggaaggaaaatattaatacatactttatagggttggtatgaggattaagtgctgagcaaagtgcctgtgaaatcctgaaataataagcatgttttagctgccattattatcatcactgtcattatcattgcagtcagcacttcccaaagcaaggtgcccaaaacagactcagtgctttagggaagtggggcagatgtgcatatggcttgtgacggttctttctttttttttttttttttgagacggagtctctctctctcgccaggctggagtgcagtgcagtggcacgatctcagcccactgcaacctccgcctcccaggttcaagtgattctcctgcctcagcctcccaagtagctgggattacaggcgcccaccaccacacccagctaatttttgtatttttagtagagacggggtttcaccatgttggccaggatggtctcaatctcttgacctcgtgatctgcccgcctcggcctcccaaagtgctgggattacaggcatgagcccctgcacctggctgagatggttcttaatttcccataccctgttgcttggctcctccagttggcggctgagagttaagcaagggtttactcggatctgaggcccccgatgccctcaatggacacattcaggaccctgtggcagctcagcagaggcacctgagggtcacgctaggtgagaccatcgcccgcctgtgggaggcaagataagtgggtaaacatcattcctgtctaatgcgaggtctgggcagtgtcccagtggaactttccagagagtgccaagggaggaccgagaaggggcatgacctctgctggagccaggagggcagtgaccaggagctggcttagcactgaagggaagcaggcatcaagggcaggatttctcaaacttcttctgaggaatccccgaggtcgaaaccggtgcttcacagatttcagatgtctgatcttgatttttctttgattccatacaacagattgcttgcctgggttagtgcttattttaagttcttggtgcttcttgtctgacttctgtatttgcaattaaaaacaacatgaccctccccacctgcagccagatatcgttagaaattcaacttcgaaatatattcctatcactcctgttttcactttaatagaaggctgttgcagtactgcatgatgggctcttataaaacttctactatctgctaattcttatctttgtgacaggattgtttgacactgagcaaggaaacacaataaggaagtaatttggatgctaggctggcagaagcctgcagctgtcaaccacagcctgccccagtgtgttcaacacggtggcattgttctccctgacttcataatgagcaaatgtttcacatttgaacttaaggaataaatttttactaataaaa

SEQ ID NO: 145199 - DNA, 1377 bp, Homo sapiens
  Payload ID: 8692
  Gene Symbol: KBTBD13
  Gene Name: kelch repeat and BTB (POZ) domain containing 13
  Uniprot ID: C9JR72
  ENST ID: ENST00000432196
  CDS Start-End: 1-1377
atggcacggggtccacagaccctggtgcaggtgtgggtgggcggccagctcttccaagccgaccgcgccctgctggtggagcactgtggcttcttccgaggcctcttccgctccggcatgcgggagacccgcgcagcagaggtgcgcctgggcgttctgagcgcgggaggtttccgcgccacgctgcaggtgctgcgcggcgaccggccggcgctggcggcggaggacgagctgctgcaggccgtggagtgcgccgccttcctccaggcgccggcgctggctcgctttctggagcacaacctcacgtcggacaactgcgcattgctgtgcgacgcggccgccgccttcggcctgcgcgacgtgttccacagtgccgcgctcttcatctgcgacggcgagcgcgagctggcggccgaactggcgctgcctgaggcccgcgcctacgtggcggccctgcggcccagcagctacgcggccgtgagcacgcacacgcccgcgcccggcttcctggaggacgcctcgcgcacgctgtgttacctggacgaggaagaggacgcgtggcgcacgctggctgcgctgcccctggaggccagcacgttgctggccggggtggccacgctgggcaacaagctttacatcgtggggggcgtgcgcggcgccagcaaggaggtggtagagctgggcttctgctacgaccccgacggcggcacgtggcacgagttccccagcccgcaccagccgcgctatgacacagcgctggccggcttcgacggccgcctctacgccatcggcggcgaattccagaggacgcccatcagctccgtggagcgctacgacccagccgcgggctgctggagtttcgtggccgacctgccgcagccggccgccggcgtgccctgcgcccaggcttgtggccgtctcttcgtgtgcctgtggcggccggccgacaccaccgccgtggtggagtacgcagtgcggaccgacgcgtggctgccagtggccgagctgcggcgtccgcagagctatggccactgcatggtggcccaccgcgacagcctctatgtggtgcgcaacggaccttccgacgacttcctgcactgcgccatcgactgtctcaacctggccacgggccagtggacggcgctgcccggccagttcgtcaacagcaagggagcgctcttcacggccgtggtgcgcggtgacaccgtctatacggtcaaccgcatgttcacgctgctctacgccatcgagggcggcacctggcggctgctcagggagaaagccggcttcccgcggcccggctccttgcagacctttctcctaaggctgcctcctggcgctcctgggcctgtgacttcgacaacggcagaactgtga

SEQ ID NO: 145200 - DNA, 3745 bp, Homo sapiens
  Payload ID: 8693
  Gene Symbol: KBTBD2
  Gene Name: kelch repeat and BTB (POZ) domain containing 2
  Uniprot ID: Q8IY47
  ENST ID: ENST00000304056
  CDS Start-End: 701-2572
gcgggggcggcgggggcggcgggcccggcgtctcgcggccccggactgacaaggcggcgcgggcgggcgggcggcgcggctcccgggggaggagtctggcggtggtcgggccctgaggagcgtgcggcggcgcccgcagaggacgctgctttccgcgctggacggaccaagcgagggagggtgcgaggggaaaccggaaggaagaggcggcggcgccagccttcctcggccggaggcggaggcgagaccccaggcgaggccgcggcgggagggccacgcccccgccgccgcgccggaggggcccagtgtggacggggccaccggctggagcggatcccacacctccggaccgagggacgcggttactccacaggatccgctgaacataggatgttgccacaaaatctacctcgtgtatttttctctttcactcatgagctgcacaattgcagatttgagcacaatgtctgcagactgtgttgaaaaactctgaagaacctaattaacacaggatgacctaggagtgattctaagtctgtgtaacaagatattactcattagtgaatgtgtcagtcttggtactgaatgctgcagataacagcaagtaggttctcctttatttctgaagtattcacttgaccttccatcagtaagacggacttttctaatctgttcctggagatattaatggaatacagtcatgtccactcaagacgagaggcagatcaatactgaatatgctgtgtcattgttggaacagttgaaactgttttatgaacagcagttgtttactgacatagtgttaattgttgagggcactgaattcccttgtcataagatggttcttgcaacatgtagctcttatttcagggccatgtttatgagtggactaagtgaaagcaaacaaacccatgtacacctgaggaatgtcgatgctgccaccttacagataataataacttatgcatacacgggtaacttggcaatgaatgacagcactgtagaacagctttatgaaacagcttgcttcctacaggtagaagatgtgttacaacgttgtcgagaatatttaattaaaaaaataaatgcagagaattgtgtacgattgttgagttttgctgatctcttcagttgtgaggaattaaaacagagtgctaaaagaatggtggagcacaagttcactgctgtgtatcatcaggacgcgttcatgcagctgtcacatgacctactgatagatattctcagtagtgacaatttaaatgtagaaaaggaagaaaccgttcgagaagctgctatgctgtggctagagtataacacagaatcacgatcccagtatttgtcttctgttcttagccaaatcagaattgatgcactttcagaagtaacacagagagcttggtttcaaggtctgccacccaatgataagtcagtggtggttcaaggtctgtataagtccatgcccaagtttttcaaaccaagacttgggatgactaaagaggaaatgatgattttcattgaagcatcttcagaaaatccttgtagtctttactcttctgtctgttacagcccccaagcagaaaaagtttacaagttatgtagcccaccagctgatttgcataaggttgggaccgttgtaactcctgataatgatatctacatagcagggggtcaagttcctctgaaaaacacaaaaacaaatcacagtaaaacaagcaaacttcagactgccttcagaactgtgaattgcttttattggtttgatgcacagcaaaatacctggtttccaaagaccccaatgctttttgtccgcataaagccatctttggtttgctgtgaaggctatatctatgcaattggaggagatagcgtaggtggagaacttaatcggaggaccgtagaaagatacgacactgagaaagatgagtggacgatggtaagccctttaccttgtgcttggcaatggagtgcagcagttgtggttcatgactgcatttatgtgatgacactgaacctcatgtactgttattttccaaggtctgactcatgggtagaaatggccatgagacagactagtaggtcctttgcttcagctgcagcttttggtgataaaattttctatattggagggttgcatattgctaccaattccggcataagactcccctctggcactgtagatgggtcttcagtaactgtggaaatttatgatgtgaataaaaatgagtggaaaatggcagccaacatccctgctaagaggtactctgacccctgtgttagagctgttgtgatctcaaattctctatgtgtgtttatgcgagaaacccacttaaatgagcgagctaaatacgtcacctaccaatatgacctggaacttgaccggtggtctctgcggcagcatatatctgaacgtgtactgtgggacttggggagagattttcgatgcactgtggggaaactctatccatcctgccttgaagagtctccatggaaaccaccaacttatcttttttcaacggatgggacagaagagtttgaactggatggagaaatggttgcactaccacctgtatagtggggaagttcagggagtgcacgcctgagttatgtgctttgtcattttctttgctaaacaaaagaggctatgaaagaactaaatatgagtacataaaattctatctttgataaattttatttttatgccctacttaatatttgcatcagtataatatatatcagtgagtcttacagaaagatatgcttccataatatgaaatagattattcaataattgagaaactttatgtgtaatcatgagagtataagaatctggattatctaacattgttagccctgtgtatgtacagttcaaaaagttcatttataaaagtagtttcctgttcctagtgtgatgtatcacaaattgtgctgaggttattttagtatgtgtgtttcattcccgtgcttctgttctgaagtcctggaatacagttttcagtgtaattaattcaactgcacttaacactaatgtccgtgttggtatagaaatgtctaaatcctatactctagttgaggaagatcttccataattttatggtattacacagggaaagctatgactgcaggatcagtctaactatactattaggtgcatgtattctcttttcactaacttatacttgtctatctagaatacaggtcttccagtcagctggtcatttaccaggtgtggacttaagttgctaggcttgcagtaagaattgccagccactcattgtgcgggtctgcgtggagctttaatcagaaaaagcctccactttctgtattatgttaacattggctcatgcatataactatctgctgctgatgtagttctccatcttcaagatttagagtgggttaaccaggtcattacatcttaatttaataacaagcattactgtagagtgattgtgtatagatctgttagctgtcagggtgtgttttttttaacctgttgtgtgcgtgtgggggttaggattagtaaggtgaactgttcaggaattctctgcactagctgtgcagaagagcagataactagcgctgctctggcattaatcccaggaaccactagcagtagtggggcgccgccaatctaacatgagcacaggtgcttcatgacaaacattactagcatgttcaactgcaccatgttctggcactgtattttgaatgacattaatttattaaataaattgtatatattcaa

SEQ ID NO: 145201 - DNA, 593 bp, Homo sapiens
  Payload ID: 8693
  Gene Symbol: KBTBD2
  Gene Name: kelch repeat and BTB (POZ) domain containing 2
  ENST ID: ENST00000424468
  CDS Start-End: 581-593
gcattgcagcacacaacggaaggcttcagacgctggagctgccgtccgcacccagatgtctctctctcccttttcccctaacctcccccaactgcgggcccttttgggtgctgctctgacttcttccttggccttgggaaaagccgaagcggctctggagagaggagggcatggtttggagaagaggtgctgcggcaacaaagcgacccgcccaacgcctcctcaactttctcctgcccccgttactccacaggatccgctgaacataggatgttgccacaaaatctacctcgtgtatttttctctttcactcatgagctgcacaattgcagatttgagcacaatgtctgcagactgtgttgaaaaactctgaagaacctaattaacacaggatgacctaggagtgattctaagtctgtgtaacaagatattactcattagtgaatgtgtcagtcttggtactgaatgctgcagataacagcaagtaggttctcctttatttctgaagtattcacttgaccttccatcagtaagacggacttttctaatctgttcctggagatattaatggaatacagtcatgtccactcaag

SEQ ID NO: 145202 - DNA, 537 bp, Homo sapiens
  Payload ID: 8693
  Gene Symbol: KBTBD2
  Gene Name: kelch repeat and BTB (POZ) domain containing 2
  ENST ID: ENST00000452926
  CDS Start-End: 395-537
aattgttttggctttccggtggcatccggcagaggaaaagggcgggggcagctagattactccacaggatccgctgaacataggatgttgccacaaaatctacctcgtgtatttttctctttcactcatgagctgcacaattgcagatttgagcacaatgtctgcagactgtgttgaaaaactctgaagaacctaattaacacaggatgacctaggagtgattctaagtctgtgtaacaagatattactcattagtgaatgtgtcagtcttggtactgaatgctgcagataacagcaagtaggttctcctttatttctgaagtattcacttgaccttccatcagtaagacggacttttctaatctgttcctggagatattaatggaatacagtcatgtccactcaagacgagaggcagatcaatactgaatatgctgtgtcattgttggaacagttgaaactgttttatgaacagcagttgtttactgacatagtgttaattgttgagggcactgaattcccttgtcataagatggt

SEQ ID NO: 145203 - DNA, 724 bp, Homo sapiens
  Payload ID: 8693
  Gene Symbol: KBTBD2
  Gene Name: kelch repeat and BTB (POZ) domain containing 2
  ENST ID: ENST00000453627
  CDS Start-End: 636-724
attcccagtgtttttctcttttgtaatctttataggtggccaaattacaattctagacaatgagatgtttgtggaagtctgctgagtttgggagatgtagtatcctgagaaagctttcactttcctgaagaaaaaaaagaccatggatggtggaagccaccccctttcccctcttcttgccttgaacaaaggtgcgaaggctaaaactgctgcagccatattgcaaccatgaagtcaatgtcgagagaatcacagaaatgatggccctgctgttcttgagctattgaaccaacaaagttactccacaggatccgctgaacataggatgttgccacaaaatctacctcgtgtatttttctctttcactcatgagctgcacaattgcagatttgagcacaatgtctgcagactgtgttgaaaaactctgaagaacctaattaacacaggatgacctaggagtgattctaagtctgtgtaacaagatattactcattagtgaatgtgtcagtcttggtactgaatgctgcagataacagcaagtaggttctcctttatttctgaagtattcacttgaccttccatcagtaagacggacttttctaatctgttcctggagatattaatggaatacagtcatgtccactcaagacgagaggcagatcaatactgaatatgctgtgtcattgttggaacagttgaaactgttttatgaacagcagttgtt

SEQ ID NO: 145204 - DNA, 556 bp, Homo sapiens
  Payload ID: 8693
  Gene Symbol: KBTBD2
  Gene Name: kelch repeat and BTB (POZ) domain containing 2
  ENST ID: ENST00000423022
  CDS Start-End: 516-556
aaagactcgcgacgtgttcgcgacatggtgggccgaaggaggacacccccttccttctgtattccccccgcgtacatctgaactaaccaagagaggtctagacgaacagagctcctgttatggtctatatcgacttaaaaaagaaagcagaaactgccctttgaaacggaaaattgtttactccacaggatccgctgaacataggatgttgccacaaaatctacctcgtgtatttttctctttcactcatgagctgcacaattgcagatttgagcacaatgtctgcagactgtgttgaaaaactctgaagaacctaattaacacaggatgacctaggagtgattctaagtctgtgtaacaagatattactcattagtgaatgtgtcagtcttggtactgaatgctgcagataacagcaagtaggttctcctttatttctgaagtattcacttgaccttccatcagtaagacggacttttctaatctgttcctggagatattaatggaatacagtcatgtccactcaagacgagaggcagatcaatactgaatatgc

SEQ ID NO: 145205 - DNA, 1196 bp, Homo sapiens
  Payload ID: 8693
  Gene Symbol: KBTBD2
  Gene Name: kelch repeat and BTB (POZ) domain containing 2
  ENST ID: ENST00000621876
  CDS Start-End: 69-1073
cacttgaccttccatcagtaagacggacttttctaatctgttcctggagatattaatggaatacagtcatgtccactcaagacgagaggcagatcaatactgaatatgctgtgtcattgttggaacagttgaaactgttttatgaacagcagttgtttactgacatagtgttaattgttgagggcactgaattcccttgtcataagatggttcttgcaacatgtagctcttatttcagggccatgtttatgagtggactaagtgaaagcaaacaaacccatgtacacctgaggaatgtcgatgctgccaccttacagataataataacttatgcatacacgggtaacttggcaatgaatgacagcactgtagaacagctttatgaaacagcttgcttcctacaggtagaagatgtgttacaacgttgtcgagaatatttaattaaaaaaataaatgcagagaattgtgtacgattgttgagttttgctgatctcttcagttgtgaggaattaaaacagagtgctaaaagaatggtggagcacaagttcactgctgtgtatcatcaggacgcgttcatgcagctgtcacatgacctactgatagatattctcagtagtgacaatttaaatgtagaaaaggaagaaaccgttcgagaagctgctatgctgtggctagagtataacacagaatcacgatcccagtatttgtcttctgttcttagccaaatcagaattgatgcactttcagaagtaacacagagagcttggtttcaaggtctgccacccaatgataagtcagtggtggttcaaggtctgtataagtccatgcccaagtttttcaaaccaagacttgggatgactaaagaggaaatgatgattttcattgaagcatcttcagaaaatccttgtagtctttactcttctgtctgttacagcccccaagcagaaaaagtttacaagttatgtagcccaccagctgatttgcataaggttgggaccgttgtaactcctgataatgatatctacatagcagggggtcaagttcctctgaaacacaaaaacaaatcacagtaaaacaagcaaacttcagactgccttcagaactgtgaattgcttttattggtttgatgcacagcaaaatacctggtttccaaagaccccaatgctttttgtccgcataaagccatctttggtttg

SEQ ID NO: 145206 - DNA, 3396 bp, Homo sapiens
  Payload ID: 8694
  Gene Symbol: KBTBD3
  Gene Name: kelch repeat and BTB (POZ) domain containing 3
  ENST ID: ENST00000534815
  CDS Start-End: 43-1644
ggagactggggtggagacttcggagactgcagttgcagggctatgtttgaagtaaacatgaaagaaagagatgatggaagtgttaccattactaatttgtcctccaaggcagtaaaagcatttctcgattatgcctatactggaaaaacaaaaataacagatgataatgtggaaatgttcttccagttgtcatcatttcttcaagtttccttcctatccaaagcttgcagtgactttttaataaaaagtattaatcttgtcaattgtttacagttattatctatatcagatagctatggctccaccagtttgtttgatcatgcattacactttgtacaacatcacttttctttattatttaaatccagtgatttcttagagatgaattttggagtactacagaaatgtctggaatcagatgaattaaatgttcctgaagaagaaatggtactgaaagttgtccttagttggactaaacataacttagaatcaaggcaaaagtatctgcctcatttgattgaaaaagtgagattacatcagttatctgaggagacacttcaggactgtctgttcaatgaagagagtttactcaaaagcacaaactgttttgacataatcatggatgcaattaagtgtgtgcaaggttctggtggactcttccctgatgctcgaccatccacaactgagaaatacatattcattcacaaaactgaggaaaatggagaaaatcaatatacattttgctataacattaaatctgattcatggaaaatactgccgcaatcacacctgattgatttgccaggatctagtctttcgagttacggagagaaaatattcttgacaggtggttgcaaagggaaatgttgtcgaacggttcgactgcatattgccgagtcatatcatgatgccactgatcaaacctggtgctactgtccagtgaaaaatgatttcttcttggtatcaactatgaaaacaccaagaaccatgcatacatcagttatggctctcgatagattatttgtcataggtggaaaaactagaggatcccgggacattaaaagtctcttagatgttgaatcttacaatcctctttccaaagaatggatatctgttagcccattacccagaggcatatactatccagaagcaagcacatgccaaaatgtaatttatgttcttggatcagaggtagagattacagatgcttttaacccatcacttgattgcttttttaaatacaatgctacaactgatcagtggtctgaactagtagcagagtttgggcaattttttcatgcaacattaattaaagctgtaccagtaaactgtacactgtatatatgtgacctttccacctataaggtttatagtttttgtccagacacttgtgtttggaaaggcgaaggatcttttgagtgtgcaggctttaatgcaggtgcaattggaattgaagataaaatttatatattaggtggtgattatgcaccagatgaaatcacagatgaagtgcaggtctaccacagcaacaggtctgaatgggaagaagtttcaccaatgcctagagccttaacagaattttactgccaggtgattcagtttaataaatacagagacccatggttttctaatctatgtgcttgaacattctaaaacgagtccagttctagtaacctaaagtaaatttgttaaccaaaatgataggtaaaaagatctatacatcttaatgaaataaaacattcctgcttttagttattatgtatgtacaccatatatgaataaacagtttccaaaaacttaaaatacaaaatatattttaccaaaaattatactgaatataatttaaccttggggaatccagaatacttagtattttcacatgaaactacaaatcatagactctgacactttgatttttaaagtactctgtccataaaagatttgtactgtttagatgggagaaacctctagagagagtaaaaatgaattacactgtatcttatatgaagtaaaaaataaatcagaggtgagaatattgttactgcgggtatgagttgttgaattcctatcatttgtgatgattggttaacttcttttaggtaccctttttacccttttttagttcagaaataattctcccagctttataaatagtacactaaacatagtttaactttttttaatgactcattttttcattaaaagcataatgtaccatgttataatgccattagcagttacttaaatgctttaaaaattgctgattagttttcaatgtcagttggtttcaatttctagctctctctctctctctcctccccccctctcattttctggttcaatcttagtaaattaacattctggatttaattagtagttctaagttacacctggcctgagtttatgttaacatgtaaccctcaattggaaatttttggattctgggatggcagtactaaaatactttttatgtatcattgctaggttccagcctaattaaggacatagaaaattgacctctaattaagtggatcattattatggcatttcttaagctttatccaaatttcagctacataaaacatttcaggatttaaattagtaccatatcaattttctgtgatgatgtataccaactataaagcactatgttggtttactacttcagtaaattattcttagtgaattattttctaaattaaaaaaaatgacttggcttttggtattgataatagtattcacaacctgcatctgttaagatgtttgatctttaacccacacaatgtaagggtactgttgtcattgttctcaggtaggtgattctgccttccaagagtatatgtttctttaatcagtttaaaagataaaggcattttgggttttaagacccctgctttacatctcaggtaatgtgtagattgtacttctctggaaccaaatgtagttttctacactcagttgtaaatgttaatctttctcaaatgtgcacattctttaaaagtgtgttcctaagtagaaatacacctaaatgaagattctcttattttatcatataaatttatgcaacgataagttccaaatgtatttttcaaaacagaatggaatatcagagtacattttcatgaagtttaaaaatcaaggactgttcctgattagatgacgtatttattggtggccttcttatctaagcacatgagtagttggctctgaactttgtgtatttgaaaaaggaaaattcagtggaggcttttgtttgtgtgtgtgtggctttgaaaacaaattatttgagaaagaccataacacagtgagtagcctatatgtgcatttactgaattgttaatttaaggatatatattaatagagtatgtttaaaataaatattgttttcatcactga

SEQ ID NO: 145207 - DNA, 2682 bp, Homo sapiens
  Payload ID: 8694
  Gene Symbol: KBTBD3
  Gene Name: kelch repeat and BTB (POZ) domain containing 3
  Uniprot ID: Q8NAB2
  ENST ID: ENST00000531837
  CDS Start-End: 668-2506
agcgcacgccctccatggatggcaccaagcagaaccgtttggcagggaaaaccatacactgaaagcggacctcgccgctatctcgggcctgatggcgcggacgcaaacgtggccccacccccttcttcccggcgtccgtgcgcaggggacgggccgtcgctacgcagactggcccaccgacagccctcccagcccgcccccgactcagccacctcctctcggagaaagcagctgggggcggagacggagatcagccctgcgctttgcggcattgtatgacgtcaagtaggcgaggcttcggaggcgagcgaagggcgggaccaaggccaagagcccgacagttacgccactcacacttgcggaagagttaacgggacagcggtgcaggccaatcgcaaccagtcctctggaggcagggagactggggtggagacttcggagactgcagttgcagttgttccgtgtaggctgttgttgactctcgtatgaaagcccacgcgatccaagtgccctgcaggttttggtccagggaaaagttggtctctgcagatgactgtaaatgactacctggaggtcgattaaagtgcggtactgcgggattcagccgatttccttcttcctctgactgcccggaaatatcagccaaaggccagcgttctaaggacatatggaattggctatggataattcatatgctttcaatcaacgaagcacatgtaatggaattccatctgagaagaaaaacaacttccttgtatcagaagatcatggacaaaaaatcttaagtgtactacagaattttagagaacaaaatgtcttttatgatttcaaaataattatgaaagatgaaataatcccgtgtcatcgttgtgtgttagcagcatgcagtgactttttcagggctatgtttgaagtaaacatgaaagaaagagatgatggaagtgttaccattactaatttgtcctccaaggcagtaaaagcatttctcgattatgcctatactggaaaaacaaaaataacagatgataatgtggaaatgttcttccagttgtcatcatttcttcaagtttccttcctatccaaagcttgcagtgactttttaataaaaagtattaatcttgtcaattgtttacagttattatctatatcagatagctatggctccaccagtttgtttgatcatgcattacactttgtacaacatcacttttctttattatttaaatccagtgatttcttagagatgaattttggagtactacagaaatgtctggaatcagatgaattaaatgttcctgaagaagaaatggtactgaaagttgtccttagttggactaaacataacttagaatcaaggcaaaagtatctgcctcatttgattgaaaaagtgagattacatcagttatctgaggagacacttcaggactgtctgttcaatgaagagagtttactcaaaagcacaaactgttttgacataatcatggatgcaattaagtgtgtgcaaggttctggtggactcttccctgatgctcgaccatccacaactgagaaatacatattcattcacaaaactgaggaaaatggagaaaatcaatatacattttgctataacattaaatctgattcatggaaaatactgccgcaatcacacctgattgatttgccaggatctagtctttcgagttacggagagaaaatattcttgacaggtggttgcaaagggaaatgttgtcgaacggttcgactgcatattgccgagtcatatcatgatgccactgatcaaacctggtgctactgtccagtgaaaaatgatttcttcttggtatcaactatgaaaacaccaagaaccatgcatacatcagttatggctctcgatagattatttgtcataggtggaaaaactagaggatcccgggacattaaaagtctcttagatgttgaatcttacaatcctctttccaaagaatggatatctgttagcccattacccagaggcatatactatccagaagcaagcacatgccaaaatgtaatttatgttcttggatcagaggtagagattacagatgcttttaacccatcacttgattgcttttttaaatacaatgctacaactgatcagtggtctgaactagtagcagagtttgggcaattttttcatgcaacattaattaaagctgtaccagtaaactgtacactgtatatatgtgacctttccacctataaggtttatagtttttgtccagacacttgtgtttggaaaggcgaaggatcttttgagtgtgcaggctttaatgcaggtgcaattggaattgaagataaaatttatatattaggtggtgattatgcaccagatgaaatcacagatgaagtgcaggtctaccacagcaacaggtctgaatgggaagaagtttcaccaatgcctagagccttaacagaattttactgccaggtgattcagtttaataaatacagagacccatggttttctaatctatgtgcttgaacattctaaaacgagtccagttctagtaacctaaagtaaatttgttaaccaaaatgataggtaaaaagatctatacatcttaatgaaataaaacattcctgcttttagttattatgtatgtacaccatatatgaataaacagtttccaaaaacttaaaatacaaaatatattttac

SEQ ID NO: 145208 - DNA, 297 bp, Homo sapiens
  Payload ID: 8694
  Gene Symbol: KBTBD3
  Gene Name: kelch repeat and BTB (POZ) domain containing 3
  ENST ID: ENST00000532662
  CDS Start-End: 199-297
gtgtaggctgttgttgactctcgtatgaaagcccacgcgatccaagtgccctgcaggttttggtccagggaaaagttggtctctgcagatgactgtaaatgactacctggaggtcgattaaagtgcggtactgcgggattcagccgatttccttcttcctctgactgcccggaaatatcagccaaaggccagcgggctatgtttgaagtaaacatgaaagaaagagatgatggaagtgttaccattactaatttgtcctccaaggcagtaaaagcatttctcgattatgcctatact

SEQ ID NO: 145209 - DNA, 3751 bp, Homo sapiens
  Payload ID: 8694
  Gene Symbol: KBTBD3
  Gene Name: kelch repeat and BTB (POZ) domain containing 3
  Uniprot ID: Q8NAB2
  ENST ID: ENST00000526793
  CDS Start-End: 161-1999
agcgaagggcgggaccaaggccaagagcccgacagttacgccactcacacttgcggaagagttaacgggacagcggtgcaggccaatcgcaaccagtcctctggaggcagggagactggggtggagacttcggagactgcagttgcagttctaaggacatatggaattggctatggataattcatatgctttcaatcaacgaagcacatgtaatggaattccatctgagaagaaaaacaacttccttgtatcagaagatcatggacaaaaaatcttaagtgtactacagaattttagagaacaaaatgtcttttatgatttcaaaataattatgaaagatgaaataatcccgtgtcatcgttgtgtgttagcagcatgcagtgactttttcagggctatgtttgaagtaaacatgaaagaaagagatgatggaagtgttaccattactaatttgtcctccaaggcagtaaaagcatttctcgattatgcctatactggaaaaacaaaaataacagatgataatgtggaaatgttcttccagttgtcatcatttcttcaagtttccttcctatccaaagcttgcagtgactttttaataaaaagtattaatcttgtcaattgtttacagttattatctatatcagatagctatggctccaccagtttgtttgatcatgcattacactttgtacaacatcacttttctttattatttaaatccagtgatttcttagagatgaattttggagtactacagaaatgtctggaatcagatgaattaaatgttcctgaagaagaaatggtactgaaagttgtccttagttggactaaacataacttagaatcaaggcaaaagtatctgcctcatttgattgaaaaagtgagattacatcagttatctgaggagacacttcaggactgtctgttcaatgaagagagtttactcaaaagcacaaactgttttgacataatcatggatgcaattaagtgtgtgcaaggttctggtggactcttccctgatgctcgaccatccacaactgagaaatacatattcattcacaaaactgaggaaaatggagaaaatcaatatacattttgctataacattaaatctgattcatggaaaatactgccgcaatcacacctgattgatttgccaggatctagtctttcgagttacggagagaaaatattcttgacaggtggttgcaaagggaaatgttgtcgaacggttcgactgcatattgccgagtcatatcatgatgccactgatcaaacctggtgctactgtccagtgaaaaatgatttcttcttggtatcaactatgaaaacaccaagaaccatgcatacatcagttatggctctcgatagattatttgtcataggtggaaaaactagaggatcccgggacattaaaagtctcttagatgttgaatcttacaatcctctttccaaagaatggatatctgttagcccattacccagaggcatatactatccagaagcaagcacatgccaaaatgtaatttatgttcttggatcagaggtagagattacagatgcttttaacccatcacttgattgcttttttaaatacaatgctacaactgatcagtggtctgaactagtagcagagtttgggcaattttttcatgcaacattaattaaagctgtaccagtaaactgtacactgtatatatgtgacctttccacctataaggtttatagtttttgtccagacacttgtgtttggaaaggcgaaggatcttttgagtgtgcaggctttaatgcaggtgcaattggaattgaagataaaatttatatattaggtggtgattatgcaccagatgaaatcacagatgaagtgcaggtctaccacagcaacaggtctgaatgggaagaagtttcaccaatgcctagagccttaacagaattttactgccaggtgattcagtttaataaatacagagacccatggttttctaatctatgtgcttgaacattctaaaacgagtccagttctagtaacctaaagtaaatttgttaaccaaaatgataggtaaaaagatctatacatcttaatgaaataaaacattcctgcttttagttattatgtatgtacaccatatatgaataaacagtttccaaaaacttaaaatacaaaatatattttaccaaaaattatactgaatataatttaaccttggggaatccagaatacttagtattttcacatgaaactacaaatcatagactctgacactttgatttttaaagtactctgtccataaaagatttgtactgtttagatgggagaaacctctagagagagtaaaaatgaattacactgtatcttatatgaagtaaaaaataaatcagaggtgagaatattgttactgcgggtatgagttgttgaattcctatcatttgtgatgattggttaacttcttttaggtaccctttttacccttttttagttcagaaataattctcccagctttataaatagtacactaaacatagtttaactttttttaatgactcattttttcattaaaagcataatgtaccatgttataatgccattagcagttacttaaatgctttaaaaattgctgattagttttcaatgtcagttggtttcaatttctagctctctctctctctctcctccccccctctcattttctggttcaatcttagtaaattaacattctggatttaattagtagttctaagttacacctggcctgagtttatgttaacatgtaaccctcaattggaaatttttggattctgggatggcagtactaaaatactttttatgtatcattgctaggttccagcctaattaaggacatagaaaattgacctctaattaagtggatcattattatggcatttcttaagctttatccaaatttcagctacataaaacatttcaggatttaaattagtaccatatcaattttctgtgatgatgtataccaactataaagcactatgttggtttactacttcagtaaattattcttagtgaattattttctaaattaaaaaaaatgacttggcttttggtattgataatagtattcacaacctgcatctgttaagatgtttgatctttaacccacacaatgtaagggtactgttgtcattgttctcaggtaggtgattctgccttccaagagtatatgtttctttaatcagtttaaaagataaaggcattttgggttttaagacccctgctttacatctcaggtaatgtgtagattgtacttctctggaaccaaatgtagttttctacactcagttgtaaatgttaatctttctcaaatgtgcacattctttaaaagtgtgttcctaagtagaaatacacctaaatgaagattctcttattttatcatataaatttatgcaacgataagttccaaatgtatttttcaaaacagaatggaatatcagagtacattttcatgaagtttaaaaatcaaggactgttcctgattagatgacgtatttattggtggccttcttatctaagcacatgagtagttggctctgaactttgtgtatttgaaaaaggaaaattcagtggaggcttttgtttgtgtgtgtgtggctttgaaaacaaattatttgagaaagaccataacacagtgagtagcctatatgtgcatttactgaattgttaatttaaggatatatattaatagagtatgtttaaaataaatattgttttcatcactga

SEQ ID NO: 145210 - DNA, 874 bp, Homo sapiens
  Payload ID: 8694
  Gene Symbol: KBTBD3
  Gene Name: kelch repeat and BTB (POZ) domain containing 3
  ENST ID: ENST00000531482
  CDS Start-End: 15-290
agttctaaggacatatggaattggctatggataattcatatgctttcaatcaacgaagcacatgtaatggaattccatctgagaagaaaaacaacttccttgtatcagaagatcatggacaaaaaatcttaagtgtactacagaattttagagaacaaaatgtcttttatgatttcaaaataattatgaaagatgaaataatcccgtgtcatcgttgtgtgttagcagcatgcagtgactttttcaggtcttcccaggtcagcatttcccaaagttctctggaacattaatcccttgaactacgctgggacagaagaaatttttttgatggtgtcagctttgtttgggggatccctgtgttgtattattttagaaaaagaagacgacaggttgaacaaaaatggaagcaaaatttgaagaaaataactctgcgagaaaagaaaatttccgtcctgtgttgtattcatgtattacggggagaggagggtctaaccgatttaaaaatttatcctctccttagcaaattcatcctctccttatattagggaaaagtacttcttagctataaggcatttcttgaaagctctcagcttgttctaattctaagcaaccttctgaatataatttggtttcccatgtagatcaccctaaagagaatgtcctattcataacactgcagtaatcactatgatgacagcagatttccatttctgcgaagttaagggtcagacacatgaccttgcaattactgtgttaattgtatcaaggtagtactatcctgtgaggcttcttggtcaatagacaagccccttttggtgaaaccctgatcttcagccttcctagttatactacaataaacttaaatcctaattgc

SEQ ID NO: 145211 - DNA, 2460 bp, Homo sapiens
  Payload ID: 8695
  Gene Symbol: KBTBD4
  Gene Name: kelch repeat and BTB (POZ) domain containing 4
  Uniprot ID: Q9NVX7
  ENST ID: ENST00000395288
  CDS Start-End: 172-1728
gaggttccgggctccgggatgaaaggagggaacgcaggtgagaaagcgagacaggcaggtagggaaatcgtgaggtgagcgtggtcctagctccttgtggcagagcctagagagaaggcgaggacgctgaagaaccaggcggacagctggcagagagagaagttggctagcatggaatcaccagaggagcctggagcatccatggatgagaactactttgtgaactacactttcaaagatcggtcacattcaggccgtgtggctcaaggcatcatgaaactgtgtctagaggaggagctctttgctgatgtcaccatttcggtggaaggccgggagtttcagctccatcggctggtcctctcagctcagagctgcttcttccgatccatgttcacttccaacctgaaggaggcccacaaccgggtgattgtgctgcaggatgtcagcgagtctgttttccagctcctggttgattatatctaccatgggactgtgaaacttcgagctgaggagttgcaggaaatttatgaggtgtcagacatgtatcagctgacatctctctttgaggaatgctctcggtttttggcccgcacagtgcaagtgggaaactgccttcaggtgatgtggctggcagatcggcacagtgatcctgagctctatacggctgccaagcactgtgccaagacccacctggcccagctgcagaatacagaggaatttctccacttgccccaccgcttactcacagatatcatctcggatggagttccgtgttctcagaacccaacagaggcaatagaagcctggatcaactttaataaagaggaaagagaggcttttgcagagtcactcaggacaagcttgaaggaaattggggagaatgtgcacatttacctgattgggaaagagtcatctcgtacccactcgttggctgtgtccttgcactgtgcagaagatgactccatcagtgtaagtggccaaaacagtttgtgccaccagatcactgcggcctgcaagcatggtggagacttgtatgtggtgggagggtccatcccacggcgcatgtggaagtgcaacaatgccaccgttgactgggagtggtgtgctcctttgcctcgggaccggctccagcacaccctggtgtctgtgcccgggaaagatgccatatattcactgggtggcaagacactgcaagataccctctccaacgcagtcatttattatcgcgtaggtgataatgtgtggacagagacaactcagctagaggtggctgtgtcaggggctgctggtgccaacctcaacgggatcatctacttactagggggggaggagaatgatctggacttctttaccaaaccttcccgactcatccagtgctttgacacagagacagacaaatgccatgtgaagccctatgtgctgccctttgcaggccgcatgcacgcagctgtgcataaagatctggtgttcatcgtggctgaaggggactccctggtgtgctacaatcccttgctagacagcttcacccggctttgccttcctgaggcctggagctctgccccatccctctggaagattgccagctgtaacgggagcatctatgtcttccgggaccgatataaaaagggggatgccaacacctacaagcttgaccctgccacttcagccgtaactgtcacaagaggtattaaggtgctgcttaccaatttgcagtttgtgttggcctaaggctgtggggaggggaggagaactgctcactccttttccctccccatacaaactcaaagtcccctgggccccaattcagagttatgttttttttggcacatactagaaaggcagtgcctcagcccttccctgaatccatggaggtgttctgtttggggctttttagactgctgctgctcagctggttgcttgaactgacagtaggccagcctgttctctgccattccctagtcatcctgtgcctcaccacagcttgcttagagcaagccttttctcagaccttaggcacagcctctcctctttacctgatcaatgttaaatgtaagcacccctgatcccaggacataaggaaagatgcccaattgtacttttgttctatagcctgtgaaatggctagttgatcatttttccacaaagaattaggtgttaagagttttccttcaggctttacttaggagaatggactaagctgaaggtgtacttcaccagcaagagtcaactctagaattcaggatgttccttctattgttttcttatccatctgtcaggaaatgtaactttggttttatttttggcttattccaaggggtaagccagaaaatagaaatgattatttctgattaatagcagaaactttttcaatctcaaatatataaggtgtctgctcttttaaaagctctaagctaagtcaagagctaggaactgttgatacaaataaaagtttttgaaggg

SEQ ID NO: 145212 - DNA, 2372 bp, Homo sapiens
  Payload ID: 8695
  Gene Symbol: KBTBD4
  Gene Name: kelch repeat and BTB (POZ) domain containing 4
  Uniprot ID: Q9NVX7
  ENST ID: ENST00000430070
  CDS Start-End: 65-1669
aagtgtgcagcagatcttcttccgggcggacgtggagccggaagcggaggttccgggctccgggatgaaaggagggaacgcagacagctggcagagagagaagttggctagcatggaatcaccagaggagcctggagcatccatggatgagaactactttgtgaactacactttcaaagatcggtcacattcaggccgtgtggctcaaggcatcatgaaactgtgtctagaggaggagctctttgctgatgtcaccatttcggtggaaggccgggagtttcagctccatcggctggtcctctcagctcagagctgcttcttccgatccatgttcacttccaacctgaaggaggcccacaaccgggtgattgtgctgcaggatgtcagcgagtctgttttccagctcctggttgattatatctaccatgggactgtgaaacttcgagctgaggagttgcaggaaatttatgaggtgtcagacatgtatcagctgacatctctctttgaggaatgctctcggtttttggcccgcacagtgcaagtgggaaactgccttcaggtgatgtggctggcagatcggcacagtgatcctgagctctatacggctgccaagcactgtgccaagacccacctggcccagctgcagaatacagaggaatttctccacttgccccaccgcttactcacagatatcatctcggatggagttccgtgttctcagaacccaacagaggcaatagaagcctggatcaactttaataaagaggaaagagaggcttttgcagagtcactcaggacaagcttgaaggaaattggggagaatgtgcacatttacctgattgggaaagagtcatctcgtacccactcgttggctgtgtccttgcactgtgcagaagatgactccatcagtgtaagtggccaaaacagtttgtgccaccagatcactgcggcctgcaagcatggtggagacttgtatgtggtgggagggtccatcccacggcgcatgtggaagtgcaacaatgccaccgttgactgggagtggtgtgctcctttgcctcgggaccggctccagcacaccctggtgtctgtgcccgggaaagatgccatatattcactgggtggcaagacactgcaagataccctctccaacgcagtcatttattatcgcgtaggtgataatgtgtggacagagacaactcagctagaggtggctgtgtcaggggctgctggtgccaacctcaacgggatcatctacttactagggggggaggagaatgatctggacttctttaccaaaccttcccgactcatccagtgctttgacacagagacagacaaatgccatgtgaagccctatgtgctgccctttgcaggccgcatgcacgcagctgtgcataaagatctggtgttcatcgtggctgaaggggactccctggtgtgctacaatcccttgctagacagcttcacccggctttgccttcctgaggcctggagctctgccccatccctctggaagattgccagctgtaacgggagcatctatgtcttccgggaccgatataaaaagggggatgccaacacctacaagcttgaccctgccacttcagccgtaactgtcacaagaggtattaaggtgctgcttaccaatttgcagtttgtgttggcctaaggctgtggggaggggaggagaactgctcactccttttccctccccatacaaactcaaagtcccctgggccccaattcagagttatgttttttttggcacatactagaaaggcagtgcctcagcccttccctgaatccatggaggtgttctgtttggggctttttagactgctgctgctcagctggttgcttgaactgacagtaggccagcctgttctctgccattccctagtcatcctgtgcctcaccacagcttgcttagagcaagccttttctcagaccttaggcacagcctctcctctttacctgatcaatgttaaatgtaagcacccctgatcccaggacataaggaaagatgcccaattgtacttttgttctatagcctgtgaaatggctagttgatcatttttccacaaagaattaggtgttaagagttttccttcaggctttacttaggagaatggactaagctgaaggtgtacttcaccagcaagagtcaactctagaattcaggatgttccttctattgttttcttatccatctgtcaggaaatgtaactttggttttatttttggcttattccaaggggtaagccagaaaatagaaatgattatttctgattaatagcagaaactttttcaatctcaaatatataaggtgtctgctcttttaaaagctctaagctaagtcaagagctaggaac

SEQ ID NO: 145213 - DNA, 546 bp, Homo sapiens
  Payload ID: 8695
  Gene Symbol: KBTBD4
  Gene Name: kelch repeat and BTB (POZ) domain containing 4
  ENST ID: ENST00000534239
  CDS Start-End: 26-546
ggaagcggaggttccgggctccgggatgaaaggagggaacgcaggttactcaagatggtgttgctttgcagacagctggcagagagagaagttggctagcatggaatcaccagaggagcctggagcatccatggatgagaactactttgtgaactacactttcaaagatcggtcacattcaggccgtgtggctcaaggcatcatgaaactgtgtctagaggaggagctctttgctgatgtcaccatttcggtggaaggccgggagtttcagctccatcggctggtcctctcagctcagagctgcttcttccgatccatgttcacttccaacctgaaggaggcccacaaccgggtgattgtgctgcaggatgtcagcgagtctgttttccagctcctggttgattatatctaccatgggactgtgaaacttcgagctgaggagttgcaggaaatttatgaggtgtcagacatgtatcagctgacatctctctttgaggaatgctctcggtttttggcccgcacagtgcaagtgggaaactgccttca

SEQ ID NO: 145214 - DNA, 2444 bp, Homo sapiens
  Payload ID: 8695
  Gene Symbol: KBTBD4
  Gene Name: kelch repeat and BTB (POZ) domain containing 4
  Uniprot ID: Q9NVX7
  ENST ID: ENST00000526005
  CDS Start-End: 155-1711
ccgggatgaaaggagggaacgcaggtgagaaagcgagacaggcaggtagggaaatcgtgaggtgagcgtggtcctagctccttgtggcagagcctagagagaaggcgaggacgctgaagaaccaggcggctggcagagagagaagttggctagcatggaatcaccagaggagcctggagcatccatggatgagaactactttgtgaactacactttcaaagatcggtcacattcaggccgtgtggctcaaggcatcatgaaactgtgtctagaggaggagctctttgctgatgtcaccatttcggtggaaggccgggagtttcagctccatcggctggtcctctcagctcagagctgcttcttccgatccatgttcacttccaacctgaaggaggcccacaaccgggtgattgtgctgcaggatgtcagcgagtctgttttccagctcctggttgattatatctaccatgggactgtgaaacttcgagctgaggagttgcaggaaatttatgaggtgtcagacatgtatcagctgacatctctctttgaggaatgctctcggtttttggcccgcacagtgcaagtgggaaactgccttcaggtgatgtggctggcagatcggcacagtgatcctgagctctatacggctgccaagcactgtgccaagacccacctggcccagctgcagaatacagaggaatttctccacttgccccaccgcttactcacagatatcatctcggatggagttccgtgttctcagaacccaacagaggcaatagaagcctggatcaactttaataaagaggaaagagaggcttttgcagagtcactcaggacaagcttgaaggaaattggggagaatgtgcacatttacctgattgggaaagagtcatctcgtacccactcgttggctgtgtccttgcactgtgcagaagatgactccatcagtgtaagtggccaaaacagtttgtgccaccagatcactgcggcctgcaagcatggtggagacttgtatgtggtgggagggtccatcccacggcgcatgtggaagtgcaacaatgccaccgttgactgggagtggtgtgctcctttgcctcgggaccggctccagcacaccctggtgtctgtgcccgggaaagatgccatatattcactgggtggcaagacactgcaagataccctctccaacgcagtcatttattatcgcgtaggtgataatgtgtggacagagacaactcagctagaggtggctgtgtcaggggctgctggtgccaacctcaacgggatcatctacttactagggggggaggagaatgatctggacttctttaccaaaccttcccgactcatccagtgctttgacacagagacagacaaatgccatgtgaagccctatgtgctgccctttgcaggccgcatgcacgcagctgtgcataaagatctggtgttcatcgtggctgaaggggactccctggtgtgctacaatcccttgctagacagcttcacccggctttgccttcctgaggcctggagctctgccccatccctctggaagattgccagctgtaacgggagcatctatgtcttccgggaccgatataaaaagggggatgccaacacctacaagcttgaccctgccacttcagccgtaactgtcacaagaggtattaaggtgctgcttaccaatttgcagtttgtgttggcctaaggctgtggggaggggaggagaactgctcactccttttccctccccatacaaactcaaagtcccctgggccccaattcagagttatgttttttttggcacatactagaaaggcagtgcctcagcccttccctgaatccatggaggtgttctgtttggggctttttagactgctgctgctcagctggttgcttgaactgacagtaggccagcctgttctctgccattccctagtcatcctgtgcctcaccacagcttgcttagagcaagccttttctcagaccttaggcacagcctctcctctttacctgatcaatgttaaatgtaagcacccctgatcccaggacataaggaaagatgcccaattgtacttttgttctatagcctgtgaaatggctagttgatcatttttccacaaagaattaggtgttaagagttttccttcaggctttacttaggagaatggactaagctgaaggtgtacttcaccagcaagagtcaactctagaattcaggatgttccttctattgttttcttatccatctgtcaggaaatgtaactttggttttatttttggcttattccaaggggtaagccagaaaatagaaatgattatttctgattaatagcagaaactttttcaatctcaaatatataaggtgtctgctcttttaaaagctctaagctaagtcaagagctaggaactgttgatacaaataaaagtttttgaaggga

SEQ ID NO: 145215 - DNA, 764 bp, Homo sapiens
  Payload ID: 8695
  Gene Symbol: KBTBD4
  Gene Name: kelch repeat and BTB (POZ) domain containing 4
  ENST ID: ENST00000529499
  CDS Start-End: 169-764
aacgcaggtgagaaagcgagacaggcaggtagggaaatcgtgaggtgagcgtggtcctagctccttgtggcagagcctagagagaaggcgaggacgctgaagaaccaggcgggttactcaagatggtgttgctttgcagacagctggcagagagagaagttggctagcatggaatcaccagaggagcctggagcatccatggatgagaactactttgtgaactacactttcaaagatcggtcacattcaggccgtgtggctcaaggcatcatgaaactgtgtctagaggaggagctctttgctgatgtcaccatttcggtggaaggccgggagtttcagctccatcggctggtcctctcagctcagagctgcttcttccgatccatgttcacttccaacctgaaggaggcccacaaccgggtgattgtgctgcaggatgtcagcgagtctgttttccagctcctggttgattatatctaccatgggactgtgaaacttcgagctgaggagttgcaggaaatttatgaggtgtcagacatgtatcagctgacatctctctttgaggaatgctctcggtttttggcccgcacagtgcaagtgggaaactgccttcaggtgatgtggctggcagatcggcacagtgatcctgagctctatacggctgccaagcactgtgccaagacccacctggcccagctgcagaatacagaggaatttctccacttgccccaccgcttactcacagatatcatctcgggtaagtt

SEQ ID NO: 145216 - DNA, 596 bp, Homo sapiens
  Payload ID: 8695
  Gene Symbol: KBTBD4
  Gene Name: kelch repeat and BTB (POZ) domain containing 4
  ENST ID: ENST00000531067
  CDS Start-End: 114-596
ctctgagccaagcttttgacgagggcgggcgggcctgagcgggaagaacggtttccctggcgaccgtttccaagacgactcaagacagctggcagagagagaagttggctagcatggaatcaccagaggagcctggagcatccatggatgagaactactttgtgaactacactttcaaagatcggtcacattcaggccgtgtggctcaaggcatcatgaaactgtgtctagaggaggagctctttgctgatgtcaccatttcggtggaaggccgggagtttcagctccatcggctggtcctctcagctcagagctgcttcttccgatccatgttcacttccaacctgaaggaggcccacaaccgggtgattgtgctgcaggatgtcagcgagtctgttttccagctcctggttgattatatctaccatgggactgtgaaacttcgagctgaggagttgcaggaaatttatgaggtgtcagacatgtatcagctgacatctctctttgaggaatgctctcggtttttggcccgcacagtgcaagtgggaaactgccttcaggtgatgtggctggcagatcggcacagtgatcctgag

SEQ ID NO: 145217 - DNA, 980 bp, Homo sapiens
  Payload ID: 8695
  Gene Symbol: KBTBD4
  Gene Name: kelch repeat and BTB (POZ) domain containing 4
  ENST ID: ENST00000525720
  CDS Start-End: 111-971
ctctgagccaagcttttgacgagggcgggcgggcctgagcgggaagaacggtttccctggcgaccgtttccaagacgactcaaggtggagcggggacattgcacagggtgatgggcctcccagtgccccggcctgggggcggatggactcaagttctgggacgcagccatagggagtctttcgagcgagcggggaagtgtgggggaagcagctcagaagagagcaaatacagctggcagagagagaagttggctagcatggaatcaccagaggagcctggagcatccatggatgagaactactttgtgaactacactttcaaagatcggtcacattcaggccgtgtggctcaaggcatcatgaaactgtgtctagaggaggagctctttgctgatgtcaccatttcggtggaaggccgggagtttcagctccatcggctggtcctctcagctcagagctgcttcttccgatccatgttcacttccaacctgaaggaggcccacaaccgggtgattgtgctgcaggatgtcagcgagtctgttttccagctcctggttgattatatctaccatgggactgtgaaacttcgagctgaggagttgcaggaaatttatgaggtgtcagacatgtatcagctgacatctctctttgaggaatgctctcggtttttggcccgcacagtgcaagtgggaaactgccttcaggtgatgtggctggcagatcggcacagtgatcctgagctctatacggctgccaagcactgtgccaagacccacctggcccagctgcagaatacagaggaatttctccacttgccccaccgcttactcacagatatcatctcggatggagttccgtgttctcagaacccaacagaggcaatagaagcctggatcaactttaataaagaggaaagagaggcttttgcagagtcactcaggacaagcttgaaggtaaggcaaatctcttaattgttgaga

SEQ ID NO: 145218 - DNA, 542 bp, Homo sapiens
  Payload ID: 8695
  Gene Symbol: KBTBD4
  Gene Name: kelch repeat and BTB (POZ) domain containing 4
  ENST ID: ENST00000529946
  CDS Start-End: 66-542
aaggagggaacgcaggtgagaaagcgagacaggcagacagctggcagagagagaagttggctagcatggaatcaccagaggagcctggagcatccatggatgagaactactttgtgaactacactttcaaagatcggtcacattcaggccgtgtggctcaaggcatcatgaaactgtgtctagaggaggagctctttgctgatgtcaccatttcggtggaaggccgggagtttcagctccatcggctggtcctctcagctcagagctgcttcttccgatccatgttcacttccaacctgaaggaggcccacaaccgggtgattgtgctgcaggatgtcagcgagtctgttttccagctcctggttgattatatctaccatgggactgtgaaacttcgagctgaggagttgcaggaaatttatgaggtgtcagacatgtatcagctgacatctctctttgaggaatgctctcggtttttggcccgcacagtgcaagtgggaaactgccttcaggtgatgtggctggcagatcggcacagtgat

SEQ ID NO: 145219 - DNA, 776 bp, Homo sapiens
  Payload ID: 8695
  Gene Symbol: KBTBD4
  Gene Name: kelch repeat and BTB (POZ) domain containing 4
  ENST ID: ENST00000530668
  CDS Start-End: 23-118
agcggaggttccgggctccgggatgaaaggagggaacgcagactatggctgtgaattcctcaggttactcaagatggtgttgctttgcagacagctggcagagagagaagttggctagcatggaatcaccagaggagcctggagcatccatggatgagaactactttgtgaactacactttcaaagatcggtcacattcaggccgtgtggctcaaggcatcatgaaactgtgtctagaggaggagctctttgctgatgtcaccatttcggtggaaggccgggagtttcagctccatcggctggtcctctcagctcagagctgcttcttccgatccatgttcacttccaacctgaaggaggcccacaaccgggtgattgtgctgcaggatgtcagcgagtctgttttccagctcctggttgattatatctaccatgggactgtgaaacttcgagctgaggagttgcaggaaatttatgaggtgtcagacatgtatcagctgacatctctctttgaggaatgctctcggtttttggcccgcacagtgcaagtgggaaactgccttcaggtgatgtggctggcagatcggcacagtgatcctgagctctatacggctgccaagcactgtgccaagacccacctggcccagctgcagaatacagaggaatttctccacttgccccaccgcttactcacagatatcatctcggatggagttccgtgttctcagaacccaacagaggcaatagaagcctggatcaactttaataaagaggaa

SEQ ID NO: 145220 - DNA, 3079 bp, Homo sapiens
  Payload ID: 8695
  Gene Symbol: KBTBD4
  Gene Name: kelch repeat and BTB (POZ) domain containing 4
  ENST ID: ENST00000533290
  CDS Start-End: 716-2347
gctacacacccctcccccgctctctgagccaagcttttgacgagggcgggcgggcctgagcgggaagaacggtttccctggcgaccgtttccaagacgactcaaggtggagcggggacattgcacagggtgatgggcctcccagtgccccggcctgggggcggatggactcaagttctgggacgcagccatagggagtctttcgagcgagcggggaagtgtgggggaagcagctcagaagagagcaaatgtaagacccacggatatcccaggctaggcttcatatggagcgtcttaactccatgcgctgggaaggagaggacctggccactaggccggggccaggggtcctttttgtctgattctactgcccctgagcttcactagttttatgccccagttatttggttagtaaggcttttacgatcacaggcctctcccagccctttgctttcatatattgacctaaatcccaagtcttttgttaacattatggaaaggaattattccgtgttttctcaggaaaacacccagagttggaacttttatttatatcattagcggaggggcgccactggggataacgaacccagatttggttaaaggatagcgtcagggacatcatggacagggccaggactaaggccaatctggacccactttgctctcacttcttccttttccctccctgagttggacagttggattcacagactatggctgtgaattcctcaggttactcaagatggtgttgctttgcagacagctggcagagagagaagttggctagcatggaatcaccagaggagcctggagcatccatggatgagaactactttgtgaactacactttcaaagatcggtcacattcaggccgtgtggctcaaggcatcatgaaactgtgtctagaggaggagctctttgctgatgtcaccatttcggtggaaggccgggagtttcagctccatcggctggtcctctcagctcagagctgcttcttccgatccatgttcacttccaacctgaaggaggcccacaaccgggtgattgtgctgcaggatgtcagcgagtctgttttccagctcctggttgattatatctaccatgggactgtgaaacttcgagctgaggagttgcaggaaatttatgaggtgtcagacatgtatcagctgacatctctctttgaggaatgctctcggtttttggcccgcacagtgcaagtgggaaactgccttcaggtgatgtggctggcagatcggcacagtgatcctgagctctatacggctgccaagcactgtgccaagacccacctggcccagctgcagaatacagaggaatttctccacttgccccaccgcttactcacagatatcatctcggatggagttccgtgttctcagaacccaacagaggcaatagaagcctggatcaactttaataaagaggaaagagaggcttttgcagagtcactcaggacaagcttgaaggaaattggggagaatgtgcacatttacctgattgggaaagagtcatctcgtacccactcgttggctgtgtccttgcactgtgcagaagatgactccatcagtgtaagtggccaaaacagtttgtgccaccagatcactgcggcctgcaagcatggtggagacttgtatgtggtgggagggtccatcccacggcgcatgtggaagtgcaacaatgccaccgttgactgggagtggtgtgctcctttgcctcgggaccggctccagcacaccctggtgtctgtgcccgggaaagatgccatatattcactgggtggcaagacactgcaagataccctctccaacgcagtcatttattatcgcgtaggtgataatgtgtggacagagacaactcagctagaggtggctgtgtcaggggctgctggtgccaacctcaacgggatcatctacttactagggggggaggagaatgatctggacttctttaccaaaccttcccgactcatccagtgctttgacacagagacagacaaatgccatgtgaagccctatgtgctgccctttgcaggccgcatgcacgcagctgtgcataaagatctggtgttcatcgtggctgaaggggactccctggtgtgctacaatcccttgctagacagcttcacccggctttgccttcctgaggcctggagctctgccccatccctctggaagattgccagctgtaacgggagcatctatgtcttccgggaccgatataaaaagggggatgccaacacctacaagcttgaccctgccacttcagccgtaactgtcacaagaggtattaaggtgctgcttaccaatttgcagtttgtgttggcctaaggctgtggggaggggaggagaactgctcactccttttccctccccatacaaactcaaagtcccctgggccccaattcagagttatgttttttttggcacatactagaaaggcagtgcctcagcccttccctgaatccatggaggtgttctgtttggggctttttagactgctgctgctcagctggttgcttgaactgacagtaggccagcctgttctctgccattccctagtcatcctgtgcctcaccacagcttgcttagagcaagccttttctcagaccttaggcacagcctctcctctttacctgatcaatgttaaatgtaagcacccctgatcccaggacataaggaaagatgcccaattgtacttttgttctatagcctgtgaaatggctagttgatcatttttccacaaagaattaggtgttaagagttttccttcaggctttacttaggagaatggactaagctgaaggtgtacttcaccagcaagagtcaactctagaattcaggatgttccttctattgttttcttatccatctgtcaggaaatgtaactttggttttatttttggcttattccaaggggtaagccagaaaatagaaatgattatttctgattaatagcagaaactttttcaatctcaaatatataaggtgtctgctcttttaaaagctctaagctaagtcaagagctaggaactgttgatacaaataaaagtttttgaaggg

SEQ ID NO: 145221 - DNA, 5178 bp, Homo sapiens
  Payload ID: 8696
  Gene Symbol: KBTBD6
  Gene Name: kelch repeat and BTB (POZ) domain containing 6
  Uniprot ID: Q86V97
  ENST ID: ENST00000379485
  CDS Start-End: 236-2260
gtgaaggcgagcagacgcggagaaaggacgcgggagtgagagagggtgagtcagccactgtctaaacgataacgggaggcggttctgcggggtagggttgaattcagtaaatgggctcgtgctgctgtctcttcggagacgctgctatcttagcgtcagcgagggaaggttgaggaggagccagagccgggtcctgcagcgtttctcgccatcagcgcccgtcgccatctccaccatgcagtcccgggaagacgccccgcgctctcgccgcctagccagtccccgtggtgggaagcggcccaagaagattcacaaacccacagtttcggcctttttcacgggtccagaggaattaaaggacacggcccattctgcagccctgctggcacagctcaagtccttctacgatgcgcggctgctgtgtgatgtgaccatcgaggtggtgacgcctggcagcgggcctggcacgggtcgcctgttcccctgcaaccgcaatgtgctggccgcggcatgtccctacttcaagagcatgttcacaggtggcatgtacgagagccagcaggccagcgtgaccatgcacgatgtggacgccgagtccttcgaggtgttggtcgactactgctacacgggtcgtgtgtctctcagtgaggccaacgtggagcgcctgtacgcggcctccgacatgctacagctggaatatgtgcgggaagcctgtgcctccttcttagcccgacgtcttgacctgaccaactgcaccgccatcctcaagtttgcagatgcctttggccatcgcaagctgcgatcccaggcccagtcctatatagctcagaacttcaagcaactcagccacatgggttcaattcgggaggagactctagcagatctgaccctggcccagctgctggctgtcctgcgcttggatagtctggacgtggagagtgagcagacagtgtgccatgtggcagtgcagtggctggaggctgctcccaaagagcggggtcccagtgctgcagaagtcttcaagtgcgtgcgctggatgcacttcactgaagaagatcaggactacttagaagggctgctgaccaagcccatcgtgaagaagtactgcctggacgttattgaaggggccctgcagatgcgctatggtgacctgttgtacaagtctctggtgccagtgccaaacagcagcagcagcagtagcagcagcaactctcttgtatctgcagcagaaaatccaccccagagactgggtatgtgtgccaaggagatggtgatcttctttggacaccccagagatccctttctctgctgtgatccatactcgggggacctttacaaagtgccgtcacctttgacctgtctggctcacactaggactgtcaccactttagctgtctgtatctctcctgaccatgacatctatctagctgctcagcccaggacagacctctgggtgtataaaccagctcagaatagttggcagcaacttgcagatcgcttgctgtgtcgtgagggcatggatgtggcatatctcaatggctatatctacattttgggggggcgagaccctattactggagttaagttgaaggaagtggaatgctacaatgttaagagaaaccagtgggcattggtggctccactgccccattcttttttatcctttgacctaatggtaattcgagactatctctatgctctcaacagtaagcgcatgttctgttatgatcctagccacaatatgtggctgaagtgcgtttctctgaagcgcaatgactttcaggaagcctgcgtcttcaatgaggagatctattgtatctgtgatatcccagtcatgaaggtctacaacccagttagggcagaatggaggcaaatgaataatattcccttggtctcagagaccaacaactacagaattatcaagcatggccaaaaattgttgctcatcacctctcgcaccccacagtggaaaaagaaccgggtgactgtgtatgaatatgatattaggggagaccaatggattaatataggtaccacattaggcctcttgcagtttgattctaactttttttgcctctctgctcgtgtttatccttcctgccttgaacctggtcagagtttcctcactgaagaagaagaaataccaagtgagtctagcactgaatgggacttaggtggattcagtgagccagactctgagtcaggaagttcaagttctctttctgatgatgatttttgggtgcgtgtagcgcctcagtgaaatgcacaggatcaacagggtttgttgtaactagattgaaacactaagttgtttttactgttttggaaaatatcttaaatatcctttttgttcctaaaggagaggaaaagttgattaacttctggtttggtttagaaaaagtaatgtttgaaatacgaaggtaatttaatgttacaaattttaacactcaaatcaaccttttaataattttctgtgctaagggtccagtatttatttgattatttagtatgtttatgtttcatgacactaatttagtcttttgatacattttacattctgtttactgccacaagcactgtggcaataacttttgaattttaatttttataatagaaaaatgattaggaattgctagatagtgttttgaaagcatatctttttcttcagaacaatgtagacttccaaaatggttaacctaaggggtctttacaaaatgtgttataagttaaacataatttgggaagttttacttttgttttcttctatgaagaaaaaaatgcaggctgggcgcggtggctcacgcctgtaatcctagcactttgggaggccgaggcaggtggatcacctgaggtcagttcaagaccagcctggccaacatggtgaaaccccgtctctactaaaaatacaaaaattagctgggcgtggtggcatgcgcctgtaatcccagctacccaggaggctgaggcaggagaattgctgaaacccgggagtcagaggctgcagagagccgagactgggccactgcactccagcctggatgacagagtgagactccgtctcaaaaaaaaaaaaaaaaaaaaaaggaaaaaaaaaaaagaaaaaaaaccatatgtgtattagggtgactgagtggtgacttcatttataataatacagagaatagctataagctcattgacagtaaaaacaacaaaccaggattctactgtttgaaaagaagtttcgttttaattttggaatttagaatgtgtatttgcaaagtcaccaattttcatctaaaaggttatattctagttgtgtcaccaaatcatcaaaaaaccttaaaaaagaagtaacttgctttgtaggtttgtattgttgatctaaacctgatacatgcttcatttaatcaggaataatccttttttttctgctggacatgtataaatttcactggattgtataaatttttatctattgccttaaacatttacatgattctcaatatgttttagctgtacagttttggtgttcatcttagaggattcttcagcagaagtgatatttctttactgttttgtgaggtaatactgattttgaaaatatatataagctaaaaacagtatttcgttgatatcagtagtcattgtgttaactataaagtcaagtgccagcaaagaactttaaaactgtaaagctgtgtatagaactgttttgtgtagcatggaaatattctgtcagctttttaaagtcactaaatgttcttgattatcagcttgaaggtatttttgtattacaagttgacagttgctgggtgtagtggctcatgcctgtaatcctagcaactcggggctgaggtgggaggattgcttcagcccaggagtttgagaccagcctgggcaacatagcaaaaccccatctctacaaaaataaaaaatatgtctgggcatggtggcccaagtctgagtcccagttacttgggaggatcacttgaatgtaggatcacttgagtctaggagttcggggctgcagctatcatctgcagctataatcatagctcactgcagctatgatcatgtctcagcactccagctttggcaacagaacgagatcccatctcttagaaaaacaaagttgatagttaaagaacataagtggatgatggcatttgaggccactagtgaaagtatgttttctctaaaatatttctctaatagtgatataaatggctattttattatgatgtttgtatgtgttttgtatttctctgtaaaccatgctccagtctttgtttttctgttaccataatgtaagagaaggtcctggaacagagactaaatcccacgaaactgacattgttaaacacactaaaacagaagtacttacctcttgaagatttaatatataatggttgacatgatacatgtacatgatgaatgaccagatgcttatggtctacattttcctttatcctgttagtattaccttccttaatctttgttcattaacatgctaattcctcttcagtgtttattttctagtgacagaatgctaacatttcttacaccctggcagaagggagagaaatgtgttttggggtgggtaactaaatttttgagtgaaatatcataagatgagaatggaaagagggagacacaaagagttataacaaaaaaacaatggtttttttagccatttgactggctctttaaatagtctacaagacattcacgtttaacatcacttttagtgaaataaaatgtgccatactagtatgtgcttcaaaagggcaaatgtgctttagtgccctaaggctaaattttggtcatttgacatcagagatgttgtaagtattgcacttaatacgcacctatttctcaatagtgttattttttggctagcattttctttaccactatcttgttgatagctttttgttctctaaggttgaaacatgacagtgcttatctcaaacagattacccatctgcagaactaaggaaagcaatttatgtatgaaagaaattcttgaattcgtcattctcaacctttgaattaaagcttagactaaatagtaatatatcgtgggaaggattttggttttgtgatatttctgtgaattaaggaatagatgttaaccattattttgtagaaaagtgatttgtatgtggttaattataaataaaactggtaccagaa

SEQ ID NO: 145222 - DNA, 4734 bp, Homo sapiens
  Payload ID: 8697
  Gene Symbol: KBTBD7
  Gene Name: kelch repeat and BTB (POZ) domain containing 7
  Uniprot ID: Q8WVZ9
  ENST ID: ENST00000379483
  CDS Start-End: 310-2364
agttctcccgggcgcctagcgggatcgccagcgcggcagtgggggcttccgcggctgcaagccagcgggtcctgtgagggcgagcggaggcggagaaagggcgcgggagtgagagagggtgagtcagccactgtctatgcaataaagggaggcctcaccgcgggatagggctgaattcagaagtgcggcccgtgccgcagtctgttccaggacgcggcttgtcttagcgtcagcgagggaaggttgaggaggagccagagcctggtcctgcagcctttctcgccgtcagcgcccgtcgccatctccaccatgcagtcccgggaagacgtcccgcgctctcgccgcctcgccagtccccgtggtgggaggcggcccaagaggatttccaagccctcggtttcggcctttttcacgggtccagaggagttaaaggacacggcccattctgcagccctgctggcacagctcaagtccttctacgacgcgcggctgctgtgtgatgtgaccatcgaggtggtgacgcctggcagcgggcctggcacgggtcgcctcttttcctgcaatcgcaacgtgctagcagctgcgtgtccctacttcaagagcatgttcacaggtggcatgtacgagagccagcaggccagcgtgaccatgcacgatgtggacgccgagtccttcgaggtgttggtcgactactgctacacgggtcgtgtgtctctcagtgaggccaatgtgcagcgcctgtacgcggcctccgacatgctacagctggaatatgtgcgggaagcctgtgcctccttcttagcccgacgtcttgacctgaccaactgcaccgccatcctcaagtttgcagacgccttcgaccatcacaagcttcgatctcaggcccagtcctacatagctcacaacttcaagcagctcagccgaatgggttcaattcgggaggagactctagcagatctaaccctggcccagctgctggctgtcctacgcctggatagtctggacatagagagtgagcggactgtatgccatgtagctgtgcagtggctggaggctgctgccaaagagcggggtcccagtgctgcagaagtcttcaagtgcgtgcgctggatgcacttcactgaagaagatcaggactacttagaagggctgctgaccaagcccatcgtgaagaagtactgcctggacgttattgaaggggccctgcagatgcgctatggtgacctgttgtacaagtctctggtgccagtgccaaacagcagcagcagcagtagcagcagcaactctcttgtatctgcagcagaaaatccaccccagagactgggtatgtgtgccaaggagatggtgatcttctttggacatcctagagatccctttctctgctatgacccttactcgggggacatttacacaatgccatcccctttgaccagctttgctcacactaagactgtcacctcctcagctgtctgtgtgtccccagaccatgacatctatctagctgctcagcccaggaaagacctctgggtgtataaaccagctcagaatagttggcagcaacttgcagatcgcttgctgtgtcgtgagggcatggatgtggcatatctcaatggctacatctacattttggggggacgagaccctattactggagttaagttgaaggaagtggaatgctacagtgttcagagaaaccagtgggcattggtggctcctgtccctcattccttctattcctttgaactcatagtggttcagaactatctttatgctgtcaacagtaagcgcatgctttgctatgatcctagccacaatatgtggctgaactgtgcttctcttaaacgtagtgactttcaggaagcatgtgtcttcaatgatgaaatctattgtatctgtgacatcccagtcatgaaggtctacaacccagctaggggagaatggaggcggattagtaatattcctttggattcagagacccacaactaccagattgtcaatcatgaccaaaagttgcttctcatcacttctacaaccccacaatggaaaaagaaccgagtgacagtgtatgagtatgatactagggaagatcagtggattaatataggtaccatgttaggccttttgcagtttgactctggctttatttgcctttgtgctcgtgtttatccttcctgccttgaacctggtcagagttttattactgaggaagatgatgcacggagtgagtctagtactgaatgggacttagatggattcagtgagctggactctgagtcaggaagttcaagttctttttcagatgatgaagtctgggtgcaagtagcacctcagcgaaatgcacaggatcagcagggttctttgtaaatagtattttgagacactaagatgtttctactgctacggaatgtattttaaacacatatcgtttctttttcttggaaaaaaagttgattaggaccacagatttggtttagaaagggtaatattttgaaatactacaaggtttagacagtccatgaaatcgacctgtttaataatttaccatcctgaaagtccagaattaaaatatggaagcaagaactatataattgattaggatgcttggtaggtttttttcattgttcaaatattcattgcacagtggattgttttgattagttagtatgctttttttttaattaattcagtcttctgttaatttttaagttttggttagtgccacaaggaatttaactttttgatttgtataatagaaaactgaactaggaattgttagcggggttttgaaggatgtgtactttccttcaaaataaagtggtagattttcaaaattttacactagtcagttctttatattctaagttaaatgtagtttgtaaaattattttggttttcttctacaaaggaaaaaattggatttatatatataaggttactgcataatgatttcattttgataatgtgcagaatggcctcataagctcacagaaagtaaaaaaaaaaaaaaaaaaaaagaaaaaatcaggattccactgttttaaaagaaatctcagtttttattttggaatataaaatgtgtatttggtatatgtgaccaattttctatcccaaaaaacacccattcttagtaatgtcatgaattaaacacccttctaaaccaaaaaaaaaaaaaaaaacggtaacttgctttttatgtttgtgtttttaatttatgcccaatacatgctttactgactcagaggaacaattcctggacatataattgggtaatgcaaatttttatccactggtcatgatttgtcttaaaatgtttacttgcctccctaaaatattttggctgtgtaggtttggtgtttgtcctagaggattcttcaacagaaagtgatttattctttactgttttgtgaggtaatatggtttagaacatatgtataagctaaaaacagtattttactcagatcagtagttatcgtgtctatcagctataaaaaaaatcaactgccagccaagaactttaaaactttaagctgtgtattatagaaccgttttgtgtagcattggaatattgtccattttgtaagtcattgtgaatgttcttaattatcagcttgaaggtatttttgtattaaaagttgacattgaagaacctaagtggatgatgggatttggggccagtagtgaaagtatgtttcctctaaaatatttccctaaacagtggtatacatggttattttattatgagatttgtatatgttctgtgtttctctgtgaacaatgtttcagtctctctgtcaccatatgtaaggggaagtccacaaatatagactacattgcacaaaactaaaattgttaattacaagaaaatataggtgcttaccttttgaaggtttattaatacatatggttgtcacaatacgtatatatgataaatggtgtacatatacagatgtttatggtgtataaatttttctatacccaattagaattatcttcctgattctttattcaataacatgctaattcctcttctatgttctatagtgacagaatgctaacttttcttataccctggcagaggacagaggagtctggtctaggatggggaactgaatttttgaacgaaaaggaaagagaaaggatgaaaaaacaaacaaacaaaaaaacacacgataatgtttcttagtcattttgattggccatttgaacagtctacaagtttaacgttatttccagtgaagtaggatggctgacctagcaatacatgtttcttcaaaagggtaaacatgctttagtgacctaaagctaaattttgtacatttgacatcagggatgttataagtactgcacttaatacaaagctatttctcaattgtgttatttttgagacaaatttttcttcaccattaacttcttgttggtagctttttgttttgtaaaaattgagagatggcaatgcttatctcaaccagattatccatctgcagaattaaggtatgcaactggtaaataaaagacaaatgctccagtttgtctttctcaacctttgagttcttaacctttgagttaaaacctagtctaaatagtgggaatgtcttggtttacagtaaggttttcttgggaaggatcttggttttgtgatctatttgtgaattaaggagtagatgttaaccattattttatagataagtgatttgtacatggttagttataaataaaactggtactagaacccag

SEQ ID NO: 145223 - DNA, 4680 bp, Homo sapiens
  Payload ID: 8698
  Gene Symbol: KBTBD8
  Gene Name: kelch repeat and BTB (POZ) domain containing 8
  Uniprot ID: Q8NFY9
  ENST ID: ENST00000417314
  CDS Start-End: 50-1855
gaaatgacatttcctttttaaatagctggagtcggggccccatcgagaaatggccgcgtcggcagatttaagtaagtcttccccaacaccgaatgggattccatcttcagacccagccagcgatgccatggaccccttccatgcttgcagtattcttaagcaactcaaaacaatgtacgatgaaggacagttgacagacattgtagtggaagtggatcacgggaaaacattttcctgtcatagaaacgttcttgctgcaatcagcccttacttcagatccatgttcactagcggccttacagaaagtactcaaaaagaagttcgaatagttggtgttgaagctgaatcgatggatttagtgttgaactatgcctacacttccagagttattcttacagaggccaatgttcaagccttgttcactgcagctagcatcttccagattccttccatccaagaccaatgtgctaagtatatgatcagtcatttggacccacagaattctattggggtctttatctttgctgatcattatggtcatcaggaactcggagatcgatcaaaagaatacattcgtaaaaagtttctgtgtgtcaccaaagaacaagagtttctccagttgacaaaagaccaactgataagtatactagacagtgacgatttaaatgtagaccgagaagagcatgtttatgaaagcattataaggtggtttgagcatgaacagaatgaaagagaagtgcaccttccagaaatttttgctaaatgcatacgttttcctctgatggaagatacctttatagagaaaattccacctcagtttgcacaggctatagccaaaagctgtgtagaaaagggaccatccaacaccaatggctgtacacagaggcttggaatgactgcttctgaaatgatcatatgttttgatgctgcccacaaacactcaggaaagaagcaaacagtgccttgtctagatatagtcacaggaagggtgtttaaactatgcaaaccaccaaatgacctgagagaagttgggattcttgtatcaccagataatgacatttacattgcaggagggtacaggccaagcagcagtgaggtctccatcgaccataaggcagaaaatgatttctggatgtatgatcattccaccaatagatggctatccaaaccatccttgcttcgagccagaataggctgcaaacttgtctattgctgtggtaaaatgtatgcaatcggaggtcgtgtttatgaaggtgatgggagaaactcactaaaatctgttgagtgctacgacagtagagagaattgttggacgactgtttgcgcgatgccagttgcaatggaatttcataatgctgtggagtacaaagagaagatctatgttttacagggagaattttttctcttctatgagcctcaaaaagactactggggtttcttaacccccatgactgtgcctagaatccagggcttagcagctgtatacaaggactctatctactacatagctggaacctgtggaaatcatcaacgtatgtttactgtagaagcctatgatattgagctaaataaatggactcgtaagaaagactttccatgtgatcagtccataaatccataccttaaactggtacttttccagaacaaactccatttatttgttcgagctactcaagtgactgttgaagaacacgtcttcagaaccagcagaaaaaattccctttaccaatatgatgacattgctgaccagtggatgaaagtgtatgagaccccagatcggctctgggaccttggccggcattttgaatgtgctgttgctaaactgtatcctcagtgtcttcagaaagtactctaaatgagtagcaggccttagtgcatcactggcatctcattcttaggaaacttgtctttgatacaaaagagtgctgacagtatttcagaaagctgagagagttttatacatggaaaatgggtatgcttaaagattgcagggtagggagggattttccttcatccttgtgacatttcatttcagtaaggaaaagataacaaagtgcaattatcagcatttttttttcctggcataaaattaatcatttcattttataattttgtgataaatagtaactgaggtaccagatgaatcaggacaactatgcactcttataagagcatttagggtattattgggtaaagacgtctaaacttgtttgatgtgacttttaattttaaatacgggtaacaatctgaggcaatatcactaggactttagctgtgacctctctaacacagagaagcactaacttagatcctcattcttaatatttatatgtatctatttttgtgtactgttttcaagtgtactgagatttaaatgtgttctattattagagtagatcgaagaaaaaattagtctcagaaagagcttttagtctgattgtttccatttcccatgtaattttaagttaagctaaagttttaaagtggcagttttctgtcgatgactttttcaagtgctaacactgtctcttttgtgaaaatctggaaaagtgctcatattcacaggtggctggtgctagtctaacttaattcatgtgtataactagatggatttaaatggtctgagcctatgcctatctttcaaattggtgtggatttcatggccatagtactttacctgttgaactcttgtgatttcacaagattctctacttatgtgataggagggtatggccagttattcatctaactggactcaatcttagaatagtaggaacattatacccagtttgcactaacatgggccatttgtagcccaaccttctcttccatctacctgtccattcattattggtacaaggaaaggtaacttatttctcttctgcacagagcataatgtgaagttttatacctacttttaaaattctgctttccagaaacaaaattcctgcagtggtctaatttaatgtctttaagtttcatattacaattaaaacctcattttttttttccatttttgcacttaacagtgatgaatacttttacgttggaatcctccttctagctgaaggtgattgaaaaggaaaagagtgagtgaacagaaccatagctttctaggtactaaagcattttttgcatttaactgatgaaatttctaacaatcatcagttaggaatattaacatgaaggataaaccaacttatttgtatacctaaggcaggcatttggatcagtaacatgttttactaagcctagagtaattcgtaaagggtataagcataggacagattttgccctcaatcacaatatttgtattcacttgaaagcaaactggcatggttcgtattttaaaaatcttgcacaaattgtaatgtgatactgtgaaacaaattgaaaacattgcctctttgcatcacatacctcgtttttcagaaactttccaaactgctttacatagacctctacaagtagggaatgttttctgaagcagaagttaaaatggacagcatttctagaattaacattttaaaatctagtcttagctagatatgtggtttcttcttattggtgttgatagtatgtctgtaatctctgtataaactttgtcaacatttttacctccccagttttatcttctgttttgtttttgtttttatcatcatgatgttttggagttattactgtgtattttagaaatcattctttacagttttgcattgctgaggagagagaaaaaacaatttttttgcaagagatgttcatgtaatttatttttgaaagctttgttgaataagatttcctgccgctttttgacaatcttgtgtatttagaaaaatgtattacttgaaaacatgacatagaacattgagttagcaatttacatgggctgtatgttatataagagaatgacatactgtggctaattcaacagtagatttattcttttagcctgcacaacagttgatcttttggctatgacaatttgtatggagggtacgatctaagttaagtgtgtcaaaagcaaggcttaggatttgttatgggagtagaatatatattgaattttgtatgaagaactatttgtttaaattatatagctgggatattttgccactgttaaaatggattcagaagaggtcctagaaaagtaagattagtgacatgtgtgggtttatatttagatatttaaggtgcattttcatagtgtggtaagaccttaagtaaaaggcacaatgggtactacagaattaaaatgtaggtctaacataatgccagttccactttaactttgtttttgcatttgaagaatgtatgtagcactttcctatatatttgtcacacattgaaaactggactgggtataactatgttataggaaagtagaaattgtattctttattttccatctttgttttctgttctacaaagttgatgcttaagcatcaagctgattttattggtcatgagaacaaatggatgtgatcatgaaggaatcagattccctatgtaaagcagtttaaaatggaattcaatgttcagtgctcaggtatgtagtaagtactgtagtcctgtgggggcaaatgtgtagatatttttaaacattttgccataattgcacaattttttgcatttttacctgatgtcattgtttcttataataaaaccttttctgattgaaaa

SEQ ID NO: 145224 - DNA, 568 bp, Homo sapiens
  Payload ID: 8698
  Gene Symbol: KBTBD8
  Gene Name: kelch repeat and BTB (POZ) domain containing 8
  ENST ID: ENST00000484414
  CDS Start-End: 70-568
gaaatgacatttcctttttaaatagctggagtcggggccccatcgagaaatggccgcgtcggcagatccatgttcactagcggccttacagaaagtactcaaaaagaagttcgaatagttggtgttgaagctgaatcgatggatttagtgttgaactatgcctacacttccagagttattcttacagaggccaatgttcaagccttgttcactgcagctagcatcttccagattccttccatccaagaccaatgtgctaagtatatgatcagtcatttggacccacagaattctattggggtctttatctttgctgatcattatggtcatcaggaactcggagatcgatcaaaagaatacattcgtaaaaagtttctgtgtgtcaccaaagaacaagagtttctccagttgacaaaagaccaactgataagtatactagacagtgacgatttaaatgtagaccgagaagagcatgtttatgaaagcattataaggtggtttgagcatgaacagaatgaaagagaagtgcaccttccagaaatttttgctaaatgcatacgttttcctc

SEQ ID NO: 145225 - DNA, 557 bp, Homo sapiens
  Payload ID: 8698
  Gene Symbol: KBTBD8
  Gene Name: kelch repeat and BTB (POZ) domain containing 8
  ENST ID: ENST00000460784
  CDS Start-End: 119-557
gcgatgccgtaactggctcggcacttcttgtagttgtacgatttttctcctcctagatttaagtaagtcttccccaacaccgaatgggattccatcttcagacccagccagcgatgccatggaccccttccatgcttgcagtattcttaagcaactcaaaacaatgtacgatgaaggacagttgacagacattgtagtggaagtggatcacgggaaaacattttcctgtcatagaaacgttcttgctgcaatcagcccttacttcagatccatgttcactagcggccttacagaaagtactcaaaaagaagttcgaatagttggtgttgaagctgaatcgatggatttagtgttgaactatgcctacacttccagagttattcttacagaggccaatgttcaagccttgttcactgcagctagcatcttccagattccttccatccaagaccaatgtgctaagtatatgatcagtcatttggacccacagaattctattggggtctttatctttgctgatcattatggtcatcaggaactcggagatcgatcaaaag

SEQ ID NO: 145226 - DNA, 984 bp, Homo sapiens
  Payload ID: 8698
  Gene Symbol: KBTBD8
  Gene Name: kelch repeat and BTB (POZ) domain containing 8
  Uniprot ID: Q8NFY9
  ENST ID: ENST00000460576
  CDS Start-End: 50-529
gaaatgacatttcctttttaaatagctggagtcggggccccatcgagaaatggccgcgtcggcaggagaattttttctcttctatgagcctcaaaaagactactggggtttcttaacccccatgactgtgcctagaatccagggcttagcagctgtatacaaggactctatctactacatagctggaacctgtggaaatcatcaacgtatgtttactgtagaagcctatgatattgagctaaataaatggactcgtaagaaagactttccatgtgatcagtccataaatccataccttaaactggtacttttccagaacaaactccatttatttgttcgagctactcaagtgactgttgaagaacacgtcttcagaaccagcagaaaaaattccctttaccaatatgatgacattgctgaccagtggatgaaagtgtatgagaccccagatcggctctgggaccttggccggcattttgaatgtgctgttgctaaactgtatcctcagtgtcttcagaaagtactctaaatgagtagcaggccttagtgcatcactggcatctcattcttaggaaacttgtctttgatacaaaagagtgctgacagtatttcagaaagctgagagagttttatacatggaaaatgggtatgcttaaagattgcagggtagggagggattttccttcatccttgtgacatttcatttcagtaaggaaaagataacaaagtgcaattatcagcatttttttttcctggcataaaattaatcatttcattttataattttgtgataaatagtaactgaggtaccagatgaatcaggacaactatgcactcttataagagcatttagggtattattgggtaaagacgtctaaacttgtttgatgtgacttttaattttaaatacgggtaacaatctgaggcaatatcactaggactttagctgtgacctctctaacacagagaagcactaacttagat

SEQ ID NO: 145227 - DNA, 2955 bp, Homo sapiens
  Payload ID: 8699
  Gene Symbol: KEAP1
  Gene Name: kelch-like ECH-associated protein 1
  Uniprot ID: Q14145
  ENST ID: ENST00000171111
  CDS Start-End: 549-2423
gattgcgccactgcactccagcctgggcgtgcagatcagagcgagaccttgtctctaaaggaaaaaaaaaaagaaagaaagaaagaaaagaaaagaaaagaaaacctagcgaggtagataattttccctagatcctgcggccgccggaccacgaggccggcgctgtgcgttgttaaaaggagaatagcagatggtggcgcgcagccccgcgaggagacatccagcaacgaaatcgggagatggaagggacagtgagaaggggggcctggctgtgcgcccccgcccgatgccccactcctcgccgacgggcgccgggcacctgcgggaagggcgggagaatcgccgctcctttcccgccgcgccctttccgccctctccccgcctccttttcgggcgtcccgaggccgctccccaaccgacaaccaagaccccgcaggccacgcagccctggagccgaggccccccgacggcggaggcgcccgcgggtcccctacagccaaggtccctgagtgccagaggtggtggtgttgcttatcttctggaaccccatgcagccagatcccaggcctagcggggctggggcctgctgccgattcctgcccctgcagtcacagtgccctgagggggcaggggacgcggtgatgtacgcctccactgagtgcaaggcggaggtgacgccctcccagcatggcaaccgcaccttcagctacaccctggaggatcataccaagcaggcctttggcatcatgaacgagctgcggctcagccagcagctgtgtgacgtcacactgcaggtcaagtaccaggatgcaccggccgcccagttcatggcccacaaggtggtgctggcctcatccagccctgtcttcaaggccatgttcaccaacgggctgcgggagcagggcatggaggtggtgtccattgagggtatccaccccaaggtcatggagcgcctcattgaattcgcctacacggcctccatctccatgggcgagaagtgtgtcctccacgtcatgaacggtgctgtcatgtaccagatcgacagcgttgtccgtgcctgcagtgacttcctggtgcagcagctggaccccagcaatgccatcggcatcgccaacttcgctgagcagattggctgtgtggagttgcaccagcgtgcccgggagtacatctacatgcattttggggaggtggccaagcaagaggagttcttcaacctgtcccactgccaactggtgaccctcatcagccgggacgacctgaacgtgcgctgcgagtccgaggtcttccacgcctgcatcaactgggtcaagtacgactgcgaacagcgacggttctacgtccaggcgctgctgcgggccgtgcgctgccactcgttgacgccgaacttcctgcagatgcagctgcagaagtgcgagatcctgcagtccgactcccgctgcaaggactacctggtcaagatcttcgaggagctcaccctgcacaagcccacgcaggtgatgccctgccgggcgcccaaggtgggccgcctgatctacaccgcgggcggctacttccgacagtcgctcagctacctggaggcttacaaccccagtgacggcacctggctccggttggcggacctgcaggtgccgcggagcggcctggccggctgcgtggtgggcgggctgttgtacgccgtgggcggcaggaacaactcgcccgacggcaacaccgactccagcgccctggactgttacaaccccatgaccaatcagtggtcgccctgcgcccccatgagcgtgccccgtaaccgcatcggggtgggggtcatcgatggccacatctatgccgtcggcggctcccacggctgcatccaccacaacagtgtggagaggtatgagccagagcgggatgagtggcacttggtggccccaatgctgacacgaaggatcggggtgggcgtggctgtcctcaatcgtctcctttatgccgtggggggctttgacgggacaaaccgccttaattcagctgagtgttactacccagagaggaacgagtggcgaatgatcacagcaatgaacaccatccgaagcggggcaggcgtctgcgtcctgcacaactgtatctatgctgctgggggctatgatggtcaggaccagctgaacagcgtggagcgctacgatgtggaaacagagacgtggactttcgtagcccccatgaagcaccggcgaagtgccctggggatcactgtccaccaggggagaatctacgtccttggaggctatgatggtcacacgttcctggacagtgtggagtgttacgacccagatacagacacctggagcgaggtgacccgaatgacatcgggccggagtggggtgggcgtggctgtcaccatggagccctgccggaagcagattgaccagcagaactgtacctgttgaggcacttttgtttcttgggcaaaaatacagtccaatggggagtatcattgtttttgtacaaaaaccgggactaaaagaaaagacagcactgcaaataacccatcttccgggaagggaggccaggatgcctcagtgttaaaatgacatctcaaaagaagtccaaagcgggaatcatgtgcccctcagcggagccccgggagtgtccaagacagcctggctgggaaagggggtgtggaaagagcaggcttccaggagagaggcccccaaaccctctggccgggtaataggcctgggtcccactcacccatgccggcagctgtcaccatgtgatttattcttggatacctgggagggggccaatgggggcctcagggggaggccccctctggaaatgtggttcccagggatgggcctgtacatagaagccaccggatggcacttccccaccggatggacagttattttgttgataagtaaccctgtaattttccaaggaaaataaagaacagactaactagtgtctttcaccctg

SEQ ID NO: 145228 - DNA, 2648 bp, Homo sapiens
  Payload ID: 8699
  Gene Symbol: KEAP1
  Gene Name: kelch-like ECH-associated protein 1
  Uniprot ID: Q14145
  ENST ID: ENST00000393623
  CDS Start-End: 248-2122
gtgggcgggggtggggagcggcccctcagcggtccctaccgcctgaggccagggcccggggacttttattgtgacacggcgggcgcccggctctgcttagtcatggtgacctgcgcgcgctccgcgcctcccccacgcgcagcgatggaggcgccggggctcgggcggtggaggcggagccggagcgcggccatggcggggtccctgagtgccagaggtggtggtgttgcttatcttctggaaccccatgcagccagatcccaggcctagcggggctggggcctgctgccgattcctgcccctgcagtcacagtgccctgagggggcaggggacgcggtgatgtacgcctccactgagtgcaaggcggaggtgacgccctcccagcatggcaaccgcaccttcagctacaccctggaggatcataccaagcaggcctttggcatcatgaacgagctgcggctcagccagcagctgtgtgacgtcacactgcaggtcaagtaccaggatgcaccggccgcccagttcatggcccacaaggtggtgctggcctcatccagccctgtcttcaaggccatgttcaccaacgggctgcgggagcagggcatggaggtggtgtccattgagggtatccaccccaaggtcatggagcgcctcattgaattcgcctacacggcctccatctccatgggcgagaagtgtgtcctccacgtcatgaacggtgctgtcatgtaccagatcgacagcgttgtccgtgcctgcagtgacttcctggtgcagcagctggaccccagcaatgccatcggcatcgccaacttcgctgagcagattggctgtgtggagttgcaccagcgtgcccgggagtacatctacatgcattttggggaggtggccaagcaagaggagttcttcaacctgtcccactgccaactggtgaccctcatcagccgggacgacctgaacgtgcgctgcgagtccgaggtcttccacgcctgcatcaactgggtcaagtacgactgcgaacagcgacggttctacgtccaggcgctgctgcgggccgtgcgctgccactcgttgacgccgaacttcctgcagatgcagctgcagaagtgcgagatcctgcagtccgactcccgctgcaaggactacctggtcaagatcttcgaggagctcaccctgcacaagcccacgcaggtgatgccctgccgggcgcccaaggtgggccgcctgatctacaccgcgggcggctacttccgacagtcgctcagctacctggaggcttacaaccccagtgacggcacctggctccggttggcggacctgcaggtgccgcggagcggcctggccggctgcgtggtgggcgggctgttgtacgccgtgggcggcaggaacaactcgcccgacggcaacaccgactccagcgccctggactgttacaaccccatgaccaatcagtggtcgccctgcgcccccatgagcgtgccccgtaaccgcatcggggtgggggtcatcgatggccacatctatgccgtcggcggctcccacggctgcatccaccacaacagtgtggagaggtatgagccagagcgggatgagtggcacttggtggccccaatgctgacacgaaggatcggggtgggcgtggctgtcctcaatcgtctcctttatgccgtggggggctttgacgggacaaaccgccttaattcagctgagtgttactacccagagaggaacgagtggcgaatgatcacagcaatgaacaccatccgaagcggggcaggcgtctgcgtcctgcacaactgtatctatgctgctgggggctatgatggtcaggaccagctgaacagcgtggagcgctacgatgtggaaacagagacgtggactttcgtagcccccatgaagcaccggcgaagtgccctggggatcactgtccaccaggggagaatctacgtccttggaggctatgatggtcacacgttcctggacagtgtggagtgttacgacccagatacagacacctggagcgaggtgacccgaatgacatcgggccggagtggggtgggcgtggctgtcaccatggagccctgccggaagcagattgaccagcagaactgtacctgttgaggcacttttgtttcttgggcaaaaatacagtccaatggggagtatcattgtttttgtacaaaaaccgggactaaaagaaaagacagcactgcaaataacccatcttccgggaagggaggccaggatgcctcagtgttaaaatgacatctcaaaagaagtccaaagcgggaatcatgtgcccctcagcggagccccgggagtgtccaagacagcctggctgggaaagggggtgtggaaagagcaggcttccaggagagaggcccccaaaccctctggccgggtaataggcctgggtcccactcacccatgccggcagctgtcaccatgtgatttattcttggatacctgggagggggccaatgggggcctcagggggaggccccctctggaaatgtggttcccagggatgggcctgtacatagaagccaccggatggcacttccccaccggatggacagttattttgttgataagtaaccctgtaattttccaaggaaaataaagaacagactaactagtgtctttc

SEQ ID NO: 145229 - DNA, 960 bp, Homo sapiens
  Payload ID: 8699
  Gene Symbol: KEAP1
  Gene Name: kelch-like ECH-associated protein 1
  ENST ID: ENST00000591039
  CDS Start-End: 325-960
gggatgtgcccgggctgcgggcatcgcgggccgcgagcgcccctgcggccgtgcccggagaccaggaaaacgggcgccacggcccagggcgcctccgagttccccgccaggactcggagggccaggagggcgcgacctgggtggatatttttgttggacggcgcaactcttggggtggcccgggagcggcggaaaccgagcgagagaaccaggaggcgctgcgcagaaggaggcccgggggctccgaggcgttgaggggctcgatctgcgttctggggtccctgagtgccagaggtggtggtgttgcttatcttctggaaccccatgcagccagatcccaggcctagcggggctggggcctgctgccgattcctgcccctgcagtcacagtgccctgagggggcaggggacgcggtgatgtacgcctccactgagtgcaaggcggaggtgacgccctcccagcatggcaaccgcaccttcagctacaccctggaggatcataccaagcaggcctttggcatcatgaacgagctgcggctcagccagcagctgtgtgacgtcacactgcaggtcaagtaccaggatgcaccggccgcccagttcatggcccacaaggtggtgctggcctcatccagccctgtcttcaaggccatgttcaccaacgggctgcgggagcagggcatggaggtggtgtccattgagggtatccaccccaaggtcatggagcgcctcattgaattcgcctacacggcctccatctccatgggcgagaagtgtgtcctccacgtcatgaacggtgctgtcatgtaccagatcgacagcgttgtccgtgcctgcagtgacttcctggtgcagcagctggaccccagcaatgccatcggcatcgccaacttcgctgagcagattggctgtgtggagttgcaccagcgtgcccgggagtacatctacatgcattttggg

SEQ ID NO: 145230 - DNA, 986 bp, Homo sapiens
  Payload ID: 8699
  Gene Symbol: KEAP1
  Gene Name: kelch-like ECH-associated protein 1
  ENST ID: ENST00000591419
  CDS Start-End: 348-986
gcgggatgtgcccgggctgcgggcatcgcgggccgcgagcgcccctgcggccgtgcccggagaccaggaaaacgggcgccacggcccagggcgcctccgagttccccgccaggactcggagggccaggagggcgcgacctgggtggatatttttgttggacggcgcaactcttggggtggcccgggagcggcggaaaccgagcgagagaaccaggaggcgctgcgcagaaggaggcccgggggctccgaggcgttgaggggctcgatctgcgttctggggttggcagccgagaggccgcggtccctgagtgccagaggtggtggtgttgcttatcttctggaaccccatgcagccagatcccaggcctagcggggctggggcctgctgccgattcctgcccctgcagtcacagtgccctgagggggcaggggacgcggtgatgtacgcctccactgagtgcaaggcggaggtgacgccctcccagcatggcaaccgcaccttcagctacaccctggaggatcataccaagcaggcctttggcatcatgaacgagctgcggctcagccagcagctgtgtgacgtcacactgcaggtcaagtaccaggatgcaccggccgcccagttcatggcccacaaggtggtgctggcctcatccagccctgtcttcaaggccatgttcaccaacgggctgcgggagcagggcatggaggtggtgtccattgagggtatccaccccaaggtcatggagcgcctcattgaattcgcctacacggcctccatctccatgggcgagaagtgtgtcctccacgtcatgaacggtgctgtcatgtaccagatcgacagcgttgtccgtgcctgcagtgacttcctggtgcagcagctggaccccagcaatgccatcggcatcgccaacttcgctgagcagattggctgtgtggagttgcaccagcgtgcccgggagtacatctacatgcattttggggag

SEQ ID NO: 145231 - DNA, 774 bp, Homo sapiens
  Payload ID: 8699
  Gene Symbol: KEAP1
  Gene Name: kelch-like ECH-associated protein 1
  ENST ID: ENST00000585845
  CDS Start-End: 1-389
atagcagatggtggcgcgcagccccgcgaggagacatccagcaacgaaatcgggagatggaagggacagtgagaaggggggcctggctgtgcgcccccgcccgatgccccactcctcgccgacgggcgccgggcacctgcgggaagggcgggagaatcgccgctcctttcccgccgcgccctttccgccctctccccgcctccttttcgggcgtcccgaggccgctccccaaccgacaaccaagaccccgcaggccacgcagccctggagccgaggccccccgacggcggaggcgcccgcgggtcccctacagccaagaagtgtgtcctccacgtcatgaacggtgctgtcatgtaccagatcgacagcgttgtccgtgcctgcagtgacttcctggtgcagcagctggaccccagcaatgccatcggcatcgccaacttcgctgagcagattggctgtgtggagttgcaccagcgtgcccgggagtacatctacatgcattttggggaggtggccaagcaagaggagttcttcaacctgtcccactgccaactggtgaccctcatcagccgggacgacctgaacgtgcgctgcgagtccgaggtcttccacgcctgcatcaactgggtcaagtacgactgcgaacagcgacggttctacgtccaggcgctgctgcgggccgtgcgctgccactcgttgacgccgaacttcctgcagatgcagctgcagaagtgcgagatcctgcagtccgactcccgctgcaaggactacctg

SEQ ID NO: 145232 - DNA, 582 bp, Homo sapiens
  Payload ID: 8699
  Gene Symbol: KEAP1
  Gene Name: kelch-like ECH-associated protein 1
  ENST ID: ENST00000590593
  CDS Start-End: 1-350
acctggaggcttacaaccccagtgacggcacctggctccggttggcggacctgcaggtgccgcggagcggcctggccggctgcgtggtgggcgggctgttgtacgccgtgggcggcaggaacaactcgcccgacggcaacaccgactccagcgccctggactgttacaaccccatgaccaatcagtggtcgccctgcgcccccatgagcgtgccccgtaaccgcatcggggtgggggtcatcgatggccacatctatgccgtcggcggctcccacggctgcatccaccacaacagtgtggagaggcgtctgcgtcctgcacaactgtatctatgctgctgggggctatgatggtcaggaccagctgaacagcgtggagcgctacgatgtggaaacagagacgtggactttcgtagcccccatgaagcaccggcgaagtgccctggggatcactgtccaccaggggagaatctacgtccttggaggctatgatggtcacacgttcctggacagtgtggagtgttacgacccagatacagacacctggagcgaggtgacccgaatgacatcgggccggagtggg

SEQ ID NO: 145233 - DNA, 1044 bp, Homo sapiens
  Payload ID: 8699
  Gene Symbol: KEAP1
  Gene Name: kelch-like ECH-associated protein 1
  ENST ID: ENST00000592478
  CDS Start-End: 1-517
ctgttacaaccccatgaccaatcagtggtcgccctgcgcccccatgagcgtgccccgtaaccgcatcggggtgggggtcatcgatggccacatctatgccgtcggcggctcccacggctgcatccaccacaacagtgtggagaggtatgagccagagcgggatgagtggcacttggtggccccaatgctgacacgaaggatcggggtgggcgtggctgtcctcaatcgtctcctttatgccgtggggggctttgacgggacaaaccgccttaattcagctgagtgttactacccagagaggaacgagtggcgaatgatcacagcaatgaacaccatccgaagcggggcaggaggctatgatggtcacacgttcctggacagtgtggagtgttacgacccagatacagacacctggagcgaggtgacccgaatgacatcgggccggagtggggtgggcgtggctgtcaccatggagccctgccggaagcagattgaccagcagaactgtacctgttgaggcacttttgtttcttgggcaaaaatacagtccaatggggagtatcattgtttttgtacaaaaaccgggactaaaagaaaagacagcactgcaaataacccatcttccgggaagggaggccaggatgcctcagtgttaaaatgacatctcaaaagaagtccaaagcgggaatcatgtgcccctcagcggagccccgggagtgtccaagacagcctggctgggaaagggggtgtggaaagagcaggcttccaggagagaggcccccaaaccctctggccgggtaataggcctgggtcccactcacccatgccggcagctgtcaccatgtgatttattcttggatacctgggagggggccaatgggggcctcagggggaggccccctctggaaatgtggttcccagggatgggcctgtacatagaagccaccggatggcacttccccaccggatggacagttattttgttgataagtaaccctgtaattttccaaggaaaataaagaacagactaactagtgtctttca

SEQ ID NO: 145234 - DNA, 979 bp, Homo sapiens
  Payload ID: 8699
  Gene Symbol: KEAP1
  Gene Name: kelch-like ECH-associated protein 1
  ENST ID: ENST00000592055
  CDS Start-End: 142-979
agtgcgcgggtggcatcactgtgcccggagcccctgcgcgccccggccatccccaccccgagggaccccctacggaggcgacctgggggctgaggtccctgagtgccagaggtggtggtgttgcttatcttctggaaccccatgcagccagatcccaggcctagcggggctggggcctgctgccgattcctgcccctgcagtcacagtgccctgagggggcaggggacgcggtgatgtacgcctccactgagtgcaaggcggaggtgacgccctcccagcatggcaaccgcaccttcagctacaccctggaggatcataccaagcaggcctttggcatcatgaacgagctgcggctcagccagcagctgtgtgacgtcacactgcaggtcaagtaccaggatgcaccggccgcccagttcatggcccacaaggtggtgctggcctcatccagccctgtcttcaaggccatgttcaccaacgggctgcgggagcagggcatggaggtggtgtccattgagggtatccaccccaaggtcatggagcgcctcattgaattcgcctacacggcctccatctccatgggcgagaagtgtgtcctccacgtcatgaacggtgctgtcatgtaccagatcgacagcgttgtccgtgcctgcagtgacttcctggtgcagcagctggaccccagcaatgccatcggcatcgccaacttcgctgagcagattggctgtgtggagttgcaccagcgtgcccgggagtacatctacatgcattttggggaggtggccaagcaagaggagttcttcaacctgtcccactgccaactggtgaccctcatcagccgggacgacctgaacgtgcgctgcgagtccgaggtcttccacgcctgcatcaactgggtcaagtacgactgcgaacagcgacggttctacgtccaggcgctgctgcgggccgtgcgctgccactcgttgacgccgaact

SEQ ID NO: 145235 - DNA, 4115 bp, Homo sapiens
  Payload ID: 8700
  Gene Symbol: KLHL1
  Gene Name: kelch-like family member 1
  Uniprot ID: Q9NR64
  ENST ID: ENST00000377844
  CDS Start-End: 761-3007
gaaaattgtactgtgaggaccttgacagcttcacaggcgggctttttcttttgcctccctatatgcgctagaatatctatttttctcttttacaaactgactatataaaaccacctcttctggcattgcagaaagcaattgactttctcagagccacccggcaggctatcggggcatcctcgaaaaggccagggacaggggcgcaggtgcaccaagagatctggcgaggggtacgcttcctcgagacttggggctctttctctctgcgctctccagacactgaactctgagctgcaaggacaagaacgccaccaccttccctactaaggctctgccacaagcgcatcccagtgaggtgtatccagctgcagccgcctccggagcttcggagcgctcagacctccctccctcgcgcatctccagcctaagggttgtcccacctcgccataacacggggctctcgcgcgggcatcgaggattctcagcttttggcgtcccagtcctgcctctgctcctgcctggtggtgtccccacgcccaggtcctgcggacccgaccacggctgaaacgcgcggctttgccgtctgcgctccagccttcgcctggcagagcgcgcagcccacctagcgtcttctggctctaggggtgcagagggcgcatcccgcctcttcctccgcccccgggccccgctgtcctcccccacctgctgaccagcctactcctgcgtgagctgccagccttttgccttctgtgcgtaaagcatgtcaggctctgggcgaaaagacttcgatgtgaagcacattctgcgactccgctggaaactcttcagccacccgtctccttccaccggcggcccggcggggggaggctgcctgcaacaggacggcagtggcagctttgagcactggggacccagccagagtcgcctgctcaaaagccaagagagaagcggtgtgagcactttctggaagaagccttcctcctcttcctcttcatcgtcctccccgtcctcttcctcctcttccttcaatccgctgaatggcaccctgcttccagttgccacgaggctgcagcaaggggctcctgggcagggcactcagcagccagccaggactctcttctacgtggagtcactagaggaggaggtggtgccaggcatggactttcctggaccacacgaaaaagggctggttctgcaagagctcaaagtggagccagacaactctagccaggcaacaggtgaaggatgtggacacaggctgtcatcaaccggccattcaatgacacctcaaagtgatttggactccagtagctctgaagaattctatcaagctgttcatcatgctgagcaaaccttcagaaagatggaaagttatttgaagcagcagcaactttgtgatgttatcctgattgttgggaaccgaaagatacctgcacataggcttgttctgagttcagtctccgactattttgcggccatgtttacaagtgatgtttgtgaagccaagcaagaggagatcaaaatggaaggcatagaccccaatgctctctgggaccttgtccaatttgcatatacaggctgcttggaattaaaagaggacaccattgagaaccttcttgctgcagcgtgccttcttcagcttccacaggtggtggaagtgtgctgccacttcctcatgaagcttttgcatccatctaactgtttaggaattcgagccttcgcagatgctcaaggatgcattgagttaatgaaggtggcccacagctacacaatggaaaacataatggaagttatcagaaatcaagagtttttactccttccagctgaggagctccataaactactggccagtgatgatgtcaatgttcctgatgaagaaaccatcttccatgcattgatgatgtgggtcaagtatgacatgcagagtagatgcaatgacctgagcatgcttcttgcctttataagactgccactgcttccaccacagatattggctgacctagaaaatcatgcattatttaagaatgatctggaatgtcaaaagctgattctagaagcaatgaaataccatctattgccagaaagaagaactttaatgcaaagtccgagaactaaacccagaaaatctacagtcggaactttgtatgctgtaggaggaatggataacaacaaaggagctacaactatagagaaatatgatctgagaacaaatctgtggatccaggcagggatgatgaatggcagaaggctgcagtttggtgtggctgttattgatgacaaactctttgtaattggaggtcgagatggcttaaagacattgaacactgttgaatgttacaatcccaaaaccaagacatggactgtcttaccaccaatgtcaacacacagacatggtctaggtgtaacagtacttgaaggccctatttatgctgtgggaggccatgatggctggagctatctgaatacagtggaaaggtgggatccacagagtcaacaatggacatttgtagccagtatgtcaattgctcggagcacagttggtgtagcagcattgaatggcaagttgtattcagttggaggtcgtgatggaagttcctgtttgagttcaatggaatattatgatcctcatacaaataagtggaacatgtgtgctcccatgtgtaagaggagagggggtgtcggagtggccacatgtgacggttttctttatgcagtaggaggtcatgatgctcctgcttcaaatcactgttcccggctactggattatgtagaaagatatgatcccaaaacagacacttggaccatggtggctcctttgagtatgcccagagatgctgttggggtctgtctccttggtgacagattatatgctgttggtggctatgatggacagacatacctcaacactatggaatcctatgacccacaaactaatgagtggacacagatggcttccttgaatattgggagagcaggtgcctgtgtggtagtcatcaagcaaccttgacttattgatattttacttggaaagattttacttgctggagtggttatttttatattgaatggcaagaatgagaacttccagagatgaaaactcttcaagaacaaggatctctgtagcgttacctactgatgttgaaagagttagtagatcaaacagaatagtaggaaacaagaaaacattaaacttatacaggaaaaatgtctggccatatgttagttagttcgggaatggttattggtaatttgttttgtattatagcatacaataactagagttaccaaaggcttgttttttcttgagcagttgaaaggagagaccaatatttgtgacatggatagtttcatgaccacaactcattcaatcattttatagtctatggcaatatccaagagattgccaagagtagaagacagaatatttcatctgacagtatctgattggtttactgtttttctaatcatatgtggtcataacgggaagcagaattatgctttattcaaacaaacctgcttctgcctcattttcctaagctatgagaacaattagagaaacagattcatgcttgtatcttgcattcagaaaacaaactgtcctactaatcaaagctgcatatctcatcagagataatggttgaattttattgcaaccatattggcaatctgaaactggcaaacacaaaggattgttttcactaggcttaccattttgctttgcttttttaacacactgagccaaagatgcagtgtaattattgggcttttgccttatgttgagttcagtgtaagcatggaagctagtgattctgaatgatatatatatccattgcatgttgaactcctttagaattttgttcttaaacaaacttagaatttcaaaagaaaaacatatgatccattaagttggagtgtttatgattattgctagaaagaaggcagacttcatattctcatcgcccatttttcaaacttgttacattgatctgtacattattttaagccacatgtttgtaattgtttaaaacaaagtggaaacattacacaatgtccttaataaataggcccatgtaaattttaattacaattaataaatgatcaaaaaatttgcattt

SEQ ID NO: 145236 - DNA, 3966 bp, Homo sapiens
  Payload ID: 8700
  Gene Symbol: KLHL1
  Gene Name: kelch-like family member 1
  ENST ID: ENST00000545028
  CDS Start-End: 795-2858
acttacaggggaggaggaggcgctgaggcagagagaaaattgtactgtgaggaccttgacagcttcacaggcgggctttttcttttgcctccctatatgcgctagaatatctatttttctcttttacaaactgactatataaaaccacctcttctggcattgcagaaagcaattgactttctcagagccacccggcaggctatcggggcatcctcgaaaaggccagggacaggggcgcaggtgcaccaagagatctggcgaggggtacgcttcctcgagacttggggctctttctctctgcgctctccagacactgaactctgagctgcaaggacaagaacgccaccaccttccctactaaggctctgccacaagcgcatcccagtgaggtgtatccagctgcagccgcctccggagcttcggagcgctcagacctccctccctcgcgcatctccagcctaagggttgtcccacctcgccataacacggggctctcgcgcgggcatcgaggattctcagcttttggcgtcccagtcctgcctctgctcctgcctggtggtgtccccacgcccaggtcctgcggacccgaccacggctgaaacgcgcggctttgccgtctgcgctccagccttcgcctggcagagcgcgcagcccacctagcgtcttctggctctaggggtgcagagggcgcatcccgcctcttcctccgcccccgggccccgctgtcctcccccacctgctgaccagcctactcctgcgtgagctgccagccttttgccttctgtgcgtaaagcatgtcaggctctgggcgaaaagacttcgatgtgaagcacattctgcgactccgctggaaactcttcagccacccgtctccttccaccggcggcccggcggggggaggctgcctgcaacaggacggcagtggcagctttgagcactggggacccagccagagtcgcctgctcaaaagccaagagagaagcggtgtgagcactttctggaagaagccttcctcctcttcctcttcatcgtcctccccgtcctcttcctcctcttccttcaatccgctgaatggcaccctgcttccagttgccacgaggctgcagcaaggggctcctgggcagggcactcagcagccagccaggactctcttctacgtggagtcactagaggaggaggtggtgccaggcatggactttcctggaccacacgaaaaagggctggttctgcaagagctcaaagtggagccagacaactctagccaggcaacaggtgaaggatgtggacacaggcttgttctgagttcagtctccgactattttgcggccatgtttacaagtgatgtttgtgaagccaagcaagaggagatcaaaatggaaggcatagaccccaatgctctctgggaccttgtccaatttgcatatacaggctgcttggaattaaaagaggacaccattgagaaccttcttgctgcagcgtgccttcttcagcttccacaggtggtggaagtgtgctgccacttcctcatgaagcttttgcatccatctaactgtttaggaattcgagccttcgcagatgctcaaggatgcattgagttaatgaaggtggcccacagctacacaatggaaaacataatggaagttatcagaaatcaagagtttttactccttccagctgaggagctccataaactactggccagtgatgatgtcaatgttcctgatgaagaaaccatcttccatgcattgatgatgtgggtcaagtatgacatgcagagtagatgcaatgacctgagcatgcttcttgcctttataagactgccactgcttccaccacagatattggctgacctagaaaatcatgcattatttaagaatgatctggaatgtcaaaagctgattctagaagcaatgaaataccatctattgccagaaagaagaactttaatgcaaagtccgagaactaaacccagaaaatctacagtcggaactttgtatgctgtaggaggaatggataacaacaaaggagctacaactatagagaaatatgatctgagaacaaatctgtggatccaggcagggatgatgaatggcagaaggctgcagtttggtgtggctgttattgatgacaaactctttgtaattggaggtcgagatggcttaaagacattgaacactgttgaatgttacaatcccaaaaccaagacatggactgtcttaccaccaatgtcaacacacagacatggtctaggtgtaacagtacttgaaggccctatttatgctgtgggaggccatgatggctggagctatctgaatacagtggaaaggtgggatccacagagtcaacaatggacatttgtagccagtatgtcaattgctcggagcacagttggtgtagcagcattgaatggcaagttgtattcagttggaggtcgtgatggaagttcctgtttgagttcaatggaatattatgatcctcatacaaataagtggaacatgtgtgctcccatgtgtaagaggagagggggtgtcggagtggccacatgtgacggttttctttatgcagtaggaggtcatgatgctcctgcttcaaatcactgttcccggctactggattatgtagaaagatatgatcccaaaacagacacttggaccatggtggctcctttgagtatgcccagagatgctgttggggtctgtctccttggtgacagattatatgctgttggtggctatgatggacagacatacctcaacactatggaatcctatgacccacaaactaatgagtggacacagatggcttccttgaatattgggagagcaggtgcctgtgtggtagtcatcaagcaaccttgacttattgatattttacttggaaagattttacttgctggagtggttatttttatattgaatggcaagaatgagaacttccagagatgaaaactcttcaagaacaaggatctctgtagcgttacctactgatgttgaaagagttagtagatcaaacagaatagtaggaaacaagaaaacattaaacttatacaggaaaaatgtctggccatatgttagttagttcgggaatggttattggtaatttgttttgtattatagcatacaataactagagttaccaaaggcttgttttttcttgagcagttgaaaggagagaccaatatttgtgacatggatagtttcatgaccacaactcattcaatcattttatagtctatggcaatatccaagagattgccaagagtagaagacagaatatttcatctgacagtatctgattggtttactgtttttctaatcatatgtggtcataacgggaagcagaattatgctttattcaaacaaacctgcttctgcctcattttcctaagctatgagaacaattagagaaacagattcatgcttgtatcttgcattcagaaaacaaactgtcctactaatcaaagctgcatatctcatcagagataatggttgaattttattgcaaccatattggcaatctgaaactggcaaacacaaaggattgttttcactaggcttaccattttgctttgcttttttaacacactgagccaaagatgcagtgtaattattgggcttttgccttatgttgagttcagtgtaagcatggaagctagtgattctgaatgatatatatatccattgcatgttgaactcctttagaattttgttcttaaacaaacttagaatttcaaaagaaaaacatatgatccattaagttggagtgtttatgattattgctagaaagaaggcagacttcatattctcatcgcccatttttcaaacttgttacattgatctgtacattattttaagccacatgtttgtaattgtttaaaacaaagtggaaacattacacaatgtccttaataaataggcccatgtaaattttaattacaattaataaatgatcaaaaaatttgcattt

SEQ ID NO: 145237 - DNA, 2057 bp, Homo sapiens
  Payload ID: 8701
  Gene Symbol: KLHL10
  Gene Name: kelch-like family member 10
  Uniprot ID: Q6JEL2
  ENST ID: ENST00000293303
  CDS Start-End: 154-1980
actgcagggccaggattctggaacttgggttgcctgatagaccctatacaaaagatgtagtagggaaaaggagcgacagctggctaaaggggccccccacaaccctccccgacaccctaggaaagcagcctctctccgctgtcccagggtgccatggagatggagagcgcggcggcctccacacgtttccaccagcctcacatggagaggaagatgagtgcgatggcctgtgagatcttcaacgagcttagactagagggcaagctctgcgacgtggtcatcaaggtcaatggctttgagttcagtgcccataagaacatcctctgtagctgcagttcctactttagagctttgtttacaagtggctggaacaacactgaaaagaaggtatacaacatccctggcatttctcccgacatgatgaagctaatcattgagtatgcatacacccggaccgtgcctatcacaccggacaatgtggagaaactgcttgctgctgcagaccagtttaacatcatgggtatcgtcaggggttgctgcgagttcctcaagtcagagctgtgcttggataattgtatcggcatctgtaagttcacggactactactactgtcctgagctgaggcagaaggcctacatgttcatactgcacaactttgaggagatggtgaaagtctcggcagaatttttagagctctcggtcactgaacttaaggatatcattgagaaagatgagctcaatgtcaaacaggaagatgctgtatttgaggccattttaaagtggatttctcatgacccccaaaatagaaagcagcacatttcaattttgcttcctaaggttcgcctggccctaatgcatgctgagtacttcatgaacaatgttaagatgaatgactatgtcaaagacagtgaggaatgcaaaccagtcatcattaatgccctaaaggccatgtatgacctcaacatgaatggaccctctaattctgatttcaccaacccactcaccagaccacgcttgccctatgccatcctctttgcaattggtggctggagtggtgggagccccaccaatgccattgaggcatatgacgctcgggcagacagatgggtgaatgttacttgtgaggaagagagtccccgtgcctaccatggggcagcctatttgaaaggctatgtgtatatcattggggggtttgatagtgtagactatttcaatagtgttaagcgttttgacccagtcaagaaaacttggcatcaggtggccccgatgcactccagacgttgctatgtcagtgtgacagtcctcggcaattttatttatgccatgggaggatttgatggctacgtgcgtctaaacactgctgaacgttatgagccagagaccaatcaatggacactcatcgcccccatgcacgaacagaggagtgatgcaagcgccacaacactttatgggaaggtctacatatgtggtgggtttaatggaaacgagtgcctgttcacagcagaagtgtataacactgaaagtaatcagtggacagtcatagcacccatgagaagcaggaggagtggaataggcgtgattgcttatggagaacatgtatatgcggtaggtggctttgatggagctaatcgacttaggagtgccgaagcctacagccctgtggctaacacttggcgcacaatccccactatgtttaatcctcgtagcaattttggcatcgaggtggtggatgacctcttgtttgtggtgggtggctttaatggttttaccaccacctttaatgttgagtgctatgatgaaaagaccgatgagtggtatgatgctcatgacatgagtatataccgcagtgctctgagctgctgtgtagtaccagggctggccaatgttgaggaatatgcagctagacgggacaacttcccaggattagcactgcgagatgaagtaaaatattctgcttcgacaagtaccctacctgtatgagcctcttcatttagctaataaaaagtctaagcaataagaattaattctttttttaaaaaaatgcagtgtttaaactt

SEQ ID NO: 145238 - DNA, 641 bp, Homo sapiens
  Payload ID: 8701
  Gene Symbol: KLHL10
  Gene Name: kelch-like family member 10
  ENST ID: ENST00000448203
  CDS Start-End: 276-641
gaaatttgggttttaggacaggcgaaccaacccgctctccttcaagctcccggccatttcttggggcagagagctaggaggggtccgcggcagagcaaagcgggaaggcccaatgggcaggaagcctctccagccgcccccagcccggccggcccccgcacgccccagagcctcaattgacttggatttccttgagttcggtgtctagggagccaagtgttgggctgtggaaggtagatgaatgctccagggatagagacctgtatcagggtgccatggagatggagagcgcggcggcctccacacgtttccaccagcctcacatggagaggaagatgagtgcgatggcctgtgagatcttcaacgagcttagactagagggcaagctctgcgacgtggtcatcaaggtcaatggctttgagttcagtgcccataagaacatcctctgtagctgcagttcctactttagagctttgtttacaagtggctggaacaacactgaaaagaaggtatacaacatccctggcatttctcccgacatgatgaagctaatcattgagtatgcatacacccggaccgtgcctatcacaccggacaatgtggagaaactgcttgctgctgcagaccagtttaacatcatg

SEQ ID NO: 145239 - DNA, 566 bp, Homo sapiens
  Payload ID: 8701
  Gene Symbol: KLHL10
  Gene Name: kelch-like family member 10
  ENST ID: ENST00000438813
  CDS Start-End: 109-566
atacaaaagatgtagtagggaaaaggagcgacagctggctaaaggggccccccacaaccctccccgacaccctaggaaagcagcctctctccgctgtcccagggtgccatggagatggagagcgcggcggcctccacacgtttccaccagcctcacatggagaggaagatgagtgcgatggcctgtgagatcttcaacgagcttagactagagggcaagctctgcgacgtggtcatcaaggagagaaatgtttccgtggctgctagtttctttcttttttccagagctttgtttacaagtggctggaacaacactgaaaagaaggtatacaacatccctggcatttctcccgacatgatgaagctaatcattgagtatgcatacacccggaccgtgcctatcacaccggacaatgtggagaaactgcttgctgctgcagaccagtttaacatcatgggtatcgtcaggggttgctgcgagttcctcaagtcagagctgtgcttggataattgtatcggcatctgtaagttcacggactactactactgtcctgagctgaggcagaa

SEQ ID NO: 145240 - DNA, 2383 bp, Homo sapiens
  Payload ID: 8702
  Gene Symbol: KLHL11
  Gene Name: kelch-like family member 11
  Uniprot ID: Q9NVR0
  ENST ID: ENST00000319121
  CDS Start-End: 62-2188
tgtgtcgtaccaacagccgcatcgttccgaggctgtggaggccgggcgcagcggcgtcaagatggcggctgcggcagtggcggcggcggcggcggcggccgcggctgcatctcttcaggtactggagatggagagcatggagacggccgccgccggctcggcaggactggccgccgaggtccgaggcagcggcacggtggacttcgggcctgggccggggatctctgcaatggaggcgagcgggggcgatccgggcccagaagccgaggatttcgagtgcagctctcactgctcagagctgtcctggcggcagaacgagcagcggcgccagggcctcttctgcgacattaccctgtgcttcggcggggctggaggccgcgagttccgggcccaccgctcggtactggctgccgccaccgagtacttcacgcccctgctctcgggccagttttccgagtcccgctcgggacgggtggagatgcgcaagtggagctccgagccggggcccgaacccgacacagtggaagccgtaatcgagtacatgtacaccgggcgcatccgcgtcagcacgggcagcgtgcacgaggtgctggagttggccgacaggttcctactcattcgtttaaaagaattttgtggagaatttctcaagaaaaaacttcatctctcaaattgtgtggcaattcatagcttagcacacatgtacaccctgagccaacttgctctgaaggctgctgatatgatacggagaaatttccacaaagtgattcaggatgaagaattttatacgttacctttccatctcattagagactggctttcagatttggaaattacagttgattctgaagaggttctctttgaaaccgttttgaaatgggttcagagaaatgctgaagagagagagagatactttgaagaactttttaaattgctcaggttgtcccagatgaaacctacctaccttactcgacatgtcaaaccagagaggctggtagccaataatgaagtttgtgtcaagttggtcgctgacgcagtggagagacatgctctgagagctgagaatatacaatctggcacatgccagcaccccacttctcatgtgtcactattgcctcgttatgggcaaaacatggatgtgatcatggttattggaggtgtgtcagaaggaggggactatttaagtgaatgtgtgggatactttgttgatgaggacagatgggtaaatctgccacatattcataatcacctcgatggacatgctgttgcagtaacagaatcctacgtgtatgttgctggatcaatggagccagggtttgctaaaactgtagaaaggtataacccaaatttgaatacatgggaacatgtttgtagtctgatgacaagaaagcattcttttggactaacagaagtcaaagggaagctctatagcattggaggacatggcaactttagtcctggttttaaagatgtgactgtttataatcctgagcttgataaatggcacaacttggaatcggcaccaaagattcttcgagatgtcaaagcactagccattgaagaccggtttgtatacattgccgcccgcactcctgtagaccgggacactgaagatggattaaaggctgtaattacttgctatgatacagagactcgacagtggcaagatgtggaatctttgccgcttattgacaattactgctttttccaaatgtctgtggtcaattcaaacttttatcagacagcatcatgttgtcccaagagttattgtttagaaaacgaagaggcagtaagaaaaattgccagccaagtgtctgatgagatccttgaaagcttgcctccagaagtcctaagcatcgaaggagcagccatttgctattacaaagatgatgtcttcattataggaggctggaaaaacagtgatgatattgataaacagtatcggaaagaagcctaccgatattgtgcggagaggaagaggtggatgcttcttcctcctatgccacaacctcgttgtagagccactgcttgtcacgtgaggatcccataccggtacttgcatggcacacagagataccctatgcctcaaaacctgatgtggcagaaggaccgcatcagacagatgcaagagatacatcgtcacgccctgaacatgaggcgagtgccaagctctcagattgaatgctaggttctctcaagcgtgccgattaaaactgttacacccgtttcgtgaagctgaagatacccaggctgttatttaaaaaagtatgtcgataacttattttctacatgaactgattattaccccatataaaggaaatagagttaaaaactaaagaatgggagactcagttcaatacatggtcattttgttagcttgcaa

SEQ ID NO: 145241 - DNA, 1033 bp, Homo sapiens
  Payload ID: 8703
  Gene Symbol: KLHL12
  Gene Name: kelch-like family member 12
  ENST ID: ENST00000367258
  CDS Start-End: 88-1033
gcagagtatatactgaggtctgtggatcctaaggctcagaggattctcgccgcagcgttgttcggcccgaaaaggccattgtggacaatggacgtgaataaatttgaggcctctgtgggttttctcgatgtcaaaaagttcctcagtacctggaagttgcagaatccaaggacccattttgttctttctccgcactgctttatgggaggcattatggcccccaaagacataatgacaaatactcatgctaaatccatcctcaattcaatgaactccctcaggaagagcaataccctctgtgatgtgacattgagagtagagcagaaagacttccctgcccatcggattgtgctggctgcctgtagtgattacttctgtgccatgttcactagtgagctctcagagaaggggaaaccttatgttgacatccaaggtttgactgcctctaccatggaaattttattggactttgtgtacacagaaacagtacatgtgacagtggagaatgtacaagaactgcttcctgcagcctgtctgcttcagttgaaaggtgtgaaacaagcctgctgtgagttcttagaaagtcagttggacccttctaattgcctgggtattagggattttgctgaaacccacaattgtgttgacctgatgcaagcagctgaggtttttagccagaagcattttcctgaagtggtacagcatgaagagttcattcttctgagtcaaggagaggtggaaaagctaatcaagtgcgacgaaattcaggtggattctgaagagccagtctttgaggctgtcatcaactgggtgaagcatgccaagaaagagcgggaagaatccttgcctaacctgctacagtatgtgcggatgcccctactaacccccaggtatatcacagatgtaatagatgctgagcctttcatccgctgtagtttacaatgcagggatctggttgatgaagcaaagaagtttcatctgaggcctgaacttcggagtcagatgcagggacccaggacaagggctcgcctag

SEQ ID NO: 145242 - DNA, 2257 bp, Homo sapiens
  Payload ID: 8703
  Gene Symbol: KLHL12
  Gene Name: kelch-like family member 12
  ENST ID: ENST00000367259
  CDS Start-End: 122-736
tccccagtgcctaactctgctgtctgctatatttcagcctttcatccgctgtagtttacaatgcagggatctggttgatgaagcaaagaagtttcatctgaggcctgaacttcggagtcagatgcagggacccaggacaagggctcgcctaggagccaatgaagtgcttttggtggttgggggctttggaagccagcagtctcccattgatgtggtagagaaatatgaccccaagactcaggagtggagctttttgccaagcatcactcgtaagagacgttatgtggcctcagtgtcccttcatgaccggatctacgtcattggtggctatgatggccgttcccgccttagttcagtggaatgtctagactacacagcagatgaggatggggtctggtattctgtggcccctatgaatgtccgacgaggtcttgctggagccaccaccctgggagatatgatctatgtctctggaggctttgatggaagcaggcgtcacaccagtatggagcgctatgatccaaacattgaccagtggagcatgctgggagatatgcagacagcccgggaaggtgccggactcgtagtggccagtggagtgatctactgtctaggaggatatgacggcttgaatatcttaaattcagttgagaaatacgaccctcatacaggacattggactaatgttacaccaatggccaccaagcgttctgatatgatggtaattccctgctaagtagcattgaatgttatgaccctatcatcgacagctgggaagtcgtgacatccatgggaacccagcgctgtgatgctggtgtttgtgttctccgcgagaagtgaccattgttggagcaccatccagagctagtgaccagtccagtggacagttagtgggagaatcaaaaatcctttccagaatgtctgtttctcactatgtgcaccgggtgattacaggcaccagtgcagtgatgattgtacttatttgacacatactccccgtcgtcctggttcttgttcctgagaagggtgggtaacagatattccaggaaaaagaatgcacattgaatggatgtgagagaccacattgcctctcccactgctttggggagcactttcctgtcatttctaacttaccacatgcttggtgtactatatgtatgttgtgcctcatatgttgcaaagaactaaggtgagtatagcctactagatatgggcaatatccagcctagatgattggaaagataccagtttaagtaaacttggtaaaatccaagtctttttttttttttccaggaacaactacattttctcatatacaggtagctaggggcaacacagttccattctagagggaaacaaaagggagagccccacaaaactttggggacaagggagagagagactcatctgacacttcttttggaggtcaggatttgtatatcagaattgaagttagaattaagtgaattaaactgaatttgattgtgagtgaacctagaacagcactgaagtattacataacctggaagactgagaagggtatattatttgaaggatctttttatttccccgaggtctttcgcactggagacagcataaaagagtgaacaaatgttgggatgagagaagatgacatcaatgtgggagttcagtataactggggataaactagaagaacctgtgattttacagtcatcttattacctgccagggctcatctagccatggcaatgtttgccttgaatgggggtgaaagcctttctttgttggatcaaatactactacactattacacttccacactatttatttggggatgggctgggagtgacagtagcctagtagttcagctacctgattactgccccattcttttagaagcacatgtctgccaaggagtggtttgtactgctgtgtttggtacatctagtcttttttctgctataagttttccttacctgtcctttagtgtagattttattcatcacaggacagaataatcaaggacaaccaaaatccttttgttagtttcagtacctcagctatcaacatttctgagctaccattcaatgttcctctgtgtcatggagtgaaattcttgttttgtgggtattaggagtgtgggaatgtgataacctaaacaacctttgctctgaaattccatttttccctctttccctgagttgtattgacctacagagttaatttcctttgtatttttttaagaaaatattaaaaatcaacggtctcaaatgcc

SEQ ID NO: 145243 - DNA, 3359 bp, Homo sapiens
  Payload ID: 8703
  Gene Symbol: KLHL12
  Gene Name: kelch-like family member 12
  Uniprot ID: Q53G59
  ENST ID: ENST00000367261
  CDS Start-End: 220-1926
gtcatcacgtcgcgcggccgcaggggccagacccggacggctccagagcctccagagcctccgggtctgggcggcgcttcggctcctcccgagccgcctgctagccccgcgccgcactccatccccacaggctggggacgggcccggtgcggctgtgtgggttcgggagcggagttgcagaatccaaggacccattttgttctttctccgcactgctttatgggaggcattatggcccccaaagacataatgacaaatactcatgctaaatccatcctcaattcaatgaactccctcaggaagagcaataccctctgtgatgtgacattgagagtagagcagaaagacttccctgcccatcggattgtgctggctgcctgtagtgattacttctgtgccatgttcactagtgagctctcagagaaggggaaaccttatgttgacatccaaggtttgactgcctctaccatggaaattttattggactttgtgtacacagaaacagtacatgtgacagtggagaatgtacaagaactgcttcctgcagcctgtctgcttcagttgaaaggtgtgaaacaagcctgctgtgagttcttagaaagtcagttggacccttctaattgcctgggtattagggattttgctgaaacccacaattgtgttgacctgatgcaagcagctgaggtttttagccagaagcattttcctgaagtggtacagcatgaagagttcattcttctgagtcaaggagaggtggaaaagctaatcaagtgcgacgaaattcaggtggattctgaagagccagtctttgaggctgtcatcaactgggtgaagcatgccaagaaagagcgggaagaatccttgcctaacctgctacagtatgtgcggatgcccctactaacccccaggtatatcacagatgtaatagatgctgagcctttcatccgctgtagtttacaatgcagggatctggttgatgaagcaaagaagtttcatctgaggcctgaacttcggagtcagatgcagggacccaggacaagggctcgcctaggagccaatgaagtgcttttggtggttgggggctttggaagccagcagtctcccattgatgtggtagagaaatatgaccccaagactcaggagtggagctttttgccaagcatcactcgtaagagacgttatgtggcctcagtgtcccttcatgaccggatctacgtcattggtggctatgatggccgttcccgccttagttcagtggaatgtctagactacacagcagatgaggatggggtctggtattctgtggcccctatgaatgtccgacgaggtcttgctggagccaccaccctgggagatatgatctatgtctctggaggctttgatggaagcaggcgtcacaccagtatggagcgctatgatccaaacattgaccagtggagcatgctgggagatatgcagacagcccgggaaggtgccggactcgtagtggccagtggagtgatctactgtctaggaggatatgacggcttgaatatcttaaattcagttgagaaatacgaccctcatacaggacattggactaatgttacaccaatggccaccaagcgttctggtgcaggagtagccctgctgaatgaccatatttatgtggtggggggatttgatggtacagcccacctttcttccgttgaagcatacaacattcgcactgattcctggacaactgtcaccagtatgaccactccacgatgctatgtaggggccacagtgcttcgggggagactctatgcaattgcaggatatgatggtaattccctgctaagtagcattgaatgttatgaccctatcatcgacagctgggaagtcgtgacatccatgggaacccagcgctgtgatgctggtgtttgtgttctccgcgagaagtgaccattgttggagcaccatccagagctagtgaccagtccagtggacagttagtgggagaatcaaaaatcctttccagaatgtctgtttctcactatgtgcaccgggtgattacaggcaccagtgcagtgatgattgtacttatttgacacatactccccgtcgtcctggttcttgttcctgagaagggtgggtaacagatattccaggaaaaagaatgcacattgaatggatgtgagagaccacattgcctctcccactgctttggggagcactttcctgtcatttctaacttaccacatgcttggtgtactatatgtatgttgtgcctcatatgttgcaaagaactaaggtgagtatagcctactagatatgggcaatatccagcctagatgattggaaagataccagtttaagtaaacttggtaaaatccaagtctttttttttttttccaggaacaactacattttctcatatacaggtagctaggggcaacacagttccattctagagggaaacaaaagggagagccccacaaaactttggggacaagggagagagagactcatctgacacttcttttggaggtcaggatttgtatatcagaattgaagttagaattaagtgaattaaactgaatttgattgtgagtgaacctagaacagcactgaagtattacataacctggaagactgagaagggtatattatttgaaggatctttttatttccccgaggtctttcgcactggagacagcataaaagagtgaacaaatgttgggatgagagaagatgacatcaatgtgggagttcagtataactggggataaactagaagaacctgtgattttacagtcatcttattacctgccagggctcatctagccatggcaatgtttgccttgaatgggggtgaaagcctttctttgttggatcaaatactactacactattacacttccacactatttatttggggatgggctgggagtgacagtagcctagtagttcagctacctgattactgccccattcttttagaagcacatgtctgccaaggagtggtttgtactgctgtgtttggtacatctagtcttttttctgctataagttttccttacctgtcctttagtgtagattttattcatcacaggacagaataatcaaggacaaccaaaatccttttgttagtttcagtacctcagctatcaacatttctgagctaccattcaatgttcctctgtgtcatggagtgaaattcttgttttgtgggtattaggagtgtgggaatgtgataacctaaacaacctttgctctgaaattccatttttccctctttccctgagttgtattgacctacagagttaatttcctttgtatttttttaagaaaatattaaaaatcaacggtctcaaatgccgagagtttgtggctaa

SEQ ID NO: 145244 - DNA, 3972 bp, Homo sapiens
  Payload ID: 8704
  Gene Symbol: KLHL13
  Gene Name: kelch-like family member 13
  Uniprot ID: Q9P2N7
  ENST ID: ENST00000262820
  CDS Start-End: 911-2878
attaagagcatgctactctgtacttcgctgctgcagaagagagagtgatatttgtgttactacagcatgttgtaaatgtgtgagattttgctcatctcagcttggaaataagaatagggaaaggagagcaacttgaatcagaagctactagaagaacctgcagagttctgaagcagtttatattcttcttacattttgccttctcctagctggaaagcagagggactggaatttttgaaacgggcttttcccataatggcattcttgatttgtgtggccagagcttgcacaggaggaaagcaggctgctgaatttagtcactgatctctattagcggtagcctaaggctatgctgaggtttatatcccatttgtattgttgcagctcaaaagaagattgttcagaggatgacaagtgtattctgagtaggtatgttgttgtttcattttcatatgaaacccatctatgttttttcttgctactattggtcagaaatcaggttaataggtgcagaatatagtacagtgctgcagtatccctgttaaggtagaacaatggtattgcaagcttaaaaaaaaaaagcctggctgcttttattaaataaagctgcattgtatggtatgcacagtgcagtcctaaaaaaatatactgcagtcaacgcttttctggcactattgttgagttggaatgattgaatcatcatattgctttaggggacagaagaatttaaggaggtaccttacagccctattttacagattggaagcatcggtttaagggcactggcagaatcctttgcttgttctccgcggcagccactgctgtgtcagtacagtgtggaatggaagtcttagttggtagtctgttatggaaacgctctttactgttattgtagtaccgtggtgacaacatgccattgaaatggaaaacgagctctcctgctatctggaaattcccagttcctgtgcttaaaacatccaggtcaactccactttctccagcatacatatctctcgtggaagaggaagaccaacacatgaaattgtcccttggaggcagcgaaatgggcctctcatcccatttgcagtcttccaaggcaggacctacacgcatctttaccagcaatacccacagttctgtggtgttacagggctttgaccagcttcgacttgaaggattgctttgtgatgtgaccctgatgccaggtgacacagatgatgctttccctgtgcatagagtcatgatggcatctgctagtgattacttcaaggctatgttcacaggtggaatgaaagaacaagatttaatgtgcattaaacttcatggtgtgagcaaagtcggtctaaggaaaattattgatttcatttatactgcaaagctttctcttaatatggacaaccttcaagacacgctggaagctgccagtttcctacagattctgccagttttggacttctgtaaagtgtttctcatatctggggtcactttagacaactgtgttgaagttggacggattgccaacacctacaatctaaccgaagtggataaatacgttaacagtttcgtcttgaagaattttcctgcattgctgagcacaggggagttcttgaaactcccttttgagcgtcttgccttcgtgctttccagtaatagccttaagcactgtactgaacttgagctctttaaggctacctgtcgttggcttcgcctggaagagcctcggatggactttgctgcaaaattaatgaagaacatacgatttccactgatgacaccacaggagctcattaattacgtgcaaacggtggatttcatgagaactgacaatacttgtgtgaatttgcttttggaagccagcaattaccaaatgatgccatatatgcagccagttatgcagtcagacaggactgccattaggtctgacaccactcacttggttacactaggaggagtgctgaggcagcagctggttgtcagtaaggaattgcgcatgtatgatgaaaaggcccatgagtggaaatcgttagcccccatggatgccccaaggtaccagcatggcatcgccgtcattggaaattttctctatgtggttggcggacagagtaattatgatacaaaaggaaaaacggcagttgatacagtcttcagatttgatcctcgatacaataaatggatgcaagttgcatctttaaatgaaaagcgcaccttcttccacctaagtgccctcaaaggatatctgtatgcagttggtgggcgaaatgcagcaggtgaactgcccacagtagaatgttacaatccaagaacaaatgaatggacctatgttgccaaaatgagtgagccccactatggccatgctggaactgtgtatggaggagtgatgtatatttcaggaggaattactcatgatactttccaaaaggagctcatgtgctttgaccctgatactgacaaatggatccagaaggcgccaatgaccactgtcagaggtctgcattgcatgtgtacagtgggagaaaggctctatgtcattggtggcaatcacttcagaggaacaagtgattatgatgatgtcctaagctgtgaatactattcacctatccttgaccagtggaccccaattgctgccatgttaagagggcagagtgatgttggggtcgctgtcttcgaaaataaaatctatgtggttggggggtattcttggaataatcgttgtatggtagagatagtgcagaaatatgatccagataaagatgaatggcataaggtttttgatctgccagaatcccttggtggcattcgtgcttgcacactcacagtttttccaccagaagaaaccacaccatcaccttctagagagtcccctctttctgcaccttaagatcatctctacaactaagatgctgtagttctatctttgcaatgtgtcataaattctcttctttttcccccttaagtagtatatatgttaggattaccctctggtaattgatacagatattggaaaaaagacaacattgatgttatttgtgctctttgtttggcctagaatgtttataaagtggtaacacaaccattctggaaatgtatcccatagaagctgatgtttaacatatgaaaaaaaaagtattgtctataaaatgtttcttcagtactttttaaatgctgtgtattgggtgtaaggtatttgtcatcttacattagtaaacccaataagccaagttgaaggtggattatagtaaatgtacaactgtgctcactaggcttcaagtaaaaagttttcctttcatctttgactgtaagatgtcaaagggaggcagcctgcttgaacaggaaacaatacacaaaaggttgccaactcgcatgagctacctccctcttttcataaagtatttttgacatatctgtcaacccacttgactgtgtgggtgcattgagaacacaaagtttcctagacacacaggagaagtagcttaaattcactaatattaatttaaaaagcagcatgaaccctctacttataaacaagggtttggtgtttttaaagtgtgtatacatacatacacatacacacatgcacatatgtcaaatataatttttttaaaaattgagtggcacatcaaagaaatgtgaaattaaaaagaattcttccaaaaagcagcttccattaaaatgggaattcagtatgcacatactgaatgcatatatgtagaaccatacagaatttaggtggataagggctagaaattttgagcaacaaaatttgtcacttgaccagattttatcttcaaaaactgtattctactccttctcctttgctgttgaggtaacttgcatattatatgtattctgtatactcagttcataaggttatttagcacaaagtatagcagcttcacctggagagctgcttttgctcagtaaattcaacttccatgttttatctttttttgttcaataaaaacatttaatgtc

SEQ ID NO: 145245 - DNA, 5331 bp, Homo sapiens
  Payload ID: 8704
  Gene Symbol: KLHL13
  Gene Name: kelch-like family member 13
  ENST ID: ENST00000371876
  CDS Start-End: 2423-4237
cttggaattactcagataatcattcctttaagcatagattgatataattgtggcttggggtttgcagagaagtgttacctccttgcaatgttgaagaacagtgctcttcacattcaatcaataaacttaataaaggggagatagatgggaatattgaatctgctaagaaggttaacatggcatgtactgttaccaaagcagaaattagtagggagtgttttgaatgttaaaaagtcaaaagatactgataaaacatcatgaaaaagataattttagtccaggcttcttcagcttttgaagtaattaattaaaaaggcaagcatattatgttggcaagaaagggctgcattttcactttttgctttctgtttttaagagcaagagacaaatgacaaagtaaataagttgttacttgtagtttactcaaaaaagcaatttccgggatatgtcattgtggcaatgtgaattcagctttactcctatcccttttacatctgcagtttcataagaatgataattgatggtcatttaagcactgcataataaagaaatgtctttggaatgatctacagaaagaagattctgtattcattcagaggacatatattaagtctttcgtgctaggctctgtgcagggaatacagaaactaataaaacagtctgcttgaatatcctattaatataatctggatgaatagacattttctggttagggataacagtcaccatcaatcaatttctgacttttccaattgattctgtaattttaaacgtctgtccacaaaagttgtttaaaattgtgtgtgtgtgctatatatcataaatataacttaattctctttaaagctatctctgaaactctggtggaaggctatatccagtttcttttatgctttttaaaatcttaagttattctcttctttattaaatatctatcagaattgaattaaacatggttatatattattaattcatttttggttatactatggctctaatatcattaagaagaattgatgtcatccttaaggccagaatttttgctaattattgcaagatttaaaaccacttagttggtgtcataattcaaaaagcagaatctttagtatggtctttttcttgttaaaactgatcaacttggggttttaggtatgacaggaaaaaaaggtgaaacctttctgatattggatagctcagttagacagttagaaaagcaaataattcaaaattgaggaaattacagaaaaaatgaagagttccagcacttgaaaatctgctctccttcttttttcctaatgtctattttagcagtctttttagcagtctgtatcatgaatgcagaaccaaattcatgagccatgggctccccactcttaggcaggtgatccagagattattttagcaatgtatacctatggagaaacacaagatctcttctaaggaatgatgaaaggttattaataatggcacatttttagtataacctgagatttttaaactatcaaatgtattgtcatattctctttgcatctaagtgacctactgactaaggttctcctattcttacttatgccccttgaaaatactattgctgcaatacatgcaaatacagaattgcctgtatttatatttttagtattcatttctttgaaaagatggaaatgtgactagattgtagctattaaacaatcccaaactggtaagtgagagatactgctagaaaaagaaattatatcatgtgaaaaattttgttcagttggggttgattagaactactactaataacagaagataaagtaatgcattaatatataacaattaatcttttacttttattaatgggggtttggagtgggaatcagactagacctagattcaaaccctgggccaaccactttaataagtggtttctgacccttctttagtctgtgtataaaattattggcaagtacctgctatataatgactattcaataaatggtagctatcatttttatcttttcaaaattaggtgttccaaattaattttaactatatgcagcataatttgatggcattgctatctaaatagtaacatatcaacagtaattactgtggcctttaaaaactctgtgactataattttgaaccaccttttaagttgatttctcagttatcatctgtatattctgtacttggaaaccattttacaaatatacatttcttctaagataaagagtggtacaagcgtataatatagtgaaacaatattcaccatattgcatggtcatatgattgcaatagtgactgattatttttctaaataatctcattgtaaattgtacaagttttaatttccccttctttcttatgtaaaaaaactttcagatctctcgtggaagaggaagaccaacacatgaaattgtcccttggaggcagcgaaatgggcctctcatcccatttgcagtcttccaaggcaggacctacacgcatctttaccagcaatacccacagttctgtggtgttacagggctttgaccagcttcgacttgaaggattgctttgtgatgtgaccctgatgccaggtgacacagatgatgctttccctgtgcatagagtcatgatggcatctgctagtgattacttcaaggctatgttcacaggtggaatgaaagaacaagatttaatgtgcattaaacttcatggtgtgagcaaagtcggtctaaggaaaattattgatttcatttatactgcaaagctttctcttaatatggacaaccttcaagacacgctggaagctgccagtttcctacagattctgccagttttggacttctgtaaagtgtttctcatatctggggtcactttagacaactgtgttgaagttggacggattgccaacacctacaatctaaccgaagtggataaatacgttaacagtttcgtcttgaagaattttcctgcattgctgagcacaggggagttcttgaaactcccttttgagcgtcttgccttcgtgctttccagtaatagccttaagcactgtactgaacttgagctctttaaggctacctgtcgttggcttcgcctggaagagcctcggatggactttgctgcaaaattaatgaagaacatacgatttccactgatgacaccacaggagctcattaattacgtgcaaacggtggatttcatgagaactgacaatacttgtgtgaatttgcttttggaagccagcaattaccaaatgatgccatatatgcagccagttatgcagtcagacaggactgccattaggtctgacaccactcacttggttacactaggaggagtgctgaggcagcagctggttgtcagtaaggaattgcgcatgtatgatgaaaaggcccatgagtggaaatcgttagcccccatggatgccccaaggtaccagcatggcatcgccgtcattggaaattttctctatgtggttggcggacagagtaattatgatacaaaaggaaaaacggcagttgatacagtcttcagatttgatcctcgatacaataaatggatgcaagttgcatctttaaatgaaaagcgcaccttcttccacctaagtgccctcaaaggatatctgtatgcagttggtgggcgaaatgcagcaggtgaactgcccacagtagaatgttacaatccaagaacaaatgaatggacctatgttgccaaaatgagtgagccccactatggccatgctggaactgtgtatggaggagtgatgtatatttcaggaggaattactcatgatactttccaaaaggagctcatgtgctttgaccctgatactgacaaatggatccagaaggcgccaatgaccactgtcagaggtctgcattgcatgtgtacagtgggagaaaggctctatgtcattggtggcaatcacttcagaggaacaagtgattatgatgatgtcctaagctgtgaatactattcacctatccttgaccagtggaccccaattgctgccatgttaagagggcagagtgatgttggggtcgctgtcttcgaaaataaaatctatgtggttggggggtattcttggaataatcgttgtatggtagagatagtgcagaaatatgatccagataaagatgaatggcataaggtttttgatctgccagaatcccttggtggcattcgtgcttgcacactcacagtttttccaccagaagaaaccacaccatcaccttctagagagtcccctctttctgcaccttaagatcatctctacaactaagatgctgtagttctatctttgcaatgtgtcataaattctcttctttttcccccttaagtagtatatatgttaggattaccctctggtaattgatacagatattggaaaaaagacaacattgatgttatttgtgctctttgtttggcctagaatgtttataaagtggtaacacaaccattctggaaatgtatcccatagaagctgatgtttaacatatgaaaaaaaaagtattgtctataaaatgtttcttcagtactttttaaatgctgtgtattgggtgtaaggtatttgtcatcttacattagtaaacccaataagccaagttgaaggtggattatagtaaatgtacaactgtgctcactaggcttcaagtaaaaagttttcctttcatctttgactgtaagatgtcaaagggaggcagcctgcttgaacaggaaacaatacacaaaaggttgccaactcgcatgagctacctccctcttttcataaagtatttttgacatatctgtcaacccacttgactgtgtgggtgcattgagaacacaaagtttcctagacacacaggagaagtagcttaaattcactaatattaatttaaaaagcagcatgaaccctctacttataaacaagggtttggtgtttttaaagtgtgtatacatacatacacatacacacatgcacatatgtcaaatataatttttttaaaaattgagtggcacatcaaagaaatgtgaaattaaaaagaattcttccaaaaagcagcttccattaaaatgggaattcagtatgcacatactgaatgcatatatgtagaaccatacagaatttaggtggataagggctagaaattttgagcaacaaaatttgtcacttgaccagattttatcttcaaaaactgtattctactccttctcctttgctgttgaggtaacttgcatattatatgtattctgtatactcagttcataaggttatttagcacaaagtatagcagcttcacctggagagctgcttttgctcagtaaattcaacttccatgttttatctttttttgttcaataaaaacatttaatgtc

SEQ ID NO: 145246 - DNA, 3234 bp, Homo sapiens
  Payload ID: 8704
  Gene Symbol: KLHL13
  Gene Name: kelch-like family member 13
  ENST ID: ENST00000371878
  CDS Start-End: 326-2140
gcagagttctgaagcagtttatattcttcttacattttgccttctcctagctggaaagcagagggactggaatttttgaaacgggcttttcccataatggcattcttgatttgtgtggccagagcttgcacaggaggaaagcaggctgctgaatttagtcactgatctctattagcggtagcctaaggctatgctgaggtttatatcccatttgtattgttgcagctcaaaagaagattgttcagaggatgacaagtgtattctgagtagatctctcgtggaagaggaagaccaacacatgaaattgtcccttggaggcagcgaaatgggcctctcatcccatttgcagtcttccaaggcaggacctacacgcatctttaccagcaatacccacagttctgtggtgttacagggctttgaccagcttcgacttgaaggattgctttgtgatgtgaccctgatgccaggtgacacagatgatgctttccctgtgcatagagtcatgatggcatctgctagtgattacttcaaggctatgttcacaggtggaatgaaagaacaagatttaatgtgcattaaacttcatggtgtgagcaaagtcggtctaaggaaaattattgatttcatttatactgcaaagctttctcttaatatggacaaccttcaagacacgctggaagctgccagtttcctacagattctgccagttttggacttctgtaaagtgtttctcatatctggggtcactttagacaactgtgttgaagttggacggattgccaacacctacaatctaaccgaagtggataaatacgttaacagtttcgtcttgaagaattttcctgcattgctgagcacaggggagttcttgaaactcccttttgagcgtcttgccttcgtgctttccagtaatagccttaagcactgtactgaacttgagctctttaaggctacctgtcgttggcttcgcctggaagagcctcggatggactttgctgcaaaattaatgaagaacatacgatttccactgatgacaccacaggagctcattaattacgtgcaaacggtggatttcatgagaactgacaatacttgtgtgaatttgcttttggaagccagcaattaccaaatgatgccatatatgcagccagttatgcagtcagacaggactgccattaggtctgacaccactcacttggttacactaggaggagtgctgaggcagcagctggttgtcagtaaggaattgcgcatgtatgatgaaaaggcccatgagtggaaatcgttagcccccatggatgccccaaggtaccagcatggcatcgccgtcattggaaattttctctatgtggttggcggacagagtaattatgatacaaaaggaaaaacggcagttgatacagtcttcagatttgatcctcgatacaataaatggatgcaagttgcatctttaaatgaaaagcgcaccttcttccacctaagtgccctcaaaggatatctgtatgcagttggtgggcgaaatgcagcaggtgaactgcccacagtagaatgttacaatccaagaacaaatgaatggacctatgttgccaaaatgagtgagccccactatggccatgctggaactgtgtatggaggagtgatgtatatttcaggaggaattactcatgatactttccaaaaggagctcatgtgctttgaccctgatactgacaaatggatccagaaggcgccaatgaccactgtcagaggtctgcattgcatgtgtacagtgggagaaaggctctatgtcattggtggcaatcacttcagaggaacaagtgattatgatgatgtcctaagctgtgaatactattcacctatccttgaccagtggaccccaattgctgccatgttaagagggcagagtgatgttggggtcgctgtcttcgaaaataaaatctatgtggttggggggtattcttggaataatcgttgtatggtagagatagtgcagaaatatgatccagataaagatgaatggcataaggtttttgatctgccagaatcccttggtggcattcgtgcttgcacactcacagtttttccaccagaagaaaccacaccatcaccttctagagagtcccctctttctgcaccttaagatcatctctacaactaagatgctgtagttctatctttgcaatgtgtcataaattctcttctttttcccccttaagtagtatatatgttaggattaccctctggtaattgatacagatattggaaaaaagacaacattgatgttatttgtgctctttgtttggcctagaatgtttataaagtggtaacacaaccattctggaaatgtatcccatagaagctgatgtttaacatatgaaaaaaaaagtattgtctataaaatgtttcttcagtactttttaaatgctgtgtattgggtgtaaggtatttgtcatcttacattagtaaacccaataagccaagttgaaggtggattatagtaaatgtacaactgtgctcactaggcttcaagtaaaaagttttcctttcatctttgactgtaagatgtcaaagggaggcagcctgcttgaacaggaaacaatacacaaaaggttgccaactcgcatgagctacctccctcttttcataaagtatttttgacatatctgtcaacccacttgactgtgtgggtgcattgagaacacaaagtttcctagacacacaggagaagtagcttaaattcactaatattaatttaaaaagcagcatgaaccctctacttataaacaagggtttggtgtttttaaagtgtgtatacatacatacacatacacacatgcacatatgtcaaatataatttttttaaaaattgagtggcacatcaaagaaatgtgaaattaaaaagaattcttccaaaaagcagcttccattaaaatgggaattcagtatgcacatactgaatgcatatatgtagaaccatacagaatttaggtggataagggctagaaattttgagcaacaaaatttgtcacttgaccagattttatcttcaaaaactgtattctactccttctcctttgctgttgaggtaacttgcatattatatgtattctgtatactcagttcataaggttatttagcacaaagtatagcagcttcacctggagagctgcttttgctcagtaaattcaacttccatgttttatctttttttgttcaataaaaacatttaatgtc

SEQ ID NO: 145247 - DNA, 3256 bp, Homo sapiens
  Payload ID: 8704
  Gene Symbol: KLHL13
  Gene Name: kelch-like family member 13
  ENST ID: ENST00000371882
  CDS Start-End: 347-2161
ggtcaggcggaggctctgccgctgcggccgcagtagctcagctcctattcctgggaagcctggaacggggacttttgaaaataactgcagcggcattcgggttagggtccgtgctctccgcctgcgccaggacagggtgaagtggtcggggcgagcagagggtgcgaaggtgcgggtgctggtgcctcgcagcaggagggagccccggctgcgccgcgcgactccctctttggccctcggagcgcagcacccggcggacaagcggcgggacgccaggacgcggcgagcaagatctctcgtggaagaggaagaccaacacatgaaattgtcccttggaggcagcgaaatgggcctctcatcccatttgcagtcttccaaggcaggacctacacgcatctttaccagcaatacccacagttctgtggtgttacagggctttgaccagcttcgacttgaaggattgctttgtgatgtgaccctgatgccaggtgacacagatgatgctttccctgtgcatagagtcatgatggcatctgctagtgattacttcaaggctatgttcacaggtggaatgaaagaacaagatttaatgtgcattaaacttcatggtgtgagcaaagtcggtctaaggaaaattattgatttcatttatactgcaaagctttctcttaatatggacaaccttcaagacacgctggaagctgccagtttcctacagattctgccagttttggacttctgtaaagtgtttctcatatctggggtcactttagacaactgtgttgaagttggacggattgccaacacctacaatctaaccgaagtggataaatacgttaacagtttcgtcttgaagaattttcctgcattgctgagcacaggggagttcttgaaactcccttttgagcgtcttgccttcgtgctttccagtaatagccttaagcactgtactgaacttgagctctttaaggctacctgtcgttggcttcgcctggaagagcctcggatggactttgctgcaaaattaatgaagaacatacgatttccactgatgacaccacaggagctcattaattacgtgcaaacggtggatttcatgagaactgacaatacttgtgtgaatttgcttttggaagccagcaattaccaaatgatgccatatatgcagccagttatgcagtcagacaggactgccattaggtctgacaccactcacttggttacactaggaggagtgctgaggcagcagctggttgtcagtaaggaattgcgcatgtatgatgaaaaggcccatgagtggaaatcgttagcccccatggatgccccaaggtaccagcatggcatcgccgtcattggaaattttctctatgtggttggcggacagagtaattatgatacaaaaggaaaaacggcagttgatacagtcttcagatttgatcctcgatacaataaatggatgcaagttgcatctttaaatgaaaagcgcaccttcttccacctaagtgccctcaaaggatatctgtatgcagttggtgggcgaaatgcagcaggtgaactgcccacagtagaatgttacaatccaagaacaaatgaatggacctatgttgccaaaatgagtgagccccactatggccatgctggaactgtgtatggaggagtgatgtatatttcaggaggaattactcatgatactttccaaaaggagctcatgtgctttgaccctgatactgacaaatggatccagaaggcgccaatgaccactgtcagaggtctgcattgcatgtgtacagtgggagaaaggctctatgtcattggtggcaatcacttcagaggaacaagtgattatgatgatgtcctaagctgtgaatactattcacctatccttgaccagtggaccccaattgctgccatgttaagagggcagagtgatgttggggtcgctgtcttcgaaaataaaatctatgtggttggggggtattcttggaataatcgttgtatggtagagatagtgcagaaatatgatccagataaagatgaatggcataaggtttttgatctgccagaatcccttggtggcattcgtgcttgcacactcacagtttttccaccagaagaaaccacaccatcaccttctagagagtcccctctttctgcaccttaagatcatctctacaactaagatgctgtagttctatctttgcaatgtgtcataaattctcttctttttcccccttaagtagtatatatgttaggattaccctctggtaattgatacagatattggaaaaaagacaacattgatgttatttgtgctctttgtttggcctagaatgtttataaagtggtaacacaaccattctggaaatgtatcccatagaagctgatgtttaacatatgaaaaaaaaagtattgtctataaaatgtttcttcagtactttttaaatgctgtgtattgggtgtaaggtatttgtcatcttacattagtaaacccaataagccaagttgaaggtggattatagtaaatgtacaactgtgctcactaggcttcaagtaaaaagttttcctttcatctttgactgtaagatgtcaaagggaggcagcctgcttgaacaggaaacaatacacaaaaggttgccaactcgcatgagctacctccctcttttcataaagtatttttgacatatctgtcaacccacttgactgtgtgggtgcattgagaacacaaagtttcctagacacacaggagaagtagcttaaattcactaatattaatttaaaaagcagcatgaaccctctacttataaacaagggtttggtgtttttaaagtgtgtatacatacatacacatacacacatgcacatatgtcaaatataatttttttaaaaattgagtggcacatcaaagaaatgtgaaattaaaaagaattcttccaaaaagcagcttccattaaaatgggaattcagtatgcacatactgaatgcatatatgtagaaccatacagaatttaggtggataagggctagaaattttgagcaacaaaatttgtcacttgaccagattttatcttcaaaaactgtattctactccttctcctttgctgttgaggtaacttgcatattatatgtattctgtatactcagttcataaggttatttagcacaaagtatagcagcttcacctggagagctgcttttgctcagtaaattcaacttccatgttttatctttttttgttcaataaaaacatttaatgtca

SEQ ID NO: 145248 - DNA, 306 bp, Homo sapiens
  Payload ID: 8704
  Gene Symbol: KLHL13
  Gene Name: kelch-like family member 13
  ENST ID: ENST00000453826
  CDS Start-End: 194-306
cattatccaacttttagaggtgatggatcatctgcatagaggggaattggttgctgcaatacttcgtaaccggagacggaggcaattgtcattaaaacaagccgatttcaaggatatattcaaaaaatcaacttcaggatctctcgtggaagaggaagaccaacacatgaaattgtcccttggaggcagcgaaatgggcctctcatcccatttgcagtcttccaaggcaggacctacacgcatctttaccagcaatacccacagttctgtggtgttacagggctttgaccagcttcgacttgaagg

SEQ ID NO: 145249 - DNA, 3972 bp, Homo sapiens; identical to SEQ ID NO: 145244
  Payload ID: 8704
  Gene Symbol: KLHL13
  Gene Name: kelch-like family member 13
  ENST ID: ENST00000447671
  CDS Start-End: 1064-2878

SEQ ID NO: 145250 - DNA, 2353 bp, Homo sapiens
  Payload ID: 8704
  Gene Symbol: KLHL13
  Gene Name: kelch-like family member 13
  ENST ID: ENST00000469946
  CDS Start-End: 203-2017
agagaatttgatgagagagggatccacaagaacatgacaaatgatgagagttcaaaccttaagagaaaaatgggcttattggagacggaggcaattgtcattaaaacaagccgatttcaaggatatattcaaaaaatcaacttcaggatctctcgtggaagaggaagaccaacacatgaaattgtcccttggaggcagcgaaatgggcctctcatcccatttgcagtcttccaaggcaggacctacacgcatctttaccagcaatacccacagttctgtggtgttacagggctttgaccagcttcgacttgaaggattgctttgtgatgtgaccctgatgccaggtgacacagatgatgctttccctgtgcatagagtcatgatggcatctgctagtgattacttcaaggctatgttcacaggtggaatgaaagaacaagatttaatgtgcattaaacttcatggtgtgagcaaagtcggtctaaggaaaattattgatttcatttatactgcaaagctttctcttaatatggacaaccttcaagacacgctggaagctgccagtttcctacagattctgccagttttggacttctgtaaagtgtttctcatatctggggtcactttagacaactgtgttgaagttggacggattgccaacacctacaatctaaccgaagtggataaatacgttaacagtttcgtcttgaagaattttcctgcattgctgagcacaggggagttcttgaaactcccttttgagcgtcttgccttcgtgctttccagtaatagccttaagcactgtactgaacttgagctctttaaggctacctgtcgttggcttcgcctggaagagcctcggatggactttgctgcaaaattaatgaagaacatacgatttccactgatgacaccacaggagctcattaattacgtgcaaacggtggatttcatgagaactgacaatacttgtgtgaatttgcttttggaagccagcaattaccaaatgatgccatatatgcagccagttatgcagtcagacaggactgccattaggtctgacaccactcacttggttacactaggaggagtgctgaggcagcagctggttgtcagtaaggaattgcgcatgtatgatgaaaaggcccatgagtggaaatcgttagcccccatggatgccccaaggtaccagcatggcatcgccgtcattggaaattttctctatgtggttggcggacagagtaattatgatacaaaaggaaaaacggcagttgatacagtcttcagatttgatcctcgatacaataaatggatgcaagttgcatctttaaatgaaaagcgcaccttcttccacctaagtgccctcaaaggatatctgtatgcagttggtgggcgaaatgcagcaggtgaactgcccacagtagaatgttacaatccaagaacaaatgaatggacctatgttgccaaaatgagtgagccccactatggccatgctggaactgtgtatggaggagtgatgtatatttcaggaggaattactcatgatactttccaaaaggagctcatgtgctttgaccctgatactgacaaatggatccagaaggcgccaatgaccactgtcagaggtctgcattgcatgtgtacagtgggagaaaggctctatgtcattggtggcaatcacttcagaggaacaagtgattatgatgatgtcctaagctgtgaatactattcacctatccttgaccagtggaccccaattgctgccatgttaagagggcagagtgatgttggggtcgctgtcttcgaaaataaaatctatgtggttggggggtattcttggaataatcgttgtatggtagagatagtgcagaaatatgatccagataaagatgaatggcataaggtttttgatctgccagaatcccttggtggcattcgtgcttgcacactcacagtttttccaccagaagaaaccacaccatcaccttctagagagtcccctctttctgcaccttaagatcatctctacaactaagatgctgtagttctatctttgcaatgtgtcataaattctcttctttttcccccttaagtagtatatatgttaggattaccctctggtaattgatacagatattggaaaaaagacaacattgatgttatttgtgctctttgtttggcctagaatgtttataaagtggtaacacaaccattctggaaatgtatcccatagaagctgatgtttaacatatgaaaaaaaaagtattgtctataaaatgtttcttcagtactttttaaatgctgtgtattgggtgtaaggtatttgtcatcttacattagtaaacccaataag

SEQ ID NO: 145251 - DNA, 3322 bp, Homo sapiens
  Payload ID: 8704
  Gene Symbol: KLHL13
  Gene Name: kelch-like family member 13
  Uniprot ID: Q9P2N7
  ENST ID: ENST00000545703
  CDS Start-End: 387-2228
actgccccctccctccccaactgggttcccgcccccctccctcagcagcccccccacaccctggtgaggtcaggcggaggctctgccgctgcggccgcagtagctcagctcctattcctgggaagcctggaacggggacttttgaaaataactgcagcggcattcgggttagggtccgtgctctccgcctgcgccaggacagggtgaagtggtcggggcgagcagagggtgcgaaggtgcgggtgctggtgcctcgcagcaggagggagccccggctgcgccgcgcgactccctctttggccctcggagcgcagcacccggcggacaagcggcgggacgccaggacgcggcgagcaagatctctcgtggaagaggaagaccaacacatgaaattgtcccttggaggcagcgaaatgggcctctcatcccatttgcagtcttccaaggcaggacctacacgcatctttaccagcaatacccacagttctgtggtgttacagggctttgaccagcttcgacttgaaggattgctttgtgatgtgaccctgatgccaggtgacacagatgatgctttccctgtgcatagagtcatgatggcatctgctagtgattacttcaaggctatgttcacaggtggaatgaaagaacaagatttaatgtgcattaaacttcatggtgtgagcaaagtcggtctaaggaaaattattgatttcatttatactgcaaagctttctcttaatatggacaaccttcaagacacgctggaagctgccagtttcctacagattctgccagttttggacttctgtaaagtgtttctcatatctggggtcactttagacaactgtgttgaagttggacggattgccaacacctacaatctaaccgaagtggataaatacgttaacagtttcgtcttgaagaattttcctgcattgctgagcacaggggagttcttgaaactcccttttgagcgtcttgccttcgtgctttccagtaatagccttaagcactgtactgaacttgagctctttaaggctacctgtcgttggcttcgcctggaagagcctcggatggactttgctgcaaaattaatgaagaacatacgatttccactgatgacaccacaggagctcattaattacgtgcaaacggtggatttcatgagaactgacaatacttgtgtgaatttgcttttggaagccagcaattaccaaatgatgccatatatgcagccagttatgcagtcagacaggactgccattaggtctgacaccactcacttggttacactaggaggagtgctgaggcagcagctggttgtcagtaaggaattgcgcatgtatgatgaaaaggcccatgagtggaaatcgttagcccccatggatgccccaaggtaccagcatggcatcgccgtcattggaaattttctctatgtggttggcggacagagtaattatgatacaaaaggaaaaacggcagttgatacagtcttcagatttgatcctcgatacaataaatggatgcaagttgcatctttaaatgaaaagcgcaccttcttccacctaagtgccctcaaaggatatctgtatgcagttggtgggcgaaatgcagcaggtgaactgcccacagtagaatgttacaatccaagaacaaatgaatggacctatgttgccaaaatgagtgagccccactatggccatgctggaactgtgtatggaggagtgatgtatatttcaggaggaattactcatgatactttccaaaaggagctcatgtgctttgaccctgatactgacaaatggatccagaaggcgccaatgaccactgtcagaggtctgcattgcatgtgtacagtgggagaaaggctctatgtcattggtggcaatcacttcagaggaacaagtgattatgatgatgtcctaagctgtgaatactattcacctatccttgaccagtggaccccaattgctgccatgttaagagggcagagtgatgttggggtcgctgtcttcgaaaataaaatctatgtggttggggggtattcttggaataatcgttgtatggtagagatagtgcagaaatatgatccagataaagatgaatggcataaggtttttgatctgccagaatcccttggtggcattcgtgcttgcacactcacagtttttccaccagaagaaaccacaccatcaccttctagagagtcccctctttctgcaccttaagatcatctctacaactaagatgctgtagttctatctttgcaatgtgtcataaattctcttctttttcccccttaagtagtatatatgttaggattaccctctggtaattgatacagatattggaaaaaagacaacattgatgttatttgtgctctttgtttggcctagaatgtttataaagtggtaacacaaccattctggaaatgtatcccatagaagctgatgtttaacatatgaaaaaaaaagtattgtctataaaatgtttcttcagtactttttaaatgctgtgtattgggtgtaaggtatttgtcatcttacattagtaaacccaataagccaagttgaaggtggattatagtaaatgtacaactgtgctcactaggcttcaagtaaaaagttttcctttcatctttgactgtaagatgtcaaagggaggcagcctgcttgaacaggaaacaatacacaaaaggttgccaactcgcatgagctacctccctcttttcataaagtatttttgacatatctgtcaacccacttgactgtgtgggtgcattgagaacacaaagtttcctagacacacaggagaagtagcttaaattcactaatattaatttaaaaagcagcatgaaccctctacttataaacaagggtttggtgtttttaaagtgtgtatacatacatacacatacacacatgcacatatgtcaaatataatttttttaaaaattgagtggcacatcaaagaaatgtgaaattaaaaagaattcttccaaaaagcagcttccattaaaatgggaattcagtatgcacatactgaatgcatatatgtagaaccatacagaatttaggtggataagggctagaaattttgagcaacaaaatttgtcacttgaccagattttatcttcaaaaactgtattctactccttctcctttgctgttgaggtaacttgcatattatatgtattctgtatactcagttcataaggttatttagcacaaagtatagcagcttcacctggagagctgcttttgctcagtaaattcaacttccatgttttatctttttttgttcaataaaaacatttaatgtc

SEQ ID NO: 145252 - DNA, 3396 bp, Homo sapiens
  Payload ID: 8704
  Gene Symbol: KLHL13
  Gene Name: kelch-like family member 13
  Uniprot ID: Q9P2N7
  ENST ID: ENST00000540167
  CDS Start-End: 383-2302
actgccccctccctccccaactgggttcccgcccccctccctcagcagcccccccacaccctggtgaggtcaggcggaggctctgccgctgcggccgcagtagctcagctcctattcctgggaagcctggaacggggacttttgaaaataactgcagcggcattcgggttagggtccgtgctctccgcctgcgccaggacagggtgaagtggtcggggcgagcagagggtgcgaaggtgcgggtgctggtgcctcgcagcaggagggagccccggctgcgccgcgcgactccctctttggccctcggagcgcagcacccggcggacaagcggcgggacgccaggacgcggcgagcaaggtcattatccaacttttagaggtgatggatcatctgcatagaggggaattggttgctgcaatacttcgtaaccgatctctcgtggaagaggaagaccaacacatgaaattgtcccttggaggcagcgaaatgggcctctcatcccatttgcagtcttccaaggcaggacctacacgcatctttaccagcaatacccacagttctgtggtgttacagggctttgaccagcttcgacttgaaggattgctttgtgatgtgaccctgatgccaggtgacacagatgatgctttccctgtgcatagagtcatgatggcatctgctagtgattacttcaaggctatgttcacaggtggaatgaaagaacaagatttaatgtgcattaaacttcatggtgtgagcaaagtcggtctaaggaaaattattgatttcatttatactgcaaagctttctcttaatatggacaaccttcaagacacgctggaagctgccagtttcctacagattctgccagttttggacttctgtaaagtgtttctcatatctggggtcactttagacaactgtgttgaagttggacggattgccaacacctacaatctaaccgaagtggataaatacgttaacagtttcgtcttgaagaattttcctgcattgctgagcacaggggagttcttgaaactcccttttgagcgtcttgccttcgtgctttccagtaatagccttaagcactgtactgaacttgagctctttaaggctacctgtcgttggcttcgcctggaagagcctcggatggactttgctgcaaaattaatgaagaacatacgatttccactgatgacaccacaggagctcattaattacgtgcaaacggtggatttcatgagaactgacaatacttgtgtgaatttgcttttggaagccagcaattaccaaatgatgccatatatgcagccagttatgcagtcagacaggactgccattaggtctgacaccactcacttggttacactaggaggagtgctgaggcagcagctggttgtcagtaaggaattgcgcatgtatgatgaaaaggcccatgagtggaaatcgttagcccccatggatgccccaaggtaccagcatggcatcgccgtcattggaaattttctctatgtggttggcggacagagtaattatgatacaaaaggaaaaacggcagttgatacagtcttcagatttgatcctcgatacaataaatggatgcaagttgcatctttaaatgaaaagcgcaccttcttccacctaagtgccctcaaaggatatctgtatgcagttggtgggcgaaatgcagcaggtgaactgcccacagtagaatgttacaatccaagaacaaatgaatggacctatgttgccaaaatgagtgagccccactatggccatgctggaactgtgtatggaggagtgatgtatatttcaggaggaattactcatgatactttccaaaaggagctcatgtgctttgaccctgatactgacaaatggatccagaaggcgccaatgaccactgtcagaggtctgcattgcatgtgtacagtgggagaaaggctctatgtcattggtggcaatcacttcagaggaacaagtgattatgatgatgtcctaagctgtgaatactattcacctatccttgaccagtggaccccaattgctgccatgttaagagggcagagtgatgttggggtcgctgtcttcgaaaataaaatctatgtggttggggggtattcttggaataatcgttgtatggtagagatagtgcagaaatatgatccagataaagatgaatggcataaggtttttgatctgccagaatcccttggtggcattcgtgcttgcacactcacagtttttccaccagaagaaaccacaccatcaccttctagagagtcccctctttctgcaccttaagatcatctctacaactaagatgctgtagttctatctttgcaatgtgtcataaattctcttctttttcccccttaagtagtatatatgttaggattaccctctggtaattgatacagatattggaaaaaagacaacattgatgttatttgtgctctttgtttggcctagaatgtttataaagtggtaacacaaccattctggaaatgtatcccatagaagctgatgtttaacatatgaaaaaaaaagtattgtctataaaatgtttcttcagtactttttaaatgctgtgtattgggtgtaaggtatttgtcatcttacattagtaaacccaataagccaagttgaaggtggattatagtaaatgtacaactgtgctcactaggcttcaagtaaaaagttttcctttcatctttgactgtaagatgtcaaagggaggcagcctgcttgaacaggaaacaatacacaaaaggttgccaactcgcatgagctacctccctcttttcataaagtatttttgacatatctgtcaacccacttgactgtgtgggtgcattgagaacacaaagtttcctagacacacaggagaagtagcttaaattcactaatattaatttaaaaagcagcatgaaccctctacttataaacaagggtttggtgtttttaaagtgtgtatacatacatacacatacacacatgcacatatgtcaaatataatttttttaaaaattgagtggcacatcaaagaaatgtgaaattaaaaagaattcttccaaaaagcagcttccattaaaatgggaattcagtatgcacatactgaatgcatatatgtagaaccatacagaatttaggtggataagggctagaaattttgagcaacaaaatttgtcacttgaccagattttatcttcaaaaactgtattctactccttctcctttgctgttgaggtaacttgcatattatatgtattctgtatactcagttcataaggttatttagcacaaagtatagcagcttcacctggagagctgcttttgctcagtaaattcaacttccatgttttatctttttttgttcaataaaaacatttaatgtc

SEQ ID NO: 145253 - DNA, 3071 bp, Homo sapiens
  Payload ID: 8704
  Gene Symbol: KLHL13
  Gene Name: kelch-like family member 13
  Uniprot ID: Q9P2N7
  ENST ID: ENST00000539496
  CDS Start-End: 1-1977
atgatgagagttcaaaccttaagagaaaaatgggcttattggagacggaggcaattgtcattaaaacaagccgatttcaaggatatattcaaaaaatcaacttcaggatctctcgtggaagaggaagaccaacacatgaaattgtcccttggaggcagcgaaatgggcctctcatcccatttgcagtcttccaaggcaggacctacacgcatctttaccagcaatacccacagttctgtggtgttacagggctttgaccagcttcgacttgaaggattgctttgtgatgtgaccctgatgccaggtgacacagatgatgctttccctgtgcatagagtcatgatggcatctgctagtgattacttcaaggctatgttcacaggtggaatgaaagaacaagatttaatgtgcattaaacttcatggtgtgagcaaagtcggtctaaggaaaattattgatttcatttatactgcaaagctttctcttaatatggacaaccttcaagacacgctggaagctgccagtttcctacagattctgccagttttggacttctgtaaagtgtttctcatatctggggtcactttagacaactgtgttgaagttggacggattgccaacacctacaatctaaccgaagtggataaatacgttaacagtttcgtcttgaagaattttcctgcattgctgagcacaggggagttcttgaaactcccttttgagcgtcttgccttcgtgctttccagtaatagccttaagcactgtactgaacttgagctctttaaggctacctgtcgttggcttcgcctggaagagcctcggatggactttgctgcaaaattaatgaagaacatacgatttccactgatgacaccacaggagctcattaattacgtgcaaacggtggatttcatgagaactgacaatacttgtgtgaatttgcttttggaagccagcaattaccaaatgatgccatatatgcagccagttatgcagtcagacaggactgccattaggtctgacaccactcacttggttacactaggaggagtgctgaggcagcagctggttgtcagtaaggaattgcgcatgtatgatgaaaaggcccatgagtggaaatcgttagcccccatggatgccccaaggtaccagcatggcatcgccgtcattggaaattttctctatgtggttggcggacagagtaattatgatacaaaaggaaaaacggcagttgatacagtcttcagatttgatcctcgatacaataaatggatgcaagttgcatctttaaatgaaaagcgcaccttcttccacctaagtgccctcaaaggatatctgtatgcagttggtgggcgaaatgcagcaggtgaactgcccacagtagaatgttacaatccaagaacaaatgaatggacctatgttgccaaaatgagtgagccccactatggccatgctggaactgtgtatggaggagtgatgtatatttcaggaggaattactcatgatactttccaaaaggagctcatgtgctttgaccctgatactgacaaatggatccagaaggcgccaatgaccactgtcagaggtctgcattgcatgtgtacagtgggagaaaggctctatgtcattggtggcaatcacttcagaggaacaagtgattatgatgatgtcctaagctgtgaatactattcacctatccttgaccagtggaccccaattgctgccatgttaagagggcagagtgatgttggggtcgctgtcttcgaaaataaaatctatgtggttggggggtattcttggaataatcgttgtatggtagagatagtgcagaaatatgatccagataaagatgaatggcataaggtttttgatctgccagaatcccttggtggcattcgtgcttgcacactcacagtttttccaccagaagaaaccacaccatcaccttctagagagtcccctctttctgcaccttaagatcatctctacaactaagatgctgtagttctatctttgcaatgtgtcataaattctcttctttttcccccttaagtagtatatatgttaggattaccctctggtaattgatacagatattggaaaaaagacaacattgatgttatttgtgctctttgtttggcctagaatgtttataaagtggtaacacaaccattctggaaatgtatcccatagaagctgatgtttaacatatgaaaaaaaaagtattgtctataaaatgtttcttcagtactttttaaatgctgtgtattgggtgtaaggtatttgtcatcttacattagtaaacccaataagccaagttgaaggtggattatagtaaatgtacaactgtgctcactaggcttcaagtaaaaagttttcctttcatctttgactgtaagatgtcaaagggaggcagcctgcttgaacaggaaacaatacacaaaaggttgccaactcgcatgagctacctccctcttttcataaagtatttttgacatatctgtcaacccacttgactgtgtgggtgcattgagaacacaaagtttcctagacacacaggagaagtagcttaaattcactaatattaatttaaaaagcagcatgaaccctctacttataaacaagggtttggtgtttttaaagtgtgtatacatacatacacatacacacatgcacatatgtcaaatataatttttttaaaaattgagtggcacatcaaagaaatgtgaaattaaaaagaattcttccaaaaagcagcttccattaaaatgggaattcagtatgcacatactgaatgcatatatgtagaaccatacagaatttaggtggataagggctagaaattttgagcaacaaaatttgtcacttgaccagattttatcttcaaaaactgtattctactccttctcctttgctgttgaggtaacttgcatattatatgtattctgtatactcagttcataaggttatttagcacaaagtatagcagcttcacctggagagctgcttttgctcagtaaattcaacttccatgttttatctttttttgttcaataaaaacatttaatgtc

SEQ ID NO: 145254 - DNA, 3102 bp, Homo sapiens
  Payload ID: 8704
  Gene Symbol: KLHL13
  Gene Name: kelch-like family member 13
  Uniprot ID: Q9P2N7
  ENST ID: ENST00000541812
  CDS Start-End: 89-2008
tagaagagtgatatttgtgtgagagcctgggtcaggcttattttgagacgtgggccccactgaggtcattatccaacttttagaggtgatggatcatctgcatagaggggaattggttgctgcaatacttcgtaaccgatctctcgtggaagaggaagaccaacacatgaaattgtcccttggaggcagcgaaatgggcctctcatcccatttgcagtcttccaaggcaggacctacacgcatctttaccagcaatacccacagttctgtggtgttacagggctttgaccagcttcgacttgaaggattgctttgtgatgtgaccctgatgccaggtgacacagatgatgctttccctgtgcatagagtcatgatggcatctgctagtgattacttcaaggctatgttcacaggtggaatgaaagaacaagatttaatgtgcattaaacttcatggtgtgagcaaagtcggtctaaggaaaattattgatttcatttatactgcaaagctttctcttaatatggacaaccttcaagacacgctggaagctgccagtttcctacagattctgccagttttggacttctgtaaagtgtttctcatatctggggtcactttagacaactgtgttgaagttggacggattgccaacacctacaatctaaccgaagtggataaatacgttaacagtttcgtcttgaagaattttcctgcattgctgagcacaggggagttcttgaaactcccttttgagcgtcttgccttcgtgctttccagtaatagccttaagcactgtactgaacttgagctctttaaggctacctgtcgttggcttcgcctggaagagcctcggatggactttgctgcaaaattaatgaagaacatacgatttccactgatgacaccacaggagctcattaattacgtgcaaacggtggatttcatgagaactgacaatacttgtgtgaatttgcttttggaagccagcaattaccaaatgatgccatatatgcagccagttatgcagtcagacaggactgccattaggtctgacaccactcacttggttacactaggaggagtgctgaggcagcagctggttgtcagtaaggaattgcgcatgtatgatgaaaaggcccatgagtggaaatcgttagcccccatggatgccccaaggtaccagcatggcatcgccgtcattggaaattttctctatgtggttggcggacagagtaattatgatacaaaaggaaaaacggcagttgatacagtcttcagatttgatcctcgatacaataaatggatgcaagttgcatctttaaatgaaaagcgcaccttcttccacctaagtgccctcaaaggatatctgtatgcagttggtgggcgaaatgcagcaggtgaactgcccacagtagaatgttacaatccaagaacaaatgaatggacctatgttgccaaaatgagtgagccccactatggccatgctggaactgtgtatggaggagtgatgtatatttcaggaggaattactcatgatactttccaaaaggagctcatgtgctttgaccctgatactgacaaatggatccagaaggcgccaatgaccactgtcagaggtctgcattgcatgtgtacagtgggagaaaggctctatgtcattggtggcaatcacttcagaggaacaagtgattatgatgatgtcctaagctgtgaatactattcacctatccttgaccagtggaccccaattgctgccatgttaagagggcagagtgatgttggggtcgctgtcttcgaaaataaaatctatgtggttggggggtattcttggaataatcgttgtatggtagagatagtgcagaaatatgatccagataaagatgaatggcataaggtttttgatctgccagaatcccttggtggcattcgtgcttgcacactcacagtttttccaccagaagaaaccacaccatcaccttctagagagtcccctctttctgcaccttaagatcatctctacaactaagatgctgtagttctatctttgcaatgtgtcataaattctcttctttttcccccttaagtagtatatatgttaggattaccctctggtaattgatacagatattggaaaaaagacaacattgatgttatttgtgctctttgtttggcctagaatgtttataaagtggtaacacaaccattctggaaatgtatcccatagaagctgatgtttaacatatgaaaaaaaaagtattgtctataaaatgtttcttcagtactttttaaatgctgtgtattgggtgtaaggtatttgtcatcttacattagtaaacccaataagccaagttgaaggtggattatagtaaatgtacaactgtgctcactaggcttcaagtaaaaagttttcctttcatctttgactgtaagatgtcaaagggaggcagcctgcttgaacaggaaacaatacacaaaaggttgccaactcgcatgagctacctccctcttttcataaagtatttttgacatatctgtcaacccacttgactgtgtgggtgcattgagaacacaaagtttcctagacacacaggagaagtagcttaaattcactaatattaatttaaaaagcagcatgaaccctctacttataaacaagggtttggtgtttttaaagtgtgtatacatacatacacatacacacatgcacatatgtcaaatataatttttttaaaaattgagtggcacatcaaagaaatgtgaaattaaaaagaattcttccaaaaagcagcttccattaaaatgggaattcagtatgcacatactgaatgcatatatgtagaaccatacagaatttaggtggataagggctagaaattttgagcaacaaaatttgtcacttgaccagattttatcttcaaaaactgtattctactccttctcctttgctgttgaggtaacttgcatattatatgtattctgtatactcagttcataaggttatttagcacaaagtatagcagcttcacctggagagctgcttttgctcagtaaattcaacttccatgttttatctttttttgttcaataaaaacatttaatgtc

SEQ ID NO: 145255 - DNA, 1884 bp, Homo sapiens
  Payload ID: 8705
  Gene Symbol: KLHL14
  Gene Name: kelch-like family member 14
  Uniprot ID: Q9P2G3
  ENST ID: ENST00000358095
  CDS Start-End: 257-1423
cttttctccctctcctacattttcttgctgttgctaattcatggtgatcaaatgatgtacgacaaaataaattgtaaagagtgactgcctggagttgggaaccagaaggtgttttccccctcccaaggagacagcaaacctttaaaaaggaaggacaattgatttttggggggagcttaagtgagccttgactttgcagctggttgagaacaggttggaggagggtttaaagccaggtgcaccgagtcagctcgccatgtccagatccggggacaggacctccaccttcgaccccagccacagcgacaacctgctgcacggcctcaacctgctgtggaggaagcagctgttttgcgacgtgaccctgacggcccagggccagcagttccattgccacaaggccgtgctggcctcctgctcgcagtacttccgatcgctcttctccagccacccccctctcgggggaggggtcggcggccaggacggcctgggggcccccaaggaccagcagcagccgccgcagcagcagccgtcacagcagcagcagccgccgccgcaggaggagcccgggactccttcttcctcccccgacgacaagctgctgaccagcccccgggccatcaacaacctggtgctgcagggctgctcgtccatcgggctgcgcctggtgctcgagtacctctacacggccaacgtgaccctgtccctggacacggtggaggaggtgctgtcggtcagcaagatcctgcacatcccccaggtcaccaagctctgcgtgcagttcctcaacgaccagatctcggtgcagaactacaagcaggtgtgcaagatcgccgcgctgcacggcctggaggagaccaagaagctggccaacaagtacctggtggaggatgtgctgctgctcaacttcgaggagatgcgcgccctgctggactcgctgccgccccccgtggagtcggagctggcgctcttccagatgtccgtgctgtggctggagcacgaccgcgagacccgcatgcagtatgcgcctgacctcatgaagcgcctccgcttcgccctcatcccggccccggagctggtggagcgggtccagtcagtggatttcatgcgaaccgacccggtctgccagaagctgctgctggacgccatgaactaccacctgatgcccttcaggcagcactgcaggcagagcctggccagcagaattcgctctaacaagaaaatgctgttattggttggagggctgcctcctggaccggaccggctccccagcaatttggttcagtattacgacgatgaaaagaagacatggaaaatactcacaatcacaggaccacaccccatttcagggaagcaggaaagtgcaagctcaccagagttcagaaggaggaaaaccagagaattttcaaacaacacaatgtgactatcataattatactactagacatcaaatattcagtgtattcttctgctgtgctcaaagcgctctcacctctcctccaaggggagattacccaaaatcatcaagctcattgtggaggacctctgggtgagaagaatagtcatcccaacatcaagctgatttgagactcctcttgacccggaatgaataaactaaagagaaattatctggtccctcacacataatgcaccgtgatggaatagggacaggatcaccccagtaaacacgttcatttggaaagaccgtagcaatttagcaattctaccaaatagacattatgaagggcacctatccaagaggtgggttgtgttccttgattagggttctgcccaattctgttcattattttttttgttttcccatgccccctgcttctccctgtgggagatccttcttttcctgttatcttcattggccatgtc

SEQ ID NO: 145256 - DNA, 4312 bp, Homo sapiens
  Payload ID: 8705
  Gene Symbol: KLHL14
  Gene Name: kelch-like family member 14
  Uniprot ID: Q9P2G3
  ENST ID: ENST00000359358
  CDS Start-End: 440-2326
agcacgaccgtttctctccccaaccgtggatttcctattactctcgttacgactcactgagccccaggcccaaggataatgatgtgttgtttcttggtagcataatttgtcacacgtacattttttcttcttcttctcttgcagaaagctctgctccctctctctctccctctctctttctctcttttctccctctcctacattttcttgctgttgctaattcatggtgatcaaatgatgtacgacaaaataaattgtaaagagtgactgcctggagttgggaaccagaaggtgttttccccctcccaaggagacagcaaacctttaaaaaggaaggacaattgatttttggggggagcttaagtgagccttgactttgcagctggttgagaacaggttggaggagggtttaaagccaggtgcaccgagtcagctcgccatgtccagatccggggacaggacctccaccttcgaccccagccacagcgacaacctgctgcacggcctcaacctgctgtggaggaagcagctgttttgcgacgtgaccctgacggcccagggccagcagttccattgccacaaggccgtgctggcctcctgctcgcagtacttccgatcgctcttctccagccacccccctctcgggggaggggtcggcggccaggacggcctgggggcccccaaggaccagcagcagccgccgcagcagcagccgtcacagcagcagcagccgccgccgcaggaggagcccgggactccttcttcctcccccgacgacaagctgctgaccagcccccgggccatcaacaacctggtgctgcagggctgctcgtccatcgggctgcgcctggtgctcgagtacctctacacggccaacgtgaccctgtccctggacacggtggaggaggtgctgtcggtcagcaagatcctgcacatcccccaggtcaccaagctctgcgtgcagttcctcaacgaccagatctcggtgcagaactacaagcaggtgtgcaagatcgccgcgctgcacggcctggaggagaccaagaagctggccaacaagtacctggtggaggatgtgctgctgctcaacttcgaggagatgcgcgccctgctggactcgctgccgccccccgtggagtcggagctggcgctcttccagatgtccgtgctgtggctggagcacgaccgcgagacccgcatgcagtatgcgcctgacctcatgaagcgcctccgcttcgccctcatcccggccccggagctggtggagcgggtccagtcagtggatttcatgcgaaccgacccggtctgccagaagctgctgctggacgccatgaactaccacctgatgcccttcaggcagcactgcaggcagagcctggccagcagaattcgctctaacaagaaaatgctgttattggttggagggctgcctcctggaccggaccggctccccagcaatttggttcagtattacgacgatgaaaagaagacatggaaaatactcacaattatgccatacaacagtgcccaccactgcgttgtggaggtggaaaacttcttgttcgtgttgggtggagaggaccagtggaatccgaatggaaaacacagtacaaattttgtcagccgatatgatcctcgatttaatagctggattcaacttccacccatgcaggaaagaagagccagtttctatgcatgtcggttggacaagcatttatacgtaattggtggaaggaatgaaactggctacttgtccagcgtggagtgctataacctagaaacgaatgaatggcgctatgtgtcctctttgccacagcctctggcggctcatgcgggagcagtgcacaatgggaaaatatacatttcagggggtgtacacaatggagaatatgtcccatggctatattgctatgacccagtaatggatgtctgggctcgaaaacaagatatgaacacaaaacgtgcaattcacactttggctgtaatgaatgatcgcttgtatgcaattggaggaaatcatttgaaaggtttctcccaccttgatgtaatgcttgtggaatgctatgacccaaaaggtgaccagtggaatatactccaaactcccattttggagggtcgaagtggccctggctgtgcagtgcttgatgacagcatttaccttgtgggaggctacagctggagtatgggggcctacaagtcatctacaatatgctattgtccagagaaaggaacctggacagaactcgaaggagatgtagcagaaccgttggcaggccctgcctgtgtgacagttattctgccctcttgtgtaccatacaacaaataacaccaggaaactctggaatgaacagtatcacattctaggaagcaatggcaggtgacatcactattataataggaacaatgcattctaatggtacaactgccaaaacccacccttggtttctgatgatttataagtaactacaaaagaaagagacctgttcttgaacagatactatgtctataactcagatcgcaccaaacttcctgtggtgacagactcttccatttcagactggttttaacttatcccagctttacaaaaactcttcatgtgaatcttaacttgcaaaaggagaaagataaaatacagaagactggccccagagagacctcagatcagtattgtgcattgtagtctacctgcatgtgatctatgttgacatttcggggatattgtgttcaagaatgattccaaatttgagccaccaaaatacactgcattacagaaattgccacttgattctgtactcttaacctttggctacttcacagactccattggcaacactgttattgaaaatcatgtaagattaaagagaggcattttcgtttctatacaacttcatttcatacaccttctgcccttacagcacctcatgggatcagaaaagagaaagatgttggctcttgtaataaatgctttctaccctataggttctaggctagacagagtcgtcatttctgtgtcctcaattttatctgaaagattaaaacaaaatatattatgtcactattcagttcatggaggtttgtgctttttcatattttgtgatatataagtagtgaacacacatgttatttacttcaaaagacaggattgacaaattcagtcaatactattttagagattctgttagatgatatgtctgacccaaatttaatccataataaaaaaaaatgggagattgttttcaggaattcagggatgaaaagaaagaataatttccattaagtagaattccagttgtctttctgtttctaaaacacagaacttacaagagccacaggagccaattatagcacctgacagaatacttctcctcttcctcaccttcgggtgcctctagacacttgacttacgatcgttattcccccaattcatcatattttgtttgttatcaccagagatgcctgaactcagttaagcgagcaattgctagttgtcttgaggagcatgaggaattcaggagcagaaggtcaggatagcatgagatagtctcaatgtggccaaccaaaaggacaaaactgacaggaatgcacattcgattttcaagccctccagagcttgaacaacaactttaggagtaaataaaagcctaaaatatattttaaccatccagagatggtgttgaatccttcaacaaatgtgtcattcaaaacagtaattagggaaatcccacagatgaaaaatgccttagtgataagctttcatggcagagcacgtcaagataaatgggtatactggaatccgatgccgtttctacagtaaagtgcaatcttcgttgtttttgtatttatttgtatgttcagatccaaaggatccgttgtaaaaatatatatatataaatatatgtatatccagtgcaatcaactgtcatttctttttccttaaaacatatgagtatatagaaagaaaagttacagtactctgtgggaaaatctcagctgacatcatgaatagaatgaggtctgcttcagaaccttttgttgtcaactgtcactgtttcttccaaaagtcacaatttgtacaagaacctttgctttccttagacttgttctgcattttattttttatttctcaccaaaataaaagcatttatgagaattataagtaaagctttctgtatttcagagagacataagttactagaaagtgaaaagtgaataaataagtcacagagaatgtaaattttgtacagtattagaatgtgtaaatgaagcttgcttggaaggggaaaactttaaataaaaactttatgtactaatt

SEQ ID NO: 145257 - DNA, 765 bp, Homo sapiens
  Payload ID: 8705
  Gene Symbol: KLHL14
  Gene Name: kelch-like family member 14
  ENST ID: ENST00000583263
  CDS Start-End: 84-765
gggatccctccgagccgggcggcggcggcggctctcccccgggcgggcgggccggcgggccggcgggccggcgcgcgggcgggatgcaagcagagggtccctttctgctcagccctggaaggttggaggagggtttaaagccaggtgcaccgagtcagctcgccatgtccagatccggggacaggacctccaccttcgaccccagccacagcgacaacctgctgcacggcctcaacctgctgtggaggaagcagctgttttgcgacgtgaccctgacggcccagggccagcagttccattgccacaaggccgtgctggcctcctgctcgcagtacttccgatcgctcttctccagccacccccctctcgggggaggggtcggcggccaggacggcctgggggcccccaaggaccagcagcagccgccgcagcagcagccgtcacagcagcagcagccgccgccgcaggaggagcccgggactccttcttcctcccccgacgacaagctgctgaccagcccccgggccatcaacaacctggtgctgcagggctgctcgtccatcgggctgcgcctggtgctcgagtacctctacacggccaacgtgaccctgtccctggacacggtggaggaggtgctgtcggtcagcaagatcctgcacatcccccaggtcaccaagctctgcgtgcagttcctcaacgaccagatctcggtgcagaactacaagcaggtgtgcaagatcgccgcgctgcacggcctggaggaga

SEQ ID NO: 145258 - DNA, 6272 bp, Homo sapiens
  Payload ID: 8706
  Gene Symbol: KLHL15
  Gene Name: kelch-like family member 15
  Uniprot ID: Q96M94
  ENST ID: ENST00000328046
  CDS Start-End: 257-2071
gtttcaactcttgcttgaatcaagaacagaagcctctctttagacaggacttatccagagggggctgcaggcgagcactctcgtgccccgccggagcgacccggctcgtgccgggagcggctgctcgtagacgtccgaggagcctgccgagtgccgtcccggcgcccgaccgcccacccatcggcccgctggcccggttcttcctgatgcagactgccgtccactagaggctggacaggaccccccgaggtgattcatggcaggggacgtggaaggattctgttcctccatccacgacaccagtgtctctgctgggttcagagcactgtatgaggagggattgcttcttgatgtcactctggttattgaagatcatcagttccaggcccataaagcactcttggccacccagagtgattacttcagaattatgtttactgcagacatgagggaacgagatcaggacaaaattcatttaaaaggtctaacagctaccggtttcagccatgtcctgcaatttatgtactatggaactatagagctgagtatgaataccgttcatgagattcttcaggctgccatgtatgttcaacttatagaagtggtgaagttctgctgctcttttctcttagcgaagatctgcctagaaaattgtgcagaaattatgagactcttagatgatttcggcgtaaacatcgagggagtcagggagaagttagacacctttctgctagacaactttgtgccactcatgtctaggcctgactttctgtcctatctgagctttgagaagctcatgtcttacttggataatgatcatctgagcaggttcccagagatagagctgtacgaggctgtgcagtcttggctgcggcatgatagaagacgctggagacataccgataccatcattcagaatatccggttttgcttgatgaccccaaccagcgtttttgagaaggttaagacatcagaattttatagatactcccgacagctccgttacgaagttgaccaagcattgaattactttcagaatgttcaccagcagcctttgttggatatgaagtcaagccgcatccgttctgcaaaaccgcaaactacagtatttcgaggaatgattggacatagcatggttaacagtaaaatacttctcttaaagaaaccaagagtctggtgggagctagaaggcccacaagtacctctgcgacctgactgccttgctatcgtcaataattttgtgttcctgttaggcggggaagagctgggcccggatggtgaattccatgcttcttccaaagtattcaggtatgacccgagacagaactcctggctgcagatggcagatatgtctgtaccacgctctgaatttgctgtaggtgttattgggaagtttatttacgccgtagcaggcagaaccagagatgagactttctattcaactgagagatatgacatcaccaacgataaatgggaatttgtggatccttatccagttaacaaatatggacatgaggggacagtgctcaataacaaattgtttatcaccggtggaatcacctcatcttccacctccaagcaagtgtgcgtgtttgaccccagcaaagaagggaccatagaacaacggaccaggagaactcaagtggttaccaactgttgggagaataagagcaagatgaattacgcgagatgctttcacaagatgatttcttacaatggcaagctttatgtcttcggtggtgtctgtgtgatcttgagggcctctttcgaatctcagggatgcccttctacagaagtatacaacccagagactgatcagtggaccatcttggcatccatgccgattggtagaagtggccatggtgtgactgtgctggacaaacaaataatggttcttggaggcctttgttataatggtcattacagcgattccatcctcacttttgatccggatgaaaacaagtggaaggaagatgagtaccctcggatgccctgcaagctggatggtttacaagtatgcaacctgcattttccggactatgtactggatgaggtcaggcgttgcaactaatgacatcctcctccctaaaaaaagaggcaaacaaagtatttgtttgcacagagtaattaattaaaacatataaagaaaaacctcaccagttttactatcaaagccattggtctaacattgtaagaatttttcattctgtgctagcatcctttttttcttttcagtggcctcaaactcatgcaataagttaattctaagtgctagctcttgaaactacttccagaagcagttgaatagaatgctccacttatctgggatattgattttctgctttaaacatttctttcagatgttagcgtaggagtcatgtgtcttctaagagaagacccgataagtgtcactggatgtgatttcagtctctgtctctatctgaaacctttttgaagatttatttcagtgtatttcagtctgttatactttttagttttattatttaaaagtttaaaactcttgacctttttgcatggctttttgctgaaaatgcaaaaatataaattttctacaaaattaactttttatattcaaaacactatttctaagctgccttctcttatccgcattgtgttagtgaaagcatattcatactcgcatacaacctataaatacacaaggcacatcccttttatgcgtggttaggattctatatttttaagctagtgcacttacttgcacacacagttcgccatacttgttgaattttagatgtaacgtcttttcacatattaacatttttagaaagttgaaataactggagtcctcatttgctatcaaagtagcctatcttcagtccatactgattcagtaatatttgaactccttatatttctgaaacatgtatggttatgaaaactaacactttatattttattttcaaaagtaaatgttagtgttctttgtcgatgtatgtcttttctttttgaaaatgtttttctttgcagtctgtttaacgttaccctgtttttagtgagaatcggagtggtatatgacaagttctggccctgcagcatgcaagcacttttaaagagcatttaggtaataccagactcctaaatcaaggccccttaaaagtaagtgcaactcccattttttacattcagtaaggctgctgcatttgttattgaatggaaggtagaaactcttagaaaatttgacctcagttttgacttagaggtaagaaatagaattataatgttactggttttatctacttgtttattttgtacaaaatacccagcgacactagggatgtaagccctcagtttttgttttatttactgaaagctattagcatgaaggatagtaaccacaaagttcagaatggatcaagaatagctgtttaaaagcatttataataagtgttttaggattagctgcacctttcaactctttaaatgcagaggaaaaaacatagttgacaaagttaagcaagaataacctgggagtggatcattgaaattgatgccatttgcgcatgagtagtctatatctgatacagactagatctatactggcaaaacttgccagatcttagaatattggtgcaatattgcaatgccttctatatggctgctgatgtataaattttctagtttcactttgtttggtgttttttgtttttttgtttgtttgtttgtttttttgctgctgccaccattgaacataaaatggaagtgtgaagtcatggaaatgtgaagactttggtttttgggggttttttgggcagttattagacatactatgagattaaacctgatcttcaaactccagaattggaggcatttgggtttaagaaaccaggtacataagtagcttttgaaaaaaccattggcattgatttcaaaaatcaataataatcttattttatatatgagacttatattttcattaactagtcctgtcatttacttacagtttccaaacatgaaatttggtatcttgtttcccatggtaatatgggtaaaagtctttttctacatttaaaaaatacattattttatttttgaaagttaggaataagttagccatttaatttttttctacattagtttagtggctttgtatgtgtgctattttgctttaaagaaaataacgtcttcattattttcctcattgatgtcttttgctagaaaagaccaagaaagagccatcaggccaggtatccacatcaaagcctttacactatagtggtggttctctttaattgcttagatatgacttcatgaccctagtcagggtgacatctgggcaaacatttgagtattcttggtcttccattttaaagacagaggccaagatcaaagttcatgttttgtaaaattcgtaaaatcttaacttgaactaactctgggttcagctttacgtaagtcacgtcggacctgatgttagctgtaatcagttttgagctttaaggatagttgctgttgcttgggttctgaatgtatgagaaaactccctgtttatatgtagttctaatttaggttattttaaatccatgattaacttacattcccttttaaaattatggttttattgctgcaagagatttatttttgttatactaaactatggaaaagtttttcatagcatttttttcaagtttattttttgtgtgcttcatttggagtttttgtttatatacattgcgctcaaaaaagtagttttttgaaaaattcagtaagatttgaatctatacagtttaactgttatgacctttatgcgtgttgttttcactttatatctcaaatgccagagttcacaaaaatagctgatcttcattaattacatcttaattagaaccatttgttctcttccgtgtctttgaccttctaagttttgattttaaagaaattccttgcactacagccttttcttaaaatgcaagattctcactttgaaggttttgtgttggaagaaatgctactggtttttaaaaagcaaagcttaactaatagaattattagcttttcttgagacagctttctgtgtcctcattactctgctctgtgtgagtgttactagaatttgtgaaatactgactgagcccttcacttatcttttctaaagcagcacctttggacacctcattctgggaagcctgctcgagtcatagtaaaggacacacgctttatgtggggagaagtggtaaaaatggagttttgtcttaattacatgaaactaagctttaaaatattttataacagattatttgagctgcataatctaaacatgtcaaacgttcagtgggactatttttatatatgtatatgtgggtgtaggtcataacatttcagtttataatataaattgttatttcagtttataagctatctctcagaggagactagctcttttgagaattcataatttaaagttttagactgaagtaaaatgcaacatagataatagtgtaaatcagatataattgagggctatatggcagtaaaactgctagtgccagttttcttgtttgcctgttatacatttttgatttttgtttttgtattctgaacattttgagagatcatatgtttgttcaattacatttagagttggtttgggaataaatatcttctaaaaagagatttatcttaaaaatggaagtcctaaaaattagtttatccagagtttataaagtcaaatattcagtaggcatagactggaatagataaattcatggaaatcatatcctttcagtacaccgtataacttcaatattacacaagtaacattgaggagaatgccatcagctttgttctcccttaaattctttggttttctttttacattttgggaacaactgcatttaaaatgttattagtcagtatatagtaaggattaggtgtttgctttctgaaggaatggtccagtgaggtgattgggagaggttattttctacctaacttgtatatgccctatacctcttgggcatactttgtctatagaaaaatattttgacctttaggtacattttgggccagtagtcaaataatcctagggccgatataaaaatcttagaataatttaaggtttgccttttatacctgttttgaaagcctttacatttttgtcaggtaatttttcccaagccgtggatataatctattcaaacatgtttatgctatccattctgtttttaaattgaaaaaaatgttaaaagtgtttatgaagaaaagtttaaataaaatatttttaatctttaaaa

SEQ ID NO: 145259 - DNA, 2560 bp, Homo sapiens
  Payload ID: 8707
  Gene Symbol: KLHL17
  Gene Name: kelch-like family member 17
  Uniprot ID: Q6TDP4
  ENST ID: ENST00000338591
  CDS Start-End: 108-2036
agtgagcgacacagagcgggccgccaccgccgagcagccctccggcagtctccgcgtccgttaagcccgcgggtcctccgcgaatcggcggtgggtccggcagccgaatgcagccccgcagcgagcgcccggccggcaggacgcagagcccggagcacggcagcccggggcccgggcccgaggcgccgccgcctccaccgccgcagccgccggcccccgaggcagagcgcacgcggccccggcaggctcggcccgcagcccccatggagggagccgtgcagctgctgagccgcgagggccacagcgtggcccacaactccaagcggcactaccacgatgccttcgtggccatgagccgcatgcgccagcgcggcctcctgtgcgacatcgtcctgcacgtggctgccaaggagatccgtgcgcacaaagtggtgctggcctcctgcagcccctacttccacgccatgttcacaaatgagatgagcgagagccgccagacccacgtgacgctgcacgacatcgaccctcaggccttggaccagctggtgcagtttgcctacacggctgagattgtggtgggcgagggcaatgtgcagactctgctcccagccgccagtctcctgcagctgaatggcgtccgagacgcttgctgcaagtttctactgagtcagctcgacccctccaactgcctgggtatccggggctttgccgatgcgcactcctgcagcgacctgctcaaggccgcccacaggtacgtgctgcagcacttcgtggacgtggccaagaccgaggagtttatgctgctgcccctgaaacaggttctggaactggtctctagcgacagcctgaacgtgccttcagaggaggaggtctaccgagccgtcctgagctgggtgaaacacgacgtggacgcccgcaggcagcatgtcccacggctcatgaagtgtgtgcggctgcccttgctgagccgcgacttcctgctgggccacgtggatgccgagagcctggtgaggcaccaccctgactgcaaggacctcctcatcgaggccctgaagttccacctgctgcctgagcagaggggcgtcctaggcaccagccgcacacgtccccggcgctgcgagggggccgggcctgtgctttttgctgtgggcggcgggagcctgtttgccatccacggagactgtgaggcctacgacacgcgcaccgaccgctggcacgtggtggcctccatgtccacgcgccgggcccgggtgggagtggctgcggtggggaaccggctctatgctgtgggcggctatgatgggacctcagacctggctaccgtggagtcctacgaccccgtgactaacacgtggcagccggaggtgtccatgggcacaaggcgaagctgcctgggtgtggccgccttgcatggactcctgtactcggccggcggctatgacggggcctcctgcctgaacagtgctgaacgctacgaccccctgaccggaacgtggacgtccgtcgctgccatgagcacccggaggcgctatgtgcgagtggccacgcttgatgggaacctgtatgctgtgggcggctacgacagctcctcacacctggccactgtggagaagtatgagccccaggtgaacgtgtggtcgcccgtggcgtccatgctgagccgacgcagctcagcgggcgtggccgtgctggagggtgccctgtacgtggcagggggcaacgacggcaccagctgcctcaactcggtagagagatacagtccaaaggctggagcctgggaaagcgtggcgcccatgaatatccgcaggagcacgcatgacctggtggccatggacggatggttgtacgccgtggggggtaacgacggtagctccagcctcaactccatcgagaagtacaacccgaggaccaacaagtgggtggccgcatcctgcatgttcacccggcgcagcagtgtgggtgtggcggtgctggagctgctcaatttcccgccgccatcctccccgacgctgtccgtgtcctccaccagcctctgacccacctaccaccagaggcctgcagcctcccacatgccttaaggggaccgtggcccccaccagggacgtcctgcgccatccgttcacgtctctgcatccattccttcatgtctttatttagttgtttatttatttagttatttatcttatttattgaggggtgaggagtgccacggctgcccgtttacacctttagcgtctggtcctcctgcgtgtcctcccctccactgcctgcatggggggcgcggggagtgaccaggcgggggcctcaccgccccagggccgttgcctgctcagaccttgcaggctgtggagcaagaggccctgggtctctccaagcagctgcagaccccagctcgaattttgcacatggcggggtcccgggaagggtggggagcagttgtccttcctgtcgtcgtctgccgtgtgccatctttcctggatcttgtagtgggtgcacacgcgtgcactgggaccccacacagcaatacgagtccaacttaataaacacatttctggggttc

SEQ ID NO: 145260 - DNA, 913 bp, Homo sapiens
  Payload ID: 8707
  Gene Symbol: KLHL17
  Gene Name: kelch-like family member 17
  ENST ID: ENST00000466300
  CDS Start-End: 1-463
cttgctgagccgcgacttcctgctgggccacgtggatgccgagagcctggtgaggcaccaccctgactgcaaggacctcctcatcgaggccctgaagttccacctgctgcctgagcagaggggcgtcctaggcaccagccgcacacgtccccggcgctgcgagggggccgggcctgtgctttttgctgtgggggcctctccaggagcctggggtgtggcccagcagtgggatccactcacgagtcccgtctccacctgccctccccaggcggcgggagcctgtttgccatccacggagactgtgaggcctacgacacgcgcaccgaccgctggcacgtggtggcctccatgtccacgcgccgggcccgggtgggagtggctgcggtggggaaccggctctatgctgtgggcggctatgatgggacctcagacctggctaccgtggagtcctacgaccccgtgactaacacgtggcagccggaggtgtccatgggcacaaggcgaagctgcctgggtgtggccgccttgcatggactcctgtactcggccggcggctatgacggggcctcctgcctgaacagtgctgaacgctacgaccccctgaccggaacgtggacgtccgtcgctgccatgagcacccggaggcgctatgtgcgagtggccacgcttgatgggaacctgtatgctgtgggcggctacgacagctcctcacacctggccactgtggagaagtgaacgtgtggtcgcccgtggcgtccatgctgagccgacgcagctcagcgggcgtggccgtgctggagggtgccctgtacgtggcagggggcaacgacggcaccagctgcctcaactcggtagagagatacagtccaaaggctggagcctgggaaagcgtggcgcccatgaatatccgcag

SEQ ID NO: 145261 - DNA, 1950 bp, Homo sapiens
  Payload ID: 8707
  Gene Symbol: KLHL17
  Gene Name: kelch-like family member 17
  ENST ID: ENST00000622660
  CDS Start-End: 455-1132
cgcgtccgttaagcccgcgggtcctccgcgaatcggcggtgggtccggcagccgaatgcagcccaccccaccccagtctttgtctttgactcccgaccccgttttgttcctgacacagccctgcccacaatccttagtgcctgctgtgtgtccccgagacctttctggatctgggccccccaggagcctcgtctgtggctcctgactctgctcggcccctcccagtatgaacactcagcccccacctgctaaccctccctcctaggcatcttcagggctccctgggtccacaggaccctccccagatctcaggtctgaggacccccactcccaggttctggaactggtctctagcgacagcctgaacgtgccttcagaggaggaggtctaccgagccgtcctgagctgggtgaaacacgacgtggacgcccgcaggcagcatgtcccacggctcatgaagtgtgtgcggctgcccttgctgagccgcgacttcctgctgggccacgtggatgccgagagcctggtgaggcaccaccctgactgcaaggacctcctcatcgaggccctgaagttccacctgctgcctgagcagaggggcgtcctaggcaccagccgcacacgtccccggcgctgcgagggggccgggcctgtgctttttgctgtgggcggcgggagcctgtttgccatccacggagactgtgaggcctacgacacgcgcaccgaccgctggcacgtggtggcctccatgtccacgcgccgggcccgggtgggagtggctgcggtggggaaccggctctatgctgtgggcggctatgatgggacctcagacctggctaccgtggagtcctacgaccccgtgactaacacgtggcagccggaggtgtccatgggcacaaggcgaagctgcctgggtgtggccgccttgcatggactcctgtactcggccggcggctatgacggggcctcctgcctgaacagtgctgaacgctacgaccccctgaccggaacgtggacgtccgtcgctgccatgagcacccggaggcgctatgtgcgagtggccacgcttgatgggaacctgtatgctgtgggcggctacgacagctcctcacacctggccactgtggagaagtgaacgtgtggtcgcccgtggcgtccatgctgagccgacgcagctcagcgggcgtggccgtgctggagggtgccctgtacgtggcagggggcaacgacggcaccagctgcctcaactcggtagagagatacagtccaaaggctggagcctgggaaagcgtggcgcccatgaatatccgcaggagcacgcatgacctggtggccatggacggatggttgtacgccgtggggggtaacgacggtagctccagcctcaactccatcgagaagtacaacccgaggaccaacaagtgggtggccgcatcctgcatgttcacccggcgcagcagtgtgggtgtggcggtgctggagctgctcaatttcccgccgccatcctccccgacgctgtccgtgtcctccaccagcctctgacccacctaccaccagaggcctgcagcctcccacatgccttaaggggaccgtggcccccaccagggacgtcctgcgccatccgttcacgtctctgcatccattccttcatgtctttatttagttgtttatttatttagttatttatcttatttattgaggggtgaggagtgccacggctgcccgtttacacctttagcgtctggtcctcctgcgtgtcctcccctccactgcctgcatggggggcgcggggagtgaccaggcgggggcctcaccgccccagggccgttgcctgctcagaccttgcaggctgtggagcaagaggccctgggtctctccaagcagctgcagaccccagctcgaattttgcacatggcggggtcccgggaagggtggggagcagttgtccttcct

SEQ ID NO: 145262 - DNA, 4620 bp, Homo sapiens
  Payload ID: 8708
  Gene Symbol: KLHL18
  Gene Name: kelch-like family member 18
  Uniprot ID: O94889
  ENST ID: ENST00000232766
  CDS Start-End: 21-1745
agttgcagcggccggggaagatggtggaggacggcgcggaggagctggaggatctggtgcacttctccgtgtctgagttgcctagtcgcggctacggcgtcatggaggagatccggcggcagggcaagctgtgcgacgtgaccctcaagattggggaccacaaattcagtgcccaccggattgtcttagcagcctcgatcccgtatttccatgctatgtttacaaatgacatgatggagtgcaagcaggatgagattgtaatgcaaggaatggacccaagtgccctggaggctctgatcaactttgcctacaacggcaaccttgccattgaccagcaaaatgtccagtcattgctgatgggggcgagcttcctgcagctgcagagcatcaaagacgcctgctgcacattccttcgagaacggcttcacccaaaaaactgcctgggtgtgcgccagtttgctgagacaatgatgtgtgctgtgctgtacgacgctgccaacagcttcatccaccagcactttgtggaggtgtccatgtcagaagagttcctggccctgcccttggaagacgtgcttgagctggtgtctcgggatgagctgaatgtcaaatctgaggagcaggtctttgaagctgcattggcctgggtcagatacgaccgggagcagaggggtccctacctgcctgagctgctgtccaatatccgcctgcccctctgtcggccccagttcctttcagacagagtacagcaggatgacctggtgcgttgctgccacaaatgcagggacctggtagacgaagcaaaggactaccacctcatgccagagcgccggccccacctgccagctttcagaacccggccacgctgctgcacatccatcgctggacttatctacgctgtagggggcctcaactcagcaggtgattccctgaatgtggtggaagtgttcgaccccattgccaattgctgggagagatgccgtcccatgacaacagcccgcagccgcgttggcgtggctgtggtgaacgggcttctctatgccatcggaggatatgacggccagctacggctgagcactgtggaggcctacaacccggagacagacacatggaccagagtggggagcatgaatagcaagagaagtgccatggggacagtcgtgctggatgggcagatctacgtctgtgggggctacgatggcaactcttccctcagctccgtggagacctactcacctgagacggacaaatggacagtggtgacctcgatgagctcgaatcgcagtgctgctggggttacagtctttgagggcaggatatatgtgtcaggcggccatgatggtttgcagatcttcagcagtgtggaacactacaaccaccacacagccacctggcaccctgcagctggcatgctcaacaagcgctgccggcacggagccgcctccctggggagcaagatgtttgtctgcgggggctacgatggctctggcttcctcagcattgccgagatgtacagctctgtggcagaccagtggtgcctgattgtccccatgcacacgcgcaggagccgggtctccctggtggccagctgtgggcgcctctacgctgttgggggctacgacggacagtcaaacctaagctcagtggagatgtatgacccagagacagactgctggacattcatggcccccatggcgtgccatgagggaggggtcggtgtgggctgcatccctctcctcaccatctaaggcagaggatgggatgtggtggggcagggatctggtacagacataggcgcttccttccaggaacagtccctcaggagaggcagtggaccagaagagatggcgaaacgtgagctcgccggaggtacagtttttccaggtgcttaagccctcccccactgtgccacccttgtgaccttcaggcttgggtcatcaagatgcacagcatggaacacaagctcctctggatcctgcagctggtgacatggaactgttttctggtccacatgaacacaggctccatccaggcccagctcctacccaccgcctctctgtgggccagctgttcacagaaggccttccatctgatgctccccatcgcctgcttgctctccagccgagtctggccaatttgccatggggaggctgcagtgtccaagcctgctggaaactgggatgtagctggggacgaaaggacagacccaagcgttctccctgcctgagatggtgtggccacagcagtggaaggctgcacacaggcacattccttcttccacagtggggcaccaaggattctgtcctcattgctgggtaagcagggagaagagaagttttccccatgtctaattttgggatttcagtgaggccttttgatctgtccaggagaacagaagggaaaaaaagatacttgaaagaaactgaaggaaatttaaacaaagaaacacttgaaagaaactggaaagaaaaataatttttttatgtgaacaaattttgcaagaagaaaaaagcataaaagacactaacggcaaatctatgtttaaatggaaaatcgtctaactggagaagggcggtatccaccccacattcggatcccagggtcctgaggcctcgcattgagctgggggttccctctgagccccagtgtgtgtggaatcagtgcactcttgactgggcctgtagtaaggtgctcatggggtttgtcttctcacccaccatcagaggacttttaaaatcataggcgtagagagttaggctatctgctgaattactgccactcttcttggtgggggctcctagctgtggctgggggctccaggcgcccctgtgattacctcctactgccaccatggcgctcattcagattccccactctcactaacattgcttccttttttgaccagcaggaaacagcaggtctggccagattctcacttgcccatcaatctcgttcttggatgatttccctcattgtgatgcttctggggcacgttgaccatatgcacctctagaacctaaccagggcttccttctaccagctgtgggcgggcttggtctggtaaccttgtctgctctgccattccactgctcctccatccactcgccaatcccaagagtctggcctccctccagccctgggcagactgaccagcaaggtggacctttacattcaagcacagctggcttttatgacataaagaactaaaggccgaaagaatctcttgctgctgcaaagaacagattttatatttcttcctctaatcttggcaaatgacctttaccttttggaaagatttcatattgcttcctcctccctggataggacctaatgtagcacagcgggactcaaagaggaggacattttctcttgccagtgcactgggcagtggggctgtccttcaactgctgctgccaaaattggttttctaaaattcttccagtagagactaaaagaagattcaattcctgtaacccaagactgagtcttagggctccagtctccacctgcttggtttcctatcctttgctgcctgcctggggtggcctggaagcctgttcagaaaggcacaatgtggagcctggggtgtctcccccaccccaggaccgtcaggtttaccagtgtgtgcaatcgccatgtattcagagggaagtacctttgttacctacaacttaggagctaggcctctgctacaagcacttgaaaatgatatttttatttttaacgtctcaacaatctgatatcggatgtcgtttaacctgggctcgtggtagggctccagcatttctccctccttcctggtttgcctgtaggggtagactcggaaggtgggtggggtgtgcatttcctgttaggagtgtatcagtgcttgtcttattataagcccctttcttttgtgaatttgaagtagcaccaacaagcctggattgtgaaggtattaagaatcggtctgtgggctactgagtgggtccttaggatactggcccagattttgccactgggtatggcagatcattttctaccatggcctgctgctcttgtagtggacttcctgagtccaatcccacctcctggtgtagaatttacactgctgcacctgaggtcgatgtttcaaagtaagatcaagccagtgttttgatctgggctctgagcacaagtcaggaaacaccaacatattcacactctcccagtaggttcctcagtccgatggtgaatggctattcgtaaatggctggtctggctctttggtgttggagcctttccaatagccccatgaaaagaagcatcacccaaggatattgtaaaaaggatgtaacaaggagatagggtagacattgtactcagtgggccttggggcctagcccagctctgagcagaggactgtggcattcactgtccttgagtgtttcaccttcttggataacacacgggccttctcttctggatttcatcagagattacagccagatgggggctgaagaccatcctcttgaccacagaggtgtgactgtgggaattcctcccaatttatggtttcccagaaaatcttagttccttttatttatagaatgcatgtcttttgtgttaagaaaccaaagagaaataaagagaacactcctaata

SEQ ID NO: 145263 - DNA, 2249 bp, Homo sapiens
  Payload ID: 8708
  Gene Symbol: KLHL18
  Gene Name: kelch-like family member 18
  ENST ID: ENST00000442272
  CDS Start-End: 20-199
gttgcagcggccggggaagatggtggaggacggcgcggaggagctggaggatctggtgcacttctccgtgtctgagttgcctagtcgcggctacggcgtcatggaggagatccggcggcagggcaagctgtgcgacgtgaccctcaagtgccctggaggctctgatcaactttgcctacaacggcaaccttgccattgaccagcaaaatgtccagtcattgctgatgggggcgagcttcctgcagctgcagagcatcaaagacgcctgctgcacattccttcgagaacggcttcacccaaaaaactgcctgggtgtgcgccagtttgctgagacaatgatgtgtgctgtgctgtacgacgctgccaacagcttcatccaccagcactttgtggaggtgtccatgtcagaagagttcctggccctgcccttggaagacgtgcttgagctggtgtctcgggatgagctgaatgtcaaatctgaggagcaggtctttgaagctgcattggcctgggtcagatacgaccgggagcagaggggtccctacctgcctgagctgctgtccaatatccgcctgcccctctgtcggccccagttcctttcagacagagtacagcaggatgacctggtgcgttgctgccacaaatgcagggacctggtagacgaagcaaaggactaccacctcatgccagagcgccggccccacctgccagctttcagaacccggccacgctgctgcacatccatcgctggacttatctacgctgtagggggcctcaactcagcaggtgattccctgaatgtggtggaagtgttcgaccccattgccaattgctgggagagatgccgtcccatgacaacagcccgcagccgcgttggcgtggctgtggtgaacgggcttctctatgccatcggaggatatgacggccagctacggctgagcactgtggaggcctacaacccggagacagacacatggaccagagtggggagcatgaatagcaagagaagtgccatggggacagtcgtgctggatgggcagatctacgtctgtgggggctacgatggcaactcttccctcagctccgtggagacctactcacctgagacggacaaatggacagtggtgacctcgatgagctcgaatcgcagtgctgctggggttacagtctttgagggcaggatatatgtgtcaggcggccatgatggtttgcagatcttcagcagtgtggaacactacaaccaccacacagccacctggcaccctgcagctggcatgctcaacaagcgctgccggcacggagccgcctccctggggagcaagatgtttgtctgcgggggctacgatggctctggcttcctcagcattgccgagatgtacagctctgtggcagaccagtggtgcctgattgtccccatgcacacgcgcaggagccgggtctccctggtggccagctgtgggcgcctctacgctgttgggggctacgacggacagtcaaacctaagctcagtggagatgtatgacccagagacagactgctggacattcatggcccccatggcgtgccatgagggaggggtcggtgtgggctgcatccctctcctcaccatctaaggcagaggatgggatgtggtggggcagggatctggtacagacataggcgcttccttccaggaacagtccctcaggagaggcagtggaccagaagagatggcgaaacgtgagctcgccggaggtacagtttttccaggtgcttaagccctcccccactgtgccacccttgtgaccttcaggcttgggtcatcaagatgcacagcatggaacacaagctcctctggatcctgcagctggtgacatggaactgttttctggtccacatgaacacaggctccatccaggcccagctcctacccaccgcctctctgtgggccagctgttcacagaaggccttccatctgatgctccccatcgcctgcttgctctccagccgagtctggccaatttgccatggggaggctgcagtgtccaagcctgctggaaactgggatgtagctggggacgaaaggacagacccaagcgttctccctgcctgagatggtgtggccacagcagtggaaggctgcacacaggcacattccttcttccacagtggggcaccaaggattctgtcctcattgctgggtaagcagggagaagagaagttttccccatgtctaattttgggatttcagtgaggccttttgatctgtc

SEQ ID NO: 145264 - DNA, 560 bp, Homo sapiens
  Payload ID: 8708
  Gene Symbol: KLHL18
  Gene Name: kelch-like family member 18
  ENST ID: ENST00000433449
  CDS Start-End: 50-241
agtgtctagccggccggcgaggcctgcgcagttgcagcggccggggaagatggtggaggacggcgcggaggagctggaggatctggtgcacttctccgtgtctgagttgcctagtcgcggctacggcgtcatggaggagatccggcggcagggcaagctgtgcgacgtgaccctcaagccaactgaattttcagatgagatgagaaggtcatgcttttccacctttgagctcccactttgaccagctctgccagtcctgagccagaaggtcaacagttaaaaagaagagattggggaccacaaattcagtgcccaccggattgtcttagcagcctcgatcccgtatttccatgctatgtttacaaatgacatgatggagtgcaagcaggatgagattgtaatgcaaggaatggacccaagtgccctggaggctctgatcaactttgcctacaacggcaaccttgccattgaccagcaaaatgtccagtcattgctgatgggggcgagcttcctgcagctgcagagcatcaaagacgcctgctgcacattccttcgagaac

SEQ ID NO: 145265 - DNA, 463 bp, Homo sapiens
  Payload ID: 8708
  Gene Symbol: KLHL18
  Gene Name: kelch-like family member 18
  ENST ID: ENST00000437353
  CDS Start-End: 21-463
agttgcagcggccggggaagatggtggaggacggcgcggaggagctggaggatctggtgcacttctccgtgtctgagttgcctagtcgcggctacggcgtcatggaggagatccggcggcagggcaagctgtgcgacgtgaccctcaagattggggaccacaaattcagtgcccaccggattgtcttagcagcctcgatcccgtatttccatgctatgtttacaaatgacatgatggagtgcaagcaggatgagattgtaatgcaaggaatggacccaagtgccctggaggctctgatcaactttgcctacaacggcaaccttgccattgaccagcaaaatgtccagtcattgctgatgggggcgagcttcctgcagctgcagagcatcaaagacgcctgctgcacattccttcgagaacggcttcacccaaaaaactgcctgggtgtgcgccagtttgctga

SEQ ID NO: 145266 - DNA, 3134 bp, Homo sapiens
  Payload ID: 8709
  Gene Symbol: KLHL2
  Gene Name: kelch-like family member 2
  Uniprot ID: O95198
  ENST ID: ENST00000226725
  CDS Start-End: 260-2041
gcgcccgccggtcccgtcgccgccgccccgcactcgggcgagcgcgggagccgcgcagtagacggagcgcgcccggccgagcgggccatggccgcgggggccgccgccgcaggtggtggcgcgcggtgaggagagcgcggcgccccctccggggcggatggaacgcggctcggcgggcgggcagtgccggcgtccgcggctggaatggtgctggctgtgttggtcggtgcctgcgttctgaagcccgagaggagccacaatggagacgccgccgctgcctcccgcatgcacaaagcagggtcatcagaagcctctcgattcaaaagatgataataccgaaaaacactgcccagtgacagtgaatccttggcatatgaagaaagctttcaaagtcatgaacgaattaagaagtcaaaatttgctgtgcgatgtcacaattgtggcagaagacatggaaatttctgctcatagagtggtgctggccgcctgtagtccttattttcatgccatgtttacaggtgagatgagtgagagccgagcaaagagagttagaataaaagaggtagatggctggaccctgaggatgctaattgattatgtttacactgcagaaattcaggttacagaagaaaatgtacaggtacttctcccagcagctggtctcttacagttacaggatgtgaagaagacttgttgtgaatttttggaatcccagcttcaccctgtcaactgcttaggaatccgggcttttgctgatatgcatgcatgtaccgaccttctgaacaaggccaacacctatgcagagcaacattttgcagatgttgtacttagtgaagaatttctcaatcttggcatcgaacaagtgtgcagcttaatctcaagtgacaaacttaccatttcttcagaagagaaggtatttgaagcagtaatagcatgggtgaaccatgacaaggatgtgaggcaagagtttatggcccgactgatggaacatgtacggttacctttgcttcctcgggaatatttagttcagagggttgaagaggaagcattggtcaagaatagcagtgcttgcaaagattacctcattgaagcaatgaagtaccatttgctgccaacagagcagcgtatattaatgaagagtgtccggacccggctgaggacacccatgaaccttcccaaattgatggtggtggttgggggccaagcaccaaaggctatccggagtgtggaatgctatgactttaaagaagaaaggtggcaccaagtagcagagttgccttccaggaggtgcagggcaggcatggtctacatggctggacttgtttttgctgttggtggctttaatggctcattaagagttcgcactgtagattcctacgaccctgtgaaggaccagtggaccagcgttgctaacatgagagaccggagaagcactttgggagctgctgtgttaaatggattattatacgctgtgggaggctttgatgggagtacaggtttgtcatctgtggaagcatacaacataaagtctaatgagtggtttcatgtagctcccatgaatacaaggaggagcagtgttggtgtgggtgttgttggaggtttgctctatgctgtaggaggttatgatggagcatcacgtcagtgtcttagcacagtagaatgctataatgctacaacaaatgagtggacctatatagcagaaatgagcaccaggcggagtggagcaggtgttggtgtgttaaacaatttattgtatgctgtaggaggtcatgatggccctttagtacgaaaaagtgttgaagtatatgatcccaccactaacgcatggagacaggttgcagatatgaacatgtgcagaagaaatgcaggagtttgtgcagttaatggtctgttatatgttgttggaggggatgatggttcctgtaacttggcgtcagtagaatattataacccaacaaccgataaatggacagttgtgtcatcgtgtatgagcacagggagaagttatgcaggggtcacagttattgataaaccattatgagcctgaaggacattttcagcatatttatacatgagaaacagccttcaacaagtatttgtgaagtgactgagaatctagcacttctccacttgtagctgcactttaagtctcagcagaagatacgatcgtctgcctttataggcctcagatactgaagattatttttggtagaagcaccgtgtaggctttttctgcaatgagcagcagctgactgaattttcataagaaacttggactgcaggacttaatctgtagtctttagacaacagttgctttcataaagactagttcttatcaaccttgaatgactacagattattttgtgaaggaggatgaagtaatgtgtgttcttgtaaaattaaattttatctttatttcttctaaaaatctgtataccaggaactgaaaatctttgaacagatattaaaatctacgtaagtatacaaactagttgagggatacactgtttgcttttataaaataactttgattacatgaatataataaattatgtgcatataaatgtgtgtctatatgctttcctttaaatatgtttgaaaagatgtttgaaacttgattatactatttataattggcacagtactttgaattatgccagtactacattgtaaaacagagttgtattttttgatatttaacaatgcttaacactttaaatgccacttctgaggaatggacctggtgtaacacacttgaatatgtgtgatgccaaactttttaaaatacaatataaattatgcttatttattattttctttagtttaatcttggtcatgttttggtgtgtatttttaatttttttcttaaattaacactttggcatgaacattactgcaggtttttgatgaatataatgaatgtatggaattcaattgaatttgcatggtcttcggaattttttctgtgtgtataaatttagctgctattaacagaagagagaactttctgtgagtagccatgtgtgttgatcagatacagtttttctgagatcttcaattaatctcactttaaaaatgaccaaaacatgtctttcttgaattaactttgaataaaagtttgtatattatttgtt

SEQ ID NO: 145267 - DNA, 2452 bp, Homo sapiens
  Payload ID: 8709
  Gene Symbol: KLHL2
  Gene Name: kelch-like family member 2
  ENST ID: ENST00000421009
  CDS Start-End: 77-1567
gtgacagtgaatccttggcatatgaagaaagctttcaaagtcatgaacgaattaagaagtcaaaatttgctgtgcgatgtcacaattgtggcagaagacatggaaatttctgctcatagagtggtgctggccgcctgtagtccttattttcatgccatgtttacaggtacttctcccagcagctggtctcttacagttacaggatgtgaagaagacttgttgtgaatttttggaatcccagcttcaccctgtcaactgcttaggaatccgggcttttgctgatatgcatgcatgtaccgaccttctgaacaaggccaacacctatgcagagcaacattttgcagatgttgtacttagtgaagaatttctcaatcttggcatcgaacaagtgtgcagcttaatctcaagtgacaaacttaccatttcttcagaagagaaggtatttgaagcagtaatagcatgggtgaaccatgacaaggatgtgaggcaagagtttatggcccgactgatggaacatgtacggttacctttgcttcctcgggaatatttagttcagagggttgaagaggaagcattggtcaagaatagcagtgcttgcaaagattacctcattgaagcaatgaagtaccatttgctgccaacagagcagcgtatattaatgaagagtgtccggacccggctgaggacacccatgaaccttcccaaattgatggtggtggttgggggccaagcaccaaaggctatccggagtgtggaatgctatgactttaaagaagaaaggtggcaccaagtagcagagttgccttccaggaggtgcagggcaggcatggtctacatggctggacttgtttttgctgttggtggctttaatggctcattaagagttcgcactgtagattcctacgaccctgtgaaggaccagtggaccagcgttgctaacatgagagaccggagaagcactttgggagctgctgtgttaaatggattattatacgctgtgggaggctttgatgggagtacaggtttgtcatctgtggaagcatacaacataaagtctaatgagtggtttcatgtagctcccatgaatacaaggaggagcagtgttggtgtgggtgttgttggaggtttgctctatgctgtaggaggttatgatggagcatcacgtcagtgtcttagcacagtagaatgctataatgctacaacaaatgagtggacctatatagcagaaatgagcaccaggcggagtggagcaggtgttggtgtgttaaacaatttattgtatgctgtaggaggtcatgatggccctttagtacgaaaaagtgttgaagtatatgatcccaccactaacgcatggagacaggttgcagatatgaacatgtgcagaagaaatgcaggagtttgtgcagttaatggtctgttatatgttgttggaggggatgatggttcctgtaacttggcgtcagtagaatattataacccaacaaccgataaatggacagttgtgtcatcgtgtatgagcacagggagaagttatgcaggggtcacagttattgataaaccattatgagcctgaaggacattttcagcatatttatacatgagaaacagccttcaacaagtatttgtgaagtgactgagaatctagcacttctccacttgtagctgcactttaagtctcagcagaagatacgatcgtctgcctttataggcctcagatactgaagattatttttggtagaagcaccgtgtaggctttttctgcaatgagcagcagctgactgaattttcataagaaacttggactgcaggacttaatctgtagtctttagacaacagttgctttcataaagactagttcttatcaaccttgaatgactacagattattttgtgaaggaggatgaagtaatgtgtgttcttgtaaaattaaattttatctttatttcttctaaaaatctgtataccaggaactgaaaatctttgaacagatattaaaatctacgtaagtatacaaactagttgagggatacactgtttgcttttataaaataactttgattacatgaatataataaattatgtgcatataaatgtgtgtctatatgctttcctttaaatatgtttgaaaagatgtttgaaacttgattatactatttataattggcacagtactttgaattatgccagtactacattgtaaaacagagttgtattttttgatatttaacaatgcttaacactttaaatgccacttctgaggaatggacctggtgtaacacacttgaatatgtgtgatgccaaactttttaaaatacaatataaattatgcttatttattattttctttagtttaatcttggtcatgttttggtgtgtatttttaatttttttcttaaattaacactttggcatgaacattactgcaggtttttgatgaatataatgaatgtatg

SEQ ID NO: 145268 - DNA, 582 bp, Homo sapiens
  Payload ID: 8709
  Gene Symbol: KLHL2
  Gene Name: kelch-like family member 2
  ENST ID: ENST00000509704
  CDS Start-End: 231-582
ttcgtttttacttttggaacagagggagctaaaggaaagaacaagggaatacttagaatgcagttttatttggagatatctgctaagccacttctgctgaatattctgtgttgatctttgacggaacttggacaccagggagatgcacaaagcagggtcatcagaagcctctcgattcaaaagatgataataccgaaaaacactgcccagtgacagtgaatccttggcatatgaagaaagctttcaaagtcatgaacgaattaagaagtcaaaatttgctgtgcgatgtcacaattgtggcagaagacatggaaatttctgctcatagagtggtgctggccgcctgtagtccttattttcatgccatgtttacaggtgagatgagtgagagccgagcaaagagagttagaataaaagaggtagatggctggaccctgaggatgctaattgattatgtttacactgcagaaattcaggttacagaagaaaatgtacaggtacttctcccagcagctggtctcttacagttacaggatgtgaagaagacttgttgtgaatttttggaatcccagcttcaccctg

SEQ ID NO: 145269 - DNA, 2887 bp, Homo sapiens
  Payload ID: 8709
  Gene Symbol: KLHL2
  Gene Name: kelch-like family member 2
  ENST ID: ENST00000506824
  CDS Start-End: 108-275
agaacagaggccagtggaaactattaggaagactcagcttttcatgaagttagatttttagcctgagctttaagtcaaagaaagatgacctggacttaaagtgccttatggtatggttggaagcacggccccagattctctttgtatgcacaaagcagggtcatcagaagcctctcgattcaaaagatgataataccgaaaaacactgcccagtgacagtgaatccttggcatatgaagaaagctttcaaagtcatgaacgaattaagaaggtgagatgagtgagagccgagcaaagagagttagaataaaagaggtagatggctggaccctgaggatgctaattgattatgtttacactgcagaaattcaggttacagaagaaaatgtacaggtacttctcccagcagctggtctcttacagttacaggatgtgaagaagacttgttgtgaatttttggaatcccagcttcaccctgtcaactgcttaggaatccgggcttttgctgatatgcatgcatgtaccgaccttctgaacaaggccaacacctatgcagagcaacattttgcagatgttgtacttagtgaagaatttctcaatcttggcatcgaacaagtgtgcagcttaatctcaagtgacaaacttaccatttcttcagaagagaaggtatttgaagcagtaatagcatgggtgaaccatgacaaggatgtgaggcaagagtttatggcccgactgatggaacatgtacggttacctttgcttcctcgggaatatttagttcagagggttgaagaggaagcattggtcaagaatagcagtgcttgcaaagattacctcattgaagcaatgaagtaccatttgctgccaacagagcagcgtatattaatgaagagtgtccggacccggctgaggacacccatgaaccttcccaaattgatggtggtggttgggggccaagcaccaaaggctatccggagtgtggaatgctatgactttaaagaagaaaggtggcaccaagtagcagagttgccttccaggaggtgcagggcaggcatggtctacatggctggacttgtttttgctgttggtggctttaatggctcattaagagttcgcactgtagattcctacgaccctgtgaaggaccagtggaccagcgttgctaacatgagagaccggagaagcactttgggagctgctgtgttaaatggattattatacgctgtgggaggctttgatgggagtacaggtttgtcatctgtggaagcatacaacataaagtctaatgagtggtttcatgtagctcccatgaatacaaggaggagcagtgttggtgtgggtgttgttggaggtttgctctatgctgtaggaggttatgatggagcatcacgtcagtgtcttagcacagtagaatgctataatgctacaacaaatgagtggacctatatagcagaaatgagcaccaggcggagtggagcaggtgttggtgtgttaaacaatttattgtatgctgtaggaggtcatgatggccctttagtacgaaaaagtgttgaagtatatgatcccaccactaacgcatggagacaggttgcagatatgaacatgtgcagaagaaatgcaggagtttgtgcagttaatggtctgttatatgttgttggaggggatgatggttcctgtaacttggcgtcagtagaatattataacccaacaaccgataaatggacagttgtgtcatcgtgtatgagcacagggagaagttatgcaggggtcacagttattgataaaccattatgagcctgaaggacattttcagcatatttatacatgagaaacagccttcaacaagtatttgtgaagtgactgagaatctagcacttctccacttgtagctgcactttaagtctcagcagaagatacgatcgtctgcctttataggcctcagatactgaagattatttttggtagaagcaccgtgtaggctttttctgcaatgagcagcagctgactgaattttcataagaaacttggactgcaggacttaatctgtagtctttagacaacagttgctttcataaagactagttcttatcaaccttgaatgactacagattattttgtgaaggaggatgaagtaatgtgtgttcttgtaaaattaaattttatctttatttcttctaaaaatctgtataccaggaactgaaaatctttgaacagatattaaaatctacgtaagtatacaaactagttgagggatacactgtttgcttttataaaataactttgattacatgaatataataaattatgtgcatataaatgtgtgtctatatgctttcctttaaatatgtttgaaaagatgtttgaaacttgattatactatttataattggcacagtactttgaattatgccagtactacattgtaaaacagagttgtattttttgatatttaacaatgcttaacactttaaatgccacttctgaggaatggacctggtgtaacacacttgaatatgtgtgatgccaaactttttaaaatacaatataaattatgcttatttattattttctttagtttaatcttggtcatgttttggtgtgtatttttaatttttttcttaaattaacactttggcatgaacattactgcaggtttttgatgaatataatgaatgtatggaattcaattgaatttgcatggtcttcggaattttttctgtgtgtataaatttagctgctattaacagaagagagaactttctgtgagtagccatgtgtgttgatcagatacagtttttctgagatcttcaattaatctcactttaaaaatgaccaaaacatgtctttcttgaattaactttgaataaaagtttgtatattatttgtt

SEQ ID NO: 145270 - DNA, 487 bp, Homo sapiens
  Payload ID: 8709
  Gene Symbol: KLHL2
  Gene Name: kelch-like family member 2
  ENST ID: ENST00000511305
  CDS Start-End: 55-487
tggtgctggctgtgttggtcggtgcctgcgttctgaagcccgagaggagccacaatggagacgccgccgctgcctcccgcatgcacaaagcagggtcatcagaagcctctcgattcaaaagatgataataccgaaaaacactgcccagtgacagtgaatccttggcatatgaagaaagctttcaaagtcatgaacgaattaagaagacaatctcactctgccacccaggctggaatgcagtggcgtgatctcagctcactgcaacctccgactcctgggttcaagcgattgtcccacctcagcctcccgagtagctgggattacagtcaaaatttgctgtgcgatgtcacaattgtggcagaagacatggaaatttctgctcatagagtggtgctggccgcctgtagtccttattttcatgccatgtttacaggtgagatgagtgagagccgagcaaagagagttagaataaaagaggtagatggct

SEQ ID NO: 145271 - DNA, 2169 bp, Homo sapiens
  Payload ID: 8709
  Gene Symbol: KLHL2
  Gene Name: kelch-like family member 2
  ENST ID: ENST00000506761
  CDS Start-End: 235-1518
gcacttgttaagacatgctatcgattgttccatgtgaaatactggcagtagtaaggcctcctggtgatctttcccagatggcctcattagcttttgcttagaagttccagttgtgaggtacttctcccagcagctggtctcttacagttacaggatgtgaagaagacttgttgtgaatttttggaatcccagcttcaccctgtcaactgcttaggaatccgggcttttgctgatatgcatgcatgtaccgaccttctgaacaaggccaacacctatgcagagcaacattttgcagatgttgtacttagtgaagaatttctcaatcttggcatcgaacaagtgtgcagcttaatctcaagtgacaaacttaccatttcttcagaagagaaggtatttgaagcagtaatagcatgggtgaaccatgacaaggatgtgaggcaagagtttatggcccgactgatggaacatgtacggttacctttgcttcctcgggaatatttagttcagagggttgaagaggaagcattggtcaagaatagcagtgcttgcaaagattacctcattgaagcaatgaagtaccatttgctgccaacagagcagcgtatattaatgaagagtgtccggacccggctgaggacacccatgaaccttcccaaattgatggtggtggttgggggccaagcaccaaaggctatccggagtgtggaatgctatgactttaaagaagaaaggtggcaccaagtagcagagttgccttccaggaggtgcagggcaggcatggtctacatggctggacttgtttttgctgttggtggctttaatggctcattaagagttcgcactgtagattcctacgaccctgtgaaggaccagtggaccagcgttgctaacatgagagaccggagaagcactttgggagctgctgtgttaaatggattattatacgctgtgggaggctttgatgggagtacaggtttgtcatctgtggaagcatacaacataaagtctaatgagtggtttcatgtagctcccatgaatacaaggaggagcagtgttggtgtgggtgttgttggaggtttgctctatgctgtaggaggttatgatggagcatcacgtcagtgtcttagcacagtagaatgctataatgctacaacaaatgagtggacctatatagcagaaatgagcaccaggcggagtggagcaggtgttggtgtgttaaacaatttattgtatgctgtaggaggtcatgatggccctttagtacgaaaaagtgttgaagtatatgatcccaccactaacgcatggagacaggttgcagatatgaacatgtgcagaagaaatgcaggagtttgtgcagttaatggtctgttatatgttgttggaggggatgatggttcctgtaacttggcgtcagtagaatattataacccaacaaccgataaatggacagttgtgtcatcgtgtatgagcacagggagaagttatgcaggggtcacagttattgataaaccattatgagcctgaaggacattttcagcatatttatacatgagaaacagccttcaacaagtatttgtgaagtgactgagaatctagcacttctccacttgtagctgcactttaagtctcagcagaagatacgatcgtctgcctttataggcctcagatactgaagattatttttggtagaagcaccgtgtaggctttttctgcaatgagcagcagctgactgaattttcataagaaacttggactgcaggacttaatctgtagtctttagacaacagttgctttcataaagactagttcttatcaaccttgaatgactacagattattttgtgaaggaggatgaagtaatgtgtgttcttgtaaaattaaattttatctttatttcttctaaaaatctgtataccaggaactgaaaatctttgaacagatattaaaatctacgtaagtatacaaactagttgagggatacactgtttgcttttataaaataactttgattacatgaatataataaattatgtgcatataaatgtgtgtctatatgctttcctttaaatatgtttgaaaagatgtttgaaacttgattatactatttataattggcacagtactttgaattatgccagtactacattgtaaaacagagttgtattttttg

SEQ ID NO: 145272 - DNA, 2442 bp, Homo sapiens
  Payload ID: 8709
  Gene Symbol: KLHL2
  Gene Name: kelch-like family member 2
  Uniprot ID: O95198
  ENST ID: ENST00000514860
  CDS Start-End: 251-2044
tttttttccttgccaccccttggcctgtttgcctccactcccattaacatccctccaccatggatcccgtgtgccggatttgagacttgcaggcagtgtctttaggaaggaactttaccgggcctcactgccagagctgggctagaacagaggccagtggaaactattaggaagactcagcttttcatgaagttagatttttagcctgagctttaagtcaaagaaagatgacctggacttaaagtgccttatggtatggttggaagcacggccccagattctctttgtatgcacaaagcagggtcatcagaagcctctcgattcaaaagatgataataccgaaaaacactgcccagtgacagtgaatccttggcatatgaagaaagctttcaaagtcatgaacgaattaagaagtcaaaatttgctgtgcgatgtcacaattgtggcagaagacatggaaatttctgctcatagagtggtgctggccgcctgtagtccttattttcatgccatgtttacaggtgagatgagtgagagccgagcaaagagagttagaataaaagaggtagatggctggaccctgaggatgctaattgattatgtttacactgcagaaattcaggttacagaagaaaatgtacaggtacttctcccagcagctggtctcttacagttacaggatgtgaagaagacttgttgtgaatttttggaatcccagcttcaccctgtcaactgcttaggaatccgggcttttgctgatatgcatgcatgtaccgaccttctgaacaaggccaacacctatgcagagcaacattttgcagatgttgtacttagtgaagaatttctcaatcttggcatcgaacaagtgtgcagcttaatctcaagtgacaaacttaccatttcttcagaagagaaggtatttgaagcagtaatagcatgggtgaaccatgacaaggatgtgaggcaagagtttatggcccgactgatggaacatgtacggttacctttgcttcctcgggaatatttagttcagagggttgaagaggaagcattggtcaagaatagcagtgcttgcaaagattacctcattgaagcaatgaagtaccatttgctgccaacagagcagcgtatattaatgaagagtgtccggacccggctgaggacacccatgaaccttcccaaattgatggtggtggttgggggccaagcaccaaaggctatccggagtgtggaatgctatgactttaaagaagaaaggtggcaccaagtagcagagttgccttccaggaggtgcagggcaggcatggtctacatggctggacttgtttttgctgttggtggctttaatggctcattaagagttcgcactgtagattcctacgaccctgtgaaggaccagtggaccagcgttgctaacatgagagaccggagaagcactttgggagctgctgtgttaaatggattattatacgctgtgggaggctttgatgggagtacaggtttgtcatctgtggaagcatacaacataaagtctaatgagtggtttcatgtagctcccatgaatacaaggaggagcagtgttggtgtgggtgttgttggaggtttgctctatgctgtaggaggttatgatggagcatcacgtcagtgtcttagcacagtagaatgctataatgctacaacaaatgagtggacctatatagcagaaatgagcaccaggcggagtggagcaggtgttggtgtgttaaacaatttattgtatgctgtaggaggtcatgatggccctttagtacgaaaaagtgttgaagtatatgatcccaccactaacgcatggagacaggttgcagatatgaacatgtgcagaagaaatgcaggagtttgtgcagttaatggtctgttatatgttgttggaggggatgatggttcctgtaacttggcgtcagtagaatattataacccaacaaccgataaatggacagttgtgtcatcgtgtatgagcacagggagaagttatgcaggggtcacagttattgataaaccattatgagcctgaaggacattttcagcatatttatacatgagaaacagccttcaacaagtatttgtgaagtgactgagaatctagcacttctccacttgtagctgcactttaagtctcagcagaagatacgatcgtctgcctttataggcctcagatactgaagattatttttggtagaagcaccgtgtaggctttttctgcaatgagcagcagctgactgaattttcataagaaacttggactgcaggacttaatctgtagtctttagacaacagttgctttcataaagactagttcttatcaaccttgaatgactacagattattttgtgaaggaggatgaagtaatgtgtgttcttgtaaaattaaattttatctttatttcttctaaaaatctgtatacca

SEQ ID NO: 145273 - DNA, 2907 bp, Homo sapiens
  Payload ID: 8709
  Gene Symbol: KLHL2
  Gene Name: kelch-like family member 2
  Uniprot ID: O95198
  ENST ID: ENST00000538127
  CDS Start-End: 294-1811
actgccagagctgggctagaacagaggccagtggaaactattaggaagactcagcttttcatgaagttagatttttagcctgagctttaagtcaaagaaagatgacctggacttaaagtgccttatggtatggttggaagcacggccccagattctctttgtatgcacaaagcagggtcatcagaagcctctcgattcaaaagatgataataccgaaaaacactgcccagtgacagtgaatccttggcatatgaagaaagctttcaaagtcatgaacgaattaagaaggtgagatgagtgagagccgagcaaagagagttagaataaaagaggtagatggctggaccctgaggatgctaattgattatgtttacactgcagaaattcaggttacagaagaaaatgtacaggtacttctcccagcagctggtctcttacagttacaggatgtgaagaagacttgttgtgaatttttggaatcccagcttcaccctgtcaactgcttaggaatccgggcttttgctgatatgcatgcatgtaccgaccttctgaacaaggccaacacctatgcagagcaacattttgcagatgttgtacttagtgaagaatttctcaatcttggcatcgaacaagtgtgcagcttaatctcaagtgacaaacttaccatttcttcagaagagaaggtatttgaagcagtaatagcatgggtgaaccatgacaaggatgtgaggcaagagtttatggcccgactgatggaacatgtacggttacctttgcttcctcgggaatatttagttcagagggttgaagaggaagcattggtcaagaatagcagtgcttgcaaagattacctcattgaagcaatgaagtaccatttgctgccaacagagcagcgtatattaatgaagagtgtccggacccggctgaggacacccatgaaccttcccaaattgatggtggtggttgggggccaagcaccaaaggctatccggagtgtggaatgctatgactttaaagaagaaaggtggcaccaagtagcagagttgccttccaggaggtgcagggcaggcatggtctacatggctggacttgtttttgctgttggtggctttaatggctcattaagagttcgcactgtagattcctacgaccctgtgaaggaccagtggaccagcgttgctaacatgagagaccggagaagcactttgggagctgctgtgttaaatggattattatacgctgtgggaggctttgatgggagtacaggtttgtcatctgtggaagcatacaacataaagtctaatgagtggtttcatgtagctcccatgaatacaaggaggagcagtgttggtgtgggtgttgttggaggtttgctctatgctgtaggaggttatgatggagcatcacgtcagtgtcttagcacagtagaatgctataatgctacaacaaatgagtggacctatatagcagaaatgagcaccaggcggagtggagcaggtgttggtgtgttaaacaatttattgtatgctgtaggaggtcatgatggccctttagtacgaaaaagtgttgaagtatatgatcccaccactaacgcatggagacaggttgcagatatgaacatgtgcagaagaaatgcaggagtttgtgcagttaatggtctgttatatgttgttggaggggatgatggttcctgtaacttggcgtcagtagaatattataacccaacaaccgataaatggacagttgtgtcatcgtgtatgagcacagggagaagttatgcaggggtcacagttattgataaaccattatgagcctgaaggacattttcagcatatttatacatgagaaacagccttcaacaagtatttgtgaagtgactgagaatctagcacttctccacttgtagctgcactttaagtctcagcagaagatacgatcgtctgcctttataggcctcagatactgaagattatttttggtagaagcaccgtgtaggctttttctgcaatgagcagcagctgactgaattttcataagaaacttggactgcaggacttaatctgtagtctttagacaacagttgctttcataaagactagttcttatcaaccttgaatgactacagattattttgtgaaggaggatgaagtaatgtgtgttcttgtaaaattaaattttatctttatttcttctaaaaatctgtataccaggaactgaaaatctttgaacagatattaaaatctacgtaagtatacaaactagttgagggatacactgtttgcttttataaaataactttgattacatgaatataataaattatgtgcatataaatgtgtgtctatatgctttcctttaaatatgtttgaaaagatgtttgaaacttgattatactatttataattggcacagtactttgaattatgccagtactacattgtaaaacagagttgtattttttgatatttaacaatgcttaacactttaaatgccacttctgaggaatggacctggtgtaacacacttgaatatgtgtgatgccaaactttttaaaatacaatataaattatgcttatttattattttctttagtttaatcttggtcatgttttggtgtgtatttttaatttttttcttaaattaacactttggcatgaacattactgcaggtttttgatgaatataatgaatgtatggaattcaattgaatttgcatggtcttcggaattttttctgtgtgtataaatttagctgctattaacagaagagagaactttctgtgagtagccatgtgtgttgatcagatacagtttttctgagatcttcaattaatctcactttaaaaatgaccaaaacatgtctttcttgaattaactttgaataaaagtttgtatattatttgtttca

SEQ ID NO: 145274 - DNA, 3421 bp, Homo sapiens
  Payload ID: 8710
  Gene Symbol: KLHL20
  Gene Name: kelch-like family member 20
  Uniprot ID: Q9Y2M5
  ENST ID: ENST00000209884
  CDS Start-End: 137-1966
ctgcctgcgttagcggcggtggaggaggaggcagagaggagtggagggcggagtagacggaggaggctgctgcagagaagaaagtgtcagagccggttcggctttagagtgtggtgaagggtacttttcatggtgcatggaaggaaagccaatgcgcaggtgtaccaacattcgaccaggagagactggaatggatgtaacaagccgctgcacccttggagaccccaacaaactgccagaaggggttccccaacctgcccgcatgccctatatctcagacaagcaccctcgacaaaccttggaagtgattaaccttctgagaaagcaccgggagctatgtgatgtggtgctagttgtgggcgccaagaagatatatgcccatcgagtcattttgtcagcctgtagtccctacttccgagctatgtttacaggagaattggcagagagccgtcagacagaagtagtgatccgagacattgacgagagggctatggaattactgattgactttgcgtatacctcccagataacagtagaagagggcaatgttcagactcttctgccagctgcttgcctcctccagctggcagaaatacaggaagcctgctgtgaattcttaaagagacaattagatccttctaactgcctgggcattcgggcttttgctgacacacattcatgtcgtgagttgctaaggatagcagacaagttcacccaacataactttcaagaggtaatggagagtgaagagttcatgttgcttccagccaatcaactcattgatataatatccagtgatgagctaaacgttcgcagtgaagaacaagtgttcaatgcagtgatggcctgggtcaaatacagtattcaggaaagacgtcctcaattaccccaggtgctgcagcatgttcgtttgcctttgcttagtcccaagttcctggtcggcacagtaggctctgatcccctcatcaaaagtgatgaagaatgcagagacttggtagatgaggctaaaaactacctcctattgccgcaagaacgaccactaatgcaaggaccaaggacgagaccacggaaacctatccgatgtggggaagtactctttgcagttggtggttggtgcagtggagatgccatttccagtgttgaacgatatgatccacagaccaatgaatggagaatggtggcttcaatgagcaaaaggagatgcggagttggggtcagtgttcttgatgatctgttatatgcagtaggaggccatgatggatcctcttatctcaatagtgttgaaaggtatgaccccaaaacaaaccagtggagcagtgatgtggcccctacaagcacctgcaggacaagtgttggtgtagcagtacttggaggctttctttatgctgtgggtggccaggatggtgtgtcttgcctcaacattgttgagaggtatgatccgaaggagaacaagtggactcgggtagcttctatgagtaccagaagactaggtgtggctgtggctgtgttaggagggttcttatatgctgtaggtggctctgacgggacatctcctctcaacacagtggaacgttacaatcctcaggaaaacagatggcacactatagcccctatggggacccggaggaaacacctaggctgtgcagtatatcaggacatgatctatgctgtaggaggtagagatgacactacagagctgagcagtgctgagagatacaaccccagaaccaaccagtggtctccagtggtggccatgacatcacgccgtagtggagttggcctggcagtggtcaatggacagctcatggcagtaggaggttttgatggcacaacatacttgaagaccatagaagtttttgatcctgatgccaatacatggaggttatatggcgggatgaattaccgtcggctagggggtggcgtaggagttattaaaatgacacattgtgaatcccatatttggtgaacacagagaagacagtcttgtatatattcctctgtattctggggagctttgaccttggagctttgtacagcttgagaaaacattagaacaaattttattatttgccggtgcctcaacaaatggaaatacaatccaatgaaagtacttcacctgcaagatgcacaataattttcaactctgtgcagaagaatatttatttttggttttaatttatcatggttttttgttgttttcgttttgaacttatccttcctcccacaaaaaaagaaaagaagaaaaaattccaagcagcaaaacttactttgtttgtaaggtattcatttaggtttgaaaatactatttaataagggcagaagggctatatatgatttggctattatttctagacactccatccacatgattccactaacaaggattaccaggaataaaggtaggtatgcaaaatgtattagctacccattattctcgcactaaccaccagaagacttgaaaatcttaaaaaaaaaaaacaaaaaaacaagaaaaggcaacatctcattttaaatagtacaattcagaagggatactaaatcaataaaaaccaggactcagacactacagttttcatcagtgtaattttatgtcttgtttctttctatatgaacttgtttatttagtctttttttcataatattctcatagagtttctgctagatctagagctctgctcagtgcctcttataaaaacaatatataagtctcatatgctgtcttgagaatccaagagaatcacatgcagctctgcaacagtttttgctcaaaaatgttactgactaaagcaactgtccttcctgtttccttattgctaccaaggaccagcagggagaaatgtcttctcccagcagtgaattctgttatgcaatttattcttgatgctcaggcctggttaagctgaggcttacctttaataacagcctccaagggaatgaattattcagttaatgtaatagcacacattaaagagtgtaaaatcaattgaggcattttattaatatcttggttcttttatacaaacaatgtatcattatcttcattctataaggtcattgttactacttctctcaaattgcactttctggtaaaaagttaaaaatttttaaggaaaaaataatttcaatggttaaagttttttttcctcattgtattcatagacaaatttttttcaatatattttgcaagaaaaatctttgaataagactaactgcatttaaaaggaataacctccttctccctttccccaactacaaaaatgtttggcaactttgtgtttacatttaaagatcatttgcacctttttcaaggaaaaaaagtattgagtaaacaattgtttacatatatcatttatgcttttttctagcatgtataacttttttaaataaaggtagtatttaccattaaaaaaattttagctaa

SEQ ID NO: 145275 - DNA, 4487 bp, Homo sapiens
  Payload ID: 8711
  Gene Symbol: KLHL21
  Gene Name: kelch-like family member 21
  Uniprot ID: Q9UJP4
  ENST ID: ENST00000377658
  CDS Start-End: 53-1846
gtctctccgcaggccccggccgcggcgtcctcgacaacctatcgaaggcgccatggagcgaccggcgcccctggccgtgcttcccttctcggaccccgcgcacgccctgagcctgctgcgcggcctgagccagctgcgcgccgagcgcaagttcctggacgtgaccctggaggcggcgggcgggcgcgacttcccggcgcaccgtgcggtgctggccgccgccagcccctacttccgcgccatgttcgcggggcagctgcgcgagagccgcgccgagcgggtgcgcctgcacggagtgcctcccgacatgctgcagctgctgctggacttcagctacacgggccgcgtggcggtaagcggcgacaacgctgagccgctgctgcgcgccgccgacctgctgcagttcccggccgtgaaggaggcgtgcggggccttcctgcagcagcagctcgacctggccaactgcctggacatgcaggacttcgctgaggccttcagctgctcgggactggcgagcgcggcgcagcggttcattctgcgccacgtgggcgagctgggcgccgagcagctggagcggctgccactggcgcgcctgctgcgctacctgcgggacgacgggctgtgtgtgcccaaggaggaggccgcctaccagctggcgctgcgctgggtccgcgctgacccgccgcgccgcgccgcgcactggccgcagctgctggaggccgtgcgcctgcccttcgtgcgccgcttctacctgttggcgcacgtcgaggccgagccgctggtggcgcgctgcccaccctgcctgcgcctgctgcgcgaggcgcgcgacttccaggcggcgcgctacgaccgccacgaccgcgggccctgtccccgaatgcgtcctcgcccgtccaccggtctcgccgagatcctcgtgctcgtgggcggctgcgaccaggactgtgacgagctggtcactgtcgactgctacaacccgcagacgggtcagtggcgctacctggccgagttcccagaccacctgggcggaggctacagcatcgtggcgctgggcaatgacatctacgtgacgggtgggtccgatggctcccggctctatgactgcgtgtggaggtacaactcaagcgtgaatgagtgggcggaggtggcgcccatgctgaaggcccgcgagtaccacagctcctctgtgctggacggactgctgtacgtggtggccgccgacagcaccgagcgctatgaccacaccactgactcctgggaggccctgcagcccatgacctaccccatggacaactgctccaccactgcgtgccgtggccggctctatgccatcggctccctggctggcaaggagaccatggtgatgcagtgctacgacccggacaccgacctgtggtcgctggtggactgcggccagctcccgccctggtccttcgcccccaagactgcgactctaaacggactcatgtactttgtcagggatgactccgctgaggtggacgtgtacaacccgacgaggaacgaatgggacaagatcccgtccatgaatcaggtacatgtggggggcagcctggccgtccttggggggaagctgtacgtctctgggggatacgacaatacatttgaactctcggacgtggtagaggcctatgacccagagactcgcgcgtggagcgtggtggggcggctcccagaacccaccttctggcatggcagtgtcagcatcttccgccagttcatgccccagaccttctcgggtgggcgtggcttcgagttggacagtggcagcgatgacatggacccaggccgaccccggccgccgcgggaccccgatgagctgcactagccccagtctggcccggcacgggcctcggtgcaggtaactggcacctctgcggggcagtgccccactcctttgtgcacaaggacacgttgggctcacaggaggagcacaggctcttgggtggcgaagccagcccaggatccattacctggaaggtttctgtaccttgagagcctgaatcagaggccgtcgggaacgccctccctgcagttgaggaagagccactttcctgccagcacatgtttctgggtcttggaggtcacccccaccccgcggatcacagctcacccacgcggcgcacacccctcctgccgttgtcatctgcacctacttgttcccaccttgggagaggacgatgacttgggagggacgcgtgaagggagaaggggtcctcccatgaggctgaggatggcctgaacctggagcagcggaccaggcagacgggctgaagtggggtcccaaattccatgtccagaggtgtggggagcctgcctccctagctcctggcccctgccaggggcttacatcaaaacacctcagagggctgccctccagaggctgcacccagaacagtgggacatgagcaggggtgtgggcttggagggtgaagaggatgtggtcctatcagatgctgggcctcctcagccatagccccctgctcctaccccctgactggctcttgcgtcctcacctctcaccctctccttcccgggaggccctgggaggtgatcattgacacccagccaagcagacagctgcgggtgcccaagcccttgctgggcctgcgcgtgaggagtcccactgcttctaaaggaagtcctgggcaggaggtggctttggtggttggttccaaagttgaaaatgcttgcagtttgaccttagaagaagtgggaagaagaaggagctctacagggtcagctttgtttgatttgtccagtctaagaagtcccattgccaaagctttctgcaggagggtgaatgccgcagcttggcagcccctgggtttctcttggaaatggtcagtttcccctcaaagtacccaaagtagccttggcttgagtttttgtccttgcctcctttttagagaagagggcatttagactgcattttcctggttaaagaaggttaaagcaaatgtttattgccttttctagtgaactaactcgtagagatgttctcagcaggaagacagtcttagcactgtcacttagcagattgcacttaagtcccttgtgctggccagatggcgtggctggttgccttaatatgtcccaggacccctgacagggctgcctggcctctccctcgtgctcctcaagagcccagtccatacactgtggatgtcattgctgtcgggttaggaagtcttgtcctagaacgccctggctggtatgaccacagttcatggcggctcttctcgcttgggtcatggtcatcttccagcacctgctgtgctgggaaggccgaggatgggggcccagcactgtccaggcctgctggggcctggctgggagtcctgtgggcagcatggaacatgcagctgggcttcctgtgaccaggcaccctctggcactgttgcttgccctgtgccctggaccttttcctgcccttctccttcctctgctcccttggggctaccccttggcccctcctggtctgtgcaaactccctcagggagcccccctgccctgtagctctcgcttaacttcctaggggctgctgagcccacccagaggttgttggagttcagcggggcagcttgtctcccttgtcagcaggggcgtaagggctgggtttggccatacaaggttggctacgccctcaatccctgaccgttccaggcactgagctgggcacccacggaaggacatgctgtccagactgtgatgactgccagcacagggcatctcgggcttggctggtctgcgaggccttgcccctgtggaactctgggttcctgttttctcagtcttttttgcggctttgctgtggttggcagctgccgtactccaggcttgtgtcggccactcagatgagggctgtggtgcgagccagtgcaggagagctgcgcttgggattgtgccctctcctgtgtctgtcctccggacctacccaggtctccaccatcaggaccctgtctttgggtttagaagaccaagtatggggaaaaccaggcaccagcctctgcagcaatgggtccctctagcctgtggacaccagctgggggatccagggtcaggccccctcctctccccagtttccctctgctgtgggttctgggctgtcatgtctccaccacttaaggatgtctttacactgacttcaggatagatgctgggatgcctgggcatggccacatgttacatgtacagaactttgtctacagcacaaattaagttatataaacacagtgactggtatttaatgctgatctactataaggtattctatatttatatgacttcagagacgcgtatgtaataaaggacgccctccctccagtgtccacatccagttcaccccagagggtcgggcaggttgacatatttatttttgtctattctgtaggcttccatgtccagaatcctgcttaaggttttagggtaccttcagtactttttgcaataaaagtatttcctatcca

SEQ ID NO: 145276 - DNA, 6445 bp, Homo sapiens
  Payload ID: 8711
  Gene Symbol: KLHL21
  Gene Name: kelch-like family member 21
  Uniprot ID: Q9UJP4
  ENST ID: ENST00000377663
  CDS Start-End: 185-1804
cgcgctcgcggggggcggtggcgcccggcacagaggggttaagggggcggtgcagacgtctccccgcccatcccgcccctcgagagccgcggcgccccgccctatttatagcagcggtgcctagcgcgccgcgtctctccgcaggccccggccgcggcgtcctcgacaacctatcgaaggcgccatggagcgaccggcgcccctggccgtgcttcccttctcggaccccgcgcacgccctgagcctgctgcgcggcctgagccagctgcgcgccgagcgcaagttcctggacgtgaccctggaggcggcgggcgggcgcgacttcccggcgcaccgtgcggtgctggccgccgccagcccctacttccgcgccatgttcgcggggcagctgcgcgagagccgcgccgagcgggtgcgcctgcacggagtgcctcccgacatgctgcagctgctgctggacttcagctacacgggccgcgtggcggtaagcggcgacaacgctgagccgctgctgcgcgccgccgacctgctgcagttcccggccgtgaaggaggcgtgcggggccttcctgcagcagcagctcgacctggccaactgcctggacatgcaggacttcgctgaggccttcagctgctcgggactggcgagcgcggcgcagcggttcattctgcgccacgtgggcgagctgggcgccgagcagctggagcggctgccactggcgcgcctgctgcgctacctgcgggacgacgggctgtgtgtgcccaaggaggaggccgcctaccagctggcgctgcgctgggtccgcgctgacccgccgcgccgcgccgcgcactggccgcagctgctggaggccgtgcgcctgcccttcgtgcgccgcttctacctgttggcgcacgtcgaggccgagccgctggtggcgcgctgcccaccctgcctgcgcctgctgcgcgaggcgcgcgacttccaggcggcgcgctacgaccgccacgaccgcgggccctgtccccgaatgcgtcctcgcccgtccaccggtctcgccgagatcctcgtgctcgtgggcggctgcgaccaggactgtgacgagctggtcactgtcgactgctacaacccgcagacgggtcagtggcgctacctggccgagttcccagaccacctgggcggaggctacagcatcgtggcgctgggcaatgacatctacgtgacgggtgggtccgatggctcccggctctatgactgcgtgtggaggtacaactcaagcgtgaatgagtgggcggaggtggcgcccatgctgaaggcccgcgagtaccacagctcctctgtgctggacggactgctgtacgtggtggccgccgacagcaccgagcgctatgaccacaccactgactcctgggaggccctgcagcccatgacctaccccatggacaactgctccaccactgcgtgccgtggccggctctatgccatcggctccctggctggcaaggagaccatggtgatgcagtgctacgacccggacaccgacctgtggtcgctggtggactgcggccagctcccgccctggtccttcgcccccaagactgcgactctaaacggactcatgtactttgtcagggatgactccgctgaggtggacgtgtacaacccgacgaggaacgaatgggacaagatcccgtccatgaatcaggtaaattttcaggcgggccagcattggaagcacaggctggtcctgattttgcaacccaagtgtcatcgtgatgagtgtttgggatccacagccatgatgggtgggtctcatctcaattaatagaaggctgctcttacccttattttgcacttaaggctcactgagacacagatgttaagtaataccctatgattacacagcttagtacacatttgagcagtgtttattgagtatctgctgtgagccagagagcagaaggaagtgagggagcaaggcatacagtcatctggggacacctgttccagagagggacagcaggtacagaggccctgcagcagggcaccctggcgtgttcttagatacaccagcagcccatgtggccggagcagagtcagcatgaggtctgtgacctaccttttttatttttgagacagggtcttgctctgtcacccaggctggagtgcagtggtacaatcatggctcactgcagcctccacctccttgactcgcagtcctcccaccgcaccttcctgaatagctgagactacaggcgtgtgccaccacacccagtaattttttttctcatatgtagatacaaaaggatattcttaaaatttttatagagacagggtcttgctgtgttacccaggctggtctcacactcctggcctcaagtgaccctcctgtctcagcctcccaaagtgctaggattataggcgtgaaccaccacgcccagctggttcctgaggaagtcagtgtgggaatactttttttttttttatacggagtctcgctctgtcacccaggctggagtgcagtggcacgatctcggctcactgcaagctccatctcccaggttcacgccattctcccgcctcaacctcccgagtagctgggactacaggtacccaccaccacgcccagctaattttgtttgtgtatttttagtagagacgggatttcactgtgttagccaggatggtctggatctcctgaccttgtgatctgcctggctcagcctcccaaagtgctgggattacaggcatgagccaccatgcccagcccactgtgggaatacttgtgttgagcacttgctgtgtgttctgaataggacaaccagggtccaccccttctctctgggcttgttgagaagaggggtgcccagcctgacagtgatgggacagggaggcttcagtgccatttggccatgtgagcagtgttagtctgaggtacacatcatattgcctacagccttctttcctgtgtgtctgttaacatttccaaacctacactccgtgacatccagcctcacagcttacatcacagcttaatgtcctggcatttaagagacccagcgttctgttttccccgcagtaagctgcacatagtcatagcgaatttgggaaagatggaaggaatcatccagcctcgcggttcagagcccagctctgccactgtcagccatgcaagcctcagttttcccatctgtaacatggggagaacagcactgctcagcccagagggccactgcagagattctgagagagaacgtaggaagcgctgctcggcacgacctgcacacggggaggcctggcgctgcagcgggcaccctcatcaccatagggaaggcccagctgcctccggggaggcccgttctcctaggcagggtgttggaaaggggttggcctctctgctgctttctgggagagccaaggccacccctctggggtactgacagggcatgccttgtctccagtggttccccaggtggggccctgccctaccctctcctctgacctccactcactcatccctttggcccacaggtacatgtggggggcagcctggccgtccttggggggaagctgtacgtctctgggggatacgacaatacatttgaactctcggacgtggtagaggcctatgacccagagactcgcgcgtggagcgtggtggggcggctcccagaacccaccttctggcatggcagtgtcagcatcttccgccagttcatgccccagaccttctcgggtgggcgtggcttcgagttggacagtggcagcgatgacatggacccaggccgaccccggccgccgcgggaccccgatgagctgcactagccccagtctggcccggcacgggcctcggtgcaggtaactggcacctctgcggggcagtgccccactcctttgtgcacaaggacacgttgggctcacaggaggagcacaggctcttgggtggcgaagccagcccaggatccattacctggaaggtttctgtaccttgagagcctgaatcagaggccgtcgggaacgccctccctgcagttgaggaagagccactttcctgccagcacatgtttctgggtcttggaggtcacccccaccccgcggatcacagctcacccacgcggcgcacacccctcctgccgttgtcatctgcacctacttgttcccaccttgggagaggacgatgacttgggagggacgcgtgaagggagaaggggtcctcccatgaggctgaggatggcctgaacctggagcagcggaccaggcagacgggctgaagtggggtcccaaattccatgtccagaggtgtggggagcctgcctccctagctcctggcccctgccaggggcttacatcaaaacacctcagagggctgccctccagaggctgcacccagaacagtgggacatgagcaggggtgtgggcttggagggtgaagaggatgtggtcctatcagatgctgggcctcctcagccatagccccctgctcctaccccctgactggctcttgcgtcctcacctctcaccctctccttcccgggaggccctgggaggtgatcattgacacccagccaagcagacagctgcgggtgcccaagcccttgctgggcctgcgcgtgaggagtcccactgcttctaaaggaagtcctgggcaggaggtggctttggtggttggttccaaagttgaaaatgcttgcagtttgaccttagaagaagtgggaagaagaaggagctctacagggtcagctttgtttgatttgtccagtctaagaagtcccattgccaaagctttctgcaggagggtgaatgccgcagcttggcagcccctgggtttctcttggaaatggtcagtttcccctcaaagtacccaaagtagccttggcttgagtttttgtccttgcctcctttttagagaagagggcatttagactgcattttcctggttaaagaaggttaaagcaaatgtttattgccttttctagtgaactaactcgtagagatgttctcagcaggaagacagtcttagcactgtcacttagcagattgcacttaagtcccttgtgctggccagatggcgtggctggttgccttaatatgtcccaggacccctgacagggctgcctggcctctccctcgtgctcctcaagagcccagtccatacactgtggatgtcattgctgtcgggttaggaagtcttgtcctagaacgccctggctggtatgaccacagttcatggcggctcttctcgcttgggtcatggtcatcttccagcacctgctgtgctgggaaggccgaggatgggggcccagcactgtccaggcctgctggggcctggctgggagtcctgtgggcagcatggaacatgcagctgggcttcctgtgaccaggcaccctctggcactgttgcttgccctgtgccctggaccttttcctgcccttctccttcctctgctcccttggggctaccccttggcccctcctggtctgtgcaaactccctcagggagcccccctgccctgtagctctcgcttaacttcctaggggctgctgagcccacccagaggttgttggagttcagcggggcagcttgtctcccttgtcagcaggggcgtaagggctgggtttggccatacaaggttggctacgccctcaatccctgaccgttccaggcactgagctgggcacccacggaaggacatgctgtccagactgtgatgactgccagcacagggcatctcgggcttggctggtctgcgaggccttgcccctgtggaactctgggttcctgttttctcagtcttttttgcggctttgctgtggttggcagctgccgtactccaggcttgtgtcggccactcagatgagggctgtggtgcgagccagtgcaggagagctgcgcttgggattgtgccctctcctgtgtctgtcctccggacctacccaggtctccaccatcaggaccctgtctttgggtttagaagaccaagtatggggaaaaccaggcaccagcctctgcagcaatgggtccctctagcctgtggacaccagctgggggatccagggtcaggccccctcctctccccagtttccctctgctgtgggttctgggctgtcatgtctccaccacttaaggatgtctttacactgacttcaggatagatgctgggatgcctgggcatggccacatgttacatgtacagaactttgtctacagcacaaattaagttatataaacacagtgactggtatttaatgctgatctactataaggtattctatatttatatgacttcagagacgcgtatgtaataaaggacgccctccctccagtgtccacatccagttcaccccagagggtcgggcaggttgacatatttatttttgtctattctgtaggcttccatgtccagaatcctgcttaaggttttagggtaccttcagtactttttgcaataaaagtatttcctatcca

SEQ ID NO: 145277 - DNA, 1056 bp, Homo sapiens
  Payload ID: 8711
  Gene Symbol: KLHL21
  Gene Name: kelch-like family member 21
  ENST ID: ENST00000467612
  CDS Start-End: 192-884
cgggggcctcgggagccgaccccggtccgaggggggcctaaaactcctcgagagcaaccggagccaggggcgggcggcggctcggaccgcgtccccgggggcggggaaagagtgggtccgatggctcccggctctatgactgcgtgtggaggtacaactcaagcgtgaatgagtgggcggaggtggcgcccatgctgaaggcccgcgagtaccacagctcctctgtgctggacggactgctgtacgtggtggccgccgacagcaccgagcgctatgaccacaccactgactcctgggaggccctgcagcccatgacctaccccatggacaactgctccaccactgcgtgccgtggccggctctatgccatcggctccctggctggcaaggagaccatggtgatgcagtgctacgacccggacaccgacctgtggtcgctggtggactgcggccagctcccgccctggtccttcgcccccaagactgcgactctaaacggactcatgtactttgtcagggatgactccgctgaggtggacgtgtacaacccgacgaggaacgaatgggacaagatcccgtccatgaatcaggtacatgtggggggcagcctggccgtccttggggggaagctgtacgtctctgggggatacgacaatacatttgaactctcggacgtggtagaggcctatgacccagagactcgcgcgtggagcgtggtggggcggctcccagaacccaccttctggcatggcagtgtcagcatcttccgccagttcatgccccagaccttctcgggtgggcgtggcttcgagttggacagtggcagcgatgacatggacccaggccgaccccggccgccgcgggaccccgatgagctgcactagccccagtctggcccggcacgggcctcggtgcaggtaactggcacctctgcggggcagtgccccactcctttgtgcacaaggacacgttgggctcacaggaggagcacaggctcttgggtggcgaagccagcccaggatccattacctggaaggtttctgtaccttgagagcc

SEQ ID NO: 145278 - DNA, 667 bp, Homo sapiens
  Payload ID: 8711
  Gene Symbol: KLHL21
  Gene Name: kelch-like family member 21
  ENST ID: ENST00000463043
  CDS Start-End: 239-640
agggggcggggcgcgggccaccgggcccgggggatcgggggagcagccgggggcctcgggagccgaccccggtccgaggggggcctaaaactcctcgagagcaaccggagccaggggcgggcggcggctcggaccgcgtccccgggggcggggaaagagtgggtccgatggctcccggctctatgactgcgtgtggaggtacaactcaagcgtgaatgagtgggcggaggtggcgcccatgctgaaggcccgcgagtaccacagctcctctgtgctggacggactgctgtacgtggtggccgccgacagcaccgagcgctatgaccacaccactgactcctgggaggccctgcagcccatgacctaccccatggacaactgctccaccactgcgtgccgtggccggctctatgccatcggctccctggctggcaaggagaccatggtgatgcagtgctacgacccggacaccgacctgtggtcgctggtggactgcggccagctcccgccctggtccttcgcccccaagactgcgactctaaacggactcatgtactttgtcagggatgactccgctgaggtggacgtgtacaacccgacgaggaacgaatgggacaagatcccgtccatgaatcagtaagctgcacatagtcatagcgaatttggg

SEQ ID NO: 145279 - DNA, 824 bp, Homo sapiens
  Payload ID: 8711
  Gene Symbol: KLHL21
  Gene Name: kelch-like family member 21
  ENST ID: ENST00000496707
  CDS Start-End: 148-824
ctgctgacaagctctgtggctccccaggagaactgtcccaaggcccagggctctggtctgctgaggtgtgggtccgatggctcccggctctatgactgcgtgtggaggtacaactcaagcgtgaatgagtgggcggaggtggcgcccatgctgaaggcccgcgagtaccacagctcctctgtgctggacggactgctgtacgtggtggccgccgacagcaccgagcgctatgaccacaccactgactcctgggaggccctgcagcccatgacctaccccatggacaactgctccaccactgcgtgccgtggccggctctatgccatcggctccctggctggcaaggagaccatggtgatgcagtgctacgacccggacaccgacctgtggtcgctggtggactgcggccagctcccgccctggtccttcgcccccaagactgcgactctaaacggactcatgtactttgtcagggatgactccgctgaggtggacgtgtacaacccgacgaggaacgaatgggacaagatcccgtccatgaatcaggtacatgtggggggcagcctggccgtccttggggggaagctgtacgtctctgggggatacgacaatacatttgaactctcggacgtggtagaggcctatgacccagagactcgcgcgtggagcgtggtggggcggctcccagaacccaccttctggcatggcagtgtcagcatcttccgccagttcatgccccagaccttctcgggtgggcgtggcttcgagttggacagtggcagcgatgacatggacccaggccgaccccggccgccgcgggaccc

SEQ ID NO: 145280 - DNA, 1945 bp, Homo sapiens
  Payload ID: 8711
  Gene Symbol: KLHL21
  Gene Name: kelch-like family member 21
  ENST ID: ENST00000610898
  CDS Start-End: 1678-1785
ctctcgtggagtccgagcagctgcttcagggaggcccgggagcccctagggcgggcagccccggagcctgcagctgcgacgcagactcggaaactacaactgcgcgtgaagccgactaaagttaacgcctgtgtgattgagtcagaagctccttcaggaacacaggagtggggccgactcctggaatccggccccgggtcgcttataaatgcgccaagaaaaaaacgtcacccagtaattttttttctcatatgtagatacaaaaggatattcttaaaatttttatagagacagggtcttgctgtgttacccaggctggtctcacactcctggcctcaagtgaccctcctgtctcagcctcccaaagtgctaggattataggcgtgaaccaccacgcccagctggttcctgaggaagtcagtgtgggaatactttttttttttttatacggagtctcgctctgtcacccaggctggagtgcagtggcacgatctcggctcactgcaagctccatctcccaggttcacgccattctcccgcctcaacctcccgagtagctgggactacaggtacccaccaccacgcccagctaattttgtttgtgtatttttagtagagacgggatttcactgtgttagccaggatggtctggatctcctgaccttgtgatctgcctggctcagcctcccaaagtgctgggattacaggcatgagccaccatgcccagcccactgtgggaatacttgtgttgagcacttgctgtgtgttctgaataggacaaccagggtccaccccttctctctgggcttgttgagaagaggggtgcccagcctgacagtgatgggacagggaggcttcagtgccatttggccatgtgagcagtgttagtctgaggtacacatcatattgcctacagccttctttcctgtgtgtctgttaacatttccaaacctacactccgtgacatccagcctcacagcttacatcacagcttaatgtcctggcatttaagagacccagcgttctgttttccccgcagtaagctgcacatagtcatagcgaatttgggaaagatggaaggaatcatccagcctcgcggttcagagcccagctctgccactgtcagccatgcaagcctcagttttcccatctgtaacatggggagaacagcactgctcagcccagagggccactgcagagattctgagagagaacgtaggaagcgctgctcggcacgacctgcacacggggaggcctggcgctgcagcgggcaccctcatcaccatagggaaggcccagctgcctccggggaggcccgttctcctaggcagggtgttggaaaggggttggcctctctgctgctttctgggagagccaaggccacccctctggggtactgacagggcatgccttgtctccagtggttccccaggtggggccctgccctaccctctcctctgacctccactcactcatccctttggcccacaggtacatgtggggggcagcctggccgtccttggggggaagctgtacgtctctgggggatacgacaatacatttgaactctcggacgtggtagaggcctatgacccagagactcgcgcgtggagcgtggtggggcggctcccagaacccaccttctggcatggcagtgtcagcatcttccgccagttcatgccccagaccttctcgggtgggcgtggcttcgagttggacagtggcagcgatgacatggacccaggccgaccccggccgccgcgggaccccgatgagctgcactagccccagtctggcccggcacgggcctcggtgcaggtaactggcacctctgcggggcagtgccccactcctttgtgcacaaggacacgttgggctcacaggaggagcacaggctcttgggtggcgaagccagcccaggatccattacctggaaggtttctgt

SEQ ID NO: 145281 - DNA, 2616 bp, Homo sapiens
  Payload ID: 8712
  Gene Symbol: KLHL22
  Gene Name: kelch-like family member 22
  Uniprot ID: Q53GT1
  ENST ID: ENST00000328879
  CDS Start-End: 158-2062
acgtgacggcccaggcccccgccccgccggctcctctcgcccagcctcccgcctcgcgcctcccgcctcccgcctcccgcctccctccagctgcgagtgcggcctcggctggcggcggcaccaggccacagttgtaagggatcttgtggctgtcaggatggcagaggagcaggagttcacccagctctgcaagttgcctgcacagccctcacacccacactgcgtgaacaacacctaccgcagcgcacagcactcccaggctctgctccgagggctgctggctctccgggacagcggaatcctcttcgatgttgtgctggtggtggagggcagacacatcgaggcccatcgcatcctgctggctgcgtcctgcgattacttcagaggaatgtttgctgggggattgaaggagatggaacaggaagaggtcctgatccacggtgtgtcctacaatgctatgtgccaaatcctacatttcatatacacctccgagctggagctcagcctgagcaatgtacaagagacactggtggctgcctgccagcttcagatcccagaaattatccatttctgctgtgatttcctcatgtcctgggtggacgaagagaacattctcgatgtctaccggctggcagagctgtttgacttgagccgcctgactgagcaactggacacctatatcctcaaaaactttgtggccttctctcggactgacaagtaccgccagcttccattggagaaggtctactccctcctcagcagcaatcgcctggaggtctcctgcgagaccgaggtatatgagggggcccttctctaccattatagcctggagcaggtgcaggctgaccagatctcgctgcacgagcccccaaagctccttgagacagtgcggtttccgctgatggaagctgaggtcctgcagcggctgcatgacaagctggaccccagccctttgagggacacagtggccagcgccctcatgtaccaccggaacgagagcctacagcccagcctgcagagcccgcaaacggagctgcggtcggacttccagtgcgttgtgggcttcgggggcattcactccacgccgtccactgtcctcagcgaccaggccaagtatctaaaccccttactgggagagtggaagcacttcactgcctccctggccccccgcatgtccaaccagggcatcgcggtgctcaacaacttcgtatacttgattggaggggacaacaatgtccaaggatttcgagcagagtcccgatgctggaggtatgacccacggcacaaccgctggttccagatccagtccctgcagcaggagcacgccgacctgtccgtgtgtgttgtaggcaggtacatctacgctgtggcgggccgtgactaccacaatgacctgaatgctgtggagcgctacgaccctgccaccaactcctgggcatacgtggccccactcaagagggaggtgtatgcccacgcaggcgcgacgctggaggggaagatgtatatcacctgcggccgcagaggggaggattacctgaaagagacacactgctacgatccaggcagcaacacttggcacacactggctgatgggcctgtgcggcgcgcctggcacggcatggcaaccctcctcaacaagctgtatgtgatcgggggcagcaacaacgatgccggatacaggagggacgtgcaccaggtggcctgctacagctgcacgtctggacagtggtcatctgtctgcccactccctgctgggcacggtgagcctggcattgctgtgctggacaacaggatctatgtgttaggtggccgctcacacaaccgcggcagccgcacaggctacgtgcacatttacgatgtggagaaggactgctgggaggaagggccccagctggacaactccatctcaggcctggcggcctgtgtgctcaccctgccccgctccctgctccttgagccgccccgcgggacccctgaccgcagccaggccgacccggactttgcctctgaggtgatgagtgtgtctgactgggaggagtttgacaactccagtgaggactaggctccctgtgcctggcatcagagggaagggaggctggggctgcagggcagtgaaacccacgcagcctaggccagagcactttactccaggcagggcccctgcccctgttggccacagcttatgggccctgccctctttcttcacaccagccccttggccagcctgccgcaggcatctcagggccatgcagatcccaggctgtggattacgtcactgcaggaactgcttctgaaaggctttggccttcctcagtgagccctggaggggttggccttctctcctccctgcctagatcagtccttctccaaaaggacctgggagctggcagcctgggcaggggggctgaggcacgtggtagccctctttctgtgaatggggtggggctgtgggggcagctggggttggaggatgagagctcctgaggggcagaggagcagagatgcatcagctcgcctgggactggctctgtgataaaaagacccctcccgctgggttttcagaccccatgttgttggtcaatgaaataaagcatcttacagaaggtgttaactgtt

SEQ ID NO: 145282 - DNA, 792 bp, Homo sapiens
  Payload ID: 8712
  Gene Symbol: KLHL22
  Gene Name: kelch-like family member 22
  ENST ID: ENST00000443285
  CDS Start-End: 38-792
agctgcgagtgcggcctcggctggcggcggcaccagtatgggtttagggagtagctgccatttatcccttcccaagagagcagaggcactactatgctcacggaaggccacagttgtaagggatcttgtggctgtcaggatggcagaggagcaggagttcacccagctctgcaagttgcctgcacagccctcacacccacactgcgtgaacaacacctaccgcagcgcacagcactcccaggctctgctccgagggctgctggctctccgggacagcggaatcctcttcgatgttgtgctggtggtggagggcagacacatcgaggcccatcgcatcctgctggctgcgtcctgcgattacttcagaggaatgtttgctgggggattgaaggagatggaacaggaagaggtcctgatccacggtgtgtcctacaatgctatgtgccaaatcctacatttcatatacacctccgagctggagctcagcctgagcaatgtacaagagacactggtggctgcctgccagcttcagatcccagaaattatccatttctgctgtgatttcctcatgtcctgggtggacgaagagaacattctcgatgtctaccggctggcagagctgtttgacttgagccgcctgactgagcaactggacacctatatcctcaaaaactttgtggccttctctcggactgacaagtaccgccagcttccattggagaaggtctactccctcctcagcagcaatcgcctggaggtctcctgcgagaccgaggtatatgagggggccct

SEQ ID NO: 145283 - DNA, 742 bp, Homo sapiens
  Payload ID: 8712
  Gene Symbol: KLHL22
  Gene Name: kelch-like family member 22
  ENST ID: ENST00000458248
  CDS Start-End: 38-742
agctgcgagtgcggcctcggctggcggcggcaccaggatggcagaggagcaggagttcacccagctctgcaagttgcctgcacagccctcacacccacactgcgtgaacaacacctaccgcagcgcacagcactcccaggctctgctccgagggctgctggctctccgggacagcggaatcctcttcgatgttgtgctggtggtggagggcagacacatcgaggcccatcgcatcctgctggctgcgtcctgcgattacttcagaggaatgtttgctgggggattgaaggagatggaacaggaagaggtcctgatccacggtgtgtcctacaatgctatgtgccaaatcctacatttcatatacacctccgagctggagctcagcctgagcaatgtacaagagacactggtggctgcctgccagcttcagatcccagaaattatccatttctgctgtgatttcctcatgtcctgggtggacgaagagaacattctcgatgtctaccggctggcagagctgtttgacttgagccgcctgactgagcaactggacacctatatcctcaaaaactttgtggccttctctcggactgacaagtaccgccagcttccattggagaaggtctactccctcctcagcagcaatcgcctggaggtctcctgcgagaccgaggtatatgagggggcccttctctaccattatagcctggagcaggtgcaggctgaccagatctcgctgcac

SEQ ID NO: 145284 - DNA, 724 bp, Homo sapiens
  Payload ID: 8712
  Gene Symbol: KLHL22
  Gene Name: kelch-like family member 22
  ENST ID: ENST00000451553
  CDS Start-End: 48-724
tccctccagctgcgagtgcggcctcggctggcggcggcaccagaggaatgtttgctgggggattgaaggagatggaacaggaagaggtcctgatccacggtgtgtcctacaatgctatgtgccaaatcctacatttcatatacacctccgagctggagctcagcctgagcaatgtacaagagacactggtggctgcctgccagcttcagatcccagaaattatccatttctgctgtgatttcctcatgtcctgggtggacgaagagaacattctcgatgtctaccggctggcagagctgtttgacttgagccgcctgactgagcaactggacacctatatcctcaaaaactttgtggccttctctcggactgacaagtaccgccagcttccattggagaaggtctactccctcctcagcagcaatcgcctggaggtctcctgcgagaccgaggtatatgagggggcccttctctaccattatagcctggagcaggtgcaggctgaccagatctcgctgcacgagcccccaaagctccttgagacagtgcggtttccgctgatggaagctgaggtcctgcagcggctgcatgacaagctggaccccagccctttgagggacacagtggccagcgccctcatgtaccaccggaacgagagcctacagcccagcctgcagagcccgcaaacggagctgcggtcggacttccagtgcgttgtgggctt

SEQ ID NO: 145285 - DNA, 769 bp, Homo sapiens
  Payload ID: 8712
  Gene Symbol: KLHL22
  Gene Name: kelch-like family member 22
  ENST ID: ENST00000423364
  CDS Start-End: 447-769
gtactgtgatattgtgaaatatatatttggtcttgtctcatttcttggcatacaacttctaaaatctttggactttccagagtgatgcctttttgtatgctggccagcagcccctaggtagcttcaggatgggggctggtgacaggaaaggccaaggcaggcataagagggttgggactttcagcctcacctctcaacctccggagaggggagacaggctgaagattaagttcatcaccaatggccagtgatttaatcagtcatgcctacataatgaagcttccataaaaattctgaatgactgggtttggaaaacttctggatagttgaacacatggaggctcctaaagagtgatgttcctggagagggcctggaagctctgcaccacttcccacatgtctggccccatgcatctcttcatcttaaaggaaagtaggccctggaaatgccacccccttggcacccacctcccagactcctggctgtgtgtctcctgaccactactcaggccacagttgtaagggatcttgtggctgtcaggatggcagaggagcaggagttcacccagctctgcaagttgcctgcacagccctcacacccacactgcgtgaacaacacctaccgcagcgcacagcactcccaggctctgctccgagggctgctggctctccgggacagcggaatcctcttcgatgttgtgctggtggtggagggcagacacatcgaggcccatcgcatcctgctggctgcgtcctgcgattacttcag

SEQ ID NO: 145286 - DNA, 1045 bp, Homo sapiens
  Payload ID: 8712
  Gene Symbol: KLHL22
  Gene Name: kelch-like family member 22
  ENST ID: ENST00000444967
  CDS Start-End: 160-1045
tccagctgcgagtgcggcctcggctggcggcggcaccagttgaacacatggaggctcctaaagagtgatgttcctggagagggcctggaagctctgcaccacttcccacatgtctggccccatgcatctcttcatcttaaaggaaagtaggccctggaaatgccacccccttggcacccacctcccagactcctggctgtgtgtctcctgaccactactcaggccacagttgtaagggatcttgtggctgtcaggatggcagaggagcaggagttcacccagctctgcaagttgcctgcacagccctcacacccacactgcgtgaacaacacctaccgcagcgcacagcactcccaggctctgctccgagggctgctggctctccgggacagcggaatcctcttcgatgttgtgctggtggtggagggcagacacatcgaggcccatcgcatcctgctggctgcgtcctgcgattacttcagaggaatgtttgctgggggattgaaggagatggaacaggaagaggtcctgatccacggtgtgtcctacaatgctatgtgccaaatcctacatttcatatacacctccgagctggagctcagcctgagcaatgtacaagagacactggtggctgcctgccagcttcagatcccagaaattatccatttctgctgtgatttcctcatgtcctgggtggacgaagagaacattctcgatgtctaccggctggcagagctgtttgacttgagccgcctgactgagcaactggacacctatatcctcaaaaactttgtggccttctctcggactgacaagtaccgccagcttccattggagaaggtctactccctcctcagcagcaatcgcctggaggtctcctgcgagaccgaggtatatgagggggcccttctctaccattatagcctggagcaggtgcaggctgaccagatctcgctgcacgagcccccaaagctccttgagacagtgcggtttccgctgatggaagctgaggtcctgcagcggctgcatgacaagctggacccca

SEQ ID NO: 145287 - DNA, 572 bp, Homo sapiens
  Payload ID: 8712
  Gene Symbol: KLHL22
  Gene Name: kelch-like family member 22
  ENST ID: ENST00000431430
  CDS Start-End: 98-572
tcccgcctcccgcctcccgcctccctccagctgcgagtgcggcctcggctggcggcggcaccaggccacagttgtaagggatcttgtggctgtcaggatggcagaggagcaggagttcacccagctctgcaagttgcctgcacagccctcacacccacactgcgtgaacaacacctaccgcagcgcacagcactcccaggctctgctccgagggctgctggctctccgggacagcggaatcctcttcgatgttgtgctggtggtggagggcagacacatcgaggcccatcgcatcctgctggctgcgtcctgcgattacttcagaggaatgtttgctgggggattgaaggagatggaacaggaagaggtcctgatccacggtgtgtcctacaatgctatgtgccaaatcctacatttcatatacacctccgagctggagctcagcctgagcaatgtacaagagacactggtggctgcctgccagcttcagatgctgttcaccagcccaggcttgaatgggtgtcattctctctgcagatcccagaaattatccatttctgctgtgatttcct

SEQ ID NO: 145288 - DNA, 2087 bp, Homo sapiens
  Payload ID: 8713
  Gene Symbol: KLHL23
  Gene Name: kelch-like family member 23
  Uniprot ID: Q8NBE8
  ENST ID: ENST00000272797
  CDS Start-End: 339-2015
aagagaggcgcctgcgcttgcgagctgggcttgtgagtggggctgccgagagggcaggcgtggggcgaggccaaaggactgaacccgcaggagcgtcacgggcgccggggcggctgccgacggcgggactgggttttctatcagatgttccacgtaataatgctggagttaagaagtttccattattttgctccaaaccagaagactctgttccctgtatatagaataggagtaatatttgaaaacaactggctgatgtttaaaactgaagattgtcatgattgtttatcctaatcccaatgctgaagtaagattgtcttggaaatactaagttggccatggctctaaaaggacaagaagattatatttatcttttcaaggattcaacacatccagtggattttctggatgcattcagaacattttacttggatggattatttactgatattactcttcagtgtccttcaggcataattttccattgtcaccgagccgttttagctgcttgcagcaattattttaaggcaatgttcacagctgacatgaaagaaaaatttaaaaataaaataaaactctctggcatccaccatgatattctggaaggccttgtaaattatgcatacacttcccaaattgaaataactaaaagaaatgttcaaagcctgcttgaggcagcggatctgctacagttcctttcagtaaagaaggcttgtgagcggtttttggtaaggcacttggatattgataattgtattggaatgcactcctttgcagaatttcatgtgtgtccagaactagagaaggaatctcgaagaattctatgttcaaagtttaaggaagtgtggcaacaagaagaatttctggaaatcagccttgaaaagtttctctttatcttgtccagaaagaatctcagtgtttggaaagaagaagctatcatagagccagttattaagtggactgctcatgatgtagaaaatcgaattgaatgcctctataatctactgagctatatcaacattgatatagatccagtgtacttaaaaacagccttaggccttcaaagaagctgcctgctcaccgaaaataagatccgctccctaatatacaatgccttgaatcccatgcataaagagatttcccagaggtccacagccacaatgtatataattggaggctattactggcatcctttatcagaggttcacatatgggatcctttgacaaatgtttggattcagggagcagaaataccagattataccagggagagctatggtgttacatgtttaggacccaacatttatgtaactgggggctacaggacggataacatagaagctcttgacacagtgtggatctataacagtgaaagtgatgaatggacagaaggtttgccaatgctcaatgccaggtattaccactgtgcagtcaccttgggtggctgtgtctatgctttaggtggttacagaaaaggggctccagcagaagaggctgagttctatgatcctttaaaagagaaatggattcctattgcaaacatgattaaaggtgtgggaaatgctactgcctgtgtcttacatgatgttatctacgtcattggtggccactgtggctacagaggaagctgcacctatgacaaagttcagagctacaattccgatatcaacgaatggagcctcatcacctccagtccacatccagaatatggattgtgctcagttccgtttgaaaataagctctatctagtcggcggacaaactacaatcacagaatgctatgaccctgaacaaaatgaatggagagagatagctcccatgatggaaaggaggatggagtgcggtgccgtcatcatgaatggatgtatttatgtcactggaggatactcctactcaaagggaacgtatcttcagagcattgagaaatatgatccagatcttaataagtgggaaatagtgggtaatcttcccagtgccatgcggtctcatgggtgtgtttgtgtgtataatgtctaattgaatctgcagaaatgaccaagcaatcacttttttggagtatagttttataaaaaaagaatgcagggtttg

SEQ ID NO: 145289 - DNA, 4077 bp, Homo sapiens
  Payload ID: 8713
  Gene Symbol: KLHL23
  Gene Name: kelch-like family member 23
  Uniprot ID: Q8NBE8
  ENST ID: ENST00000392647
  CDS Start-End: 245-1921
acggcccggcgacgggggagttcccgcgagtggcctcgcgcccagaccgtgcggggggctgttcgggtggaggcgggggagccgccgggacaccaaaataggagctgcttgtggggtggagcggcactagctggcggcttccgagcgcctcttccaaagatggtcagaggggccggaggcgtccccgctcccgctcgctactagcccgcgggccagcgccgcgtcccgagccccggcgggagccatggctctaaaaggacaagaagattatatttatcttttcaaggattcaacacatccagtggattttctggatgcattcagaacattttacttggatggattatttactgatattactcttcagtgtccttcaggcataattttccattgtcaccgagccgttttagctgcttgcagcaattattttaaggcaatgttcacagctgacatgaaagaaaaatttaaaaataaaataaaactctctggcatccaccatgatattctggaaggccttgtaaattatgcatacacttcccaaattgaaataactaaaagaaatgttcaaagcctgcttgaggcagcggatctgctacagttcctttcagtaaagaaggcttgtgagcggtttttggtaaggcacttggatattgataattgtattggaatgcactcctttgcagaatttcatgtgtgtccagaactagagaaggaatctcgaagaattctatgttcaaagtttaaggaagtgtggcaacaagaagaatttctggaaatcagccttgaaaagtttctctttatcttgtccagaaagaatctcagtgtttggaaagaagaagctatcatagagccagttattaagtggactgctcatgatgtagaaaatcgaattgaatgcctctataatctactgagctatatcaacattgatatagatccagtgtacttaaaaacagccttaggccttcaaagaagctgcctgctcaccgaaaataagatccgctccctaatatacaatgccttgaatcccatgcataaagagatttcccagaggtccacagccacaatgtatataattggaggctattactggcatcctttatcagaggttcacatatgggatcctttgacaaatgtttggattcagggagcagaaataccagattataccagggagagctatggtgttacatgtttaggacccaacatttatgtaactgggggctacaggacggataacatagaagctcttgacacagtgtggatctataacagtgaaagtgatgaatggacagaaggtttgccaatgctcaatgccaggtattaccactgtgcagtcaccttgggtggctgtgtctatgctttaggtggttacagaaaaggggctccagcagaagaggctgagttctatgatcctttaaaagagaaatggattcctattgcaaacatgattaaaggtgtgggaaatgctactgcctgtgtcttacatgatgttatctacgtcattggtggccactgtggctacagaggaagctgcacctatgacaaagttcagagctacaattccgatatcaacgaatggagcctcatcacctccagtccacatccagaatatggattgtgctcagttccgtttgaaaataagctctatctagtcggcggacaaactacaatcacagaatgctatgaccctgaacaaaatgaatggagagagatagctcccatgatggaaaggaggatggagtgcggtgccgtcatcatgaatggatgtatttatgtcactggaggatactcctactcaaagggaacgtatcttcagagcattgagaaatatgatccagatcttaataagtgggaaatagtgggtaatcttcccagtgccatgcggtctcatgggtgtgtttgtgtgtataatgtctaattgaatctgcagaaatgaccaagcaatcacttttttggagtatagttttataaaaaaagaatgcagggtttgaagttccttacctgataattgtgtctggcacatgataggggatcagtaaattgtaattcctaaccctactgtactcccaaacatggtgattcatggtcaagaaaaatcttatatatatatatatatacacacacacatatatgtgttcatatatatgtatacatatatatgtgtatatatacgtatgtatacatatatgtgtatatatacgtatgtatgtatacatatgtgtatatatagtatgtatgtatacatgtatgtgtatatatacgtatgtatgtatacatatatgtgtatacatatatatgtgtgtatatatatacacatatatacgtatatatgtgtatatatatacacagttgaatcagtgggattaatacctataatctctggttttcaaaggtaatatagaatatttgacacttggtaaaaggtgaactacctttgtagtgaatcttttcctcttggtagcatcaacactggggataaatcagaaccattctgtggaatgaaatgtttctcaagagcctataatatagtagatagtgcatattaagatgtctggctgggcatggtggctcatgcctgtaatcccagcactttgggaggctgaggcgggaggatcacttgagcctagaagttggagactaacctggcgagaccctgtctcaaaaaaaaaaaaaaatcaatttagctagcaggaatttgacatttaaagagggaatcttctctacctctacaaaatcaacccttaacacttttttcaccttcagaattatttagaatgtggatttactttgtctagttttttcctttatagtgtaatttattgttactctctatttactgactaccagagatatacaaaatactgtgcaaaagattgttactgttcaaagagcttacaaactaaatttaaaagaatagcaagtctgaaaaatagaagatagtcaaatatttgtttatgctaagaactgtttttaattttcagctttgatgtaaattgctagcttagttgtctttagttcaagcatgttaggaaatcctctttattcttaaatatagatacatgtctgcatatatgattgaattttagagccagaaagcatgtagagcagttgtgattagtagaaaatacactgacaagaagatatttgcatttatttcccaaagctgccagtaactagattttgtgacttaagtcatttaacctctccttgattagagcttcctgagccatgcacactggcactgcaaatcacagacaggcctagatacagatcccctcaccccttgctacatccaaaggtggcctgggtggctggagcctctgggccagaaccacctttgtccattttcctcagtgtgcctacagcatcgctttccatgtgtgccataacttgggaatagttgggatgtgttgcttaactcctttacaccattagttatctgtgagaccatctattccacactcttcattttttaaaaagagacaataattatttttaactcactgaagtttaaaactacctagcatttctgattaaaaaaaatttagaaggaaaattttaatgcatttatttcagatggcgttttaaatagatacaaccctttggaaacacaatatggtactacatagcaagggctgtaaaaatgaccatatcctttgccccataaattctacttctatacttttaaccttaaaaataattcagaaaaaagataaatgcatgaagacatttatgtctgcattctttataataacaaaaattggggaaaaaaactccatgtcaagaaagtgggataagaaaaatagtgaagtattatactgccattaaaataattatttggaagactgtagaaacgtggacatgtttgatatggtaagtaaaatgagcacaatacaaaatagtatgcatactatgattgtgactttgtaaaatctttatgcatgtggaaggtaatctgcaaaacaaattcattgtgttagtgtagcgggatatggaatgactttatttatttaaatcttttctttaatattactttgtattttcaataaaaataaatcactgtacatagtaaga

SEQ ID NO: 145290 - DNA, 895 bp, Homo sapiens
  Payload ID: 8713
  Gene Symbol: KLHL23
  Gene Name: kelch-like family member 23
  ENST ID: ENST00000437875
  CDS Start-End: 1-867
cttgaaaagtttctctttatcttgtccagaaagaatctcagtgtttggaaagaagaagctatcatagagccagttattaagtggactgctcatgatgtagaaaatcgaattgaatgcctctataatctactgagctatatcaacattgatatagatccagtgtacttaaaaacagccttaggccttcaaagaagctgcctgctcaccgaaaataagatccgctccctaatatacaatgccttgaatcccatgcataaagagatttcccagaggtccacagccacaatgtatataattggaggctattactggcatcctttatcagaggttcacatatgggatcctttgacaaatgtttggattcagggagcagaaataccagattataccagggagagctatggtgttacatgtttaggacccaacatttatgtaactgggggctacaggacggataacatagaagctcttgacacagtgtggatctataacagtgaaagtgatgaatggacagaaggtttgccaatgctcaatgccaggtattaccactgtgcagtcaccttgggtggctgtgtctatgctttaggtggttacagaaaaggggctccagcagaagaggctgagttctatgatcctttaaaagagaaatggattcctattgcaaacatgattaaaggtgtgggaaatgctactgcctgtgtcttacatgatgttatctacgtcattggtggccactgtggctacagaggaagctgcacctatgacaaagttcagagctacaattccgatatcaacgaatggagcctcatcacctccagtccacatccagggaagaaaacttggtacgtaggagcattttctatttgatactccctaaagtcacagaaatcatggg

SEQ ID NO: 145291 - DNA, 594 bp, Homo sapiens
  Payload ID: 8713
  Gene Symbol: KLHL23
  Gene Name: kelch-like family member 23
  ENST ID: ENST00000448589
  CDS Start-End: 1-77
ccgatatcaacgaatggagcctcatcacctccagtccacatccaggcctgcccacaaaaaaaaccacaagaagatgaggtgaaaaattcctaggccctgccgtgcagccacagaaaataggaacctgcctgactgtggacatcaaatgaatttcaaggcctggaacctggatagcatggttcactgagtctaagaatgaatcaccttatatggtagtataagttgtttctgagctgatataactgggaatatagaaggcagggagcctgtcattctctgcctctttgacctagtagatagtttgctgtgcagagctggcaagaatgcaaactttatgtgtattctgggacatacaagggaggcaatgggaagcaacatttatccttctgcatctctatcttgtttatattctttgctctgcttcttagttcatccaaaactaaaccaaagtaaaatcaacttgaatgaaatccaagtctttattctctccattccccaaacctaggccagattctatggtctgattttcagcttacattctattgtccagctctgtttttacagtaaacacacacatttaataaaaggtgacaa

SEQ ID NO: 145292 - DNA, 843 bp, Homo sapiens
  Payload ID: 8713
  Gene Symbol: KLHL23
  Gene Name: kelch-like family member 23
  ENST ID: ENST00000498202
  CDS Start-End: 696-843
gagaagagaggcgcctgcgcttgcgagctgggcttgtgagtggggctgccgagagggcaggcgtggggcgaggccaaaggactgaacccgcaggagcgtcacgggcgccggggcggctgccgacggcgggactgggttttctatcagatgttccacgtaataatgctggagttaagaagtttccattattttgctccaaaccagaagactctgttccctgtatatagaataggagtaatatttgaaaacaactggctgatgtttaaaactgaagattgtcatgattgtttatcctaatcccaatgctgaagtaagattgtcttggaaatactaagttggggaaccagtcagaagcatctggattaggcatttagtgatacaaggatccagaataacaaaaactatgtaccagccacattcacacaacaggtgtgggaaatgctactgcctgtgtcttacatgatgttatctacgtcattggtggccactgtggctacagaggaagctgcacctatgacaaagttcagagctacaattccgatatcaacgaatggagcctcatcacctccagtccacatccagaatatggattgtgctcagttccgtttgaaaataagctctatctagtcggcggacaaactacaatcacagaatgctatgaccctgaacaaaatgaatggagagagatagctcccatgatggaaaggaggatggagtgcggtgccgtcatcatgaatggatgtatttatgtcactggaggatactcctactcaaagggaacgtatcttcagagcattgagaaatatgatccagatcttaataagtgggaaatagtgggtaatc

SEQ ID NO: 145293 - DNA, 630 bp, Homo sapiens
  Payload ID: 8713
  Gene Symbol: KLHL23
  Gene Name: kelch-like family member 23
  ENST ID: ENST00000602521
  CDS Start-End: 406-603
ccagaagactctgttccctgtatatagaataggagtaatatttgaaaacaactggctgatgtttaaaactgaagattgtcatgattgtttatcctaatcccaatgctgaagtaagattgtcttggaaatactaagttgggtgtgggaaatgctactgcctgtgtcttacatgatgttatctacgtcattggtggccactgtggctacagaggaagctgcacctatgacaaagttcagagctacaattccgatatcaacgaatggagcctcatcacctccagtccacatccagaatatggattgtgctcagttccgtttgaaaataagctctatctagtcggcggacaaactacaatcacagaatgctatgaccctgaacaaaatgaatggagagagatagctcccatgatggaaaggaggatggagtgcggtgccgtcatcatgaatggatgtatttatgtcactggaggatactcctactcaaagggaacgtatcttcagagcattgagaaatatgatccagatcttaataagtgggaaatagtgggtaatcttcccagtgccatgcggtctcatgggtgtgtttgtgtgtataatgtctaattgaatctgcagaaatgaccaagcaat

SEQ ID NO: 145294 - DNA, 2345 bp, Homo sapiens
  Payload ID: 8714
  Gene Symbol: KLHL24
  Gene Name: kelch-like family member 24
  Uniprot ID: Q6TFL4
  ENST ID: ENST00000242810
  CDS Start-End: 351-2153
ggccagggttcgctgacgctcagtgttttggcccggacggtcacatgtttcctttgttgtgagctgcggcagagactggtggctggaggagacgccggcgctggagagtgcgctgcgccgcccgccgctgagggaccgcggggttagccactgctggctgcttccagtgttcgccgagaggtaccgggggtgacagctccgggaccggccgaaaggcgaggaaccggtgtggaaattaaaagaacacacatattttgactggggctttgatcaaccaaatgctaaaaagccacataaagaagatccctaatagtcatttctcaacaattatatagtcaactgatgtaacaatggtactaatattgggacgcagactaaacagagaggatcttggggtgcgtgattccccagcaactaagcgaaaagtttttgaaatggaccccaaatctctgacaggtcatgagttttttgacttctcttcaggatcatcccatgccgaaaacatactccagatatttaatgaatttcgtgatagccgcttattcacagatgttatcatttgtgtggaaggaaaagaatttccttgccatagagctgtgctctcagcctgtagcagctacttcagagctatgttttgtaatgaccacagggaaagccgagaaatgttggttgagatcaatggtattttagctgaagctatggaatgttttttgcagtatgtttatactggaaaggtgaagatcactacagagaatgtacagtatctctttgagacatcaagcctctttcagattagtgttctccgtgatgcatgtgccaagttcttggaggagcaacttgatccttgtaattgcttaggaatccagcgctttgctgatacccattcactcaaaacactcttcacaaaatgcaaaaattttgcgttacagacttttgaggatgtatcccagcacgaagaatttcttgagcttgacaaagatgaacttattgattatatttgtagtgatgaacttgttattggtaaagaggagatggtttttgaagccgtcatgcgttgggtctatcgtgccgttgatctgagaagaccactgttacacgagctcctgacacatgtgagactccctctgttgcatcccaactactttgttcaaacagttgaagtggaccaattgatccagaattctcctgagtgttatcagttgttgcatgaagcaagacggtaccacatacttgggaatgaaatgatgtccccaaggactaggccacgcaggtccactggctattctgaggtgatagttgtcgttggaggatgtgagcgagttggaggatttaatcttccatacactgagtgctacgatcctgtaacaggagaatggaagtctttggctaagcttccagaatttaccaaatcagagtatgcagtctgtgctctaaggaatgacattcttgtttcaggtggaagaatcaacagccgtgatgtctggatttataactcacagttaaatatttggatcagagttgcctctctcaataaaggcagatggcgtcacaaaatggctgtcctccttggtaaagtatatgttgtcggtggctatgatgggcaaaacagacttagcagcgtagaatgttatgattccttttcaaatcgatggactgaagttgctccccttaaggaagccgtgagttctcctgcagtgactagctgtgtaggcaaactgtttgtgattggtggaggacctgatgataatacttgttctgataaggttcaatcttatgatccagaaaccaattcttggctacttcgtgcagctatcccaattgccaaaaggtgtataacagctgtatccctaaacaacctgatctatgttgccggtggactgaccaaggcaatatactgttacgatccagttgaagattactggatgcacgtacagaatacattcagccgtcaggaaaactgtggtatgtctgtgtgtaatggtaaaatatatatcctgggcggaagacgggaaaatggagaagccacagacactattctctgttatgatcctgcaacaagtatcatcacaggggtagctgcaatgcccaggccagtgtcctatcatggctgtgtgactattcatagatacaatgagaaatgctttaaactctgaagacaggatacctcaccgaagaagccacactgatccaagatgggaggttttaaaaactctacagtgggaacttcacatatctcctttgtgccatatgcaaaaaatagtaaaaataataatttggtgcctttctcctcaaaatatcaatctttcaaactataataaagcctttcctataattgaaaaaaaaaa

SEQ ID NO: 145295 - DNA, 7380 bp, Homo sapiens
  Payload ID: 8714
  Gene Symbol: KLHL24
  Gene Name: kelch-like family member 24
  Uniprot ID: Q6TFL4
  ENST ID: ENST00000454652
  CDS Start-End: 387-2189
gttgtgagctgcggcagagactggtggctggaggagacgccggcgctggagagtgcgctgcgccgcccgccgctgagggaccgcggggttagccactgctggctgcttccagtgttcgccgagaggtaccgggggtgacagctccgggaccggccgaaaggcgaggaaccggaagcccgggggagtgcgaccgcctcaaatccagccttcttgtttggtgggacgaccgtcggttctgtccgggaggaatgacggggtcaaggtgtggaaattaaaagaacacacatattttgactggggctttgatcaaccaaatgctaaaaagccacataaagaagatccctaatagtcatttctcaacaattatatagtcaactgatgtaacaatggtactaatattgggacgcagactaaacagagaggatcttggggtgcgtgattccccagcaactaagcgaaaagtttttgaaatggaccccaaatctctgacaggtcatgagttttttgacttctcttcaggatcatcccatgccgaaaacatactccagatatttaatgaatttcgtgatagccgcttattcacagatgttatcatttgtgtggaaggaaaagaatttccttgccatagagctgtgctctcagcctgtagcagctacttcagagctatgttttgtaatgaccacagggaaagccgagaaatgttggttgagatcaatggtattttagctgaagctatggaatgttttttgcagtatgtttatactggaaaggtgaagatcactacagagaatgtacagtatctctttgagacatcaagcctctttcagattagtgttctccgtgatgcatgtgccaagttcttggaggagcaacttgatccttgtaattgcttaggaatccagcgctttgctgatacccattcactcaaaacactcttcacaaaatgcaaaaattttgcgttacagacttttgaggatgtatcccagcacgaagaatttcttgagcttgacaaagatgaacttattgattatatttgtagtgatgaacttgttattggtaaagaggagatggtttttgaagccgtcatgcgttgggtctatcgtgccgttgatctgagaagaccactgttacacgagctcctgacacatgtgagactccctctgttgcatcccaactactttgttcaaacagttgaagtggaccaattgatccagaattctcctgagtgttatcagttgttgcatgaagcaagacggtaccacatacttgggaatgaaatgatgtccccaaggactaggccacgcaggtccactggctattctgaggtgatagttgtcgttggaggatgtgagcgagttggaggatttaatcttccatacactgagtgctacgatcctgtaacaggagaatggaagtctttggctaagcttccagaatttaccaaatcagagtatgcagtctgtgctctaaggaatgacattcttgtttcaggtggaagaatcaacagccgtgatgtctggatttataactcacagttaaatatttggatcagagttgcctctctcaataaaggcagatggcgtcacaaaatggctgtcctccttggtaaagtatatgttgtcggtggctatgatgggcaaaacagacttagcagcgtagaatgttatgattccttttcaaatcgatggactgaagttgctccccttaaggaagccgtgagttctcctgcagtgactagctgtgtaggcaaactgtttgtgattggtggaggacctgatgataatacttgttctgataaggttcaatcttatgatccagaaaccaattcttggctacttcgtgcagctatcccaattgccaaaaggtgtataacagctgtatccctaaacaacctgatctatgttgccggtggactgaccaaggcaatatactgttacgatccagttgaagattactggatgcacgtacagaatacattcagccgtcaggaaaactgtggtatgtctgtgtgtaatggtaaaatatatatcctgggcggaagacgggaaaatggagaagccacagacactattctctgttatgatcctgcaacaagtatcatcacaggggtagctgcaatgcccaggccagtgtcctatcatggctgtgtgactattcatagatacaatgagaaatgctttaaactctgaagacaggatacctcaccgaagaagccacactgatccaagatgggaggttttaaaaactctacagtgggaacttcacatatctcctttgtgccatatgcaaaaaatagtaaaaataataatttggtgcctttctcctcaaaatatcaatctttcaaactataataaagcctttcctataattgaaaaaaaaaacttttttgttaaaggtaatggtggttgttacttggcctttgaagagtgtacctttgtaagtatttgtaagaagtctatgtgaattaggaaatgtctgtctgcataccttttaggagcgtgtgaatggtgtcttcacttattatgtatgtttatctgtatgtatattccttattttgtcatatatgtagagaaaattgcatgacttgaggcatcatttaggttgaagaagttaatgcttaggatgcattctaggagaaaaaatcagttttaaaaacctttgttgttaacaaagtatatccagattggttaattttattgaagggtttttttctgtaattgataaaaatgtaatgacaacaattcaggcatcataaaatactgaactattgtgactttattcttagaattgctgtcttacattaaacatgtttttagggggaagttaggtaggagatagaaaaataagtgcccctacaagggggattaaaattacaagttaattcctaagagaaaaatggaatggcctttgaaggaaaaatgacccactatggctctcaaagtttttatgcatcatctcttcaatcctctaagaaagcctcttttcttaacttgataaagcagtggaaacccattttgcaatattgttttgtgaaaaacagggacagacagccaggtacagagactcacacctgtactcccaactactcagcaggctggggcaggaggattgcttgagcccaggagtctgaggctacagtgagctatgaacgcacacggcaccctagcctgggcaacaggttgcgacactgtctcaagagaaaagaaaaagaaaaatagggataggttttccttcctagcccagtagagtttgacctcattagtatggtgctttgggtgaggacctcttccttgattatcccactttctagtgaacagctaaaattcctgagagtctctactgttaaggtacctttaataggataaagcagggaccacctatctcagtgggtccatttttcttttaaaattagttatctgaaaaaacttagcagtagttcccatctttaaggtaagtctttcatttggtccccattgtgtaaaatactaatcaacattttcaagcttctgtacaacagactgcttttgtctagatttctcaactccactttataaagcttatcagttttcagagaggaatgtgaattttttttctaatgcaaataaatggatatggcaggaactacagcataagtgattattgtgattctgggtggacggatataatttacaacatttagggatgttctaggtagcctgctgtagtttgacttccagtcactgttgtctttcacattataatttgtatatttcttgtgatagaagggatgatgcaaatatgtaattaaagtgtcaccagatttctgttaaaaccaaggttgaaataaaaagcctaacattggtaagctacattgttttctcattttagaatgattcagagatttcagatagacattttttaaactttaatgcttagctagaatctacattctgaggaaaactctaaaaaacttaaaaatttttagggaatttttatttttcaaatcataattttaaaatgatagataccattttgtgataacaacaattcagaaaacaattttctatcctcttagttgaaagaatgtaggtacagtttggatacttgtactttaattttagagtaaacatctgcattatactcttatagataatagaattatttagttaagaaattctttacagtaaatgagataatgtgtgaaaaagtattttgtaaatgctgaggattctacaaatgatagttgttattttcatgtgtatttgtaagatcatgtccatttcatgaatataggacttcacataaaaaaagactttctcaagacaactttatattctagtatttttctgttgtaaaaagtattaactatttacttttattttgttatacatttattttaatatccatgtgtttattatagtaaatttgaaatgaaatcctgaaaaacagaatttttttaaacacagacctcacaccaatattaattttttctctacataatttaaaactacataaattaagtacttaaaatttatattgaaggccaccaagaacttaggttgaatcttagaaaatttaaataactatttttaaagttacccaacttaatattttaattttttaatatttatcttcctttactaattcttgataaataatagcattagacttgataaaataaaaaagaattttagagtagaattaatatatcaaaaggggtatatcaaccaaattggtgtcagattgtattcattctctcatcacataaagatttttcttttgataggtgatgctcatatgaacctttggtttagaatctatatatgtacatgtgtatgtatgtagatagtatggttgtatacacacatatataccaaacaccatgaattttagcagtctgtgatgatcagcaaaaaagcacataaagtaaaaattagttgaccatgctaaattcaattctggaatttttttttatttgggcatttctagaactttttacatttgaaagtacatgatgagtattagtaacgatgacttatgtataatcagaatctttatgacaatttagttttacaaggtcagaagagatgagtttgctaaacccagctgtgatacctcagttggaaagggaattcaaaggtatgctttgtagaacagaaaagtatagtttttttttcatgaactttaatcattttctgtttttcctctatgtgagtcagctacaaaagtggtctaatttttacaacagtagaacttcctccttttctactgtaatcttcccactgactttactgcacaggtatgaaatactagtgtattggatcttcagtaacctttttatttcctagatgattgaaatataggtatttactccatttaaaccaggtgataagatgatgtaaatactcagggagggtattaacttgttacttttgctcgtttggggtgtaaagtgccatgactgaataatcttcaattcatgattctagagtaagtttaatttggaaaaaggggcttcacacatggtggtggttgaacattgattcttttatacttaaaaagatgaaaatgttttgtggactgatacattttatcttactgaatatgaattgtttatgtatctctactgtcaaatagcctttttgaaactcaggaaagacaaaggttcaattacaccacttttgtcaataagcaaaccaggtattttttttttctcctgttgtctggatatggcaatagattttttaaattgctgtgagaacccatatatgaaaagagaggagttgaattgtgtgtgccttttatgtcttgagatttatatgtggaaaagacgacatctacttcaaactgtatttttttcgtttttttttttttttggggaaggggggagaacggggtcttgctctgtcgcccaggctggagtgcagtggcgcgatctcagctgactgcaacctccacctcccgggttcaagggattctgcctcagcctcccgagtagctgagaccacaggtgcgtgccaccacacccggctaatttttttgtatttttagtagagacggggtttagtagagacggatcactcctgaccacgtgatccgcccacctcggcctcccaaagtgctgggattacaggcgtgagccaccacccccggcctgtattttcagagaggagagcttggtgtttttgtggtgccaagtggtaagataatgtctctttgaggcttcctatggactgcctttattttagtaaactcaagacaccagttaacctcaacagagttttggccttattagaatttgttgtgcatcttattgaaagccaggtttacatcacctcaccccattattctttttagttaaataaatttaccatgccaagtaaccagaatggagcaaattggttgatctttaaggcagtaggtttgactagctagctatcattattgtcacatctaatgctaggcaccagaaaccatttgagccaggagtgtgaatgaataattccagagacactttagacattttttaatgttttatatgaacattttacatttgtgtgattgccttagatattaaattttcctagtgctgataaaaacagcaacattcataacttattttatatattgttccaaagaaaagaatttgttttaatggtttcaaaataactgcacctgaatttgtttatgtgccttaagttctctagtgctatttcaacttttttttcaatctaaatgaagcttaccttagataaggttcatatttgtttcctatagagtaaataaacttccccttcttaaattgtgtaataagcaccaacgtgtggttgcttggcagaatgagaatgttaagggagattgttggatgtttggagtttcattatattttttgtttttattttttgatacctaggtgctttttaaaatattcagacaaatatctatcttacattgattaaacccgtgtaaattcatttgcagtatctacatcgaatgtcaaaaaagtatacttatttttgttccatacttatgtacaattttttccctcttcaggctttttcatttacctttttgaaaaagcacttactctccccttccctatcacccctcccccaaggtttctttatttaaatttttattgagagttgttggagctctaagacaatacaaatttagagttgaacaaaagtataatctgctttacaactagtatagacctaaggtcatttgctttcaattagaggctccagagtcttcatagtggaaagaatgctttgtatttaattgttcttagttaagttgtagcacgtgaatacttacttacatgttttgtttaaatatacttcttgcatagtttaattttttaaaagttgtatctaataaaatgtcttttaaccatta

SEQ ID NO: 145296 - DNA, 563 bp, Homo sapiens
  Payload ID: 8714
  Gene Symbol: KLHL24
  Gene Name: kelch-like family member 24
  ENST ID: ENST00000437402
  CDS Start-End: 382-563
ctttgttgtgagctgcggcagagactggtggctggaggagacgccggcgctggagagtgcgctgcgccgcccgccgctgagggaccgcggggttagccactgctggctgcttccagtgttcgccgagaggtaccgggggtgacagctccgggaccggccgaaaggcgaggaaccggtgtggaaattaaaagaacacacatattttgactggggctttgatcaaccaaatgctaaaaaggctggagtgcaatggtgcgatctcggctcactgcaacctccgcctcccgggttcaagtgattctcctgtctcctgggttcaaccacataaagaagatccctaatagtcatttctcaacaattatatagtcaactgatgtaacaatggtactaatattgggacgcagactaaacagagaggatcttggggtgcgtgattccccagcaactaagcgaaaagtttttgaaatggaccccaaatctctgacaggtcatgagttttttgacttctcttcaggatcatcccatgccgaaaacatactccagatatttaatgaatttcgtga

SEQ ID NO: 145297 - DNA, 562 bp, Homo sapiens
  Payload ID: 8714
  Gene Symbol: KLHL24
  Gene Name: kelch-like family member 24
  ENST ID: ENST00000427201
  CDS Start-End: 222-562
gttgtgagctgcggcagagactggtggctggaggagacgccggcgctggagagtgcgctgcgccgcccgccgctgagggaccgcggggttagccactgctggctgcttccagtgttcgccgagaggtaccgggggtgacagctccgggaccggccgaaagccacataaagaagatccctaatagtcatttctcaacaattatatagtcaactgatgtaacaatggtactaatattgggacgcagactaaacagagaggatcttggggtgcgtgattccccagcaactaagcgaaaagtttttgaaatggaccccaaatctctgacaggtcatgagttttttgacttctcttcaggatcatcccatgccgaaaacatactccagatatttaatgaatttcgtgatagccgcttattcacagatgttatcatttgtgtggaaggaaaagaatttccttgccatagagctgtgctctcagcctgtagcagctacttcagagctatgttttgtaatgaccacagggaaagccgagaaatgttggttgagatcaatggtattttagc

SEQ ID NO: 145298 - DNA, 603 bp, Homo sapiens
  Payload ID: 8714
  Gene Symbol: KLHL24
  Gene Name: kelch-like family member 24
  ENST ID: ENST00000454495
  CDS Start-End: 253-603
tttgttgtgagctgcggcagagactggtggctggaggagacgccggcgctggagagtgcgctgcgccgcccgccgctgagggaccgcggggttagccactgctggctgcttccagtgttcgccgagaggtgtggaaattaaaagaacacacatattttgactggggctttgatcaaccaaatgctaaaaagccacataaagaagatccctaatagtcatttctcaacaattatatagtcaactgatgtaacaatggtactaatattgggacgcagactaaacagagaggatcttggggtgcgtgattccccagcaactaagcgaaaagtttttgaaatggaccccaaatctctgacaggtcatgagttttttgacttctcttcaggatcatcccatgccgaaaacatactccagatatttaatgaatttcgtgatagccgcttattcacagatgttatcatttgtgtggaaggaaaagaatttccttgccatagagctgtgctctcagcctgtagcagctacttcagagctatgttttgtaatgaccacagggaaagccgagaaatgttggttgagatcaatggtattttagctgaagctatg

SEQ ID NO: 145299 - DNA, 588 bp, Homo sapiens
  Payload ID: 8714
  Gene Symbol: KLHL24
  Gene Name: kelch-like family member 24
  ENST ID: ENST00000482138
  CDS Start-End: 187-588
gttgtgagctgcggcagagactggtggctggaggagacgccggcgctggagagtgcgctgcgccgcccgccgctgagggaccgcggggttagccactgctggctgcttccagtgttcgccgagagccacataaagaagatccctaatagtcatttctcaacaattatatagtcaactgatgtaacaatggtactaatattgggacgcagactaaacagagaggatcttggggtgcgtgattccccagcaactaagcgaaaagtttttgaaatggaccccaaatctctgacaggtcatgagttttttgacttctcttcaggatcatcccatgccgaaaacatactccagatatttaatgaatttcgtgatagccgcttattcacagatgttatcatttgtgtggaaggaaaagaatttccttgccatagagctgtgctctcagcctgtagcagctacttcagagctatgttttgtaatgaccacagggaaagccgagaaatgttggttgagatcaatggtattttagctgaagctatggaatgttttttgcagtatgtttatactggaaaggtgaagatcactacagag

SEQ ID NO: 145300 - DNA, 627 bp, Homo sapiens
  Payload ID: 8714
  Gene Symbol: KLHL24
  Gene Name: kelch-like family member 24
  ENST ID: ENST00000493074
  CDS Start-End: 246-627
acatgtttcctttgttgtgagctgcggcagagactggtggctggaggagacgccggcgctggagagtgcgctgcgccgcccgccgctgagggaccgcggggttagccactgctggctgcttccagtgttcgccgagaggtaccgggggtgacagctccgggaccggccgaaaggcgaggaaccgccacataaagaagatccctaatagtcatttctcaacaattatatagtcaactgatgtaacaatggtactaatattgggacgcagactaaacagagaggatcttggggtgcgtgattccccagcaactaagcgaaaagtttttgaaatggaccccaaatctctgacaggtcatgagttttttgacttctcttcaggatcatcccatgccgaaaacatactccagatatttaatgaatttcgtgatagccgcttattcacagatgttatcatttgtgtggaaggaaaagaatttccttgccatagagctgtgctctcagcctgtagcagctacttcagagctatgttttgtaatgaccacagggaaagccgagaaatgttggttgagatcaatggtattttagctgaagctatggaatgttttttgcagtatgtttatactggaa

SEQ ID NO: 145301 - DNA, 613 bp, Homo sapiens
  Payload ID: 8714
  Gene Symbol: KLHL24
  Gene Name: kelch-like family member 24
  ENST ID: ENST00000468001
  CDS Start-End: 237-613
ggacccgccctcaagttctggacaccccgggtgaagactgttaacgcggcggggattgggcgcctgcggcagcttgtgggcggtacccgagggagagttcgagtttttattggtgtggaaattaaaagaacacacatattttgactggggctttgatcaaccaaatgctaaaaagccacataaagaagatccctaatagtcatttctcaacaattatatagtcaactgatgtaacaatggtactaatattgggacgcagactaaacagagaggatcttggggtgcgtgattccccagcaactaagcgaaaagtttttgaaatggaccccaaatctctgacaggtcatgagttttttgacttctcttcaggatcatcccatgccgaaaacatactccagatatttaatgaatttcgtgatagccgcttattcacagatgttatcatttgtgtggaaggaaaagaatttccttgccatagagctgtgctctcagcctgtagcagctacttcagagctatgttttgtaatgaccacagggaaagccgagaaatgttggttgagatcaatggtattttagctgaagctatggaatgttttttgcagtatgtttatac

SEQ ID NO: 145302 - DNA, 2126 bp, Homo sapiens
  Payload ID: 8714
  Gene Symbol: KLHL24
  Gene Name: kelch-like family member 24
  Uniprot ID: Q6TFL4
  ENST ID: ENST00000476808
  CDS Start-End: 1-1614
atggtactaatattgggacgcagactaaacagagaggatcttggggtgcgtgattccccagcaactaagcgaaaagtttttgaaatggaccccaaatctctgacaggtcatgagttttttgacttctcttcaggatcatcccatgccgaaaacatactccagatatttaatgaatttcgtgatagccgcttattcacagatgttatcatttgtgtggaaggaaaagaatttccttgccatagagctgtgctctcagcctgtagcagctacttcagagctatgttttgtaatgaccacagggaaagccgagaaatgttggttgagatcaatggtattttagctgaagctatggaatgttttttgcagtatgtttatactggaaaggtgaagatcactacagagaatgtacagtatctctttgagacatcaagcctctttcagattagtgttctccgtgatgcatgtgccaagttcttggaggagcaacttgatccttgtaattgcttaggaatccagcgctttgctgatacccattcactcaaaacactcttcacaaaatgcaaaaattttgcgttacagacttttgaggatgtatcccagcacgaagaatttcttgagcttgacaaagatgaacttattgattatatttgtagtgatgaacttgttattggtaaagaggagatggtttttgaagccgtcatgcgttgggtctatcgtgccgttgatctgagaagaccactgttacacgagctcctgacacatgtgagactccctctgttgcatcccaactactttgttcaaacagttgaagtggaccaattgatccagaattctcctgagtgttatcagttgttgcatgaagcaagacggtaccacatacttgggaatgaaatgatgtccccaaggactaggccacgcaggtccactggctattctgaggtgatagttgtcgttggaggatgtgagcgagttggaggatttaatcttccatacactgagtgctacgatcctgtaacaggagaatggaagtctttggctaagcttccagaatttaccaaatcagagtatgcagtctgtgctctaaggaatgacattcttgtttcaggtggaagaatcaacagccgtgatgtctggatttataactcacagttaaatatttggatcagagttgcctctctcaataaaggcagatggcgtcacaaaatggctgtcctccttggtaaagtatatgttgtcggtggctatgatgggcaaaacagacttagcagcgtagaatgttatgattccttttcaaatcgatggactgaagttgctccccttaaggaagccgtgagttctcctgcagtgactagctgtgtaggcaaactgtttgtgattggtggaggacctgatgataatacttgttctgataaggttcaatcttatgatccagaaaccaattcttggctacttcgtgcagctatcccaattgccaaaaggtgtataacagctgtatccctaaacaacctgatctatgttgccggtggactgaccaaggcaatatactgttacgatccagttgaagattactggatgcacgtacagaatacattcagccgtcaggtaataacataaagcagtacaaaagaaaaataaatctaagagggaccaagtacataatcattattaatacactggaatttcaattttaaaatatttcaggctgggcgtggtggctcacgcctgtaatcccagcactttgggaggccgaggtggatagatcacttgaggtcaggagttcaagaccagcctggctaatatggtgaaaccccgtctctactaaaaaattatggccaggcgtggtggttcatgcctgtaatcccagcactttgggaggctgaggcaggccaatcacctgaggtcgggagttcgagaccagcctgaccaacatggagaaaccccgtctctgctaaaaatacaaaattagctgggcgtggtggcgcattgcctgtaatcccagctactagggaggctgcggcaggagaattgcttgaacccgggaggtggaggtcgcggtgagccgagatcgagccattgcactccagcctggacagcaagagcgaaactccgtctcaaaaataaataaa

SEQ ID NO: 145303 - DNA, 542 bp, Homo sapiens
  Payload ID: 8714
  Gene Symbol: KLHL24
  Gene Name: kelch-like family member 24
  ENST ID: ENST00000473045
  CDS Start-End: 324-542
gttgtgagctgcggcagagactggtggctggaggagacgccggcgctggagagtgcgctgcgccgcccgccgctgagggaccgcggggttagccactgctggctgcttccagtgttcgccgagaggtaccgggggtgacagctccgggaccggccgaaaggcgaggaaccggaagcccgggggagtgcgaccgcctcaaatccagccttcttgtttggtgggacgaccgtcggttctgtccgggaggaatgacggggtcaagccacataaagaagatccctaatagtcatttctcaacaattatatagtcaactgatgtaacaatggtactaatattgggacgcagactaaacagagaggatcttggggtgcgtgattccccagcaactaagcgaaaagtttttgaaatggaccccaaatctctgacaggtcatgagttttttgacttctcttcaggatcatcccatgccgaaaacatactccagatatttaatgaatttcgtgatagccgcttattcacagatgttatcatttgtgtggaa

SEQ ID NO: 145304 - DNA, 574 bp, Homo sapiens
  Payload ID: 8714
  Gene Symbol: KLHL24
  Gene Name: kelch-like family member 24
  ENST ID: ENST00000468101
  CDS Start-End: 341-574
gttgtgagctgcggcagagactggtggctggaggagacgccggcgctggagagtgcgctgcgccgcccgccgctgagggaccgcggggttagccactgctggctgcttccagtgttcgccgagaggaagcccgggggagtgcgaccgcctcaaatccagccttcttgtttggtgggacgaccgtcggttctgtccgggaggaatgacggggtcaaggtgtggaaattaaaagaacacacatattttgactggggctttgatcaaccaaatgctaaaaagccacataaagaagatccctaatagtcatttctcaacaattatatagtcaactgatgtaacaatggtactaatattgggacgcagactaaacagagaggatcttggggtgcgtgattccccagcaactaagcgaaaagtttttgaaatggaccccaaatctctgacaggtcatgagttttttgacttctcttcaggatcatcccatgccgaaaacatactccagatatttaatgaatttcgtgatagccgcttattcacagatgttatcatttgtgtggaaggaaaagaatttcct

SEQ ID NO: 145305 - DNA, 3758 bp, Homo sapiens
  Payload ID: 8715
  Gene Symbol: KLHL25
  Gene Name: kelch-like family member 25
  Uniprot ID: Q9H0H3
  ENST ID: ENST00000337975
  CDS Start-End: 276-2045
cttttctgcggctgcactgaagggttcggctgcccatccgtcacagaggcgatgcctctgattggctgctgctcttcgggccgggaggcggggcgggaaggccggagaaactagtttgttggcggcgcctaggctgtatcgcagcgagagcgtttttgcctgtggagagccggccgacgggagccgcggcggagcctgttgagctcgcgcgggctgccgggagtggtctctgaggcggcggcggcggcggggatcgtctccggcactgacgcaccatgtcggtcagtgtccatgagacccgcaagtcgcggagcagcacggggtccatgaacgtcaccctcttccacaaggcctcccacccggactgtgtgctggcccacctcaacacgcttcgcaagcactgcatgttcaccgacgtcacactctgggcgggcgaccgtgccttcccctgtcaccgtgccgtgctggccgcctctagccgctattttgaggccatgttcagccatggccttcgggagagccgggatgacactgtcaacttccaggacaacctgcacccggaggtgctggagctgctgctggactttgcctactcctcacgcatcgccatcaacgaggagaacgctgagtcactgctggaggcaggcgacatgctgcagttccacgatgtgcgggatgctgccgccgagttcctggagaagaaccttttcccctccaactgcctgggcatgatgctgctctcggacgcccaccagtgccgccggctgtatgagttctcctggcgcatgtgcctggtgcactttgagacggtgaggcagagcgaggacttcaacagcctgtccaaggacacactgctggacctcatctcgagtgatgagctggagaccgaggacgagcgggtggtcttcgaggccatcctccagtgggtgaagcacgacctggagccacggaaggtccacttgcccgagctcctccgcagcgtgcgtctggccttgctgccgtccgactgcctgcaggaggccgtctccagcgaggccctcctcatggcagacgagcgcaccaagcttatcatggatgaggccctgcgctgcaagaccaggatcctgcagaatgatggcgtggtcaccagcccctgtgcccggccacgcaaggcgggccacacgctactcatcctggggggccagaccttcatgtgtgacaagatctaccaggtggaccacaaggccaaggagatcatccccaaggccgacctgcccagcccccggaaggagttcagcgcctcagcgatcggctgcaaggtctatgtgacggggggcaggggctccgagaacggggtctccaaggatgtctgggtgtacgacaccgtacatgaggaatggtccaaggcggcgcccatgctgattgcccgctttggccatggctcagctgagctggagaactgcctctatgtggtggggggacacacatccctggcaggggtcttcccggcctcgccttctgtctccctgaaacaagtggagaaatacgaccctggggccaacaagtggatgatggtggcccccttgcgggatggcgtcagcaatgccgcagtggtgagtgccaagctgaagctctttgttttcggaggaaccagcatccaccgggacatggtgtccaaggtccagtgctatgacccctcggagaacaggtggacgatcaaggccgagtgcccccagccttggcggtacacagccgctgccgtcctgggcagccagatcttcatcatgggaggtgacacggaattcacagccgcctcggcctaccgctttgactgtgagaccaaccagtggacgcggattggggacatgactgccaagcgcatgtcctgccatgccctggcttccggcaacaagctctatgtggtcgggggctactttgggacccagaggtgtaagactctggactgctatgaccccacttcagatacatggaactgcatcaccacagtgccctactcacttatccccacggcctttgtcagcacctggaagcacctgcccgcgtgaggagcacctgctgagcccagccagaccgcggccttcagtgtcacagcgtggccttgcttgtctgccacagcgggagctaagccggccctgggccagcactccgagaggtggaaggggccctgccagctctggggagcagcagccttgggctgttctgagctttaggcaagagaagagaagcatctcttgcatccgtgcccctgggggcctcttcagctttgcagtggtttgtgggaagacatacctcccagaggggcatggactgccaccaggactgaccctggcgtcggggagaaggacacttgcagagccttgagatcacctgtttggcaggtcctggactggggccgggcaggcaggggcagggaggcgccccgggtgggctttggggctgcggcactgccacacatcctttccctcctggcctgccctgctggggctctactgccatctatagatggtgtcctgggcctgggaaactaggttcccaggggttgagaccagaaaggtgaccaagacagattttttaaggtgcagaaactgcaggggggcctcagtgacatccatgaggccttattagcaaaggacacccagacctccaaggtttgtgggccccttccacaaagctgtaagtcccagcccacctactcagggccttgctcagtgctgtggcccggtggggacacagttgctcgtggccactcagtggagctgggcctgcagcagactcaaggctccgagtgccctgggggtcacccctcccctcccctcctcagagcccaccctgagaggcagcagtgacccccatggcacacacctgccaacagcactgggggcttctccccaggagaccacgctgccctccaagaccaggagcagctgtgagctggagacagcagagggaccccagggtgtcccctgcagatcccaccagggccgcatccatctcagtgtggaggacagtgacgggaccctcaccatcctcttgcgttttggcccccatttgctccctgagctccaagataagaatggccccgagagaactgctgaacatttgttcattgctgtcacctcctgagtcactggggtccctcaccagcacctccctgacacctgggctatggagaggttggcgcctgtcagtgaccatcctaatgcctctcgctcactcccaagccaccatttgagagggaggggtgttggtgccctgacagggactgggcagggtgtccaaacttggggcttcccaggcacctgcagtgtgaacactgcttggctggctcaagattagggccgcggagggggctgtgcacataccagttacttaagcagccacgagtgtcccccatgccttggtgcgggtcctggaggcctcttgggggtgggacctttgggcagggtttgcccactgacacgcccgccatggggcactggctgcatggggctccttggaccctgtagacccagcagaccccgcctgtgtcaggccagctgcccgaaggcacttggctgtggtcccaggggacggctctgctggcacactcaggagcctggccgcggggactgcagggagggtgcctggacccgtggggttgcttcattgagataaagcacacttatcacatagcacaaaggacgtgccatggtgctttccccaaaagttgtgttgcttttatcagttttctaacttaataaaaagagttgagaaaattc

SEQ ID NO: 145306 - DNA, 4407 bp, Homo sapiens
  Payload ID: 8716
  Gene Symbol: KLHL26
  Gene Name: kelch-like family member 26
  Uniprot ID: Q53HC5
  ENST ID: ENST00000300976
  CDS Start-End: 91-1938
agacctggccccgccccgccccccgcgtctcggtttcccgggcctgcgcgcgcggctcccgtcactcgaacgcgcgacggcggggggaagatggcggagtccggcggtagcagcggtggtgctggtggcggcggcgctttcggcgcgggcccgggccccgagcgcccgaacagcacggccgacaagaacggggccctcaagtgcaccttctcggcacccagccacagcaccagcctcctgcagggcctggccaccctccgcgctcagggccagctcctcgatgttgtgctgactattaacagagaggcctttcctgcacacaaggtcgtcctggctgcctgcagcgactacttcagggccatgttcaccggcggcatgcgggaggcaagccaggacgtcatcgagctgaagggcgtgtcggcccgtggcctgcggcacatcatcgacttcgcctacagcgccgaggtgacactggacctggactgcgtgcaggacgtgctgggcgcggccgtgttcttgcagatgctgcccgtggtggagctgtgcgaggagttcctgaaggcggccatgagcgtggagacctgcctcaacatcggccagatggccaccaccttcagcctggcctcgctgcgagagtcggtggatgccttcaccttccggcacttcctgcagatcgccgaggaggaggatttcctgcgcctgccactggagcgcctggtcttcttcctgcagagcaaccggctgcagagctgtgccgagatcgacctgttccgcgcggccgtccgctggctgcagcatgacccggcccggcggccgcgcgccagccacgtgctctgccacattcgcttcccgctcatgcagtcgtccgagctggtggacagcgtgcagacgctggacatcatggtggaggacgtgctgtgccgccagtatctgctggaggccttcaactaccaggtgctgcccttccggcagcacgagatgcagtctccgcgcaccgccgtgcgctcggatgtgccctcgctcgtcaccttcggcggcacgccctacaccgacagcgaccgctcggtcagcagcaaggtctaccagctgcctgagccgggagcccgccacttccgcgagctcacggagatggaggtaggctgcagccacacgtgcgtggccgtgctggacaattttgtgtacgtggccggggggcagcacctgcagtaccgcagcggcgagggcgcagtggacgcctgctaccgctacgacccccacctgaatcgctggctgcgcctgcaggccatgcaggaaagccgcatccagttccagctgaacgtgctgtgcggcatggtgtacgccacgggcggccgcaaccgagccggcagcctggcctccgtggagcggtactgcccccggcgcaatgagtggggctacgcctgctcgctgaagcgccgtacctggggccatgctggggccgcctcagggggccgcctctacatctcgggtggctacgggatctcagtggaggacaagaaggccctgcactgctacgaccccgtggccgaccagtgggagttcaaggcgcccatgagcgaaccccgcgtgctacacgccatggtgggtgccggcggccgcatctatgccctcgggggccgcatggaccacgtggaccgctgcttcgacgtgctggctgtggagtactatgtgccggagacggaccagtggaccagcgtgagccccatgcgggccggccagtcagaggccggctgctgcctgctggagaggaagatctacatcgtcgggggctacaactggcgtctcaacaacgtcacgggcatcgtacaggtgtacaacacggacaccgacgagtgggagcgggacctgcacttcccggagtccttcgcaggcatagcctgcgcccccgtcctgctgccccgggccgggaccaggaggtagcccccaagacccccgggaccctggcctgaccgcatgttgtctccaagtggggcttggcgaatgcacgtctgcctgagaaccccagtgccccccttcgcccgggctgcccttgaggggcctgctgcgttgataagcccccctcccaggggtccctccctccctccttcccaaagcagatcctggctgcgagtccatccgagggagcctgccggcaaagcgtctgacatgtggtggcagcaaattcgtccccggggtggtttcctcgcctggcccccgagtccccacgggctggcgggtggaatcccaggtctccagggggtccctgtgcagctccatctcacttctctactgcctcccagccccacggtttcaggcattcagatgtgagctcatcaacattgaacccaaagtcggtggtatatgactcaccctccttccaagtctcctgcgcgcgtgtttttaaaataaactcacccgaaacgtccgtaacacacggacctccaggagcagtgagaggtggcttagaagcccctggtttggggtgggtggaggaggagggcacgtgtctgcctcccctggggtgccctccttcccccatcccaagctgctgaggggaggccctggtcatgcctcagttcctgccttcatctgctttccggaggaaaaaccatatcaactcctagaaacgctccttaggggcttgggaccttccatttggcactgagcatcttgtggggccttaactggctgagacatcccggccctctacatttgccctgttggccaggcagtccccttcccgcaattggagggcgacgctaacttcagaatcccatagtggcgcttgccgcaggtctggtggggtgtcttttttctcctccctcctttccacccctccgcgccctgccactccctggcctgccctgtttttgggtcaacattgctacggagccagcagtgaggcctttcccttcaagggctctgtggtatctctggccacatttgttctaatgtctgaacctctaaatcttttctttttgattggttttactgtttttaagaagccagcactgctgtctcatagatgggatttgtactcttggggcaacttaaagtgtctctctcgctgctaacagacgattgatgtcttgtctctgtgacccactcaccatgtaaagaattaacctcctatcttagcagacatcgtctcctaatatttccctttatttaataaaaatgttatggtgaagagatggagccggcccagcactgagcttgtgcggcttgggtctgattggtcacagattcctcgtgtgtcctccgcgtgtctgggggctcctctcccccgcctcaaccttttccagcctttcagaggagtcggcagtgggctgggctttggctcaggggcgcagaggcagcaggaagcgtggccaggactttcaccctggcgttttttgttgttggtttttttgtttttttgagacggagcctcgctctgtcacccaggctggagtgcagtggcgtgatctcggctcactgcaacctctgcctcctgggttcaagcaattcacctgcctcagcctcccaagtagccaggattacagacgcagacacacaccaccacacccggctaatttttgtatttttagtacagacggggtttcaccatgttggccaggctggccttgaactcttgacctcaggtgatccacctgcctctgcctcccaaagtgctgggattacaggtgtgagccaccatgcccggaccaaccttggcactttggaagagccttcagccccctattctcatcatggccggccaaactatgaactgggctgcccagagcaggccacttatcagttgcaggttagcagagaaagcctgatgttcccggacggccttcccagaagggaggccctgggatatcacacacacatggatctccataagttgctgtgcctgcatgcctggcgctcctgtgtggcagccatcggggctggggtaacactagaggctgagggggtgggcagtgctaaaataggaacatggttgggaacctaaaagaagcccacactgtcaggggcatcgagacaaaagccgagttccctggggacttaccagaacattccagccccacccccgacctgagctcccccaaagagaacccttccccactggaggcatggccccttcaggggagcagtgagaagctttgccagctgcaagtcccctggatcagctcacacctcagaacatcttgtccccagtgagctggcaggggcgccggcccagggcggggggcgctgctgtatctaaccggatcgattgtgcataaccgtctaggccggttcgtggaatgttcgtggggccccctgcccctccctcagcctccccccgcatccccccaagaaaggaaaattatttttcgtattgtaaactttaaacatgaaaaagctgtttttaattta

SEQ ID NO: 145307 - DNA, 554 bp, Homo sapiens
  Payload ID: 8716
  Gene Symbol: KLHL26
  Gene Name: kelch-like family member 26
  ENST ID: ENST00000595423
  CDS Start-End: 1-554
ggcggagtccggcggtagcagcggtggtgctggtggcggcggcgctttcggcgcgggcccgggccccgagcgcccgaacagcacggccgacaagaacggggccctcaagtgcaccttctcggcacccagccacagcaccagcctcctgcagggcctggccaccctccgcgctcagggccagctcctcgatgttgtgctgactattaacagagaggcctttcctgcacacaaggtcgtcctggctgcctgcagcgactacttcaggctactgttccccaggccagatcattcctggctggccaaaacacccctcagccactgccagccacacgttgtgtttctgcccttcagggccatgttcaccggcggcatgcgggaggcaagccaggacgtcatcgagctgaagggcgtgtcggcccgtggcctgcggcacatcatcgacttcgcctacagcgccgaggtgacactggacctggactgcgtgcaggacgtgctgggcgcggccgtgttcttgcagatgctgcccgtggtggagctgtgcgaggagttcctga

SEQ ID NO: 145308 - DNA, 577 bp, Homo sapiens
  Payload ID: 8716
  Gene Symbol: KLHL26
  Gene Name: kelch-like family member 26
  ENST ID: ENST00000600657
  CDS Start-End: 28-168
actcgaacgcgcgacggcggggggaagatggcggagtccggcggtagcagcggtggtgctggtggcggcggcgctttcggcgcgggcccgggccccgagcgcccgaacagaaccgttctggggctttggatcgcttctcatgggttgggaagccgaccatggagatgaggccagcccggggccggaggaggggcgcctgccctgacagcacggccgacaagaacggggccctcaagtgcaccttctcggcacccagccacagcaccagcctcctgcagggcctggccaccctccgcgctcagggccagctcctcgatgttgtgctgactattaacagagaggcctttcctgcacacaaggtcgtcctggctgcctgcagcgactacttcagggccatgttcaccggcggcatgcgggaggcaagccaggacgtcatcgagctgaagggcgtgtcggcccgtggcctgcggcacatcatcgacttcgcctacagcgccgaggtgacactggacctggactgcgtgcaggacgtgctgggcgcggccgtgttcttgcagatgctgcccgtggtggagct

SEQ ID NO: 145309 - DNA, 989 bp, Homo sapiens
  Payload ID: 8716
  Gene Symbol: KLHL26
  Gene Name: kelch-like family member 26
  ENST ID: ENST00000599006
  CDS Start-End: 28-465
actcgaacgcgcgacggcggggggaagatggcggagtccggcggtagcagcggtggtgctggtggcggcggcgctttcggcgcgggcccgggccccgagcgcccgaacagcacggccgacaagaacggggccctcaagtgcaccttctcggcacccagccacagcaccagcctcctgcagggcctggccaccctccgcgctcagggccagctcctcgatgttgtgctgactattaacagagaggcctttcctgcacacaaggtcgtcctggctgcctgcagcgactacttcagggccatgttcaccggcggcatgcgggaggcaagccaggacgtcatcgagctgaagggcgtgtcggcccgtggcctgcggcacatcatcgacttcgcctacagcgccgaggtgacactggacctggactgcgtgcaggacgtagcccccaagacccccgggaccctggcctgaccgcatgttgtctccaagtggggcttggcgaatgcacgtctgcctgagaaccccagtgccccccttcgcccgggctgcccttgaggggcctgctgcgttgataagcccccctcccaggggtccctccctccctccttcccaaagcagatcctggctgcgagtccatccgagggagcctgccggcaaagcgtctgacatgtggtggcagcaaattcgtccccggggtggtttcctcgcctggcccccgagtccccacgggctggcgggtggaatcccaggtctccagggggtccctgtgcagctccatctcacttctctactgcctcccagccccacggtttcaggcattcagatgtgagctcatcaacattgaacccaaagtcggtggtatatgactcaccctccttccaagtctcctgcgcgcgtgtttttaaaataaactcacccgaaacgtccgtaacacacggacctccaggagcagtgagaggtggcttagaagcccctggtttggggtgggtggagga

SEQ ID NO: 145310 - DNA, 522 bp, Homo sapiens
  Payload ID: 8716
  Gene Symbol: KLHL26
  Gene Name: kelch-like family member 26
  ENST ID: ENST00000595182
  CDS Start-End: 31-339
gtcactcgaacgcgcgacggcggggggaagatggcggagtccggcggtagcagcggtggtgctggtggcggcggcgctttcggcgcgggcccgggccccgagcgcccgaacagcacggccgacaagaacggggccctcaagtgcaccttctcggcacccagccacagcaccagcctcctgcagggcctggccaccctccgcgctcagggccagctcctcgatgttgtgctgactattaacagagaggcctttcctgcacacaaggtcgtcctggctgcctgcagcgactacttcaggctggagtgcagtgccagtggtctcgatctcctgatctcatgatccacccgcctgggcttcccaaagtgctgggattacaggcatgagccaccgcgcccggcccctttgcatgtttttaatgagcattccgcctactttcctcttgctggctgtgccctgtgttctgtgtccccaggctactgttccccaggccagatcattcctggctggccaaaacacccctca

SEQ ID NO: 145311 - DNA, 2177 bp, Homo sapiens
  Payload ID: 8717
  Gene Symbol: KLHL28
  Gene Name: kelch-like family member 28
  ENST ID: ENST00000355081
  CDS Start-End: 205-1962
attttaggcgaactgagaattttgtgtgcattttctcctcataagtgatacttaaacggacacagtggaagagctggagtgtctagtgtgagcctgaatgctttggagtgtggaagagatattttttttttttgaaggaataatactattacttttgaatgactcgtgcgaaaagtctaagttatcatttgaagacccaaatttatgcacttcaaatgcaagtattcctaccctgctctgtaccagatggaccacacatccccgacctacatgcttgctaacttaacccacttgcattctgaacaacttctgcagggcttgaatcttcttcgccaacatcacgaactctgtgacatcattcttcgagtaggtgatgttaaaattcatgctcacaaagtggtacttgccagcgtcagcccgtatttcaaagctatgttcactggaaacctttctgaaaaagagaacagtgaggttgagtttcaatgcattgatgaaactgctctccaggccattgtggagtatgcctatacagggactgtttttatttctcaggacacagttgaatctctcctgccagcagcaaacctactccagataaaacttgtcctgaaagaatgttgtgcatttcttgaaagccaacttgatcctggtaattgtattggaatttctcgttttgcagaaacatatggttgccgtgacctttatttggcagccactaaatacatatgccagaattttgaagctgtttgccagactgaagagttttttgagcttacacatgctgacttggatgaaattgtttccaatgactgtttgaatgtagctaccgaagagactgttttttatgcattagagtcttggatcaagtatgatgtacaagaacgccagaaatacttagcacagttactaaacagtgtacgattaccattgttgagtgttaagtttctcactagactatatgaagcaaatcatcttattcgtgatgatcgcacttgtaaacatcttttgaatgaagccctaaagtaccactttatgcctgaacatagactctctcatcagacagtcttgatgacacgacctcgctgtgctcccaaagtactttgtgcagtaggagggaaatctggactctttgcctgtttggatagtgtggagatgtactttcctcagaatgactcttggattggtttggcacccctaaacattcctcgctatgaatttggaatatgcgttttagaccaaaaagtatatgttataggtggtattgcaactaatgtgcgtcctggcgtcactatcagaaaacatgaaaattcagtggaatgctggaatcctgatacaaatacttggacttctctagagagaatgaatgaaagccgaagtactcttggagtagtagtacttgcaggagaactttatgccttaggtggttatgatggacaatcttatttacaatctgtagagaagtacattcccaaaataagaaaatggcaacctgtggcaccaatgacgacaacaagaagttgttttgctgcagcggtattggatggaatgatatatgccattggtgggtatggtcctgcccacatgaacagtgtggagcgttatgatccaagtaaggactcctgggagatggttgcatccatggcagataaaaggattcactttggcgtgggtgtcatgctaggctttatttttgtggtgggtggacataatggagtctcacatttgtccagcattgaaagatacgatcctcatcaaaatcagtggactgtgtgtagaccaatgaaagaacctagaacaggagttggtgctgctgtaatcgataactacctttatgtcgtcggtggtcactcagggtcttcctatctgaatacagtgcagaaatatgatcctatctcagatacgtggctggattcagctggcatgatatactgtcgctgcaactttgggttaactgcactttgacaaatgtgaactctcggaaatagtatggtggtgaaacttgtactgcatgaacatccggatggcccagttttctgaaacccacaagctgcattgctttctttttaacttgaagtagcatgaaggctcaaaagttttgttgggtacttttaattgagaagtagttttggttgctcttgattacacagtaaatcaataatcaaaaagaaaaaagagaa

SEQ ID NO: 145312 - DNA, 6545 bp, Homo sapiens
  Payload ID: 8717
  Gene Symbol: KLHL28
  Gene Name: kelch-like family member 28
  Uniprot ID: Q9NXS3
  ENST ID: ENST00000396128
  CDS Start-End: 121-1836
aagttgcccgccccacccgtaagagttagggtttgaccggagctagtgaggatccagcccaggctccagttgtccgcggttcctcctcctgtcgctgcccgtgtgattactgagactcagatggaccacacatccccgacctacatgcttgctaacttaacccacttgcattctgaacaacttctgcagggcttgaatcttcttcgccaacatcacgaactctgtgacatcattcttcgagtaggtgatgttaaaattcatgctcacaaagtggtacttgccagcgtcagcccgtatttcaaagctatgttcactggaaacctttctgaaaaagagaacagtgaggttgagtttcaatgcattgatgaaactgctctccaggccattgtggagtatgcctatacagggactgtttttatttctcaggacacagttgaatctctcctgccagcagcaaacctactccagataaaacttgtcctgaaagaatgttgtgcatttcttgaaagccaacttgatcctggtaattgtattggaatttctcgttttgcagaaacatatggttgccgtgacctttatttggcagccactaaatacatatgccagaattttgaagctgtttgccagactgaagagttttttgagcttacacatgctgacttggatgaaattgtttccaatgactgtttgaatgtagctaccgaagagactgttttttatgcattagagtcttggatcaagtatgatgtacaagaacgccagaaatacttagcacagttactaaacagtgtacgattaccattgttgagtgttaagtttctcactagactatatgaagcaaatcatcttattcgtgatgatcgcacttgtaaacatcttttgaatgaagccctaaagtaccactttatgcctgaacatagactctctcatcagacagtcttgatgacacgacctcgctgtgctcccaaagtactttgtgcagtaggagggaaatctggactctttgcctgtttggatagtgtggagatgtactttcctcagaatgactcttggattggtttggcacccctaaacattcctcgctatgaatttggaatatgcgttttagaccaaaaagtatatgttataggtggtattgcaactaatgtgcgtcctggcgtcactatcagaaaacatgaaaattcagtggaatgctggaatcctgatacaaatacttggacttctctagagagaatgaatgaaagccgaagtactcttggagtagtagtacttgcaggagaactttatgccttaggtggttatgatggacaatcttatttacaatctgtagagaagtacattcccaaaataagaaaatggcaacctgtggcaccaatgacgacaacaagaagttgttttgctgcagcggtattggatggaatgatatatgccattggtgggtatggtcctgcccacatgaacagtgtggagcgttatgatccaagtaaggactcctgggagatggttgcatccatggcagataaaaggattcactttggcgtgggtgtcatgctaggctttatttttgtggtgggtggacataatggagtctcacatttgtccagcattgaaagatacgatcctcatcaaaatcagtggactgtgtgtagaccaatgaaagaacctagaacaggagttggtgctgctgtaatcgataactacctttatgtcgtcggtggtcactcagggtcttcctatctgaatacagtgcagaaatatgatcctatctcagatacgtggctggattcagctggcatgatatactgtcgctgcaactttgggttaactgcactttgacaaatgtgaactctcggaaatagtatggtggtgaaacttgtactgcatgaacatccggatggcccagttttctgaaacccacaagctgcattgctttctttttaacttgaagtagcatgaaggctcaaaagttttgttgggtacttttaattgagaagtagttttggttgctcttgattacacagtaaatcaataatcaaaaagaaaaaagagaaaaaaaaaaagtaaagactttgccaattgaattctgcactttttcccccaagactgagatgtactagttttatgttcataagtgtacatgtagacaaaacgtggctgctttttttttttttttttttttattttagctctccttccctgataaccatgattttctaggatgagcgatgctttaggtgctggagtgtattgaatgaatggacagagtgctgatactgcttcttggatgtaaatgcttcacatttttcatttgttttaaaacaaacaaagggctgctttttattttggtacttttaaaggttgtaaataacatgccaataggtagtcatctgaatactttcctgctaaatggttttagggctacggatgtaataaatttttaagacaattgcttttattatcatgatatttggggccctattttaggaaatcagatatttactgtttatgccttttgtatatgggcaggttaacgttggatgaatttaattacctatctatgctatggttagcatggataggagtttaagcatatcaggtgtttcagtttttcttcagtagtacagcaggcctcccagtgctgatgtaaatatttgagcagtgtttagtaccattcttagtgcatattaatttttttatatatccttataattttagttttttaagatctttgctttttcaaagtgttcagatataaaatggtgctaactgtaggatttataacaaggctataactgatgtccttttggatgttcagtatgagatatgcatgacatgttttgatagtcttttgcatttttaatggcttgattcatttgtgcttattaaaaatgttagtgattacgccaatgttaacatccaaaaatcatcagaatggcctgtgttatgcttttcatggttcctgaatagtgatttaaagaaagttacacttttgatcttctttcttcttgtgctagatattacatgtctttcttaaaaacagaaatatatgcattaaatataaagcactaggcagttatgcattactttgtacatttcttaggtaactgaatattttaaggttattgaggaaaactggaactcgatgtttacttgagtaatagttctaagttgagttctactttgattaaagaaatgatcttttaaagcaaaattgtttgctgtagccagtgacagcttatttaaagaaagtgtttaacttatttgattttagcatgttttagtaaatgtctgttagtcttaaacacattcacttgcattttattattatgtcggtacttgtattttggaactgtagtcatttgattttcttttccttgattttttttaaacctgtttgcgatctccttataaagtctctgcaagataatttttcttaagaaaaaaattcatattatattcttaagtgccataatgttctagactattgttaagaagccatttgtaattataaaacataggttcatttgttagtatatatgtttatttcttgaatactatagccgggcaatttacagttctttgttcttccataaactgccagttgtagatttgaatatatactacaaaactatgtaaaatcatttttaatcataaatgtagtatcatgctttatgaatatttgcacagattataaaaccttgcaagtgatttttagtctcttctaatttagaactcaacaggagcaactaataacaattgatagtctgagtattttctatgttgcttgtctgaataacataataatatatagcaataactttttcattgatttgaataaatctattgcatagaaataggtgcactattgtagttggcccagactttatttaaagaaaagcagtttaaaatagattcatcacatatttagttttaaatccccaattcagttttctttgtttatagcaatcaaattattaaatatatcctattatactatttttaatcccctattcccaaaagataagggaatttgaaagactgtggaaaatgattttaggacgggcgcagtggctcacgcctgtaatcccagcacttggagaggccaaggcgggtatatcacctgaggtcaggagttcgagaccagcctggccaacatggtgaaaccccgtctctactaaaaatacaaaaaattagctgggcattgtggcaggtacctgtaatcccagctacttgggaggctgaggcaggagaatcacttgaacccaggaggcagaggttgcagtgagccgagcttgcaccattgcactccagcctgggcaacaagagtgaaactccacctcaaaaaaaaaaaaagattttaattataaacacatctattctatacattgtattttaacaatattttactcatgtatcatctccactatcaaattagtgtataatcatttggtaaattagatcaaaaacatatactggtcattgtttttgaaaaatctaaatttcatcttgatgaagactaaatgtgaaatatcttgggcagtagtagtaggagccatacaccagtgaacaaattatgaaaatctgtgaaaggaagaggaaaaatgttcaaaatttagaagtatatttattttaggattgcttaacctactgtattattcgtaacaaccagagctactaatctgacctgacaactaatatgtttacattagcgccttcttttacaaatttgtgagaagtttcattatgaacactctgctgacaaattgtgaatttaaagccacatgtttctatgttaaaaaggatcaaaatgtttggttataaatcctcaggattaaaagtattagaaataattttacatattcaggcaagaagagaaaagctatttaagatttcccagaaatattttggaaaagagcagcactgggaaatagaaattaatgtaatcagttgcaagatacttgccttctataattataacaacttaatctgttaggcacctttggctattcaataatcattggatgttgtaatagaatgtaagtggcttttaatgtagctccaaggatatttataaattgtgttattgctgttattgttttaaatgtgagtgaatattaaattataggaagtggtatcaagtgataggaaaatggcattaggttttgaaattttattttgataatttaacacatatggagggtttgctatatgtatgagatattctgttagatgctgtgggagctagagagatatactctttttcactcaaagagagtaaaatatagtgggagagaccctaataactattttggtgaaggatgaatctaattccttatctctgacatcgtaagaagtgattagagacctagtttatgcataagcaattccttagtgtccaattaggttttattggcatgaaaaagaaatattaaaaaacctaatatttatagaactccaaatctcctagaattggataatgtattttctagtaagaaaactatagaaattttaaatatatatatttcctgtagtatcaagactctggctgacattgagagaaatatatgtacatgttgtgtttattttcagttttggtgttggattcctggtattgtcacctaagtgctcattttcaggaaaatcagattctacaataaacacttactgcttaaagttcagtaaacttgtgataacctcataacctctgtagtctaaaagttaaggaattataagatgtcacatgtcaagttaacatccagttctacttcttaaccttttttccctttgtaaacagcactttaattagacatgatttaattagataacaattattccatggctggatatgtactggattttcacttacagtacattgatttggtgttgatacacatttgaaaagagtgaggaatacaatacatttttaatacaataggtttacaaattttcctactggtgtgaatatggagtcaaataaaaatccagtttacatctctgcagagagaaaaattgttatccatatgtcttttatattatacatctttactagagataacttattgttaattttgtcaagttatgtgtaagtcccatttatttttaaatactaagcaaaaagttccaagtttgccttaaaatacaagtgaagttaaagaactggatgataatgcctatatttttgccttatgaattgtgctgtgtattataaaccagcaacggttttgattttaacaggattctgaaattttgtagctgtagagtactaatatttgtactctcttgcaaagaatgtgatctagttgtggattatgttagtttaaatgtttttgtatatgtattttacctctgaacatgtacctttttagcatcagggttttattttatttatgtttacacactaaagtgtcatttaactagttaagaattgtattcttttttattttaaaggttatttgtgtgtatcattgtggtaatgttctgtaattattatggttaaatttcatttaatgtaaaatgtttaaaataaaaatgaaaaatctactttg

SEQ ID NO: 145313 - DNA, 656 bp, Homo sapiens
  Payload ID: 8717
  Gene Symbol: KLHL28
  Gene Name: kelch-like family member 28
  ENST ID: ENST00000557468
  CDS Start-End: 520-656
tgaccaaaccgattgcttccatggtgatgtacccagcgcggacctcttgacccggaaatccacttgccgtgatgaatgctgggttatgtagtccacgtcaggtgttgagactaggccaaagtctcctggaagaggaagtcagaacgttgtaaacgcagctacagcggagaagggaggaggggtgaagccatttgacggatgtgacgctttccttgctctgggcggaagttgcccgccccacccgtaagagttagggtttgaccggagctagtgaggatccagcccaggctccagttgtccgcggttcctcctcctgtcgctgcccgtgtgattactgagactcagacatccaggaatattgaacgtcagtgtgaattctgtaaactattaagaattttgtgtagtttgagaagttattgtgaagaaatgctatgcaaatgaaagttgctattaatattaacaaacaatcataataataccatgttttgagtatttgctatgtgccatgcaccatgctagatggaccacacatccccgacctacatgcttgctaacttaacccacttgcattctgaacaacttctgcagggcttgaatcttcttcgccaacatcacgaactctgtgacatcattcttcgagtaggtgatgttaaaat

SEQ ID NO: 145314 - DNA, 859 bp, Homo sapiens
  Payload ID: 8717
  Gene Symbol: KLHL28
  Gene Name: kelch-like family member 28
  ENST ID: ENST00000556500
  CDS Start-End: 372-859
ggaagttgcccgccccacccgtaagagttagggtttgaccggagctagtgaggatccagcccaggctccagttgtccgcggttcctcctcctgtcgctgcccgtgtgattactgagactcaggtattttccttttgctgtcctccagcggtgcaggctttggcagtgttttgcccgaatgccactggtgctagagtaagaggcaaaggactgagcggagcaggtggaaagagaggcgacatcttcttgtgcagggctcgtcacccttgtaaacgcgttactctctaccaccctgagtaactgcgatcctttcctcttgccatctgcttatcaggacagaagatctggaccacggccaagctcacaaatcggatggaccacacatccccgacctacatgcttgctaacttaacccacttgcattctgaacaacttctgcagggcttgaatcttcttcgccaacatcacgaactctgtgacatcattcttcgagtaggtgatgttaaaattcatgctcacaaagtggtacttgccagcgtcagcccgtatttcaaagctatgttcactggaaacctttctgaaaaagagaacagtgaggttgagtttcaatgcattgatgaaactgctctccaggccattgtggagtatgcctatacagggactgtttttatttctcaggacacagttgaatctctcctgccagcagcaaacctactccagataaaacttgtcctgaaagaatgttgtgcatttcttgaaagccaacttgatcctggtaattgtattggaatttctcgttttgcagaaacatatggttgccgtgacctttatttggcagccactaaatacatatgccagaa

SEQ ID NO: 145315 - DNA, 546 bp, Homo sapiens
  Payload ID: 8717
  Gene Symbol: KLHL28
  Gene Name: kelch-like family member 28
  ENST ID: ENST00000556239
  CDS Start-End: 295-546
agtgttccagagagctaccaaagtgctttctgtgaggaagtcccatggtctggtttatatcttaacagcatcaatggctgttatatgagatggagtaataatgcaagcatggaaaccggtgatgaaactacaatagccatgtgggagataattacggcatgaactagagggatggcagcagagactgcagtagccaactgtcctttgtaatctgctccaccttttttggagggcacagtggaatttgggaggagaggagaaaactaactatacctcgtattttgctccaatgagatggaccacacatccccgacctacatgcttgctaacttaacccacttgcattctgaacaacttctgcagggcttgaatcttcttcgccaacatcacgaactctgtgacatcattcttcgagtaggtgatgttaaaattcatgctcacaaagtggtacttgccagcgtcagcccgtatttcaaagctatgttcactggaaacctttctgaaaaagagaacagtgaggttgagtttcaatgcattgatgaaact

SEQ ID NO: 145316 - DNA, 847 bp, Homo sapiens
  Payload ID: 8717
  Gene Symbol: KLHL28
  Gene Name: kelch-like family member 28
  ENST ID: ENST00000579157
  CDS Start-End: 152-847
gcccaggctccagttgtccgcggttcctcctcctgtcgctgcccgtgtgattactgagactcagttatggaggctgagaagtccaaggtcaagggggccacacctggtgtgagctttcttggggctgcatctggtggaagccttcttgctgatggaccacacatccccgacctacatgcttgctaacttaacccacttgcattctgaacaacttctgcagggcttgaatcttcttcgccaacatcacgaactctgtgacatcattcttcgagtaggtgatgttaaaattcatgctcacaaagtggtacttgccagcgtcagcccgtatttcaaagctatgttcactggaaacctttctgaaaaagagaacagtgaggttgagtttcaatgcattgatgaaactgctctccaggccattgtggagtatgcctatacagggactgtttttatttctcaggacacagttgaatctctcctgccagcagcaaacctactccagataaaacttgtcctgaaagaatgttgtgcatttcttgaaagccaacttgatcctggtaattgtattggaatttctcgttttgcagaaacatatggttgccgtgacctttatttggcagccactaaatacatatgccagaattttgaagctgtttgccagactgaagagttttttgagcttacacatgctgacttggatgaaattgtttccaatgactgtttgaatgtagctaccgaagagactgttttttatgcattagagtcttggatcaagtatgatgtacaagaacgccagaaatacttagcacagttactaaacagtgtacgattaccattgttgagtgttaag

SEQ ID NO: 145317 - DNA, 3043 bp, Homo sapiens
  Payload ID: 8718
  Gene Symbol: KLHL29
  Gene Name: kelch-like family member 29
  ENST ID: ENST00000288548
  CDS Start-End: 1-1628
cacactcctatggagtggcccagcctcccaccttcagcccggctgtgaacgtccaggccccggtcattggggtgaccccctcactgcctccccacgtggggccccagctcccgctgatgccaggccactactcgctccctcagccgccctctcagccactgagcagcgtggtggtcaacatgcctgcccaggccctgtatgccagccctcagcccctggccgtgtccacactgcccggtgtggggcaggtggcccgcccaggacccaccgctgtgggcaacggccacatggcagggcccctgctgcctccaccgccgccagcccagccgtccgccactctccccagtggtgcccctgccaccaatgggccccccacaaccgactcggcccacgggctgcagatgctgcggaccattggcgtggggaagtatgagttcaccgacccggggcaccccagagaaatgttgaaggaattgaaccagcaacgcagagcgaaagcgtttacagacctgaaaattgttgttgaaggcagagagtttgaagtccaccaaaatgttctagcttcctgcagcttgtatttcaaggacctgattcaaaggtccgtgcaagacagcggccagggcggccgggagaagctggagctcgtcctgtcgaacctgcaggcagacgtcctggagttgctgctggagtttgtctacacgggctccctggtcatcgactcggccaacgccaagacactgctggaggcggccagcaagttccagttccacaccttctgcaaagtctgcgtgtcctttctcgagaagcagctgacggccagcaactgcctgggcgtgctggccatggccgaggccatgcagtgcagcgagctctaccacatggccaaggccttcgcgctgcagatcttccccgaggtggccgcccaggaggagatcctcagcatctccaaggacgacttcatcgcctacgtctccaacgacagcctcaacaccaaggctgaggagctggtgtacgagacagtcatcaagtggatcaagaaggaccccgcgacacgcacacagtacgcggctgagctcctggccgtggtccgcctccccttcatccaccccagctacctgctcaatgtggttgacaatgaagagctgatcaagtcatcagaagcctgccgggacctggtgaacgaggccaaacgctaccatatgctgccccacgcccgccaggagatgcagacgccccgaacccggccgcgcctctctgcaggtgtggctgaggtcatcgtcttggttgggggccgtcagatggtggggatgacccagcgctcgctggtggccgtcacctgctggaacccgcagaacaacaagtggtaccccttggcctcgctgcccttctatgaccgcgagttcttcagtgtagtgagtgcaggggacaacatctacctctcaggtgggatggaatcaggggtgacgctggctgatgtctggtgctacatgtccctgcttgataactggaacctcgtctccagaatgacagtcccccgctgtcggcacaatagcctcgtctacgatgggaagatttacaccctcgggggacttggcgtggcaggcaacgtggaccacgtggagaggtaatgaggccacggtcaggacaggggcatgctctttgctcaccaagaactgaaatcacgtcactcactgtacctcccaacacccactcagtggcgatggagcagagcctggaccattcatatgggcagtcatcccaggctcttcagtcacagcaccgggggcagcagggtgtgggatacaagcagatgggatgacatctgtgtcacctttgcagtcgctgagatgggagatggggcgcttctgtcccgacaacccatttaggtgtcagacaagctggaggcccaagatccagttgcagaaggcctgggatgagccagaccctcctggccaggcagtcagggaacaccctgcaccatgagcaccagcccagagactgctggggtttcgggcaaagctggaagcaatgtttaaaatgcaggtcatgccagtggcggtgcctccttgtcctgccaagcggggggtcccacaccagggagctcccttcctccctccagccacacacaccaggacatctgttcgtaatacagagaaaggccactgcatacaaactaagcaatttagggagaacattcttgccaaccctctagaactttccagaagaaaaaataagccaaaggaccacgtgtgaacctgccctccgctgggagtcccagcctggcttcctcccaaggccattgtggagggtcagatacaggcatgaggggcgtgggctgaagtgggtgcttccggatgagaatacaaaatccttttcccttgagccagggagactgttctttcttacagagaacagatgcctgggggaaaagctcaggaagctttgtcaggcagcagaacggaggcttagtcctgcttttggagaaactagtgcctggagggtaacccgtcaggctgacctggcccaaagcacaacccaggggagacagctaagattgccagagcccctcctgcacctgagcccaccacccccaccgccatgtgtcaccagaaagcacatcttcccgtgggacatcatgttgcctatgaagccacacatacccctcaatttgtatttttcccccttggtggctaattggacacttgacaaatgttacagcaaagacggttgcagagtgaggcaggctctgaatgctcattgtgggcttttaactcctcccccaagtagagcccagagatggctcagtaacaacatttagttatcatattgatctggcaatcatgggcattgccacgtgaaaatgaggatattaccgcagttgctggagctgggttggccccggtgctggcagccttcagtgtgacccactgcccagctatgcataccccaagcattctggaagcatcggcttccgatcatttgtcatccaataataaacaaacacatgaaaaatgagacattttctctgtaggagtaaactgaa

SEQ ID NO: 145318 - DNA, 5287 bp, Homo sapiens
  Payload ID: 8718
  Gene Symbol: KLHL29
  Gene Name: kelch-like family member 29
  Uniprot ID: Q96CT2
  ENST ID: ENST00000486442
  CDS Start-End: 718-3345
ggtccccgcgccgcggccgcgccagcccccgcgccgccgccgccgtccccgccaccgcggatctcgccgcagctccagccccggccccggctccgcagcgcccgtccgcagccccggcggtcgccgcgcttgagcgcagcccccgcccggagcccgagccgcgagcccggagccagccccagccccgcggccgccgcggctgcggggagagggcgggggcgatgctgccggagccgccgccgccgccgccgcctcgatgagagccgcgccgcaccgctcatagccgcacaggctgacaggcaggaggaccgacttccctctcccgggcatcctccctgggctgccgggaggcggcggcggcggaggaggaggaggaacgaggggagaaggcggagagcaggaacgcgaggaggaggacctggatccgtttcctccggccaggacccgagcggccccagccaccgctacccgccggcgctgtccgctctccatcagccctcctgcgcccacccgcgaccccgggctctctgcgcgtcgggccggggccggagccgcgcgccggagactatctggcttcctggtgatgctcacgctttgctaagtgttggcggccatcgtggttttcgcatcctggggacgaatcctgagcttgccagagacgggcggcgcaaggtccgggctctgtttccctgtgagaagccgcctcggcccaccgagatgtcccggcaccatagccgcttcgaaagagattaccgggtgggctgggaccgccgcgaatggagcgtcaacgggacgcatgggaccaccagcatctgcagtgtcacctcgggggccggtggcggcacagccagcagcctcagcgtccggcccggcctcctgccgctgcccgtggtgccctcccggctgcccaccccggctacagctcctgctccctgcaccaccggcagcagcgaggccatcaccagcctcgtggccagctctgcgtctgcggtcaccaccaaggctcccggcatctccaaaggggacagtcagtcccagggactggcgaccagcatccggtgggggcagacgcctatcaatcagtccacaccctgggacactgatgagccaccctccaaacagatgagagagagtgacaatccaggcacagggccatgggtgaccacggtggccgccgggaaccagcccaccctgattgcacactcctatggagtggcccagcctcccaccttcagcccggctgtgaacgtccaggccccggtcattggggtgaccccctcactgcctccccacgtggggccccagctcccgctgatgccaggccactactcgctccctcagccgccctctcagccactgagcagcgtggtggtcaacatgcctgcccaggccctgtatgccagccctcagcccctggccgtgtccacactgcccggtgtggggcaggtggcccgcccaggacccaccgctgtgggcaacggccacatggcagggcccctgctgcctccaccgccgccagcccagccgtccgccactctccccagtggtgcccctgccaccaatgggccccccacaaccgactcggcccacgggctgcagatgctgcggaccattggcgtggggaagtatgagttcaccgacccggggcaccccagagaaatgttgaaggaattgaaccagcaacgcagagcgaaagcgtttacagacctgaaaattgttgttgaaggcagagagtttgaagtccaccaaaatgttctagcttcctgcagcttgtatttcaaggacctgattcaaaggtccgtgcaagacagcggccagggcggccgggagaagctggagctcgtcctgtcgaacctgcaggcagacgtcctggagttgctgctggagtttgtctacacgggctccctggtcatcgactcggccaacgccaagacactgctggaggcggccagcaagttccagttccacaccttctgcaaagtctgcgtgtcctttctcgagaagcagctgacggccagcaactgcctgggcgtgctggccatggccgaggccatgcagtgcagcgagctctaccacatggccaaggccttcgcgctgcagatcttccccgaggtggccgcccaggaggagatcctcagcatctccaaggacgacttcatcgcctacgtctccaacgacagcctcaacaccaaggctgaggagctggtgtacgagacagtcatcaagtggatcaagaaggaccccgcgacacgcacacagtacgcggctgagctcctggccgtggtccgcctccccttcatccaccccagctacctgctcaatgtggttgacaatgaagagctgatcaagtcatcagaagcctgccgggacctggtgaacgaggccaaacgctaccatatgctgccccacgcccgccaggagatgcagacgccccgaacccggccgcgcctctctgcaggtgtggctgaggtcatcgtcttggttgggggccgtcagatggtggggatgacccagcgctcgctggtggccgtcacctgctggaacccgcagaacaacaagtggtaccccttggcctcgctgcccttctatgaccgcgagttcttcagtgtagtgagtgcaggggacaacatctacctctcaggtgggatggaatcaggggtgacgctggctgatgtctggtgctacatgtccctgcttgataactggaacctcgtctccagaatgacagtcccccgctgtcggcacaatagcctcgtctacgatgggaagatttacaccctcgggggacttggcgtggcaggcaacgtggaccacgtggagaggtacgacaccatcaccaaccaatgggaggcggtggcccctctgcccaaggcagtacactctgctgcagccacagtgtgtggcggcaagatctacgtgtttggtggggtgaacgaggcaggccgagctgccggcgtcctccagtcttacgttcctcagaccaacacgtggagcttcatcgagtccccaatgattgacaacaagtatgcccccgctgtcacgctcaatggcttcgttttcatcctgggcggggcttatgccagagctaccaccatctacgaccctgagaaaggaaacattaaggcgggcccaaacatgaaccactctcgccagttctgcagtgctgtggtgcttgatggcaagatttatgcaactggaggtattgtcagcagtgaagggcccgcgctgggcaacatggaggcctacgagcccacaaccaacacatggaccctcctcccccacatgccctgccctgtgttcagacacggctgcgtcgtgataaagaaatatattcaaagcggctgacatcagcagaaagcccacgataagactgtggacaagtctggtgaggcaagtgccacgcaatgataattttccagcgacaccaacaagaggccaacaaaacacaatcaaggaactcactgcgctcaacatgttgaatattctctacattgaatgtagaaaatcatcctcgcctttggatgaaacggaggcaccgcgcttggagccgcaggaaccacgatcccgccatggggctggctgcctcctgaacaggggcgctcgctctgccaggtgcaatagagtttcacgtatttttcaactgggagagagaagctgttttttccttcctgcagagcaagcttgatccctaaacaaccatagatcagttatcttatgacaacattaggcatcaggctctcttggaataagatcaaagtgtccttatcactttgattcctacttttgttttttaaccgatctacactttcagtggccgacagaaaacgagggacaatactgtgcatcacaaggcctaggaggctgctggtccccactggggctgaagagaagcccagctgcccacgcggagccaggggtggcagctgtgggacagccggggagcagggacagcggtctgtccttcacaggtttttctactgtgtttttgctggagaaggacagtgattgcgctagctttctcttacccggtatgaattatttagatttctgaggcattttcttgataaacaaaaggctatttttaagtactgagaggaggagcaggccacaagagggataatgttgtgggaattcccaaagctctttgtaggtagtgccagaggggggcttttgctctcatttttctatgtgcagaatagaggatctctcctggggtgggcgatgcccccattttatttttagaaaaagtaactcccagacagccccataaaagctgtgcccaaggaagaagagtctgctctagaaggagcccggttctggctcaggacaccggcccagctccctccatgaggtcaagctgaggaccaggccagtgggaagggaaggagggagaattagcgtctataaagcacaggagactatttttgatattcatagctatatattaaggcacctgccacaagagctctcaggatggggacagccttcttagtggagccatggcagcaaggcctgagggcatgaacagaaccactcttcttgtcacatacgaacctgagaaaagggaagccaggagggaggtcacaccatggctcaaaagggaaaggccttcccacttgtccttagcccctcaaacctcacacggtcaacagtttccattccagggcaggagaatgctgccgccactgcgctgttgagttgaagttggtaccaaatacacatttaccacttttatatctgggaagtcaacttgccatcgtttcatgataacaaccatttataagagaaaaagacaggacacgctttccatcgttcagtatttgatgacacaaaattccagttctaacgttgggcatcaacttctagcactacgagtgtggctcccacttggacaagataccgagcttcgttatgcagtttttaatattatttattattttaaaaagtaataagcacaaaactacatacattgtatgtcatttaaagtatttatgtcaaacagggtgcaagtgtgaacccaaggactggagcacaaattcctaactgcctggggcagggctaatgttagcattggtgtgcgtctgcctccaaaggaggttctagttgtcagcgagactcaacacagatgacattgaaattcgtttctctcctcatctatcacactggagcaaaactggctatttctgtgaatgatataaaacagggttctctgtaatggtattgtacatagtatatgtttactgttaagttcttgttatattataataaatatatttatagatctaga

SEQ ID NO: 145319 - DNA, 6806 bp, Homo sapiens
  Payload ID: 8719
  Gene Symbol: KLHL3
  Gene Name: kelch-like family member 3
  Uniprot ID: Q9UH77
  ENST ID: ENST00000309755
  CDS Start-End: 445-2208
gattctttgcagcctagacagaggaggcaggagccccaggggcgggctaatcgcctgggctggggatgcctgggcagatgcagaggaagctggaaaggtggcagtgcacctgggtcgctggagctgccgccgttcctaggagaccaaggagcagcaagcctgcgggggagggggagcaagtgggttgctgcttttagcagctgaaagggctgcagggagctctgggtaagacattttctgttgctgctgcttttgcggtagaagctgctgcgagtaagtcagaggaaggaggattgagaagggaggaggcttcacttgcagccatgctgaatcactgttgctgatcagatttcccactggtctgctgggagaatcaagaacagaactaggatccccgagtgcatacacagttcagcagctaccaccctggctgggcctcacacaatggagggtgaaagtgtcaagctgagctcccagactctgatacaggctggggatgatgagaagaaccagaggacgatcactgtcaaccctgcccacatggggaaagcattcaaggttatgaatgaactgcggagtaaacagctgttgtgtgacgtgatgattgtggcagaagatgtcgagatagaagcccaccgtgtggtcctggcagcctgcagcccctacttctgtgcgatgttcacaggtgacatgtctgagagtaaagccaaaaagatagaaatcaaggacgtggatgggcagacgctgagtaagctgattgactacatctatactgctgaaatcgaggtgactgaagagaatgtccaggtgctgctcccggcagccagcttgctgcagctcatggatgttcggcagaactgctgtgacttcctgcagtctcagttgcatcccaccaattgcctgggcatccgtgcatttgcagatgtacacacctgcactgaccttctgcagcaggccaatgcctacgcagagcagcactttccagaggtgatgctaggagaagaatttcttagcctgagtctggaccaggtgtgcagcttgatatccagcgacaagctgaccgtttcttcagaagagaaggtgtttgaagctgtgatctcatggatcaattatgagaaagaaacccgtttagagcacatggcaaagctgatggaacatgtccgacttcctctcttacctagggactacctagtccaaacggttgaagaagaagctttgataaagaataacaacacctgtaaagacttcctcattgaggccatgaaataccatctcctccctctggatcagagactattgattaagaacccaaggaccaagcccaggactccagtcagccttcccaaggtcatgattgtggttggcggccaggcacccaaggcaatccgcagtgtggagtgctatgatttcgaggaggaccggtgggatcagattgctgagcttccttccagaagatgcagagcaggtgtggtgttcatggctggccacgtgtatgccgtgggagggtttaatggctcactgcgggtgcggacagtggatgtgtatgacggcgtgaaggaccagtggacgtccattgccagcatgcaggagcgccggagcacactgggcgcagcggtgctcaatgacttgctctacgcagtgggaggctttgatggcagtactggcctagcatcggtggaagcctacagctacaagaccaacgagtggttctttgtggccccgatgaacacgcggcggagcagtgtgggtgtgggcgttgtggaggggaagctatatgctgttgggggttatgatggagcttcccgccagtgtctgagcactgtggagcagtacaacccagcgaccaatgaatggatatacgtggcggacatgagcacccgccgcagtggcgcaggggttggagtgcttagcggacagctgtacgccacaggtgggcatgatgggcctttggtgaggaagagcgttgaggtttacgatcctggaacaaatacctggaagcaagtggcagacatgaacatgtgccggcgcaacgcaggggtctgtgcagtaaatgggctcctgtatgtggttggaggggatgatggatcctgcaacttggcttcggtggagtactacaatcctgtcactgacaaatggacgctgcttccaacgaacatgagcacggggcggagctatgcaggtgttgccgtgattcacaagtccttgtgacccaaactcctactgccaggaggtggaggaaggagcaggtgctgcctgtgactctgaacagcaggaccttggtgactggattcaacttgcttgggagggtctgtgctgctgtgagaaccgctctcctctgacttggcagactggtgttgttcatcgcagtgtggacaccattacccacccccgttcccctgaggtgctctggcctatgccctgagcaaggggggtcttgacatccccaggcagcacctttgggctttgttttggtgtttctacagggacaatacagaccctggagtgtgtgtgtgtgtgtgtgtgtgtgtagaccatggtgtttctctatgtttctctaagttggggggtgagcgtgtgtgacagtctactggatttctttactactgatcctttcgctgtgttaaaaatcaagtcacagagacctctcttctggatttgtcccatggggaccctgagactactaaagctgctttcttctgaaggtccagttggacagtctgggaatgtccagaaataaccagtgagaggggcagttctctggccacacccacttatgtactttaactactgtgactttgtctgcagaagagctggaaaattctcgaagctgcaccgtgtcctctgtgtgctagaataagggacaaatgggttccctgtgcttctcagctcactgtttttccttgagttctcctacaggaagcagatgagaactgcccagtcttcaggtttaggccattggtctttgatgtcatagattccaggcctgggaggtgttatgtctcttcagctgggaaaactagctcttcagagaagcctcgggtaacactgaaaaacaaaacaaaacaaaacaaaaacaggaaaaaaacaaaaaaccaaagtggtaaggattcagttcctgcctataatggtctcagagagggtcctacttttaggttttcccaggacaggacagtccccatttatacttattatcccagtttaattattcacagcaccccattttactcagaagtgttctggtctggaggataaataagaggtcaccctcctccagacccaaagatagatttgtgcctgtgttggatggggtcgtgtgtgattcagatggacattggatggcttcaaaggaatataccactagagctggcccttggcactttgtgacagtggtcaagtctgtctaatgtccttgtcttctttttcttgtgctttccccctattccagggtgtgcaccctctccccaacccccaagaaccccactactgctttccctgtgaggtaggagatatcagtgggccttggatttgaggcttcctaagatgtgcttgcattttaaaaagggagcttggtgagagctttgctaattcacaggtaaaaattattaacaatagaacttcaagcatcttgaggagcgggcatttgagggggcatggagtaatttgtatttaaaaaaccttaaagttgtgctgttcctaaactagcaaattgctcatgctgaaatttctggcataagcaggggaagtcttgtgtctggagaatagtctcataccttgcagtctgggacaccctccctactttgagaatccacctacaggaagccaaggaactttataaatcctgatgttggacttctgatacgactgggctacttccaagcaggtgctgcaggagattggcatcccccagcccctgcagttagaaaccccgaagtcttcccagccagtgagccactttgtgtatttactgtatatttattgtgccctaaatgtgcaactctcctaaagacaaaacttctctttctgatgttaagcacatgttacttcaacaagatgcttggagaacaacaaggtacccagaatttttagaagccttcagaagaggctaaaatatccagctttgggggacctggaagaaatgtctccaaaggaagcaaggcatgttttagttgagtgctctggtctcactatgaagtggggatgactgtggcttcataactctacctggctgtgggttggaagctgatggaatgagaaatgtcctttctccttctctgaggaaattttgagacttgtttcggtgtgtctgtgtgatggggatgaggctggggttgggatctgatgtatgccattcacagaagctctcaatttcagatgataggtgaattccctgcccctcccccaccactgagaagctagactttcatgcgggagaggctacttttatgtgtcgtcttccggggaagggtccctccactgaaagctagccagtcatgttttctgtttttggatttttgcaattggtttcacctcatgtctccctccctacaaagcactgcctctactgggcgtgctgccaaggccatgtgcactccatcctcatgtatcctttttcacggggaccagaacactggtacgtcatcaccaaagccaatctgctctagctgcccacagatgccaccaaaacctgctatctcttcatcaccaggtacgattctctttccacagtggacacagcaggctattttctagtttgtgctggtcacgtggtagatgaagcctcttactgccccacttagggtggccacggctgcttgtgaatgcagctttgccagtggcatatctgtcatctgattgcggtggtgaaatggaattgaggcccaaggttagaagcagccgagacgccacttggatactgatttgaacaatgtagaagtcagattctgaattccaaagttatttctcataagtacccaatggcatctctccatctacaaagttgcagtattatgcaaataaaactgacctcattttctgctatgcaataagaatacttaattctagttcccgacaagccagttgcaatatcccctaagatgctttttgagctgtcttactttgatatctgttgtgtaatgtttgtatatttctgagccagatcctttcaaagattgcctttttataaaattgaagctatagcttttaggctaaaattttaacgtagatatttttataagatatttttttcaagagtttgaatcgctttttattgtccatgataatgaaatgttgtgttctttgcatcattcactctcaaacgtagttcatgcctgtagctctcttccttttgtttctcacccttcagaaacatatttttcagtagctccaggtagatgagccttttttttttttttaaaaataccatattcaagggagtctgctgaattttaaaacgcagtcactggtgtttcttgaattgctagggactgatgttatgttcgactcagcacttgcccgtctgtattgattgtgtctttttttttttttttggagtctgctttctgtgggggtgaggccgggctgtctcgtggtggctcccactgacgggcactgagcctggtaccctgtggcatggagaagcctcagggaaaggcctgcccccccagcacatactcccatagtgtcctaggtccagccgaccattccttattctcttctatctccttgttgatctgaagcttccaatagcttgaggcctttgctgctggatgatgccctttttgggagcatcttgtctctaacctttaaaagaggggtcaatcctcatgatccctgtgtgttaagcatatgctttgcaggtgctcacactacacttacaacttgcttcttgagctatgtctctactccaggctctgttttgtgtatttatctgccatttgcatcatggtttttaaaatttattattattattattattgttgggacaggtgccatttaaattgcctccatgctccccatttgcacctagctggatcaagttgggaggctgagcaaactcatattccagttagttggagtttttaaaggctctgtttgcctggagaagcaaggaggttagaatgtaatttttttaagcgtttgcactatttagagtcctaagcccctcatgttcagctgtgctgtgtttctactgaccaagcaggagagccagcagcacttccagcatttgggaatggaagagatttcttctgtagtggataattacagcctcatagcccctgtgcagccttcgtcatgggactcagtgactcatggatatagcatcagccatggcaggaatgcacaggactgtggcatttgcagcatcaaatcaccctagtgccatgtttggttatgagattgtaaattattcgctcccccatcctcccctcccctcattttcagtggcaatagaggacccttgttgtacttcttgtttaatttgcatattatgtgtaaaatgctttcgttgaaagaaaactgaagacactgaatgtgtatgtctgtgtgggtgctctgtccctgtggttgtcatagccagtcagacttgatcactgacaccccgtacaacatattgcataggtaagatcctcgatctggtgttctctgcgtggctgttagggactgtatatcttgtaaaagaacacttgtcacatgcttgatcagttacagcaatagctgaagaaacatttcctcaaatgtattattttaacaggaatcatgttctaatttcccatcctttaattttaataaaagctgaactgtgtgaa

SEQ ID NO: 145320 - DNA, 6981 bp, Homo sapiens
  Payload ID: 8719
  Gene Symbol: KLHL3
  Gene Name: kelch-like family member 3
  Uniprot ID: Q9UH77
  ENST ID: ENST00000508657
  CDS Start-End: 716-2383
ctcttgtgctctcctctagttttactgaactgccagtactttgaacacactttgtgctttttctcctccaggtctttgtgcatactgtttcctctgcctggaatactcttctttctctttacctgactcgtttctgctcttacttcaagtctcagattctaggaagctttccatcaacctgctatcactgggacgagttggccatcccctgtgcttctgtagctcctatgaaatcataatagttgaaatgtgatgtttaaatgtttacttggcattctcctctactgaactctaagctttgtgagggtagtgatggtggctttgcctattgttttgtttcccttaaatctaaacgcagtgcctggcacatagtagcctccagtaaatgcttgtttaatgaacaaacaaacctgtgaagtgagtgatagagtgcttagtccccttcagttttcaggatggagagatggagaataaggacctcacacaaaatcacacagtacttggtggaagaagctgagctatgacctgccttccttcagaggaatgcactttgctttggaagatatgaagaaattcccagtacattgtctttcctattgggtctgtgtgagaacaggctgatagatgcctctgtgtcaagctgagctcccagactctgatacaggctggggatgatgagaagaaccagaggacgatcactgtcaaccctgcccacatggggaaagcattcaaggttatgaatgaactgcggagtaaacagctgttgtgtgacgtgatgattgtggcagaagatgtcgagatagaagcccaccgtgtggtcctggcagcctgcagcccctacttctgtgcgatgttcacaggtgacatgtctgagagtaaagccaaaaagatagaaatcaaggacgtggatgggcagacgctgagtaagctgattgactacatctatactgctgaaatcgaggtgactgaagagaatgtccaggtgctgctcccggcagccagcttgctgcagctcatggatgttcggcagaactgctgtgacttcctgcagtctcagttgcatcccaccaattgcctgggcatccgtgcatttgcagatgtacacacctgcactgaccttctgcagcaggccaatgcctacgcagagcagcactttccagaggtgatgctaggagaagaatttcttagcctgagtctggaccaggtgtgcagcttgatatccagcgacaagctgaccgtttcttcagaagagaaggtgtttgaagctgtgatctcatggatcaattatgagaaagaaacccgtttagagcacatggcaaagctgatggaacatgtccgacttcctctcttacctagggactacctagtccaaacggttgaagaagaagctttgataaagaataacaacacctgtaaagacttcctcattgaggccatgaaataccatctcctccctctggatcagagactattgattaagaacccaaggaccaagcccaggactccagtcagccttcccaaggtcatgattgtggttggcggccaggcacccaaggcaatccgcagtgtggagtgctatgatttcgaggaggaccggtgggatcagattgctgagcttccttccagaagatgcagagcaggtgtggtgttcatggctggccacgtgtatgccgtgggagggtttaatggctcactgcgggtgcggacagtggatgtgtatgacggcgtgaaggaccagtggacgtccattgccagcatgcaggagcgccggagcacactgggcgcagcggtgctcaatgacttgctctacgcagtgggaggctttgatggcagtactggcctagcatcggtggaagcctacagctacaagaccaacgagtggttctttgtggccccgatgaacacgcggcggagcagtgtgggtgtgggcgttgtggaggggaagctatatgctgttgggggttatgatggagcttcccgccagtgtctgagcactgtggagcagtacaacccagcgaccaatgaatggatatacgtggcggacatgagcacccgccgcagtggcgcaggggttggagtgcttagcggacagctgtacgccacaggtgggcatgatgggcctttggtgaggaagagcgttgaggtttacgatcctggaacaaatacctggaagcaagtggcagacatgaacatgtgccggcgcaacgcaggggtctgtgcagtaaatgggctcctgtatgtggttggaggggatgatggatcctgcaacttggcttcggtggagtactacaatcctgtcactgacaaatggacgctgcttccaacgaacatgagcacggggcggagctatgcaggtgttgccgtgattcacaagtccttgtgacccaaactcctactgccaggaggtggaggaaggagcaggtgctgcctgtgactctgaacagcaggaccttggtgactggattcaacttgcttgggagggtctgtgctgctgtgagaaccgctctcctctgacttggcagactggtgttgttcatcgcagtgtggacaccattacccacccccgttcccctgaggtgctctggcctatgccctgagcaaggggggtcttgacatccccaggcagcacctttgggctttgttttggtgtttctacagggacaatacagaccctggagtgtgtgtgtgtgtgtgtgtgtgtgtagaccatggtgtttctctatgtttctctaagttggggggtgagcgtgtgtgacagtctactggatttctttactactgatcctttcgctgtgttaaaaatcaagtcacagagacctctcttctggatttgtcccatggggaccctgagactactaaagctgctttcttctgaaggtccagttggacagtctgggaatgtccagaaataaccagtgagaggggcagttctctggccacacccacttatgtactttaactactgtgactttgtctgcagaagagctggaaaattctcgaagctgcaccgtgtcctctgtgtgctagaataagggacaaatgggttccctgtgcttctcagctcactgtttttccttgagttctcctacaggaagcagatgagaactgcccagtcttcaggtttaggccattggtctttgatgtcatagattccaggcctgggaggtgttatgtctcttcagctgggaaaactagctcttcagagaagcctcgggtaacactgaaaaacaaaacaaaacaaaacaaaaacaggaaaaaaacaaaaaaccaaagtggtaaggattcagttcctgcctataatggtctcagagagggtcctacttttaggttttcccaggacaggacagtccccatttatacttattatcccagtttaattattcacagcaccccattttactcagaagtgttctggtctggaggataaataagaggtcaccctcctccagacccaaagatagatttgtgcctgtgttggatggggtcgtgtgtgattcagatggacattggatggcttcaaaggaatataccactagagctggcccttggcactttgtgacagtggtcaagtctgtctaatgtccttgtcttctttttcttgtgctttccccctattccagggtgtgcaccctctccccaacccccaagaaccccactactgctttccctgtgaggtaggagatatcagtgggccttggatttgaggcttcctaagatgtgcttgcattttaaaaagggagcttggtgagagctttgctaattcacaggtaaaaattattaacaatagaacttcaagcatcttgaggagcgggcatttgagggggcatggagtaatttgtatttaaaaaaccttaaagttgtgctgttcctaaactagcaaattgctcatgctgaaatttctggcataagcaggggaagtcttgtgtctggagaatagtctcataccttgcagtctgggacaccctccctactttgagaatccacctacaggaagccaaggaactttataaatcctgatgttggacttctgatacgactgggctacttccaagcaggtgctgcaggagattggcatcccccagcccctgcagttagaaaccccgaagtcttcccagccagtgagccactttgtgtatttactgtatatttattgtgccctaaatgtgcaactctcctaaagacaaaacttctctttctgatgttaagcacatgttacttcaacaagatgcttggagaacaacaaggtacccagaatttttagaagccttcagaagaggctaaaatatccagctttgggggacctggaagaaatgtctccaaaggaagcaaggcatgttttagttgagtgctctggtctcactatgaagtggggatgactgtggcttcataactctacctggctgtgggttggaagctgatggaatgagaaatgtcctttctccttctctgaggaaattttgagacttgtttcggtgtgtctgtgtgatggggatgaggctggggttgggatctgatgtatgccattcacagaagctctcaatttcagatgataggtgaattccctgcccctcccccaccactgagaagctagactttcatgcgggagaggctacttttatgtgtcgtcttccggggaagggtccctccactgaaagctagccagtcatgttttctgtttttggatttttgcaattggtttcacctcatgtctccctccctacaaagcactgcctctactgggcgtgctgccaaggccatgtgcactccatcctcatgtatcctttttcacggggaccagaacactggtacgtcatcaccaaagccaatctgctctagctgcccacagatgccaccaaaacctgctatctcttcatcaccaggtacgattctctttccacagtggacacagcaggctattttctagtttgtgctggtcacgtggtagatgaagcctcttactgccccacttagggtggccacggctgcttgtgaatgcagctttgccagtggcatatctgtcatctgattgcggtggtgaaatggaattgaggcccaaggttagaagcagccgagacgccacttggatactgatttgaacaatgtagaagtcagattctgaattccaaagttatttctcataagtacccaatggcatctctccatctacaaagttgcagtattatgcaaataaaactgacctcattttctgctatgcaataagaatacttaattctagttcccgacaagccagttgcaatatcccctaagatgctttttgagctgtcttactttgatatctgttgtgtaatgtttgtatatttctgagccagatcctttcaaagattgcctttttataaaattgaagctatagcttttaggctaaaattttaacgtagatatttttataagatatttttttcaagagtttgaatcgctttttattgtccatgataatgaaatgttgtgttctttgcatcattcactctcaaacgtagttcatgcctgtagctctcttccttttgtttctcacccttcagaaacatatttttcagtagctccaggtagatgagccttttttttttttttaaaaataccatattcaagggagtctgctgaattttaaaacgcagtcactggtgtttcttgaattgctagggactgatgttatgttcgactcagcacttgcccgtctgtattgattgtgtctttttttttttttttggagtctgctttctgtgggggtgaggccgggctgtctcgtggtggctcccactgacgggcactgagcctggtaccctgtggcatggagaagcctcagggaaaggcctgcccccccagcacatactcccatagtgtcctaggtccagccgaccattccttattctcttctatctccttgttgatctgaagcttccaatagcttgaggcctttgctgctggatgatgccctttttgggagcatcttgtctctaacctttaaaagaggggtcaatcctcatgatccctgtgtgttaagcatatgctttgcaggtgctcacactacacttacaacttgcttcttgagctatgtctctactccaggctctgttttgtgtatttatctgccatttgcatcatggtttttaaaatttattattattattattattgttgggacaggtgccatttaaattgcctccatgctccccatttgcacctagctggatcaagttgggaggctgagcaaactcatattccagttagttggagtttttaaaggctctgtttgcctggagaagcaaggaggttagaatgtaatttttttaagcgtttgcactatttagagtcctaagcccctcatgttcagctgtgctgtgtttctactgaccaagcaggagagccagcagcacttccagcatttgggaatggaagagatttcttctgtagtggataattacagcctcatagcccctgtgcagccttcgtcatgggactcagtgactcatggatatagcatcagccatggcaggaatgcacaggactgtggcatttgcagcatcaaatcaccctagtgccatgtttggttatgagattgtaaattattcgctcccccatcctcccctcccctcattttcagtggcaatagaggacccttgttgtacttcttgtttaatttgcatattatgtgtaaaatgctttcgttgaaagaaaactgaagacactgaatgtgtatgtctgtgtgggtgctctgtccctgtggttgtcatagccagtcagacttgatcactgacaccccgtacaacatattgcataggtaagatcctcgatctggtgttctctgcgtggctgttagggactgtatatcttgtaaaagaacacttgtcacatgcttgatcagttacagcaatagctgaagaaacatttcctcaaatgtattattttaacaggaatcatgttctaatttcccatcctttaattttaataaaagctgaactgtgtgaa

SEQ ID NO: 145321 - DNA, 1566 bp, Homo sapiens
  Payload ID: 8719
  Gene Symbol: KLHL3
  Gene Name: kelch-like family member 3
  ENST ID: ENST00000504208
  CDS Start-End: 442-759
tatttttaaggcccattggctttgcctaaaccttggtaaacagatactaaaaatctccagtaacattgcaaaattttgttctaattatcaggttcagcttcaaaacgtgtaaaatgcattgtgtactgagagtaagaggctgactctcgttagatccatttctatcagtgtgtttaaagccaaaaggaaagtaaaatacacatggctttcttctgacttgagttgtgtgattatggtcttttactcaagcttaaatgtttttatttttttgtcttccgagttcatgttgcccaaatgtcctgaggtggttccaaataccaatcccacacttcttgaccattgtcctgtggacaataacttggaataaatgtgaaactgaagtctgagtgcccatcagagagtgtcccaatccaaccagtctataagaagatctggggtgacatgtctgagagtaaagccaaaaagatagaaatcaaggacgtggatgggcagacgctgagtaagctgattgactacatctatactgctgaaatcgaggtgactgaagagaatgtccaggtgctgctcccggcagccagcttgctgcagctcatggatgttcggcagaactgctgtgacttcctgcagtctcagttgcatcccaccaattgcctgggcatccgtgcatttgcagatgtacacacctgcactgaccttctgcagcaggccaatgcctacgcagcactttccagaggtgatgctaggagaagaatttcttagcctgagtctggaccaggtgtgcagcttgatatccagcgacaagctgaccgtttcttcagaagagaaggtgtttgaagctgtgatctcatggatcaattatgagaaagaaacccgtttagagcacatggcaaagctgatggaacatgtccgacttcctctcttacctagggactacctagtccaaacggttgaagaagaagctttgataaagaataacaacacctgtaaagacttcctcattgaggccatgaaataccatctcctccctctggatcagagactattgattaagaacccaaggaccaagcccaggactccagtcagccttcccaaggggttggagtgcttagcggacagctgtacgccacaggtgggcatgatgggcctttggtgaggaagagcgttgaggtttacgatcctggaacaaatacctggaagcaagtggcagacatgaacatgtgccggcgcaacgcaggggtctgtgcagtaaatgggctcctgtatgtggttggaggggatgatggatcctgcaacttggcttcggtggagtactacaatcctgtcactgacaaatggacgctgcttccaacgaacatgagcacggggcggagctatgcaggtgttgccgtgattcacaagtccttgtgacccaaactcctactgccaggaggtggaggaaggagcaggtgctgcctgtgactctgaacagcaggaccttggtgactggattcaacttgcttgggagggtctgtgctgctgtgagaaccgctctcctctgacttggcagactggtgttgttcatcgcag

SEQ ID NO: 145322 - DNA, 6566 bp, Homo sapiens
  Payload ID: 8719
  Gene Symbol: KLHL3
  Gene Name: kelch-like family member 3
  Uniprot ID: Q9UH77
  ENST ID: ENST00000506491
  CDS Start-End: 451-1968
agatttatatatttttaaggcccattggctttgcctaaaccttggtaaacagatactaaaaatctccagtaacattgcaaaattttgttctaattatcaggttcagcttcaaaacgtgtaaaatgcattgtgtactgagagtaagaggctgactctcgttagatccatttctatcagtgtgtttaaagccaaaaggaaagtaaaatacacatggctttcttctgacttgagttgtgtgattatggtcttttactcaagcttaaatgtttttatttttttgtcttccgagttcatgttgcccaaatgtcctgaggtggttccaaataccaatcccacacttcttgaccattgtcctgtggacaataacttggaataaatgtgaaactgaagtctgagtgcccatcagagagtgtcccaatccaaccagtctataagaagatctggggtgacatgtctgagagtaaagccaaaaagatagaaatcaaggacgtggatgggcagacgctgagtaagctgattgactacatctatactgctgaaatcgaggtgactgaagagaatgtccaggtgctgctcccggcagccagcttgctgcagctcatggatgttcggcagaactgctgtgacttcctgcagtctcagttgcatcccaccaattgcctgggcatccgtgcatttgcagatgtacacacctgcactgaccttctgcagcaggccaatgcctacgcagagcagcactttccagaggtgatgctaggagaagaatttcttagcctgagtctggaccaggtgtgcagcttgatatccagcgacaagctgaccgtttcttcagaagagaaggtgtttgaagctgtgatctcatggatcaattatgagaaagaaacccgtttagagcacatggcaaagctgatggaacatgtccgacttcctctcttacctagggactacctagtccaaacggttgaagaagaagctttgataaagaataacaacacctgtaaagacttcctcattgaggccatgaaataccatctcctccctctggatcagagactattgattaagaacccaaggaccaagcccaggactccagtcagccttcccaaggtcatgattgtggttggcggccaggcacccaaggcaatccgcagtgtggagtgctatgatttcgaggaggaccggtgggatcagattgctgagcttccttccagaagatgcagagcaggtgtggtgttcatggctggccacgtgtatgccgtgggagggtttaatggctcactgcgggtgcggacagtggatgtgtatgacggcgtgaaggaccagtggacgtccattgccagcatgcaggagcgccggagcacactgggcgcagcggtgctcaatgacttgctctacgcagtgggaggctttgatggcagtactggcctagcatcggtggaagcctacagctacaagaccaacgagtggttctttgtggccccgatgaacacgcggcggagcagtgtgggtgtgggcgttgtggaggggaagctatatgctgttgggggttatgatggagcttcccgccagtgtctgagcactgtggagcagtacaacccagcgaccaatgaatggatatacgtggcggacatgagcacccgccgcagtggcgcaggggttggagtgcttagcggacagctgtacgccacaggtgggcatgatgggcctttggtgaggaagagcgttgaggtttacgatcctggaacaaatacctggaagcaagtggcagacatgaacatgtgccggcgcaacgcaggggtctgtgcagtaaatgggctcctgtatgtggttggaggggatgatggatcctgcaacttggcttcggtggagtactacaatcctgtcactgacaaatggacgctgcttccaacgaacatgagcacggggcggagctatgcaggtgttgccgtgattcacaagtccttgtgacccaaactcctactgccaggaggtggaggaaggagcaggtgctgcctgtgactctgaacagcaggaccttggtgactggattcaacttgcttgggagggtctgtgctgctgtgagaaccgctctcctctgacttggcagactggtgttgttcatcgcagtgtggacaccattacccacccccgttcccctgaggtgctctggcctatgccctgagcaaggggggtcttgacatccccaggcagcacctttgggctttgttttggtgtttctacagggacaatacagaccctggagtgtgtgtgtgtgtgtgtgtgtgtgtagaccatggtgtttctctatgtttctctaagttggggggtgagcgtgtgtgacagtctactggatttctttactactgatcctttcgctgtgttaaaaatcaagtcacagagacctctcttctggatttgtcccatggggaccctgagactactaaagctgctttcttctgaaggtccagttggacagtctgggaatgtccagaaataaccagtgagaggggcagttctctggccacacccacttatgtactttaactactgtgactttgtctgcagaagagctggaaaattctcgaagctgcaccgtgtcctctgtgtgctagaataagggacaaatgggttccctgtgcttctcagctcactgtttttccttgagttctcctacaggaagcagatgagaactgcccagtcttcaggtttaggccattggtctttgatgtcatagattccaggcctgggaggtgttatgtctcttcagctgggaaaactagctcttcagagaagcctcgggtaacactgaaaaacaaaacaaaacaaaacaaaaacaggaaaaaaacaaaaaaccaaagtggtaaggattcagttcctgcctataatggtctcagagagggtcctacttttaggttttcccaggacaggacagtccccatttatacttattatcccagtttaattattcacagcaccccattttactcagaagtgttctggtctggaggataaataagaggtcaccctcctccagacccaaagatagatttgtgcctgtgttggatggggtcgtgtgtgattcagatggacattggatggcttcaaaggaatataccactagagctggcccttggcactttgtgacagtggtcaagtctgtctaatgtccttgtcttctttttcttgtgctttccccctattccagggtgtgcaccctctccccaacccccaagaaccccactactgctttccctgtgaggtaggagatatcagtgggccttggatttgaggcttcctaagatgtgcttgcattttaaaaagggagcttggtgagagctttgctaattcacaggtaaaaattattaacaatagaacttcaagcatcttgaggagcgggcatttgagggggcatggagtaatttgtatttaaaaaaccttaaagttgtgctgttcctaaactagcaaattgctcatgctgaaatttctggcataagcaggggaagtcttgtgtctggagaatagtctcataccttgcagtctgggacaccctccctactttgagaatccacctacaggaagccaaggaactttataaatcctgatgttggacttctgatacgactgggctacttccaagcaggtgctgcaggagattggcatcccccagcccctgcagttagaaaccccgaagtcttcccagccagtgagccactttgtgtatttactgtatatttattgtgccctaaatgtgcaactctcctaaagacaaaacttctctttctgatgttaagcacatgttacttcaacaagatgcttggagaacaacaaggtacccagaatttttagaagccttcagaagaggctaaaatatccagctttgggggacctggaagaaatgtctccaaaggaagcaaggcatgttttagttgagtgctctggtctcactatgaagtggggatgactgtggcttcataactctacctggctgtgggttggaagctgatggaatgagaaatgtcctttctccttctctgaggaaattttgagacttgtttcggtgtgtctgtgtgatggggatgaggctggggttgggatctgatgtatgccattcacagaagctctcaatttcagatgataggtgaattccctgcccctcccccaccactgagaagctagactttcatgcgggagaggctacttttatgtgtcgtcttccggggaagggtccctccactgaaagctagccagtcatgttttctgtttttggatttttgcaattggtttcacctcatgtctccctccctacaaagcactgcctctactgggcgtgctgccaaggccatgtgcactccatcctcatgtatcctttttcacggggaccagaacactggtacgtcatcaccaaagccaatctgctctagctgcccacagatgccaccaaaacctgctatctcttcatcaccaggtacgattctctttccacagtggacacagcaggctattttctagtttgtgctggtcacgtggtagatgaagcctcttactgccccacttagggtggccacggctgcttgtgaatgcagctttgccagtggcatatctgtcatctgattgcggtggtgaaatggaattgaggcccaaggttagaagcagccgagacgccacttggatactgatttgaacaatgtagaagtcagattctgaattccaaagttatttctcataagtacccaatggcatctctccatctacaaagttgcagtattatgcaaataaaactgacctcattttctgctatgcaataagaatacttaattctagttcccgacaagccagttgcaatatcccctaagatgctttttgagctgtcttactttgatatctgttgtgtaatgtttgtatatttctgagccagatcctttcaaagattgcctttttataaaattgaagctatagcttttaggctaaaattttaacgtagatatttttataagatatttttttcaagagtttgaatcgctttttattgtccatgataatgaaatgttgtgttctttgcatcattcactctcaaacgtagttcatgcctgtagctctcttccttttgtttctcacccttcagaaacatatttttcagtagctccaggtagatgagccttttttttttttttaaaaataccatattcaagggagtctgctgaattttaaaacgcagtcactggtgtttcttgaattgctagggactgatgttatgttcgactcagcacttgcccgtctgtattgattgtgtctttttttttttttttggagtctgctttctgtgggggtgaggccgggctgtctcgtggtggctcccactgacgggcactgagcctggtaccctgtggcatggagaagcctcagggaaaggcctgcccccccagcacatactcccatagtgtcctaggtccagccgaccattccttattctcttctatctccttgttgatctgaagcttccaatagcttgaggcctttgctgctggatgatgccctttttgggagcatcttgtctctaacctttaaaagaggggtcaatcctcatgatccctgtgtgttaagcatatgctttgcaggtgctcacactacacttacaacttgcttcttgagctatgtctctactccaggctctgttttgtgtatttatctgccatttgcatcatggtttttaaaatttattattattattattattgttgggacaggtgccatttaaattgcctccatgctccccatttgcacctagctggatcaagttgggaggctgagcaaactcatattccagttagttggagtttttaaaggctctgtttgcctggagaagcaaggaggttagaatgtaatttttttaagcgtttgcactatttagagtcctaagcccctcatgttcagctgtgctgtgtttctactgaccaagcaggagagccagcagcacttccagcatttgggaatggaagagatttcttctgtagtggataattacagcctcatagcccctgtgcagccttcgtcatgggactcagtgactcatggatatagcatcagccatggcaggaatgcacaggactgtggcatttgcagcatcaaatcaccctagtgccatgtttggttatgagattgtaaattattcgctcccccatcctcccctcccctcattttcagtggcaatagaggacccttgttgtacttcttgtttaatttgcatattatgtgtaaaatgctttcgttgaaagaaaactgaagacactgaatgtgtatgtctgtgtgggtgctctgtccctgtggttgtcatagccagtcagacttgatcactgacaccccgtacaacatattgcataggtaagatcctcgatctggtgttctctgcgtggctgttagggactgtatatcttgtaaaagaacacttgtcacatgcttgatcagttacagcaatagctgaagaaacatttcctcaaatgtattattttaacaggaatcatgttctaatttcccatcctttaattttaataaaagctgaactgtgtgaa

SEQ ID NO: 145323 - DNA, 1570 bp, Homo sapiens
  Payload ID: 8719
  Gene Symbol: KLHL3
  Gene Name: kelch-like family member 3
  ENST ID: ENST00000505853
  CDS Start-End: 370-1570
agatgcagaggaagctggaaaggtggcagtgcacctgggtcgctggagctgccgccgttcctaggagaccaaggagcagcaagcctgcgggggagggggagcaagtgggttgctgcttttagcagctgaaagggctgcagggagctctgggtaagacattttctgttgctgctgcttttgcggtagaagctgctgcgagtaagtcagaggaaggaggattgagaagggaggaggcttcacttgcagccatgctgaatcactgttgctgatcagatttcccactggtctgctgggagaatcaagaacagaactaggatccccgagtgcatacacagttcagcagctaccaccctggctgggcctcacacaatggagggtgaaagtaaacagctgttgtgtgacgtgatgattgtggcagaagatgtcgagatagaagcccaccgtgtggtcctggcagcctgcagcccctacttctgtgcgatgttcacaggtgacatgtctgagagtaaagccaaaaagatagaaatcaaggacgtggatgggcagacgctgagtaagctgattgactacatctatactgctgaaatcgaggtgactgaagagaatgtccaggtgctgctcccggcagccagcttgctgcagctcatggatgttcggcagaactgctgtgacttcctgcagtctcagttgcatcccaccaattgcctgggcatccgtgcatttgcagatgtacacacctgcactgaccttctgcagcaggccaatgcctacgcagagcagcactttccagaggtgatgctaggagaagaatttcttagcctgagtctggaccaggtgtgcagcttgatatccagcgacaagctgaccgtttcttcagaagagaaggtgtttgaagctgtgatctcatggatcaattatgagaaagaaacccgtttagagcacatggcaaagctgatggaacatgtccgacttcctctcttacctagggactacctagtccaaacggttgaagaagaagctttgataaagaataacaacacctgtaaagacttcctcattgaggccatgaaataccatctcctccctctggatcagagactattgattaagaacccaaggaccaagcccaggactccagtcagccttcccaaggtcatgattgtggttggcggccaggcacccaaggcaatccgcagtgtggagtgctatgatttcgaggaggaccggtgggatcagattgctgagcttccttccagaagatgcagagcaggtgtggtgttcatggctggccacgtgtatgccgtgggagggtttaatggctcactgcgggtgcggacagtggatgtgtatgacggcgtgaaggaccagtggacgtccattgccagcatgcaggagcgccggagcacactgggcgcagcggtgctcaatgacttgctctacgcagtgggaggctttgatggcagtactggcctagcatcggtggaagcctacagctacaagaccaacgagtggttctttgtggccccgatgaacacgcggcggagcagtgtgggtgtgggcgttgtggagg

SEQ ID NO: 145324 - DNA, 3726 bp, Homo sapiens
  Payload ID: 8720
  Gene Symbol: KLHL30
  Gene Name: kelch-like family member 30
  Uniprot ID: Q0D2K2
  ENST ID: ENST00000409223
  CDS Start-End: 108-1844
ctgtgttctcagcttcgaggtccaggctgagtgagaggagctcgggcggctccaggcacttcttcccttgagtgggtggactactgaggtcccctgggcacggcgtcatggtgcggaacgtggatgacctggatttccacctgccctcgcatgcccaggacatgctggatggcctgcagcgcctgcgctctcagcccaagctggccgacgtcacactgctggtgggcggccgggagctgccatgccaccgcggcctcctggcgctcagcagcccctacttccatgccatgtttgcgggtgacttcgccgagagcttctctgcgcgcgtggagctgcgggacgtggagcccgccgtggtgggacaactggtggacttcgtgtacacaggccggctgaccatcacgcagggcaacgtggaggcgctgacacgcacggctgcgcgcctgcacttcccctcggtgcagaaggtctgcggccgctacctgcagcagcaactggatgccgccaactgcctgggcatctgtgagttcggggagcagcaagggctgctgggcgtggctgccaaggcctgggccttcctgcgagagaactttgaggctgtggcacgtgaggacgagttcctgcagcttccccgagagcggctggtcacttgtctggccggcgacctgctgcaggtacagccggagcaaagccgactcgaggccctgatgcgctgggtgcgccatgacccgcaggcccgggccgcccacctgcccgagctgctcagcctagtgcacctggacgccgtgcccaggccctgcgtgcagcaactgctggcctcagagcccctgatccaggagtcagaggcatgccgggcagccctgtcccagggccatgatggggcaccactcgccctccagcagaagctggaggaggtcctggtggtggtgggcgggcaggcgctggaggaggaggaggcaggtgaggagcccacccccggccttgggaactttgccttctacaacagcaaggccaagaggtggatggcacttccagacttccccgactatcacaagtggggtttctccctggcggccctgaacaacaacatctatgtcacaggtggctctcggggcacaaagacagacacctggtcaaccacccaggcctggtgcttccccctgaaggaggcctcctggaagcccgtggcgcccatgctgaagccccgcaccaaccacgccagcgcggccctcaatggggagatctacgttatcggcggcaccaccctggacgtggtggaggtggagagctatgacccctacacggacagctggacgcccgtcagcccggccctcaaatacgtcagcaacttctcggctgccggctgccggggccggctctacctggtgggctccagcgcctgcaagtacaacgccctggccctgcagtgctacaaccctgtcacagatgcgtggagtgtgatcgcctcgcccttcctgcccaagtacctgtcctcgcctcgctgtgctgcactgcacggggagctctacctcattggggacaacaccaagaaggtctacgtgtacgaccccggggccaacctgtggcagaaggtgcagtcacagcacagcctgcatgagaatggcgcgctggtgccactgggtgatgcgctgtacgtgacgggcggccgctggcagggcatggaaggtgactaccacgtggagatggaggcctacgacacggttcgggacacctggacccgccacggcgccctgccccggctctggctctaccacggggcctccaccgtcttcctggatgtctccaagtggacccagccctccggccccacccaggagcactaaaccagggccagggtccccggggaggagtccccacagcggcccctcatcagcctgtggaacggcccctttcattttcgcttatttgttcactcggagctaccattccttccaagctgcgctcaggccaccaggggtgatcagacggcatggcttggaggacacagccttggtctctgtggccaccacactaaactctgagctgagcagtgacaagggcctgagtgccagacgctggcataacagggacaggaagctctgctgcccctggggttcccgagacctcagagaggggagccgggggccgggccagcattcccagagcttgcgagccccactcctgcccctggaccccagcaggggcttttggagcagttgcatgaatgtggggtgaacacggagcgtcccagaaagctgaggctgctggggaaggcaggccccggagatgggatcagcaccaggtcctcgtgggcctgcttctgcccagctcacggcagcgtaactgtggccagccacctcccctctctgggcttcaagctccgcgtccaccacacacggggctggctgtgtgggctttgggtccccactcaggctttgcatgttggtgctgtgtttctgcttctgtggacaaaggaggcccccacccatctcttgcacccagagggcggtgcccacagaggcaccaggaaggagggaggcagggcgtggggcggggctggagggtcccagggaggtgagcagttttgctctcagaagggattgcctccgtctctgtgtgtcagaacaaaggctcttcattagaatggaatttcccaccaggggacgactcttgggtgcattggtggcagcctcctgagggtgaggggtagcatccgatgggcccctgccagcatgcagcccgactccggctggctcaggctccgagtggcttctccctcatcctgaatgaggcacccacctttgcagctaaggagacaatgaaggactctccctgggtgcccaatggcgtgtccctcctgtcacaggctccgccctgggacatggggctagaagtcaggagtcgggcccggccaggcacaggccctggtgttgccccagaggccctgggcagctccggtctcccgccggatccaggcttcctctccaggaccagcccctgggttcctccttaacaccccccgcccctggggaccagaggggcctctgacatccttgggttctgaggacggaaacccctgagcctcttgagcttctgtaggtagggatctgctttgctcccagacctgcctctcatagcttttttttttttttttttttttttttgagacggagtctcgctcttgtcgtccaggctggagtgcaatgctgagatcttggctcactgcaacctccacctcccgggttcaagagattctcctgccttagcctctcaagtagctgggattacaggcactcgccaccacgcctgactaatttttgtatttttagtagaaacagggtttcaccatgttgaccaggctggtcttgaactcctgacctcaggtgatccgcccgcctcagcctcccaaagtgctgggattacaaggtgtgggagaagtgagttgaccctggagggccagacagagtggggcctctgggtgctaccaaaggaacaagagcccagagctgaggagaccttcggtggcagatggattggatgaagcaagggtgagggtttctggggccctgggctctgtttccatgtggaaatctgaaatgttttctagacagtgatggaaggaggtcagccaaagggctgtttaaaaacaaagcctccatgtaaaccatttctgcaagaatattttaaaataaataaaaataaaactgaagacatgaaatgtcaaaa

SEQ ID NO: 145325 - DNA, 5743 bp, Homo sapiens
  Payload ID: 8721
  Gene Symbol: KLHL31
  Gene Name: kelch-like family member 31
  Uniprot ID: Q9H511
  ENST ID: ENST00000370905
  CDS Start-End: 142-2046
accggattttccttctccctctctctatctccacagatcccttcccaagaggagtctcctgctaaaacttcatcatctcaagttgacctgccacttcacccaaggaggcaagctcttgcctgtaacagtgtatttgccaacatggcacccaaaaagaagattgtcaaaaagaacaaaggagatatcaatgagatgactataatcgtagaagatagccccctaaacaaactgaatgctttgaatgggctcctagagggaggcaatggccttagctgcatttcttctgaactaacagatgcttcttatggccccaacctcttggaaggtttaagtaaaatgcggcaggagaacttcctatgtgacttagtcattggtaccaaaaccaaatcctttgatgttcataagtcagtcatggcttcatgcagtgagtatttttacaacatcctaaaaaaagacccgtcaattcagagggtggatctcaatgatatctcaccactaggcctggccactgtcattgcatatgcctacactggaaagctcactctctccttgtatacaataggaagcattatttctgctgctgtttatcttcagatccatactcttgtaaagatgtgcagtgattttctgatacgggagatgagtgttgagaattgcatgtatgttgttaatattgctgaaacatactccctaaaaaatgcaaaagcagcagcccagaaatttattcgggataacttccttgaatttgcagaatcggatcagtttatgaaacttacatttgaacaaattaatgaacttcttatagatgatgacttacagttgccttctgagatagtagcattccagattgcaatgaaatggttagaatttgaccaaaagagagtaaaatacgctgcagatcttttgagcaatattcgctttggtaccatctctgcacaagacctggtcaattatgttcaatccgtaccaagaatgatgcaagatgctgattgtcacagacttctcgtagatgctatgaactaccacttgcttccatatcatcaaaacacattgcaatctaggcgaacaagaatccgaggtggctgccgagtcctcgtcactgttgggggacgcccaggccttactgagaagtcccttagcagagacatcttgtatagagaccctgaaaatggatggagcaagcttacggaaatgccagccaaaagttttaatcagtgtgtggctgtgatggatggatttctttatgtagccggtggtgaagaccagaatgatgcaagaaatcaagccaagcatgcagtcagcaatttctgcagatacgatccccgcttcaacacctggatacacctggccagcatgaaccagaagcgcacgcacttcagcctgagcgtgttcaacgggctcgtgtacgccgcgggcggccgcaacgcagaaggaagcctggcctcgctggagtgctacgtgccctccaccaatcagtggcagccgaagacgcccctggaggtggcgcgctgctgccacgctagcgcggtcgccgacggccgcgtgctggtgaccggaggctacatagccaacgcctactcgcgctctgtgtgcgcctacgacccggccagcgactcgtggcaggagctgccgaacctcagcacaccccggggctggcactgcgcggtcacgctgagcgacagagtgtacgtgatgggcggcagccagctggggccgcgcggggagcgcgtggacgtgctcaccgtggagtgctacagccccgcgaccggccagtggagctacgcggcgccgctgcaggtgggagtgagcactgcgggcgtctcggcgctgcatggccgcgcctacctggtggggggctggaacgagggcgagaagaagtacaagaagtgcatccagtgcttcagccccgagctcaacgagtggacggaggacgacgagctacccgaggccactgtcggcgtgtcctgctgcaccctctcgatgcccaacaacgtgactcgggaatcccgggccagttcggtatcttctgtgccagtcagtatctgagcccaggtagatgcagggacgcaggaagaacacgttatttattcgtagagccacgtggttaacctctgagttcgcgaaaaggaaaatatttaacatttactacactgattgtattgtaaaatatgtcgaggcacatgtcctgatggctttaaattcctggtatggcataatctacctcttttttttttttttttttttagcaaaatacagggcaatggccaacaaaagaaacaatttatttcagcggccactgggtggcagacggaattcgttataggcactctcccaaggcggcatgtttcctaaatgtatagcggttacacccacatttgagattttttcctctacacgttagtacacttgaggtttatgtaagtgatttcatgttcaaaagtttattttcctctctctcttttttctttaggaagttgaagatattcatatagattttatttatttaaaaatggaaattgtcgatctccataaagacttaagatttaattctgtatttcaacgcaattttccccccatatgtgattgagtaaaggattttgaaagatatcccatgacaacgtaataaagcttaaaacaagatctgaccgaaaaggaatagggattccacccagggaccctaaatttgataacctttgtgttagcggacattcctcttcctccatgcctcaggccccagtttattttctaccataaaatcatgctctcaatgaagtaattgatatgaatcatttaatttatagcataaatttaagtcatttggttgtttcaactagaaggatttgcattttatcccttgtcctctattaaagaagaatttcacataccctgggagccttaccctcaccctaaaaactacaccaacctggttaaaggcaaccttggccctaatgtacaccccgcgaagatcaccaaataaaactatgtccctaaggaccattagccttaagcttagagagcttgaagtttacacaaccaataacaataattttatttgccccaatcttttatatgataagaatgatagaaacatttggaatttgtagatttggtagtaactggatgaatgggttctcctgttgataaatgccattgtttcccatttaatatggatcctcctgatttcttaagtaaaaatcaagcactcatctcacgtatataaaaatatatactcattctgtcctatttttattaatctcatctgctccaaatgagctttggatttataatcaaagtgtacccacttgatagcacttttcctatatgtttgccaagttttggggaaagggaatgactgtagtaaatgatacatattttccttttttataatttatcactttattctttgacagtttatttgttttggagaggaagtggcctatcaattatgggttatgtgcaattggattttgaaaaataaaacaagctatttaggaattgaacatgagatatatggaaatataatttggtttttgttaatctcatcctctccaccttgtgtagataggttattgctagttatgatatttatttctaaaatatgttatttgaactgtgaaaagtggttcatatagtacactttgtggaacaattttatatcattaccccgatgaaaagttcaatctctggatatttaatgataacactcaggtaagggctacaaacgctgtaaattaagaacaagatattattaatgtaaaagcgctgggctgtttccttatcccacacaaagaatcttttaccttggtatatgtggatatggtatattaccttggtgtatgtatatgtgtgtatacgcacacactcatacaactgagaagcctatagtatatggttaatttttggagaaaagggtgttttattgtgggttacagatcataagtgagtgaatagatgtaattccttgatgcacaccaatagatgtgttcccattgacatcttagaagtattgtatgaagaggaggacctagggcttgaaatgaaatgagaatcaatcaattgcaacattacatgatggaataatgagaagagatactgaaactagaggatttttcatctatcaaagcttgataaattaggttgtgcaaaaacttggcagtggctttctagagatgaaactggagacatgttagtgctggataaatcatttaaaattaccatttaatttattttctacattgtttatctgaagactcagaaaatccacatatttgagcttaccagactcttgggtgcattgctgttctatcttctgcttcaacagttaggaaaataaagaccaatatgaatttggaatgtcagaatttctgacataacacattggcgaggagtatggaatgtaagggtcggtgaaagtttcatatcctggaacatcttgcattgccaattgaaagacataaaagtatgcagaatcaaaataatatgtgtccactttcatgtgtaagtgaaacatattctttacaccaactattgaagcagttgctcctagaaacctagtttctccagatttcccaagtggaaaatatttagtatgttttaagcttacattcaattactccagagtcttaggacccaaccatatacttccttttattttttattaaagaaaatgacttgttatttttgtaacggctgagtcctgtgatcaaataaaagcatcagttcaatatatcagggaaattgcatgttacccagcaactgaaataataaaattcaagctctctttttctaaatgggccagagacctgatgagaaagtctccaggaagccaaactttaacatactttgtccatttttagttaggttcttggtgccaagttgtcatccctgatgcattagttgctttcagtgcattgaatgaattttatttttacttcctatgttgtaagaatggttttgaatagaaggtcagtgatggtacagattcgtataattttaaaacatgattagatggtagtgaagtgttatgagtgaggaggtataattgatgtcatgaggaagtgagtactgaatggttctatgatttaaggtaaagcagcagttgtagtaagtgtattttacaaatacacatgtaaatagaggtttacctggaaatatgtacgttctaaaaggtcaattttttaattttatttttttgctggttatcctggccaagtgtcttcagaactcatccaagttacgagacgaaataaactaaaatcacctcattaatttttttcccttagttacaaccaaatgaatttatgtaatctctgaatgaactacatccctattccagccgctgatgaatatgttctccagcacaaggcagcattaaaaggaaatacttttcagtatttcttttcatgccaaaaaacctacagaataattttccaaacagtcctttattcgtaattataagaattaaacaatctaaaatattaaagatttaccctccagcacattcactgggtaaagaccatttaatttgccctctcagggaatttgaaataaattatttgtcctggatattctttaaaaactttttatttattcagcaaattttggcaaaaaaatttctttctttgcttaaaacattctggtactatataaggaacaacaaactaaaatgtatgtagtgttattttgtaatctcatcactatcaataaagctgcattcaataagaccttagtcaatgactaaata

SEQ ID NO: 145326 - DNA, 1905 bp, Homo sapiens
  Payload ID: 8721
  Gene Symbol: KLHL31
  Gene Name: kelch-like family member 31
  Uniprot ID: Q9H511
  ENST ID: ENST00000407079
  CDS Start-End: 1-1905
atggcacccaaaaagaagattgtcaaaaagaacaaaggagatatcaatgagatgactataatcgtagaagatagccccctaaacaaactgaatgctttgaatgggctcctagagggaggcaatggccttagctgcatttcttctgaactaacagatgcttcttatggccccaacctcttggaaggtttaagtaaaatgcggcaggagaacttcctatgtgacttagtcattggtaccaaaaccaaatcctttgatgttcataagtcagtcatggcttcatgcagtgagtatttttacaacatcctaaaaaaagacccgtcaattcagagggtggatctcaatgatatctcaccactaggcctggccactgtcattgcatatgcctacactggaaagctcactctctccttgtatacaataggaagcattatttctgctgctgtttatcttcagatccatactcttgtaaagatgtgcagtgattttctgatacgggagatgagtgttgagaattgcatgtatgttgttaatattgctgaaacatactccctaaaaaatgcaaaagcagcagcccagaaatttattcgggataacttccttgaatttgcagaatcggatcagtttatgaaacttacatttgaacaaattaatgaacttcttatagatgatgacttacagttgccttctgagatagtagcattccagattgcaatgaaatggttagaatttgaccaaaagagagtaaaatacgctgcagatcttttgagcaatattcgctttggtaccatctctgcacaagacctggtcaattatgttcaatccgtaccaagaatgatgcaagatgctgattgtcacagacttctcgtagatgctatgaactaccacttgcttccatatcatcaaaacacattgcaatctaggcgaacaagaatccgaggtggctgccgagtcctcgtcactgttgggggacgcccaggccttactgagaagtcccttagcagagacatcttgtatagagaccctgaaaatggatggagcaagcttacggaaatgccagccaaaagttttaatcagtgtgtggctgtgatggatggatttctttatgtagccggtggtgaagaccagaatgatgcaagaaatcaagccaagcatgcagtcagcaatttctgcagatacgatccccgcttcaacacctggatacacctggccagcatgaaccagaagcgcacgcacttcagcctgagcgtgttcaacgggctcgtgtacgccgcgggcggccgcaacgcagaaggaagcctggcctcgctggagtgctacgtgccctccaccaatcagtggcagccgaagacgcccctggaggtggcgcgctgctgccacgctagcgcggtcgccgacggccgcgtgctggtgaccggaggctacatagccaacgcctactcgcgctctgtgtgcgcctacgacccggccagcgactcgtggcaggagctgccgaacctcagcacaccccggggctggcactgcgcggtcacgctgagcgacagagtgtacgtgatgggcggcagccagctggggccgcgcggggagcgcgtggacgtgctcaccgtggagtgctacagccccgcgaccggccagtggagctacgcggcgccgctgcaggtgggagtgagcactgcgggcgtctcggcgctgcatggccgcgcctacctggtggggggctggaacgagggcgagaagaagtacaagaagtgcatccagtgcttcagccccgagctcaacgagtggacggaggacgacgagctacccgaggccactgtcggcgtgtcctgctgcaccctctcgatgcccaacaacgtgactcgggaatcccgggccagttcggtatcttctgtgccagtcagtatctga

SEQ ID NO: 145327 - DNA, 708 bp, Homo sapiens
  Payload ID: 8722
  Gene Symbol: KLHL32
  Gene Name: kelch-like family member 32
  ENST ID: ENST00000369254
  CDS Start-End: 53-472
tgattcctctgcacacttctaaggctgagaacctgaggaacccagctggaaaatgccgtctgaacgctgcctcagtattcaagaaatgctgacaggccagaggctctgccactccgaatctcacaatgacagtgtcctggcagcgctgaatcagcagaggagtgatggcatcctctgcgacatcaccctgattgctgaggaacagaaattccatgctcacaaggcagtcctagcagcatgcagtgactatttccgggcaatgttcagtctttgtatggtggaaagtggagctgatgaggttaatttgcacggtgtgaccagccttggcttaaagcaggctctggagtttgcatacacaggacagattttgctggagccaggtgtgatccaggatgtgctagcagcgggcagtcacctacagctgttggagcttctcaatttatgctcccactatctcatccaggtggagtaactaatacggcacaatatcagaacaggctaatggtgtatgaacctaaccagaataagtggataagccgtagccccatgctgcagagaagggtctaccattccatggctgctgtacaaaggaagctttatgttcttggaggcaatgacctagactacaataatgaccggatccttgtgcgccatatagattcttacaacatagacactgaccagtggacacgttgtaatttcaacctg

SEQ ID NO: 145328 - DNA, 3698 bp, Homo sapiens
  Payload ID: 8722
  Gene Symbol: KLHL32
  Gene Name: kelch-like family member 32
  Uniprot ID: Q96NJ5
  ENST ID: ENST00000369261
  CDS Start-End: 364-2226
tttactagggagcagtttccccgcgcgacagttcgggagcgcgcaggcagtcgcgcgcacacacgcacgcaggcacacacacacacacacacacacacacacacacactttcgcacacacaaacacgctaggacgctcgtcttcgctactgcatccccgaaccagcagagcgaagctactgcgggttctgttaacctcagcatcgtggggcgaagcagagccattgtgcatcaaggagaggccggtgcctgcgctgccgtctctggcacctaacccagcagaccgctcaccccatcggctggaatgcttgctgattcctctgcacacttctaaggctgagaacctgaggaacccagctggaaaatgccgtctgaacgctgcctcagtattcaagaaatgctgacaggccagaggctctgccactccgaatctcacaatgacagtgtcctggcagcgctgaatcagcagaggagtgatggcatcctctgcgacatcaccctgattgctgaggaacagaaattccatgctcacaaggcagtcctagcagcatgcagtgactatttccgggcaatgttcagtctttgtatggtggaaagtggagctgatgaggttaatttgcacggtgtgaccagccttggcttaaagcaggctctggagtttgcatacacaggacagattttgctggagccaggtgtgatccaggatgtgctagcagcgggcagtcacctacagctgttggagcttctcaatttatgctcccactatctcatccaggaattaaatagctttaattacttggatctgtacagacttgctgacctctttaacctcactttgttggagaaggcagtgatcgatttcttagtgaaacatctctctgaactcctgaagagccgcccagaagaagttctaacgcttccctattgcctgcttcaggaggtgctgaagagcgaccgcctgacctccctgagtgaagagcagatctggcagctagctgtgaggtggttggaacacaactgccactaccagtacatggacgagctcctgcaatacatccgctttggcctaatggatgtggatactctccatacagttgccctgtcccacccccttgtccaagcaagtgagactgcaacagcccttgtcaacgaggccctggaataccaccagagcatctatgcacagcctgtctggcagactcgcaggaccaaaccacgattccagtcagacactctgtatatcattggtgggaaaaagcgcgaggtctgcaaggtcaaggaacttcggtacttcaatcctgttgatcaggagaatgctctcatagctgccattgccaactggagtgagctggctcccatgcctgtgggaaggagccaccattgtgtggcagtcatgggggacttcctgtttgtggcaggaggggaagttgagcatgccagtggccggacgtgtgctgtgaggactgcctgtcgctatgacccccgcagtaattcctgggcagagatagcacccatgaaaaactgccgggagcattttgtgctgggtgccatggaggaatacctctatgcagttgggggcagaaatgaactgcgccaggttctgcctacagttgagcgatattgccccaagaagaacaaatggacttttgttcagtcctttgacagatccctttcatgccatgctggatatgtggctgatggtcttctttggatatcaggtggagtaactaatacggcacaatatcagaacaggctaatggtgtatgaacctaaccagaataagtggataagccgtagccccatgctgcagagaagggtctaccattccatggctgctgtacaaaggaagctttatgttcttggaggcaatgacctagactacaataatgaccggatccttgtgcgccatatagattcttacaacatagacactgaccagtggacacgttgtaatttcaacctgctgactggccaaaatgaatctggagttgctgtccataatgggagaatatatttagttggtggatattcaatttggacaaatgagcctctggcttgtatccaggtactggatgtaagcagagaaggcaaagaagaagtattctatgggcctacactcccttttgcttccaatggaatagcagcatgcttccttccagctccatattttacatgccctaaccttcaaactcttcaagtgcctcatcacaggattggcaccatctgaaaagccaagccatcatgaacaggaggaaaacatagctctgactgttggatactgggcatgaaaagactcagtgctccatgcttccttgtcttgctttataggtcttatattcggataaatttaagcaaaaaatgaacaattttctaaaatacgttattgaaaactcgtcacccttctcagtgtatgtcaacattcaatatgtatgacttttattgtggtatagcttagtgccaatttaaggtatattgtgttccatgggtctttagagcattctttgtacactttttctaatcagcactgtcttaagacaacataacactgttagtaaggcaatttattggacacaatggcatcgatgatcttaaaaatatatatattctgtacttaatccctttattatttaaagccgggcttgtaatttttctttttaaaatttaacattatgcagccctgctcagtagagactcactcagcattatgacatcataaatttttaaatgccatattttattcaaggtgatacgaataataatagacatacactggaacagcagttgttgaaatacccagatttttcaccttggttactctgaccttgggtcagaacctaactttacagtgcttcagttttcccaccttttaaggaggataattactgatttccacgttaatttaaaagaacattatgaggattaggcgaacactttgtaatactttgcccaagaaaaagaaaaatgttgttactgaaattataaggtattttattgtctttagaaccttgtaattgaacagggagattatttttgaagtttaaaaattactagatagaatttggaaacatgttgtggaataaatgattctaaaaagcatgtgaaagagacacacaatgaggaaatagggagtttctcaaaatctaaacttgtacaggtatctaaacttgcctcaagtaactctcagatgtcttatttaaaatcatttagtgaaaaatgacatttaaagctaaaaaataatttagttgtactaattatggtaccataaagtgctttgacataaatttgaacctagaattggcagttctaataaaagtttttccactttgttaaaggttatgtcaatcttgagtgcttgtggaattcttcaccaccaatacatattttattactatctcttttaataatgcataggaattcttttttagactagtttttgggtttgctttgtctataacaaaaaataaatacaacaacttaataatcacatttgaaaacaaatttaacaagtataatgtgagtttttcttttttcctaacttcctcaggacctaggtcacctttattaaaaggaagaattcactcttttttccttggcagtttaatcattcaggaatccctctcttaaaggaaattgttattttattcatgtaacctttttttgtaatcaaaagtgaataaaaacgatctttttgtcttacag

SEQ ID NO: 145329 - DNA, 791 bp, Homo sapiens
  Payload ID: 8722
  Gene Symbol: KLHL32
  Gene Name: kelch-like family member 32
  ENST ID: ENST00000447886
  CDS Start-End: 1-531
attttgctggagccaggtgtgatccaggatgtgctagcagcgggcagtcacctacagctgttggagcttctcaatttatgctcccactatctcatccaggaattaaatagctttaattacttggatctgtacagacttgctgacctctttaacctcactttgttggagaaggcagtgatcgatttcttagtgaaacatctctctgaactcctgaagagccgcccagaagaagttctaacgcttccctattgcctgcttcaggaggtgctgaagagcgaccgcctgacctccctgagtgaagagcagatctggcagaagtgtggaatttgtgctgccttttgtgcactgaggggagactggtgccctggcttacctcaatgggatgacaagactgctagctgtgaggtggttggaacacaactgccactaccagtacatggacgagctcctgcaatacatccgctttggcctaatggatgtggatactctccatacagttgccctgtcccacccccttgtccaagcaagtgagactgcaacagcccttgtcaacgaggccctggaataccaccagagcatctatgcacagcctgtctggcagactcgcaggaccaaaccacgattccagtcagacactctgtatatcattggtgggaaaaagcgcgaggtctgcaaggtcaaggaacttcggtacttcaatcctgttgatcaggagaatgctctcatagctgccattgccaactggagtgagctggctcccatgcctgtgggaaggagccaccattgtgtgg

SEQ ID NO: 145330 - DNA, 3699 bp, Homo sapiens
  Payload ID: 8722
  Gene Symbol: KLHL32
  Gene Name: kelch-like family member 32
  Uniprot ID: Q96NJ5
  ENST ID: ENST00000536676
  CDS Start-End: 473-2227
ggcgtctgaacccgccccgggggtgccaaggtgcgtctccagtctgacgcgaccgcctggggcggagtcagcgggacgtgccacctgcagtgctggctagggctttttatttactagggagcagtttccccgcgcgacagttcgggagcgcgcaggcagtcgcgcgcacacacgcacgcaggcacacacacacacacacacacacacacacacacactttcgcacacacaaacacgctaggacgctcgtcttcgctactgcatccccgaaccagcagagcgaagctactgcgggttctgttaacctcagcatcgtggggcgaagcagagccattgtgcatcaaggagaggccggtgcctgcgctgccgtctctggcacctaacccagcagaccgctcaccccatcggctggaatgcttgctgattcctctgcacacttctaaggctgagaacctgaggaacccagctggaaaatgccgtctgaacgctgcctcagtattcaagaaatgctgacaggccagaggctctgccactccgaatctcacaatgacagtgtcctggcagcgctgaatcagcagaggagtgatggcatcctctgcgacatcaccctgattgctgaggaacagaaattccatgctcacaaggcagtcctagcagcatgcagtgactatttccggattttgctggagccaggtgtgatccaggatgtgctagcagcgggcagtcacctacagctgttggagcttctcaatttatgctcccactatctcatccaggaattaaatagctttaattacttggatctgtacagacttgctgacctctttaacctcactttgttggagaaggcagtgatcgatttcttagtgaaacatctctctgaactcctgaagagccgcccagaagaagttctaacgcttccctattgcctgcttcaggaggtgctgaagagcgaccgcctgacctccctgagtgaagagcagatctggcagctagctgtgaggtggttggaacacaactgccactaccagtacatggacgagctcctgcaatacatccgctttggcctaatggatgtggatactctccatacagttgccctgtcccacccccttgtccaagcaagtgagactgcaacagcccttgtcaacgaggccctggaataccaccagagcatctatgcacagcctgtctggcagactcgcaggaccaaaccacgattccagtcagacactctgtatatcattggtgggaaaaagcgcgaggtctgcaaggtcaaggaacttcggtacttcaatcctgttgatcaggagaatgctctcatagctgccattgccaactggagtgagctggctcccatgcctgtgggaaggagccaccattgtgtggcagtcatgggggacttcctgtttgtggcaggaggggaagttgagcatgccagtggccggacgtgtgctgtgaggactgcctgtcgctatgacccccgcagtaattcctgggcagagatagcacccatgaaaaactgccgggagcattttgtgctgggtgccatggaggaatacctctatgcagttgggggcagaaatgaactgcgccaggttctgcctacagttgagcgatattgccccaagaagaacaaatggacttttgttcagtcctttgacagatccctttcatgccatgctggatatgtggctgatggtcttctttggatatcaggtggagtaactaatacggcacaatatcagaacaggctaatggtgtatgaacctaaccagaataagtggataagccgtagccccatgctgcagagaagggtctaccattccatggctgctgtacaaaggaagctttatgttcttggaggcaatgacctagactacaataatgaccggatccttgtgcgccatatagattcttacaacatagacactgaccagtggacacgttgtaatttcaacctgctgactggccaaaatgaatctggagttgctgtccataatgggagaatatatttagttggtggatattcaatttggacaaatgagcctctggcttgtatccaggtactggatgtaagcagagaaggcaaagaagaagtattctatgggcctacactcccttttgcttccaatggaatagcagcatgcttccttccagctccatattttacatgccctaaccttcaaactcttcaagtgcctcatcacaggattggcaccatctgaaaagccaagccatcatgaacaggaggaaaacatagctctgactgttggatactgggcatgaaaagactcagtgctccatgcttccttgtcttgctttataggtcttatattcggataaatttaagcaaaaaatgaacaattttctaaaatacgttattgaaaactcgtcacccttctcagtgtatgtcaacattcaatatgtatgacttttattgtggtatagcttagtgccaatttaaggtatattgtgttccatgggtctttagagcattctttgtacactttttctaatcagcactgtcttaagacaacataacactgttagtaaggcaatttattggacacaatggcatcgatgatcttaaaaatatatatattctgtacttaatccctttattatttaaagccgggcttgtaatttttctttttaaaatttaacattatgcagccctgctcagtagagactcactcagcattatgacatcataaatttttaaatgccatattttattcaaggtgatacgaataataatagacatacactggaacagcagttgttgaaatacccagatttttcaccttggttactctgaccttgggtcagaacctaactttacagtgcttcagttttcccaccttttaaggaggataattactgatttccacgttaatttaaaagaacattatgaggattaggcgaacactttgtaatactttgcccaagaaaaagaaaaatgttgttactgaaattataaggtattttattgtctttagaaccttgtaattgaacagggagattatttttgaagtttaaaaattactagatagaatttggaaacatgttgtggaataaatgattctaaaaagcatgtgaaagagacacacaatgaggaaatagggagtttctcaaaatctaaacttgtacaggtatctaaacttgcctcaagtaactctcagatgtcttatttaaaatcatttagtgaaaaatgacatttaaagctaaaaaataatttagttgtactaattatggtaccataaagtgctttgacataaatttgaacctagaattggcagttctaataaaagtttttccactttgttaaaggttatgtcaatcttgagtgcttgtggaattcttcaccaccaatacatattttattactatctcttttaataatgcataggaattcttttttagactagtttttgggtttgctttgtctataacaaaaaataaatacaacaacttaataatcacatttgaaaacaaatttaacaagtataatgtgagtttttcttttttcctaacttcctcaggacctaggtcacctttattaaaaggaagaattcactcttttttccttggcagtttaatcattcaggaatccctctcttaaaggaaattgttattttattcatgtaacctttttttgtaatcaaaagtgaataaaaacgatctttttgtcttacag

SEQ ID NO: 145331 - DNA, 3600 bp, Homo sapiens
  Payload ID: 8722
  Gene Symbol: KLHL32
  Gene Name: kelch-like family member 32
  Uniprot ID: Q96NJ5
  ENST ID: ENST00000539200
  CDS Start-End: 473-2128
ggcgtctgaacccgccccgggggtgccaaggtgcgtctccagtctgacgcgaccgcctggggcggagtcagcgggacgtgccacctgcagtgctggctagggctttttatttactagggagcagtttccccgcgcgacagttcgggagcgcgcaggcagtcgcgcgcacacacgcacgcaggcacacacacacacacacacacacacacacacacactttcgcacacacaaacacgctaggacgctcgtcttcgctactgcatccccgaaccagcagagcgaagctactgcgggttctgttaacctcagcatcgtggggcgaagcagagccattgtgcatcaaggagaggccggtgcctgcgctgccgtctctggcacctaacccagcagaccgctcaccccatcggctggaatgcttgctgattcctctgcacacttctaaggctgagaacctgaggaacccagctggaaaatgccgtctgaacgctgcctcagtattcaagaaatgctgacaggccagaggctctgccactccgaatctcacaatgacagtgtcctggcagcgctgaatcagcagaggagtgatggcatcctctgcgacatcaccctgattgctgaggaacagaaattccatgctcacaaggcagtcctagcagcatgcagtgactatttccgggaattaaatagctttaattacttggatctgtacagacttgctgacctctttaacctcactttgttggagaaggcagtgatcgatttcttagtgaaacatctctctgaactcctgaagagccgcccagaagaagttctaacgcttccctattgcctgcttcaggaggtgctgaagagcgaccgcctgacctccctgagtgaagagcagatctggcagctagctgtgaggtggttggaacacaactgccactaccagtacatggacgagctcctgcaatacatccgctttggcctaatggatgtggatactctccatacagttgccctgtcccacccccttgtccaagcaagtgagactgcaacagcccttgtcaacgaggccctggaataccaccagagcatctatgcacagcctgtctggcagactcgcaggaccaaaccacgattccagtcagacactctgtatatcattggtgggaaaaagcgcgaggtctgcaaggtcaaggaacttcggtacttcaatcctgttgatcaggagaatgctctcatagctgccattgccaactggagtgagctggctcccatgcctgtgggaaggagccaccattgtgtggcagtcatgggggacttcctgtttgtggcaggaggggaagttgagcatgccagtggccggacgtgtgctgtgaggactgcctgtcgctatgacccccgcagtaattcctgggcagagatagcacccatgaaaaactgccgggagcattttgtgctgggtgccatggaggaatacctctatgcagttgggggcagaaatgaactgcgccaggttctgcctacagttgagcgatattgccccaagaagaacaaatggacttttgttcagtcctttgacagatccctttcatgccatgctggatatgtggctgatggtcttctttggatatcaggtggagtaactaatacggcacaatatcagaacaggctaatggtgtatgaacctaaccagaataagtggataagccgtagccccatgctgcagagaagggtctaccattccatggctgctgtacaaaggaagctttatgttcttggaggcaatgacctagactacaataatgaccggatccttgtgcgccatatagattcttacaacatagacactgaccagtggacacgttgtaatttcaacctgctgactggccaaaatgaatctggagttgctgtccataatgggagaatatatttagttggtggatattcaatttggacaaatgagcctctggcttgtatccaggtactggatgtaagcagagaaggcaaagaagaagtattctatgggcctacactcccttttgcttccaatggaatagcagcatgcttccttccagctccatattttacatgccctaaccttcaaactcttcaagtgcctcatcacaggattggcaccatctgaaaagccaagccatcatgaacaggaggaaaacatagctctgactgttggatactgggcatgaaaagactcagtgctccatgcttccttgtcttgctttataggtcttatattcggataaatttaagcaaaaaatgaacaattttctaaaatacgttattgaaaactcgtcacccttctcagtgtatgtcaacattcaatatgtatgacttttattgtggtatagcttagtgccaatttaaggtatattgtgttccatgggtctttagagcattctttgtacactttttctaatcagcactgtcttaagacaacataacactgttagtaaggcaatttattggacacaatggcatcgatgatcttaaaaatatatatattctgtacttaatccctttattatttaaagccgggcttgtaatttttctttttaaaatttaacattatgcagccctgctcagtagagactcactcagcattatgacatcataaatttttaaatgccatattttattcaaggtgatacgaataataatagacatacactggaacagcagttgttgaaatacccagatttttcaccttggttactctgaccttgggtcagaacctaactttacagtgcttcagttttcccaccttttaaggaggataattactgatttccacgttaatttaaaagaacattatgaggattaggcgaacactttgtaatactttgcccaagaaaaagaaaaatgttgttactgaaattataaggtattttattgtctttagaaccttgtaattgaacagggagattatttttgaagtttaaaaattactagatagaatttggaaacatgttgtggaataaatgattctaaaaagcatgtgaaagagacacacaatgaggaaatagggagtttctcaaaatctaaacttgtacaggtatctaaacttgcctcaagtaactctcagatgtcttatttaaaatcatttagtgaaaaatgacatttaaagctaaaaaataatttagttgtactaattatggtaccataaagtgctttgacataaatttgaacctagaattggcagttctaataaaagtttttccactttgttaaaggttatgtcaatcttgagtgcttgtggaattcttcaccaccaatacatattttattactatctcttttaataatgcataggaattcttttttagactagtttttgggtttgctttgtctataacaaaaaataaatacaacaacttaataatcacatttgaaaacaaatttaacaagtataatgtgagtttttcttttttcctaacttcctcaggacctaggtcacctttattaaaaggaagaattcactcttttttccttggcagtttaatcattcaggaatccctctcttaaaggaaattgttattttattcatgtaacctttttttgtaatcaaaagtgaataaaaacgatctttttgtcttacag

SEQ ID NO: 145332 - DNA, 2864 bp, Homo sapiens
  Payload ID: 8722
  Gene Symbol: KLHL32
  Gene Name: kelch-like family member 32
  ENST ID: ENST00000544166
  CDS Start-End: 862-1392
ggcgtctgaacccgccccgggggtgccaaggtgcgtctccagtctgacgcgaccgcctggggcggagtcagcgggacgtgccacctgcagtgctggctagggctttttatttactagggagcagtttccccgcgcgacagttcgggagcgcgcaggcagtcgcgcgcacacacgcacgcaggcacacacacacacacacacacacacacacacacactttcgcacacacaaacacgctaggacgctcgtcttcgctactgcatccccgaaccagcagagcgaagctactgcgggttctgttaacctcagcatcgtggggcgaagcagagccattgtgcatcaaggagaggccggtgcctgcgctgccgtctctggcacctaacccagcagaccgctcaccccatcggctggaatgcttgctgattcctctgcacacttctaaggctgagaacctgaggaacccagctggaaaatgccgtctgaacgctgcctcagtattcaagaaatgctgacaggccagaggctctgccactccgaatctcacaatgacagtgtcctggcagcgctgaatcagcagaggagtgatggcatcctctgcgacatcaccctgattgctgaggaacagaaattccatgctcacaaggcagtcctagcagcatgcagtgactatttccgggcaatgttcagtctttgtatggtggaaagtggagctgatgaggttaatttgcacggtgtgaccagccttggcttaaagcaggctctggagtttgcatacacaggacagattttgctggagccaggtgtgatccaggatgtgctagcagcgggcagtcacctacagctgttggagcttctcaatttatgctcccactatctcatccaggtggagtaactaatacggcacaatatcagaacaggctaatggtgtatgaacctaaccagaataagtggataagccgtagccccatgctgcagagaagggtctaccattccatggctgctgtacaaaggaagctttatgttcttggaggcaatgacctagactacaataatgaccggatccttgtgcgccatatagattcttacaacatagacactgaccagtggacacgttgtaatttcaacctgctgactggccaaaatgaatctggagttgctgtccataatgggagaatatatttagttggtggatattcaatttggacaaatgagcctctggcttgtatccaggtactggatgtaagcagagaaggcaaagaagaagtattctatgggcctacactcccttttgcttccaatggaatagcagcatgcttccttccagctccatattttacatgccctaaccttcaaactcttcaagtgcctcatcacaggattggcaccatctgaaaagccaagccatcatgaacaggaggaaaacatagctctgactgttggatactgggcatgaaaagactcagtgctccatgcttccttgtcttgctttataggtcttatattcggataaatttaagcaaaaaatgaacaattttctaaaatacgttattgaaaactcgtcacccttctcagtgtatgtcaacattcaatatgtatgacttttattgtggtatagcttagtgccaatttaaggtatattgtgttccatgggtctttagagcattctttgtacactttttctaatcagcactgtcttaagacaacataacactgttagtaaggcaatttattggacacaatggcatcgatgatcttaaaaatatatatattctgtacttaatccctttattatttaaagccgggcttgtaatttttctttttaaaatttaacattatgcagccctgctcagtagagactcactcagcattatgacatcataaatttttaaatgccatattttattcaaggtgatacgaataataatagacatacactggaacagcagttgttgaaatacccagatttttcaccttggttactctgaccttgggtcagaacctaactttacagtgcttcagttttcccaccttttaaggaggataattactgatttccacgttaatttaaaagaacattatgaggattaggcgaacactttgtaatactttgcccaagaaaaagaaaaatgttgttactgaaattataaggtattttattgtctttagaaccttgtaattgaacagggagattatttttgaagtttaaaaattactagatagaatttggaaacatgttgtggaataaatgattctaaaaagcatgtgaaagagacacacaatgaggaaatagggagtttctcaaaatctaaacttgtacaggtatctaaacttgcctcaagtaactctcagatgtcttatttaaaatcatttagtgaaaaatgacatttaaagctaaaaaataatttagttgtactaattatggtaccataaagtgctttgacataaatttgaacctagaattggcagttctaataaaagtttttccactttgttaaaggttatgtcaatcttgagtgcttgtggaattcttcaccaccaatacatattttattactatctcttttaataatgcataggaattcttttttagactagtttttgggtttgctttgtctataacaaaaaataaatacaacaacttaataatcacatttgaaaacaaatttaacaagtataatgtgagtttttcttttttcctaacttcctcaggacctaggtcacctttattaaaaggaagaattcactcttttttccttggcagtttaatcattcaggaatccctctcttaaaggaaattgttattttattcatgtaacctttttttgtaatcaaaagtgaataaaaacgatctttttgtcttacag

SEQ ID NO: 145333 - DNA, 2642 bp, Homo sapiens
  Payload ID: 8722
  Gene Symbol: KLHL32
  Gene Name: kelch-like family member 32
  ENST ID: ENST00000620278
  CDS Start-End: 700-1170
ggttcactgcagattatcaatcagtggaaagtgatagaagcaatggatcagcagaatgggtatagaggcaatgttcagtctttgtatggtggaaagtggagctgatgaggttaatttgcacggtgtgaccagccttggcttaaagcaggctctggagtttgcatacacaggacaggccatgcctcttctgcaagactatacaacatccttgctcctctgatgggagctgcactaatttcgtgaatgtcagtcaaagcctccttccttgaggagttggcgaaagacgggtttctctttctgactagatggaaaaggagatataaagatttttcagaataagatgagtattttgctggagccaggtgtgatccaggatgtgctagcagcgggcagtcacctacagctgttggagcttctcaatttatgctcccactatctcatccaggaattaaatagctttaattacttggatctgtacagacttgctgacctctttaacctcactttgttggagaaggcagtgatcgatttcttagtgaaacatctctctgaactcctgaagagccgcccagaagaagttctaacgcttccctattgcctgcttcaggaggtgctgaagagcgaccgcctgacctccctgagtgaagagcagatctggcaggtggagtaactaatacggcacaatatcagaacaggctaatggtgtatgaacctaaccagaataagtggataagccgtagccccatgctgcagagaagggtctaccattccatggctgctgtacaaaggaagctttatgttcttggaggcaatgacctagactacaataatgaccggatccttgtgcgccatatagattcttacaacatagacactgaccagtggacacgttgtaatttcaacctgctgactggccaaaatgaatctggagttgctgtccataatgggagaatatatttagttggtggatattcaatttggacaaatgagcctctggcttgtatccaggtactggatgtaagcagagaaggcaaagaagaagtattctatgggcctacactcccttttgcttccaatggaatagcagcatgcttccttccagctccatattttacatgccctaaccttcaaactcttcaagtgcctcatcacaggattggcaccatctgaaaagccaagccatcatgaacaggaggaaaacatagctctgactgttggatactgggcatgaaaagactcagtgctccatgcttccttgtcttgctttataggtcttatattcggataaatttaagcaaaaaatgaacaattttctaaaatacgttattgaaaactcgtcacccttctcagtgtatgtcaacattcaatatgtatgacttttattgtggtatagcttagtgccaatttaaggtatattgtgttccatgggtctttagagcattctttgtacactttttctaatcagcactgtcttaagacaacataacactgttagtaaggcaatttattggacacaatggcatcgatgatcttaaaaatatatatattctgtacttaatccctttattatttaaagccgggcttgtaatttttctttttaaaatttaacattatgcagccctgctcagtagagactcactcagcattatgacatcataaatttttaaatgccatattttattcaaggtgatacgaataataatagacatacactggaacagcagttgttgaaatacccagatttttcaccttggttactctgaccttgggtcagaacctaactttacagtgcttcagttttcccaccttttaaggaggataattactgatttccacgttaatttaaaagaacattatgaggattaggcgaacactttgtaatactttgcccaagaaaaagaaaaatgttgttactgaaattataaggtattttattgtctttagaaccttgtaattgaacagggagattatttttgaagtttaaaaattactagatagaatttggaaacatgttgtggaataaatgattctaaaaagcatgtgaaagagacacacaatgaggaaatagggagtttctcaaaatctaaacttgtacaggtatctaaacttgcctcaagtaactctcagatgtcttatttaaaatcatttagtgaaaaatgacatttaaagctaaaaaataatttagttgtactaattatggtaccataaagtgctttgacataaatttgaacctagaattggcagttctaataaaagtttttccactttgttaaaggttatgtcaatcttgagtgcttgtggaattcttcaccaccaatacatattttattactatctcttttaataatgcataggaattcttttttagactagtttttgggtttgctttgtctataacaaaaaataaatacaacaacttaataatcacatttgaaaacaaatttaacaagtataatgtgagtttttcttttttcctaacttcctcaggacctaggtcacctttattaaaaggaagaattcactcttttttccttggcagtttaatcattcaggaatccctctcttaaaggaaattgttattttattcatgtaacctttttttgtaatcaaaagtgaataaaaacgatctttttgtcttacag

SEQ ID NO: 145334 - DNA, 1863 bp, Homo sapiens
  Payload ID: 8723
  Gene Symbol: KLHL33
  Gene Name: kelch-like family member 33
  Uniprot ID: A6NCF5
  ENST ID: ENST00000344581
  CDS Start-End: 224-1825
ccaggcccctggtcccaaggaaccttccctttccagccttgtccctagaggaagaagaggaagaggaagaagatgaagatgcggcagagcccgagtggctgcgcagcgaggagcatccgagccagtttttcgccgaggcccagcggctgcgggagcagagactgttgctggacgaagagtgcaccgagccgccctggcctgtggcagtgagttctttggggccatgctcctgagcgggatgagggaatcccagggcacagaggtatctctgcggacgatctccacccaggacctgcgactcctcgtctcttttgcttactccggagttgtgcgggcaaggtggccagggctactgagagctgcccaggctgctctgcagtaccagagctcttcctgcttggatttgtgtcagaaaggcttggcacggggcctcagccctgcccgttgcctggccctgttccccatggcggaagcccctgggttggagaggctctggagcaaagcccgtcactacctcctcacccacctgcctgctgtagccttgtgtcctgctttcccttctttaccagctgcctgcttggctgagctcctggatagtgatgagctccatgtgcaggaggagtttgaggcctttgtggctgcacggtgttggctggctgccaaccccgagacccaggagtcagaggccaaggccctgctgcgatgtgtccgctttggccgcatgtccaccagggagttgcggagggtgcgggcagccgggctacttccacccctgaccccagatctgttgcaccagctgatggtagaggctgatgttccaggccaagagagacggagggagcctgaccgggcactggtagtgattggcggggatgggctcagaccagacatggccctaagacaaccatcccgagcagtgtggtgggcccgggccttccgctgtggcgtgggactggtacgaactgttgagtgggggcagctgcctgccctgcctgcccccggacgcttccggcatggggctgcaagcctggcaggaagtgaactctatgtgtgtgggggacaagatttctacagtcactccaacaccctggcttcaactctcaggtgggagcccagtcaagaggactgggaggagatggctcctttgtcccaggctcgaagccttttctccttggtggcactggatggaaaactttatgccctgggtggaagacacaatgatgttgccctggactctgtggagacctacaaccctgagctcaatgtctggaggccagcacctgcacttccagcaccatgttttgcccacgcagctgcgattttggagggccagttgtacgtgagcggtggctgtggtgggactggccaatacctggcctcactgatgcactatgaccccaaacttgagaagccagggacgtttctgagccctatgggggtacctcgggctggccatgtcatggctgcattgggtgggaggttgtatgtggcaggtgggctgggtgagactgaggacctgctaagctttgaggcctatgaactaaggactgatagctggactcacctggcacccctaccctccccccatgtgggggctgcaagtgctgtgctgcagggggagctactggtgctcgggggctacagtcaccgtacttatgccctctctcaccttatccatgcctactgtcctggcctgggccgatggctctgcctgggaactctgccaaggcctcgggctgagatgcctgcctgcatcctgacactgcccgctgtgcagcacatagctttggttcccaccccacaccaaaccaaacctgctgggtgaagagggagcaacagtgtatggggagaggagggcataag

SEQ ID NO: 145335 - DNA, 3641 bp, Homo sapiens
  Payload ID: 8724
  Gene Symbol: KLHL34
  Gene Name: kelch-like family member 34
  Uniprot ID: Q8N239
  ENST ID: ENST00000379499
  CDS Start-End: 543-2477
agttgtccccggccttcgcgggtgcccgcagaacccgtcctcctcgtccaccccggagaggtcagagtcctcgccctgcactcccgggacgccgcatctgcgccgtcggacatccagcacccccggagtccaccggcaactcggttcttccaggtgatggtgtgcagccaccgccgcccctggcgtgcaggtgtgggctctccacattgggccggggaggggacttcgggcaacgcgctggaagcctcggcagtcgtggaaaccaagccccacactcccgggaagcctccaaattccgcgccctccgttactaggggcctccgaaaaccgtttccagactggatttgctctgagaggggcactgggcgatctgcaggtctggatgaaggagccctgggctttaaactgagcaggcagaaatgggcccctgctaggggctctgtggcttacgcgggggtcccgggagtgttgtgccccgggatgcctccggccctgcccagcaggcctctggtcccaccaggctgcttccagccctgggtagaatgagttacttcctgtcttactgcaaagctcatggcggcgcgctgctcaccggctaccaggccctgcgcgccgagggcttcctgtgcgacgtgacactggagaccgagggcagcgaattcccggcgcacaggtcgctcctggcgtgctccagtgactacttcagggccctgttcaagagccacacccaggaatcccgggcgcgcgtgatccacctgcacgtgccatcggcagccggcctgcagcgcctgctggacttcatctacactgcctggctgtcgctttccatggacactgtagaggacactctggaggccgccagctacctgcaggtcactgaggccctggggctctgtgggcgctacttggagcgccagctggctccagagaactgctgcttcgccgccaacgtggcagcgcgctttggcctggctcacacgctggacgcggccgagcgctgcatcgtgagccacttgcaggagctgctggcgcggggcgcgggccccgcgggactcctggagctcaaccctacatcgctgagggctgtactgggtgcccccgacgtggcgcgggtgcccgaggcccggctactgggcctggcgttagcttggttgcggcaggagcccacaactgagcgcctggcacactgtacagagttgctggagcgtgtccgctttggcctggttcccgccgacgtactgcggcgcgtgtactcgggctctggcctcgtgctgcccgcccgggtcaagggcctcatcatccaggccctcaactaccacacgacgccctcccgccagccgctcatgcagggcgagcagaccagcatccggagcccccagacccgcatcttgttggtgggggggcgcagggcacgggaggtggtgattgaggaggtcgcggccccgcagagggcagctaggggccaggtcgccgccccagagcccgaggaagaagaggaagagttggaggaagaggaggaggaggaggagtgggagctcacccagaacgtggtggccttcgatgtgtacaatcaccgctggcgcagccttacgcagctacccacaccactgctggggcacagcgtgtgcaccgcgggcaacttcctgtttgtcctgggtggggagagcccttccggcagtgcatcctctcccctggccgacgactcgcgggtggtcacggcccaagtgcaccgttacgacccgcgcttccacgcttggacggaagtgcccgccatgcgggaagcgcgggcccacttctggtgcggcgcggtgggcgagaggctcctggccgtcgggggcctgggtgcgggcggtgaggtgctggcctcggtggagatgtacgacctgcgtcgggaccgctggacggcggctggggcactaccgcgggctctgcacggtcacgcgggggccgtcggggaccgcggtgttgtgtacatctcggggggcaaggcagggagaggcgagggcggagcgagcagcctccgggacttatacgtcctgggccctgaggagcaggtttggagcaagaaggcacccatgggcaccgcacgtttcgggcaccacatggcagtgctgcgcggcgctgtgtttgcttttctggggcgatacgagcccttctctgagatcgagcgctacgaccccggcgccgaccagtggactcggttgcggccgctgccctacgaccgcttctgctatgggctggccgtggtcgaggagacagcgttgctgctgggcggcctcaagtggcgggactcgcgccaggtgcctacccgcaacgtagtgggctacgacctcgacctggaccgttgggaggacatcggctgcgcgttgccctgggcctggagcggcctgcggtgcgcagtgctgcagctggccgagggtggggacgacgagagggagggagaggttggagaggcgctagatttggtgctgggctgaatgggtcagtccggtttccttccgcaatggaggagaaagtcgcgcttggttagtcttacagagcaacggatgggctttttctaagaaagggattctgggagcagagtggcttctgaaggttaacaggcaaacaaggccttgagcaaagagaaacatttctccttgagctgagaatgggagacagcggggcggggggtcaaatagaaggctatatgaatcaacttcagtgagctggtgaaagaaaatttttagaaaggctcacgcaaggctagagaaggactttcacaaataaaatatgaccttattttccctcttacagttaaagtgtttccctaggtgcaaaacagtgattacttatgtgccaaaaaaaaaaaaaaaaaaaaaaggccaaaaaatgtaccacaggaagtttatacaaaactcagaaaattgttggctataaaggctgtaattaagtcctaggagatggcattatctgaataaatagtgaaaggagagtgccttggttaaataccatgaaatcattgtaaggagaactatgattttatgatccggagccatggttacagttctgctctgatggtttgatataaatatggaactgagaaggaaaaaaaaaatctctaagcacttttttttaatctagaaagtatccttaaatttttctgtcaccggtgtcaccctaggctgcttttgccctgactttagacagctcactggttttaagtcacatttcatcaacccttagccataataatcaggatcctctggttaagtggaatgtctaaccaaaacaaaacaaaaactgatttctttcatactcttttaaatgttcattctgcagacatactgtagattatatttgtaaaaaaaaatcaatttttggtggttacccccacttcccccaaaagaatcacagagaaaggaaagaggaataggtaaagttttaaacttcgtctcaggtaaatgggaaacgagcttgatttttcagggtcttagataagacacttgtatatactgaacaggtgctgcttttggcttgtatcaccaatgaggcagcaaagttagaactcgaaactagggtggggggtggtggctgtataattaggtcacaaagaaatgtggtaaggactttgcatgaataaagtaggtgctttataagga

SEQ ID NO: 145336 - DNA, 1500 bp, Homo sapiens
  Payload ID: 8725
  Gene Symbol: KLHL35
  Gene Name: kelch-like family member 35
  ENST ID: ENST00000376292
  CDS Start-End: 223-1314
gagggccgcctgcgcgccgccaacagcctagcgctgcgccgcgtggccgccgccttctcgctggccccgctggccgagcgctgcggccgcgtcctgcgtcaggccttcgccgaggtggcgcgccacgccgacttcctggagctggcgcctgacgaggtggtggcgctgctggcggaccccgcgctgggcgtggcgcgcgaggaggccgtgtttgaagcggccatgcgctgggtgcgccacgacgcgccggcccgccgcggccagctgcgacgcctgctggagcacgtgcgcctgccgctactggcgcccgcttacttcctggagaaggtggaggcggacgagctgctgcaggcctgcggcgagtgccgcccgctgctgctcgaggctcgcgcctgcttcatcctgggccgcgaggccggtgcgctgcggacccggccgcggagattcatggacctagctgaagtgatcgtggtcatcggcggttgcgaccgcaaaggtctcctgaagctgcccttcgccgatgcctaccatccagagagccagcggtggaccccactgcccagcctgcccggctacactcgctcagaattcgccgcctgtgctctccgcaatgacgtctacgtctccggaggccacatcaacagtcatgatgtgtggatgtttagctcccatctgcacacctggatcaaggtagcctctctgcacaagggcaggtggaggcacaagatggcagttgtgcaggggcagctgttcgcggtgggtggcttcgacggcctgaggcgcctgcacagcgtggagcgctacgaccccttctccaacacctgggcggccgccgcgcccctcccggaggccgtgagctcggcggcggtggcgtcctgcgcgggcaagctcttcgtgattgggggcgccaggcagggcggcgtcaacacggacaaggtgcagtgctttgaccccaaggaggaccggtggagcctgcggtcaccagcacccttctcacagcggtgtctcgaggctgtctcccttgaggacaccatctatgtcatggggggtctcatgagcaaaatcttcacctatgatccaggcacagatgtgtggggggaggcagctgtcctccccagccctgtggaaagctgtggagtcactgtgtgtgacgggaaggtccacatccttggcgggcgggatgatcgcggagaaagcaccgataaggtcttcacctttgaccccagcagtgggcaggtggaggtccagccatccctgcagcgctgcaccagctcccacggctgtgtcaccatcatccagagcttgggcaggtgattcagatttggacagcctgagccaggaggcggagaggcaggcggagctcagatgcacactctgctccctcatggcacctccacgcaaacagcccttaacttaatggtcccttttcttgtataaataaaatcttgttgggtctgtgttccagctgcagtctgccctgcctggagatggaatgtctaa

SEQ ID NO: 145337 - DNA, 1936 bp, Homo sapiens
  Payload ID: 8725
  Gene Symbol: KLHL35
  Gene Name: kelch-like family member 35
  Uniprot ID: Q6PF15
  ENST ID: ENST00000539798
  CDS Start-End: 1-1752
atgcggcaaggccatgcgccggaggagtcggagccgggctgcgaagcgccgtgcgcgggtccgtgccacgcgcagcgcgtgctgcaggccctgaacgcctaccggcggagcggcaccctcaccgacgtggtgctgcgcgccggcgggcgcgactttccgtgccaccgcgcggcgctcagcgcgggcagcgcctacttccgcagcttgttcgcggccgggcggcccgagcgcggcccggccgtggtgccagtggtgccagtagctcccgaggcgccaggcacgagcccggccggggcggcggcggcgctggccgtggtgctcgactacgtgtacggagcgggcgtgcggctgcgcgcggaggacgaggcggcggccgtgctggcgctggcggagcggctgggcgtggcgggcctgcgcgaggcctgcgtgcgctttctcgagggccgcctgcgcgccgccaacagcctagcgctgcgccgcgtggccgccgccttctcgctggccccgctggccgagcgctgcggccgcgtcctgcgtcaggccttcgccgaggtggcgcgccacgccgacttcctggagctggcgcctgacgaggtggtggcgctgctggcggaccccgcgctgggcgtggcgcgcgaggaggccgtgtttgaagcggccatgcgctgggtgcgccacgacgcgccggcccgccgcggccagctgcgacgcctgctggagcacgtgcgcctgccgctactggcgcccgcttacttcctggagaaggtggaggcggacgagctgctgcaggcctgcggcgagtgccgcccgctgctgctcgaggctcgcgcctgcttcatcctgggccgcgaggccggtgcgctgcggacccggccgcggagattcatggacctagctgaagtgatcgtggtcatcggcggttgcgaccgcaaaggtctcctgaagctgcccttcgccgatgcctaccatccagagagccagcggtggaccccactgcccagcctgcccggctacactcgctcagaattcgccgcctgtgctctccgcaatgacgtctacgtctccggaggccacatcaacagtcatgatgtgtggatgtttagctcccatctgcacacctggatcaaggtagcctctctgcacaagggcaggtggaggcacaagatggcagttgtgcaggggcagctgttcgcggtgggtggcttcgacggcctgaggcgcctgcacagcgtggagcgctacgaccccttctccaacacctgggcggccgccgcgcccctcccggaggccgtgagctcggcggcggtggcgtcctgcgcgggcaagctcttcgtgattgggggcgccaggcagggcggcgtcaacacggacaaggtgcagtgctttgaccccaaggaggaccggtggagcctgcggtcaccagcacccttctcacagcggtgtctcgaggctgtctcccttgaggacaccatctatgtcatggggggtctcatgagcaaaatcttcacctatgatccaggcacagatgtgtggggggaggcagctgtcctccccagccctgtggaaagctgtggagtcactgtgtgtgacgggaaggtccacatccttggcgggcgggatgatcgcggagaaagcaccgataaggtcttcacctttgaccccagcagtgggcaggtggaggtccagccatccctgcagcgctgcaccagctcccacggctgtgtcaccatcatccagagcttgggcaggtgattcagatttggacagcctgagccaggaggcggagaggcaggcggagctcagatgcacactctgctccctcatggcacctccacgcaaacagcccttaacttaatggtcccttttcttgtataaataaaatcttgttgggtctgtgttccagctgcagtctgccctgcctggagatggaatgtct

SEQ ID NO: 145338 - DNA, 1974 bp, Homo sapiens
  Payload ID: 8726
  Gene Symbol: KLHL36
  Gene Name: kelch-like family member 36
  Uniprot ID: Q8N4N3
  ENST ID: ENST00000258157
  CDS Start-End: 132-1793
gccatggctgcgcagcgggctggccgggggtctcctgaacccgggccccgccgccccgaccgcccggccccgccgccggggctgtccccgccgcgtccgtagcgcgtcctgccagggctgaaatctctttaatgatggagggaagcaggcagacgcgagtgtctcggccatacaagatcagcgaatcatcaaaggtataccgctgggccgaccactcaagcacggtgctgcagcggctgaacgagcagcgtctccgcgggctcttctgcgacgtcgtcctggtggccgatgagcagcgtgtgccagcccatcgcaacctgctggccgtgtgcagcgactacttcaactccatgttcaccatcggcatgcgggaagctttccagaaggaggtggagctgatcggcgcctcctacattgggctcaaggccgtggtggacttcctgtacggcggggagctggtgctggatggcggcaacattgactacgtcctggagacggctcacctgctgcagatctggacggtggtagacttctgctgtgagtacctggagcaggaggtgagcgaggacaactacctgtacctgcaggagctggcctccatctacagcctcaagcggcttgatgccttcatcgatggcttcatcctgaaccacttcggcacgctgtcctttacgcccgacttcctgcagaacgtctccatgcagaagctgtgtgtctacctgagcagcagcgaggtgcagcgggagtgtgagcacgacctcctgcaggccgccctgcagtggctgacgcagcagcccgagcgcgaggcccacgcccgccaggtgctggagaacatccacttcccgctcatccccaagaacgacctgctgcaccgcgtcaagccggccgtgtgctcgctgctgcccaaggaggccaactgcgagggcttcatcgaggaggccgtgcgctaccacaacaacctggcggcccagcccgtcatgcagaccaagcgcacggcgctgcgcaccaaccaggagcgcctgctgtttgtgggcggcgaggtctccgagcggtgtctggagctcagtgacgacacctgctacctggacgccaagagcgagcagtgggtcaaagagacgccgctgcccgcccggcggagccaccactgtgtcgcggtgctggggggcttcatcttcatcgccggcggcagcttctcacgggacaacggaggggatgcggcctccaatcttctttataggttcacgtacggccacgcgggcaccatctacaaagacttcgtgtacatctcggggggccacgactaccaaattggcccctaccgcaagaacctgctatgctacgaccaccggacagacgtgtgggaggagcggcggcccatgaccacggcgcgcggctggcacagcatgtgcagcctgggtgacagcatctactccatcgggggcagcgatgacaacatcgagtccatggagcgcttcgacgtgctgggcgtggaggcctacagcccgcagtgcaaccagtggacccgcgtggcgccgctgctgcacgccaacagcgagtcgggcgtggcagtgtgggagggccgcatctacatcctgggcggctacagctgggagaacactgccttctccaagaccgtgcaggtgtacgaccgcgaggccgacaagtggagcaggggcgtcgacctgcccaaggccatcgctggcgggtccgcctgtgtctgcgccctggagccacggccagaggacaagaagaagaaaggcaaaggcaagaggcaccaggaccggggccagtgaccctagctgcgcctcttgggaccatcctcaccgtcacctcccagggctctgtagaccagcagcaacttcttagtattccggaaacattatgtacaacttagcagctttttttacttttatgattcttggtatttctatgatatcacagtaaccaattaaatactatctgtaactttacata

SEQ ID NO: 145339 - DNA, 585 bp, Homo sapiens
  Payload ID: 8726
  Gene Symbol: KLHL36
  Gene Name: kelch-like family member 36
  ENST ID: ENST00000567410
  CDS Start-End: 293-585
ggggctgtccccgccgcgtccgtagcgcgtcctgccaggtgggcctccgcgcgcgcccaccctccagcccgggaccgccaggaagccgcgcccggccggggcggggagctggcggagatcgggagggtccccggccaccgcgagccgcgacccccctgcgccccttggtgccggggcgggcgggtgggcgagtgggggcgccgcggccgggggaggggccgccgcccccgcaggtgacacaggtgcggcctgtgcggaccgccccgcgcgtggcagggctgaaatctctttaatgatggagggaagcaggcagacgcgagtgtctcggccatacaagatcagcgaatcatcaaaggtataccgctgggccgaccactcaagcacggtgctgcagcggctgaacgagcagcgtctccgcgggctcttctgcgacgtcgtcctggtggccgatgagcagcgtgtgccagcccatcgcaacctgctggccgtgtgcagcgactacttcaactccatgttcaccatcggcatgcgggaagctttccagaaggaggtggagctgatcggcgcctcctacattgggctcaa

SEQ ID NO: 145340 - DNA, 508 bp, Homo sapiens
  Payload ID: 8726
  Gene Symbol: KLHL36
  Gene Name: kelch-like family member 36
  ENST ID: ENST00000569472
  CDS Start-End: 162-508
gcctcctcgccgccggctggagcctgctgggcggccgttgcgctgagttccgcctgggctgcggggtccgagcgaacgacagcggcgtccccggagaccccgccggcgagccggtgtcagcagcgtcgctttctccaacgctgagggctgaaatctctttaatgatggagggaagcaggcagacgcgagtgtctcggccatacaagatcagcgaatcatcaaaggtataccgctgggccgaccactcaagcacggtgctgcagcggctgaacgagcagcgtctccgcgggctcttctgcgacgtcgtcctggtggccgatgagcagcgtgtgccagcccatcgcaacctgctggccgtgtgcagcgactacttcaactccatgttcaccatcggcatgcgggaagctttccagaaggaggtggagctgatcggcgcctcctacattgggctcaaggccgtggtggacttcctgtacggcggggagctggtgctggatggcggcaacat

SEQ ID NO: 145341 - DNA, 555 bp, Homo sapiens
  Payload ID: 8726
  Gene Symbol: KLHL36
  Gene Name: kelch-like family member 36
  ENST ID: ENST00000565743
  CDS Start-End: 370-555
gagttccgcctgggctgcggggtccgagcgaacgacagcggcgtccccggagaccccgccggcgagccggtgtcagcagcgtcgctttctccaacgctgaggtcgggagggagcttggggaggaggcgctctgggaaacccccggccggacggggcctgcggtcccatgtttactggaagaccttttccagtgacctgggattgtcactgtgcttgggggtggccttgacccttcacctgcttccaaaaagcgtcggaggccgctgacgtccaacacgggtggaaatcagaccccacccccacgcacttgcaggagacagcagggagcctccggccccgcgaactctctctagggctgaaatctctttaatgatggagggaagcaggcagacgcgagtgtctcggccatacaagatcagcgaatcatcaaaggtataccgctgggccgaccactcaagcacggtgctgcagcggctgaacgagcagcgtctccgcgggctcttctgcgacgtcgtcctggtggccgatgagcagcgtgtgccagcccatcgcaac

SEQ ID NO: 145342 - DNA, 2173 bp, Homo sapiens
  Payload ID: 8726
  Gene Symbol: KLHL36
  Gene Name: kelch-like family member 36
  Uniprot ID: Q8N4N3
  ENST ID: ENST00000564996
  CDS Start-End: 142-1992
tcctggcggagccatggctgcgcagcgggctggccgggggtctcctgaacccgggccccgccgccccgaccgcccggccccgccgccggggctgtccccgccgcgtccgtagcgcgtcctgccagggctgaaatctctttaatgatggagggaagcaggcagacgcgagtgtctcggccatacaagatcagcgaatcatcaaaggtataccgctgggccgaccactcaagcacggtgctgcagcggctgaacgagcagcgtctccgcgggctcttctgcgacgtcgtcctggtggccgatgagcagcgtgtgccagcccatcgcaacctgctggccgtgtgcagcgactacttcaactccatgttcaccatcggcatgcgggaagctttccagaaggaggtggagctgatcggcgcctcctacattgggctcaaggccgtggtggacttcctgtacggcggggagctggtgctggatggcggcaacattgactacgtcctggagacggctcacctgctgcagatctggacggtggtagacttctgctgtgagtacctggagcaggaggtgagcgaggacaactacctgtacctgcaggagctggcctccatctacagcctcaagcggcttgatgccttcatcgatggcttcatcctgaaccacttcggcacgctgtcctttacgcccgacttcctgcagaacgtctccatgcagaagctgtgtgtctacctgagcagcagcgaggtgcagcgggagtgtgagcacgacctcctgcaggccgccctgcagtggctgacgcagcagcccgagcgcgaggcccacgcccgccaggtgctggagaacatccacttcccgctcatccccaagaacgacctgctgcaccgcgtcaagccggccgtgtgctcgctgctgcccaaggaggccaactgcgagggcttcatcgaggaggccgtgcgctaccacaacaacctggcggcccagcccgtcatgcagaccaagcgcacggcgctgcgcaccaaccaggagcgcctgctgtttgtgggcggcgaggtctccgagcggtgtctggagctcagtgacgacacctgctacctggacgccaagagcgagcagtgggtcaaagagacgccgctgcccgcccggcggagccaccactgtgtcgcggtgctggggggcttcatcttcatcgccggcggcagcttctcacgggacaacggaggggatgcggcctccaatcttctttataggtatgacccccgctgtaaacagtggatcaaggtggcctccatgaaccagcgccgtgtggatttctaccttgcctccatcgaagacatgctggtggccatcggcggccggaatgagaacggagcgctctcttcagtagagacgtacagtcccaagactgactcctggtcctatgtggccggcttgccaaggttcacgtacggccacgcgggcaccatctacaaagacttcgtgtacatctcggggggccacgactaccaaattggcccctaccgcaagaacctgctatgctacgaccaccggacagacgtgtgggaggagcggcggcccatgaccacggcgcgcggctggcacagcatgtgcagcctgggtgacagcatctactccatcgggggcagcgatgacaacatcgagtccatggagcgcttcgacgtgctgggcgtggaggcctacagcccgcagtgcaaccagtggacccgcgtggcgccgctgctgcacgccaacagcgagtcgggcgtggcagtgtgggagggccgcatctacatcctgggcggctacagctgggagaacactgccttctccaagaccgtgcaggtgtacgaccgcgaggccgacaagtggagcaggggcgtcgacctgcccaaggccatcgctggcgggtccgcctgtgtctgcgccctggagccacggccagaggacaagaagaagaaaggcaaaggcaagaggcaccaggaccggggccagtgaccctagctgcgcctcttgggaccatcctcaccgtcacctcccagggctctgtagaccagcagcaacttcttagtattccggaaacattatgtacaacttagcagctttttttacttttatgattcttggtatttctatgatatcacagtaaccaattaaatactatctgtaactttacata

SEQ ID NO: 145343 - DNA, 1982 bp, Homo sapiens
  Payload ID: 8727
  Gene Symbol: KLHL38
  Gene Name: kelch-like family member 38
  Uniprot ID: Q2WGJ6
  ENST ID: ENST00000325995
  CDS Start-End: 25-1770
ggggcttccttccctctttgtaggatggacgaggagtcactagatgggctgctcttcaaagaccacgacttctcttctgacttgttgaggcagctcaacagcttaaggcaaagcaggatcctgactgatgtgagcatctgtgccggtgcccgggagatcccctgccaccgcaacgtgctggcctccagcagcccctacttcagggctatgttctgcagcagcttccgggagaagagtgaagccaaagtgcagctgaaaggcattgaccccccaaccctggaccagatcgtctcctacgtgtatacgggggaggcacatattgccactgacaatgtcctccccgtgatggaggccgcctccatgctacagttccccaagctgtttgaggcctgctcctcgtacttgcagagccagttggcccccagcaactgcctgggtatgatcagactctcagaaatcttaagctgcgagaccctcaagaagaaagccagggaggtggcactgacgtccttcccagaggtggccgcatcggccgacctgaaggagctctgtgccttggagttgagggactatctcggagatgatgggctctgtggggaggaggaaaaggtgtttgaggccctcatggtttggatcaagcatgacctccaggcccggaagcgatacatgcaggaactgttcaagcaggtcaggctgcagtacatccacccagccttctttcaccacttcatcgccaacgatgccctcctgcagtcctcgcctgcatgccagatcatcttggagaccgccaagagacagatgttctctttgtgtggcaccaccgtcccagactgcaaactcctgttgcatgtccctccaagaaactcttaccaagatttcctcatcctcttgggcggaaggaaggacagccagcagaccaccagggacgtcctactgtacagcaaacagaccggccaatggcagagccttgccaaactcccgacacggctgtacaaggcctctgccatcaccttgcaccgcagcatctatgtgctggggggcatggctgtcagctcagggaggagtctggtcagtcacaatgtctacatcttctccctgaaactcaatcagtggaggctgggggagcccatgctggtggcccgctactcccacagaagcactgcccataagaacttcatcttctccatcggggggattggagaagggcaggagctcatgggctccatggaaaggtatgacagcatctgcaatgtctgggagagtatggccagcatgcccgtgggggtgctccaccccgcagtcgctgtgaaagaccaaagactctatctctttggaggagaggacatcatgcagaaccctgtgcgccttatccaggtttatcacatttccagaaactcgtggttcaaaatggagacaagaatgatcaagaacgtgtgtgcccctgcagtggtgcttggggagcggattgtcattgtgggaggttacacaaggaggattcttgcttatgaccctcaatccaacaaatttgtcaaatgtgcggacatgaaagaccggaggatgcaccatggggccacagtgatgggaaacaaactctacgtgacgggcgggcggcggctgaccacggactgcaacattgaggactccgcctccttcgattgctacgaccccgagacggacacctggacatcccagggacagctgccgcacaagctctttgaccatgcctgcctcactctccagtgcataccccgcacgtctggcctcccatgaggtcgacaagaaaccttctgccctagtcaaaatgccttctgtcgccagggacacaaacccagctccaaagggcttaacccttaaaggctgcagggagagctcacaagactgaggtaccagagtcgggaggcctggaactaggcattgcattgccagaactctctctctccttctctgcctctctccttatctctctcccccacctccatctg

SEQ ID NO: 145344 - DNA, 2445 bp, Homo sapiens
  Payload ID: 8728
  Gene Symbol: KLHL4
  Gene Name: kelch-like family member 4
  Uniprot ID: Q9C0H6
  ENST ID: ENST00000373114
  CDS Start-End: 81-2243
gaagaggcagaaaaacaagagataacaaaggctccgtttcctttctgtgagagaaggcttttgtctttcctcctgctacgatgtcagtgtctggcaagaaagagtttgatgtgaaacagatcctaaggctacgctggaggtggtttagtcatccttttcaaggttccaccaacactggaagctgtcttcagcaggaaggatatgagcatagagggaccccggttcagggcaggttgaagagccactctcgggacagaaacggactgaagaaaagcaacagtcctgtccaccacaatatactggcaccagtgccaggaccggcccctgcccatcagagagccgttcagaatttgcagcaacataatctgatagtacattttcaagcaaatgaagatactcctaaatcagttccagagaagaatttattcaaagaagcttgtgagaaacgcgcacaagatttggagatgatggctgatgacaatatagaagattctacagcaagattagatacacaacactctgaagacatgaatgccaccagatctgaagagcagttccatgttataaaccacgcagagcaaactcttcgtaaaatggagaactacttgaaagagaaacaactatgtgatgtgctactgattgcaggacacctccgcatcccagcccataggttggttctcagcgcagtgtctgattattttgctgcaatgtttactaatgatgtgcttgaagccaaacaagaagaggtcaggatggaaggagtagatccaaatgcactaaattccttggtgcagtatgcttacacaggagtcctgcaattgaaagaagataccattgaaagtttgctggctgcagcttgtcttctgcagctgactcaggtcattgatgtttgctccaattttctcataaagcagctccatccttcaaactgcttagggattcgatcatttggagatgcccaaggctgtacagaacttctgaacgtggcacacaaatacactatggaacacttcattgaggtaataaaaaaccaagaattcctcctgcttccagctaatgaaatttcaaaacttctgtgcagtgatgacattaatgtgcctgatgaagagaccatttttcatgctctaatgcagtgggtggggcatgatgtgcagaataggcaaggagaactggggatgctgctttcttacatcagactgccattactcccaccacagttactggcagatcttgaaaccagttccatgtttactggtgatcttgagtgtcagaagctcctgatggaagctatgaagtatcatcttttgcctgagagaagatccatgatgcaaagccctcggacaaagcctagaaaatcaactgtgggggcactttatgctgtaggaggcatggatgctatgaaaggtactactactattgaaaaatatgacctcaggaccaacagttggctacatattggcaccatgaatggccgtaggcttcaatttggagtcgcagttattgataataagctctatgtcgtgggaggaagagacggtttaaaaactttgaatacagtggaatgttttaatccagttggcaaaatctggactgtgatgcctcccatgtcaacacatcggcacggcttaggtgtagccactcttgaaggaccaatgtatgctgtaggtggtcatgatggatggagctatctaaatactgtagaaagatgggaccctgagggacgacagtggaattacgtagccagtatgtcaactcctagaagcacagttggtgttgttgcattaaacaacaaattatatgctattggtggacgtgatggaagttcctgcctcaaatcaatggaatactttgacccacacactaacaagtggagtttgtgtgctccaatgtccaaaagacgtggaggtgtgggagttgccacatacaatggattcttatatgttgtaggggggcatgatgcccctgcttccaaccattgctccaggctttctgactgtgtggaacggtatgatccaaaaggtgattcatggtcaactgtggcacctctgagtgttcctcgagatgctgttgctgtgtgccctcttggagacaaactctacgtggttggaggatatgacggacatacttatttgaacacagttgagtcatatgatgcacagagaaatgaatggaaagagagcatgcaagaacttctacaaaacttctataccacacagaagctgaaagagactctggggcactaaattcagatcctttctccacacagcaatgacatttatcaatctgactcaggtgtggctgttgcccctttttgatatggagggaacactgaaagacagtttccttctggagttccaaatgcaatatagaaaaaaaaaccctgtgactctggattttattttaagttctctaacaagactcctaccttgagatcttagtctaggt

SEQ ID NO: 145345 - DNA, 5818 bp, Homo sapiens
  Payload ID: 8728
  Gene Symbol: KLHL4
  Gene Name: kelch-like family member 4
  Uniprot ID: Q9C0H6
  ENST ID: ENST00000373119
  CDS Start-End: 146-2302
agtgggggaggggagagaaagcaagaaagactgctctcggcacttgtgcttttgttagttctacagaagaggcagaaaaacaagagataacaaaggctccgtttcctttctgtgagagaaggcttttgtctttcctcctgctacgatgtcagtgtctggcaagaaagagtttgatgtgaaacagatcctaaggctacgctggaggtggtttagtcatccttttcaaggttccaccaacactggaagctgtcttcagcaggaaggatatgagcatagagggaccccggttcagggcaggttgaagagccactctcgggacagaaacggactgaagaaaagcaacagtcctgtccaccacaatatactggcaccagtgccaggaccggcccctgcccatcagagagccgttcagaatttgcagcaacataatctgatagtacattttcaagcaaatgaagatactcctaaatcagttccagagaagaatttattcaaagaagcttgtgagaaacgcgcacaagatttggagatgatggctgatgacaatatagaagattctacagcaagattagatacacaacactctgaagacatgaatgccaccagatctgaagagcagttccatgttataaaccacgcagagcaaactcttcgtaaaatggagaactacttgaaagagaaacaactatgtgatgtgctactgattgcaggacacctccgcatcccagcccataggttggttctcagcgcagtgtctgattattttgctgcaatgtttactaatgatgtgcttgaagccaaacaagaagaggtcaggatggaaggagtagatccaaatgcactaaattccttggtgcagtatgcttacacaggagtcctgcaattgaaagaagataccattgaaagtttgctggctgcagcttgtcttctgcagctgactcaggtcattgatgtttgctccaattttctcataaagcagctccatccttcaaactgcttagggattcgatcatttggagatgcccaaggctgtacagaacttctgaacgtggcacacaaatacactatggaacacttcattgaggtaataaaaaaccaagaattcctcctgcttccagctaatgaaatttcaaaacttctgtgcagtgatgacattaatgtgcctgatgaagagaccatttttcatgctctaatgcagtgggtggggcatgatgtgcagaataggcaaggagaactggggatgctgctttcttacatcagactgccattactcccaccacagttactggcagatcttgaaaccagttccatgtttactggtgatcttgagtgtcagaagctcctgatggaagctatgaagtatcatcttttgcctgagagaagatccatgatgcaaagccctcggacaaagcctagaaaatcaactgtgggggcactttatgctgtaggaggcatggatgctatgaaaggtactactactattgaaaaatatgacctcaggaccaacagttggctacatattggcaccatgaatggccgtaggcttcaatttggagtcgcagttattgataataagctctatgtcgtgggaggaagagacggtttaaaaactttgaatacagtggaatgttttaatccagttggcaaaatctggactgtgatgcctcccatgtcaacacatcggcacggcttaggtgtagccactcttgaaggaccaatgtatgctgtaggtggtcatgatggatggagctatctaaatactgtagaaagatgggaccctgagggacgacagtggaattacgtagccagtatgtcaactcctagaagcacagttggtgttgttgcattaaacaacaaattatatgctattggtggacgtgatggaagttcctgcctcaaatcaatggaatactttgacccacacactaacaagtggagtttgtgtgctccaatgtccaaaagacgtggaggtgtgggagttgccacatacaatggattcttatatgttgtaggggggcatgatgcccctgcttccaaccattgctccaggctttctgactgtgtggaacggtatgatccaaaaggtgattcatggtcaactgtggcacctctgagtgttcctcgagatgctgttgctgtgtgccctcttggagacaaactctacgtggttggaggatatgacggacatacttatttgaacacagttgagtcatatgatgcacagagaaatgaatggaaagaggaagttcctgttaacattggaagagctggtgcatgtgttgtagtggtgaagctaccctaaagctatctatctttatcaaatggaatgaaactagataatttcaagaaactgagtaggacaaagggagaaagaaatacatgttctttttcctgcaattaataatcagactggaaaattgttgtatcattttaatttgtagttacaattgctttcattcgtgaagccgaaacgtttttaaacatgaattacatatgaattattaagcatatgtgctttcgcagctgataatataaaaggaaatcccacagtctagatatagccccattactacaaaatgctaaaatatttaatgaaaattgatggtggccacagtgtgcaggttataaaagcattaatacatttcaaggtaagagccttaaaagttaaaaacattttcagtttttttttaaaaaacgtactcttattatctggaacatagaaatataaaaggtaacatctaaagcttagaatagtgtgatttttagtaagccattattctcctattcaaataatatcccaaagagctaaacaattccttacatttaccaagaggaaagcttttactgtgttgaagctaaaaaaataatggctctttgacaaaacttgttatgttgatcgcggtatgtcaaaatttttacaggtttgctcatctgccagagcacacatataaatttggtatttcttaacatattatcttgttagatttgttaccagtaaaatattactgtaatttcatatacacagtctatacaatgaaataatgaatatttatcatattgatacaaactgtgacctcagcttcagagtgtcagggcctcacttgtatagaatgtaatgttctcctcaaacatttatgttaactctataaacaaatatcgttaagttaaacaagttttcaaaaacaaaacaatttttaaagtaccttaaaattgaggatgttactcagtgttaacacatgggaacaccaaaatattcaataagcctggtcaattctatagttatcttttttgtaccaacacatgcttttctgttactgttatattatccagtagaaaatgttaggatatgtgtgctatataaaaaaaaaaaaagacttgttaagttttaaaataacaaaaatggctagttgaatagtattttatgtgtaattcttccatttattctgtttaattatacaactaagatgaaatattgaaaaaccctttgtgaaagtaacttttcaagtaaatgcacaactttagaatttctacaaataagttcttttaaacagtctttttattgtggattgtgaaatcaaaatctggagaaatgcttataaaatatactactagcttttaagttttaagaaagaagaacgtaagttgtacaaagatatttgtactttgacaaactgaatttaaataaactttatttcctctcactatagtgtggctttagaatatatcaagtacaacctgaatggactttttgattttacatttcctatatcactaaaatacttaaacacaaaaataaaattccactcctttatttcttcttacacctgccattgtctctaattctaaagagagagctatagatttctgcagttctagaggtgaagatagagacatagagaggctgtgaaacacacatacagccctgttaggtcttttgaattcacaccttattgaaatcagtgtagaagtagagttacctaaacctttatcgccaatgcacagcttggcctgttaagttaaatgtgggtgtcaaccagtggaaaagatcaaaggaccttttgcagcctagcttgccaatcttccagtaacaacgaggtgctaccaataggcagactgtgtctagagtcatgcatggacaagaggaaagtgaaagttgaatactctcttctcaatggcatagctggacttgattaagtattgactcatagaagagacatgtatgtttcccggggctaccccttcatagctgcatttaaaaatggtgttcaggccactatggctgctgtggtttgaatatttttttccctcgaaaactcatgttgaaacttaactcctaatgtagcagtactgagaggcagggcccttaagaggtgattgggccatgaggtctgtgccctcctgaatggattaatccattcatggattaatggattattatgagtgggggactggtgactttatatgaaaaggaaggaagagtgacctaagctagcatgctcagggtgcaccgtatgtcccctggtcatgtgatgctatgtgttaccttgggacttacctgacagctcttaccaacaagaaggccatcccagatatggcctctcaacctcagacttctcagcctgcctaactgtaagaaattaattctttttctttataaattacccaggttctgttttaagcctcagaaaatgaactaagacaatgccctagatgagctgccaaaatctgagcagatatgagccatcagaatagagacctgcagaggcccagggcactcaaacataactgtgcttgtctcagtcaaacttaattgggaaaaggaggagtaagagcaggccctttctgacatgctttagcagagataacttatcagggctagtttaaacaaatgtgtataggaaaggatgttatttatatattcttacaagagtgtaagggctcacacatttactgtactcagatctgaaagacaatgttgcttcttgatttttttctataatcactatgaccgtgttcacgattccctactctgcaactctcagcatgcatcatgatgattctctaacactgtctgtcaccttcctgtatttccacagagcatgcaagaacttctacaaaacttctataccacacagaagctgaaagagactctggggcactaaattcagatcctttctccacacagcaatgacatttatcaatctgactcaggtgtggctgttgcccctttttgatatggagggaacactgaaagacagtttccttctggagttccaaatgcaatatagaaaaaaaaaccctgtgactctggattttattttaagttctctaacaagactcctaccttgagatcttagtctaggtaaagaaaaaaaaaaaaaggtcatgaaacacaaatgtcctcaactgtcatcattctatgtttactttctcccaatcacatcacctgaggtagaagagatttttcagttgctatttctcttcgtaatgaattttctttacatcctgtccacactgctggagatactaagtcccaacctaaatgatggaaggagcatctcccctcttgtctgtggaagatatcacatgaactacctaattttcaagcatggatctccatatttcaaaggaaagttttaaaaatgtttttaaaacttcaaatatctcaccacagtgaattatgggtaaggtgataatatgtttaattagcttgatttaatcatcccacactgtatacatatgccaaaatatcattttgtatgccataatatatatgatttatgaattatagtaatattaataaaagtgttaaagcttt

SEQ ID NO: 145346 - DNA, 2517 bp, Homo sapiens
  Payload ID: 8729
  Gene Symbol: KLHL40
  Gene Name: kelch-like family member 40
  Uniprot ID: Q2TBA0
  ENST ID: ENST00000287777
  CDS Start-End: 101-1966
cctcgaagacagctgctcagtctaagcaaaccccagcaggaaagcaggggtacagagaggagcccccttggcaccgccaccgcaccctaggccacccaccatggcgctgggcttggagcaggcggaggagcagcggttgtaccagcagacgctcctgcaagacgggctcaaagacatgctggaccatggcaagttcctcgactgtgtggtgcgggcgggcgagcgcgagttcccgtgccatcgcctggtgctggccgcctgcagcccctacttccgggcgcgctttctagccgagccggagcgcgcgggcgagctgcacctggaggaggtgtccccggacgtggtggcccaggtgctgcactacctgtacacatcagagatcgcgctggatgaggcgagcgtgcaggatttgttcgccgcggcacaccgcttccagatcccttccatcttcaccatctgcgtgtccttcctgcagaagcgcctgtgcctctccaactgcttggccgtcttccgtctcggcctcctgctcgactgcgcgcgtctcgccgtggctgcccgcgacttcatctgcgctcacttcacgctggtggcgcgcgacgctgacttcctcggactctcggccgacgagctcatcgccatcatctccagcgacggccttaacgtggagaaggaggaggcagtgttcgaggcggtgatgcggtgggcgggtagcggcgacgccgaggcgcaggctgagcgccagcgcgcgctgcccaccgtcttcgagagcgtgcgctgccgcttgctgccgcgcgcctttctggaaagccgcgtggagcgccaccctctcgtgcgtgcccagcccgagttgctgcgcaaggtgcagatggtgaaggatgcacacgagggccgcatcaccacgctgcggaagaaaaagaaggggaaggatggagccggggccaaggaggctgataagggcacaagcaaagccaaagcagaggaggatgaggaggccgaacgtatccttcctgggatcctcaatgacaccctgcgcttcggcatgttcctgcaggatctcatcttcatgatcagtgaggagggcgctgtggcctacgatccagcagccaacgagtgctactgtgcttccctctccaaccaggtccccaagaaccacgtcagcctggttaccaaggagaaccaggtcttcgtggctggaggcctcttctacaacgaagacaacaaagaggaccccatgagcgcatacttcctgcagtttgaccatctggactcagagtggctggggatgccaccgctgccctcgccccgctgcctctttggcctgggagaagctctcaactccatctacgtggtcggtggcagagagatcaaggacggcgagcgctgcctggactcggtcatgtgctacgacaggctgtcattcaaatggggtgaatcggacccgctgccttacgtggtgtatggccacacagtgctctcccacatggaccttgtctacgtaattggcggcaaaggcagtgacaggaagtgcctgaacaagatgtgcgtctatgaccccaagaagtttgagtggaaggagctggcacccatgcagaccgcccgctcactctttggggccactgtccatgatggccgcattatcgtggcagctggggtcaccgacacagggctgaccagttctgccgaagtgtacagcatcacagacaacaagtgggcacccttcgaggccttcccacaggagcgtagctcactcagcctggtcagcctggtgggtaccctctatgccattggtggctttgccacactggagacggagtctggagagctggttcccacagagctcaatgacatctggaggtataacgaggaggagaagaaatgggagggtgtcctgcgggagatcgcctatgcagcaggtgccaccttcctaccagtgcggctcaatgtgctgtgcctgactaagatgtgaccagctcaggcagactgaactaagcacccctcccatcctgcgaccctcactggcctggccttgtgggggctccagaaaagaggctaggagaggccagagtctacctggatccagttatggtgcctcaggggctgcgtcagccaaggaaagggaagtgctgcttagtcctggacttttgggcaagggtgagaaactagaggcttctccagtgttgccatatccccctaggttgtcttgatccatgaaccagaaccacagggcggtatcccaggccgtgtgctggccctgccccagcctagctgagtgtgctggcaaagttccccacaggactcagccttctcgtctgtccgatgggagcatccccatcaagtgcagtgtacagtgcagatatgtctccttctttaggaagaataaagtgccttctgagcaagcagctcagggtctgcatcagtgctccaagagtcagtgagcaggtgtgttgaagacttggggcttcagtgttctgctgttgggctgccaaggtcgatggtctctgctctccatctggtgtc

SEQ ID NO: 145347 - DNA, 2464 bp, Homo sapiens
  Payload ID: 8730
  Gene Symbol: KLHL41
  Gene Name: kelch-like family member 41
  Uniprot ID: O60662
  ENST ID: ENST00000284669
  CDS Start-End: 78-1898
ctttttacagctagacctgtgtgctgcaaggagctaaggccttcagtgtccccttccttacccaggtttctcacagaatggattcccagcgggaacttgcagaggaactgcggctttaccaatccacccttcttcaggatggtctaaaagatctcctggatgagaaaaaattcatcgattgcaccctaaaagcaggtgacaaaagtcttccttgccacagattgattttgtcagcttgtagtccttacttccgtgagtactttttatctgaaattgatgaggcgaaaaaaaaggaggtagtgctagacaatgtggatcctgctatacttgatttaatcatcaaatacctgtactctgccagtattgatctcaatgacggaaatgtgcaagatatttttgcattggccagccgctttcagatcccctcagtgtttactgtctgcgtttcttatcttcagaaaagacttgctcctggtaactgtctagccatcctaagattaggacttcttcttgactgcccgagactcgccatttctgcccgtgaatttgtgtctgatcgctttgtacagatttgtaaggaagaggactttatgcaactgtctccacaggaactgatctcagtcatttcaaatgacagcctaaatgtagaaaaagaagaagcagtatttgaggcagtgatgaaatgggtgcgaacagacaaggaaaacagggttaaaaaccttagtgaagtgtttgattgtatccgttttcgccttatgacagaaaaatattttaaggatcatgttgagaaagatgatataattaaaagcaacccagacctccagaaaaaaatcaaagttctaaaagatgctttcgcaggcaaactcccagaacctagcaaaaatgccgcgaagactggggctggtgaggtgaatggtgatgttggtgatgaagatttacttcctggttacctgaatgacattcccaggcatggaatgtttgtaaaagacctcatcctcttggttaatgacacagcagcagtggcttatgaccccacggaaaatgaatgctaccttactgcactggctgagcagattcccagaaatcattccagcattgttacccagcaaaatcagatatatgtggtaggaggactatatgtggatgaagaaaataaggatcaacctctacagtcatacttcttccagctcgatagcatagcatctgaatgggttggacttccacctctgccttcagccaggtgtctcttcggtctgggagaggtggatgataaaatctatgtagttgcaggcaaagaccttcaaacagaggcttcgctggattcagtattatgctatgatcctgtggctgcaaaatggaacgaagtaaaaaaactccctatcaaagtctatggccataatgtgatttcacataaagggatgatatattgtctaggaggaaagacagatgacaaaaaatgtacaaacagggtgtttatcttcaaccccaaaaaaggagattggaaagatctggctccaatgaaaattcctcgttccatgtttggagtagcagtccataaaggcaaaattgtgattgcaggaggtgtcactgaagatggtctttcagcttcagttgaagcttttgaccttacaacaaataaatgggatgtaatgaccgaatttccccaagaaagaagctccatcagtttggtcagcctggctggatctctgtatgcaattggtggttttgctatgattcaactggagtctaaagaatttgcacccactgaagtcaatgacatatggaagtatgaagatgataaaaaagaatgggctgggatgttgaaggaaatacgttatgcttcaggagctagttgcctagcaacacgtttaaatctcttcaaactgtctaaactgtgaacaaggtgacaaaacataatagattgggaggtggtttgtttggtgaatggggctttaatttattctgttttttaaaagcttgtacagacactcatgtagaaattattcaagaagttattgtctaagagatgagcagtaggtaagaaaacctcagtcattgactcttcaatgtaatgatcagagtttaaaaccattttctaataataaattaaatcttcagttgaacaaattattttgtgaatctgtttcactcaatggattgtaaagaaggctcctaaatttgagttgtttgctaatcatttcatttgcatcattagggtatccttaaactgattttctattacaattggaagtggagaatatgtgcatctacactaaaaaaatgtttaagatatcaaaaacctctcctcgtgcttcaaaatgacaggaatcctgtgcattatactaagaattacatgccataagatgacttcagaaatcctacttcagaagtgtaataaatggatggggaaatcgtttgatggggaaaagtctcttgtaagtaaaagtagtcaaattcaaatggc

SEQ ID NO: 145348 - DNA, 6703 bp, Homo sapiens
  Payload ID: 8731
  Gene Symbol: KLHL42
  Gene Name: kelch-like family member 42
  Uniprot ID: Q9P2K6
  ENST ID: ENST00000381271
  CDS Start-End: 312-1829
ctggctgggagctggaattcccttcccgcctggcgccgcccgggagagcccgcgcgaggacgcccgccgcgctccgccggcccttttttggcgctgagggaaaggagaagggcagggccgccgcctcgcgggagcgggccccgggaggaggggccgccggagaggccgggcgagcgcgggcggccctcacctcgccgctcctcccgggccgccatccctcggcgccccgcccggaaccggcgcgcgcgtaggggctgggaggccggcgcgcagatctggcggtgagcgctgccgccccggggcccccagccatgtcggccgaggagatggtgcagatccgcctggaggaccgctgctacccggtgagcaagaggaagctcatcgagcagagcgactacttccgcgccctctaccgctccggcatgcgcgaggccctgagccaggaggccggcggcccggaggtgcagcagctgcgcggcctcagcgcgccgggcctgcggctggtgctggacttcatcaacgccggcggggcccgcgaaggctggctcctgggcccgcgcggggaaaagggcggcggggtggacgaggacgaggagatggatgaggtgagcctgctgtccgagctggtggaggcggcctccttcctgcaggtcacgtccctgctgcagctgctgctgtcccaggtgcggctcaataactgcctggagatgtaccgcctggcgcaggtgtacgggctgcccgacctgcaggaggcctgcctgcgcttcatggtcgtccacttccacgaggtgctgtgcaagccccagttccacctcctggggtctcctccccaagctccaggggatgtcagcctgaagcagaggctgagggaggcccggatgactgggactcctgtcctcgtggccctcggggacttcctggggggacccctggcccctcacccctaccagggggagcccccgtccatgctcaggtacgaggagatgactgagcgttggttcccgctggccaacaaccttcctcccgacctggtcaatgtcaggggctatgggtctgccatcctggacaactacctcttcatagtgggcgggtacaggatcactagccaggagatctccgctgcgcattcctacaaccccagcaccaacgagtggctccaggtggcctccatgaaccagaagaggtctaacttcaaacttgtggctgttaattcaaaactctatgccatcggagggcaggccgtttctaacgttgagtgttacaaccccgagcaggatgcgtggaattttgtggcgcccttacccaatcctctggctgagttctctgcctgtgagtgtaagggaaaaatttatgtcattggaggatacactaccagagaccggaacatgaacattttgcagtactgcccctcttccgacatgtggacgctctttgaaacatgtgacgtccacattcgcaagcagcagatggtgtctgtggaagagaccatctacatcgtgggggggtgtctccacgagctggggcccaaccgcaggagcagccagagcgaggacatgctcaccgtgcagtcctacaacaccgtcacccgccagtggctctacctcaaggagaacacgtccaaatcgggtcttaacttgacttgtgcgctccataacgacggcatctacatcatgagcagagacgtcaccctgtcgaccagcttggaacaccgagtgttcctcaagtacaacatcttttcagatagttgggaagcatttcggcgttttccagcttttggacataacttgctggtttcttctctttatctgcccaataaagcagaaacatgactgaattgaattggtagatgaaaaaaacctggttcaagttttttttaaaatgtggtgtcccattccaagggagaccaattcctaaagggtaaagaagggttaaagtaggtcacatatatacagtagcagctgtaaataagcttacttgaactaattacttgaaaactggtggaaaaaagagaccaactttgttattttttaaattattgatttttaaattatgggagcaaatccatctccaaacatgatactcttgggccaatgacggatcatcaaaatgtagattcattgtgtctgtgtggtaaagggccaaagtcaataattgggacaaatggtaaagatgattttaaaatctgttgtatttaggtcccttgacatatcattagcaccttaagtgagaggttttctttttcttatcagtgtccttgacaagcattcatattaacatattcattctctcttctccatcacccatacccacacatacatctagtatgtttagggttctgtgttcagatattttgtttgcacactactttttaggaaacttataatgatggagccctacagtgaatccttaccagtgttcagtcctccccaaaacttgcataaaaatattcttagctatttttccagccttttttgcagttacaaatgctggataaatagactgataaaacctcttattttatttatgtggcaggttgcatatttatgtggacacataggttgcactgctaggcattctgtattgttttaaagaggatatattatttagaaaaatggacatatgaatattattaaaaattgagtcttaaatttaaatgggaagggaagaaaacaccaaataagaaaaaaatttgcctttaagagttacttttgttgaatgtatttgacttagttcttattttaaggctaaaaaaactttgtcatatttaagtcggcagctttctaatttaatcttagctttgtaattcatgttttgcttttgtggactaaggtaaggacagcatttaaatatttgtgctggagtgaggggaagaagctgttacagaagtggaatggtttctggtggtatttctgaagttaggtaaagtgctttacttgccttggttgttaattgaaatagaattcagctcaagcagttgttttcagtgagtgagttaacaataaaagcttctgccaatcatagatcaacattcctcaaaaatacatacactcatacttatggaaattttattttgattgaaaacactctgaaattatctgatattttgtaatggcatcagttaaactgtgagctggattccatctttctgcagtaacagcgggcagaaccatttcagttagcatgtgcctcactttaagaaagtcctgtaggggaaaaaaaaaactgtcagagcgaattcatgcattcaacaaacacttatgagtgcctggagtatgccgtccactgtgcagatgtaggacaggggctaatcacttagagttcttcagtttattagaggagtgactacaggttttctttacaaccatggcctctagtatacttaaaataagcgtccagttataaaaagcctatttgcacaactttttgggaatacttctattaactaaaatgaggtaagccattattttggacatagaaacagatctttgtatcttgtcaccaaataatcttacctctagtctacttacaactttgtaagggtttctaagctatgcccatttattcccaaatattaagcccttaaaaaaataaaacctctgaaccaaaatcttcccaggaatagtacttaatagattttaatgttaatttatattcattgtagaattgaatttccagtgacctgtaatttcattacatatattttaaaatctatttattttagatggtgttaacttttcgttgctgaagagcttaactttttaaaggctttgtcctatacatttagaagatgagtcagttgaattagtactggacaaacagttggagattagtttgcaaataagcatatcatatcaaatacaatattccagccaaccagttaattctcttcctggttacattcattgggtctatttgcctaatgttgacaattagattcttggaccaagtgagggtgtactctgatccacaaagctcttttataaaccaggtttgaggttgtgtgtgtgtgtgggggtgtgtgtgtgtgtgtgtgtgtatgtttgcatattatagctctctttaagacagacatctaaaaagattttggttattctgggctgccagcagtacgtgggaaaggtggaatgtgcaataggaacagatctgtgcattttgtgacatcgtccttcctgctgtgcacatcagctgtgatgacattttgagggtagttttaatttagctcggttctcttgttggtgccagtattacattgaagactacctatgatagaggcaatgttgctttgaaaatctcccttcaggcggaggttgcagtgagccgagattgtgccattgcactccagcctgggcgacagtgcaagactctgtctccaaaaaaaaaaaaagaaaaaagaaaatcccccttcatcccccaggactgtcctttactctttgatagtatccctctattttcttcccaattctctaaatgctttatcattttttcctgagatgcttctgagggatgctgacctcccactatggggaaaagggttgcttggaggacctggggtggcagccccccgaccagaagcaccctattttatagatagcagtctgaatggtagagagtcctgtgtgtgggttgttagaaggttggttcttcctgttattctctctggctttcctttcaacccacttattttcagaggcctctccccttagcatcctttaaaaggttttctgatgaatgtgtgaaagagttgattatttcaacagtattggttaagtcacaacgacgaagtgctgagaaggttatgggtaccaggaagaaacaaacagaagtcttaagattagaatgagaaccaaagagaatttaaccctgccatttttttttttttaacaccaagatcctaagtaattccaaatgccttagatatcaatgaaagctacacaccattgagatgggcaaaattctttctctacaaagggagtaatcaagtaaatacctgttctctttcaatggactgttgcctattgagcattgtggatgatgtgttttcagatttccaggtgaagttctgaccctacctgtttggccaaagacgtaaattgagaggaaaggccttggtcttcctgatcaaccagcatttaacgaacagtggcttaatgcagatcactcaagaggcagcatagcaatgtaaaaggaatataagtaggtgttggatgcctttttcctagaccaggaatggggaatatataacacctgtgccaccgctcttttaaggaggcattatgaatgagtgcagcattcctgtcctctgtgccaggatttggtcttagaatccatgtcagattggtgcttccagacatctattcccagtccatcagagtgaaatgaaggctatttgccatccctgccttagacagaggagtgaaagaattaagtgggtagacaccaaccaaaatgactttgaaagcagtgagctgattgagctccagttctgtggttaccagaaatactgagtgtctgtcatgtgcaagacaatgctaagaacagaatacagacataaataagtcacggcccatgaccttgaagagcttacggccttataaagaggttcactgtaattgtcttcaccagggcgtccttctcaaagatgcccacttttgtctggcacattggggctcggtggtctggtggtcccttcggtcttggccctgtccgtcctttgtttttgtgatttactaacaatcatcacgaaccagttttgtttttcttttaaatttgaacatcacatcttgtgttttagttttttgctctatgatttttttctcactgcttttcagtcttctctgtacttcatttttgtgaaaaagtgaaaatcacatataatctttatttaaaaatgctcaccaagcactgcagactttggagttagggattcagcagcttgttccagtgaaaaggaggagtgaagctggggaagttagtatctaagaggggcaagctgattgcatgtgcatttatacctatgcctttaaaacattcccataaaaagtattaataaagaaatttccattccacactagtactgatgaaaaggtggttgattttgccttgtgataattatcaaaggatagtttttcatccttagattttattcacatgagagattttttttattttctctgttgacttaggaacacatcataaattcacaccaactgacacgttgctgacgtctgtacttgacataaccatttttattcatacaggaagcattaaatataaaagatggtcagttttgaagagcaaagggtgctgaaatgacttgtacggttggctggtgctttctcaaatggattgccatagttcattactagtaaagaaaaggaaaatgtgatttacgttgtcatttttcctattaaaaaaaacccttaagaatggggcacttgagctgtccctgcaatgttttcatatctagtagtcattttagggaaagtgataatctgtagaatgaatagttatgttttgatatgactgatactttctttgttaaaaggttgtattaagtcttcaatttcaagtctagcttaaaagtgtaaacattatgtgattcatttgaatacaagaatgcctatgaaatacccactataacagcattccttttgtgtttagaactatagaagaaaatgtcttcaaataaagtagttttcagtca

SEQ ID NO: 145349 - DNA, 772 bp, Homo sapiens
  Payload ID: 8731
  Gene Symbol: KLHL42
  Gene Name: kelch-like family member 42
  ENST ID: ENST00000543254
  CDS Start-End: 1-538
cagcctgaagcagaggctgagggaggcccggatgactgggactcctgtcctcgtggccctcggggacttcctggggggacccctggcccctcacccctaccagggggagcccccgtccatgctcaggtacgaggagatgactgagcgttggttcccgctggccaacaaccttcctcccgacctggtcaatgtcaggggctatgggtctgccatcctggacaactacctcttcatagtgggcgggtacaggatcactagccaggagatctccgctgcgcattcctacaaccccagcaccaacgagtggctccaggtggcctccatgaaccagaagaggtctaacttcaaacttgtggctgttaattcaaaactctatgccatcggagggcaggccgtttctaacgttgagtgttacaaccccgagcaggatgcgtggaattttgtggcgcccttacccaatcctctggctgagttctctgcctgtgagtgtaagggaaaaatttatgtcattggaggatacactaccagaggtaagtgaagggaccaggtaggtggtctgcccatgtgtaggcgtcagcagtctgggaagggcaagagggtgtcagaggaagccccgacatatccgagtgtcatgttatgctttaatagtgtacacttacacatctggaaggaagagagttccatatggcagggatgattgggacaggagggatcttttgataactttgtgtgagcatgaaaatcgaatggggaagggagagctgtgaaaaaa

SEQ ID NO: 145350 - DNA, 1894 bp, Homo sapiens
  Payload ID: 8731
  Gene Symbol: KLHL42
  Gene Name: kelch-like family member 42
  ENST ID: ENST00000539176
  CDS Start-End: 284-1393
cctggcgccgcccgggagagcccgcgcgaggacgcccgccgcgctccgccggcccttttttggcgctgagggaaaggagaagggcagggccgccgcctcgcgggagcgggccccgggaggaggggccgccggagaggccgggcgagcgcgggcggccctcacctcgccgctcctcccgggccgccatccctcggcgccccgcccggaaccggcgcgcgcgtaggggctgggaggccggcgcgcagatctggcggtgagcgctgccgccccggggcccccagccatgtcggccgaggagatggtgcagatccgcctggaggaccgctgctacccggtgagcaagaggaagctcatcgagcagagcgactacttccgcgccctctaccgctccggcatgcgcgaggccctgagccaggaggccggcggcccggaggtgcagcagctgcgcggcctcagcgcgccgggcctgcggctggtgctggacttcatcaacgccggcggggcccgcgaaggctggctcctgggcccgcgcggggaaaagggcggcggggtggacgaggacgaggagatggatgaggtgagcctgctgtccgagctggtggaggcggcctccttcctgcaggtcacgtccctgctgcagctgctgctgtcccaggtgcggctcaataactgcctggagatgtaccgcctggcgcaggtgtacgggctgcccgacctgcaggaggcctgcctgcgcttcatggtcgtccacttccacgaggtgctgtgcaagccccagttccacctcctggggtctcctccccaagctccaggggatgtcagcctgaagcagaggctgagggaggcccggatgactgggactcctgtcctcgtggccctcggggacttcctggggggacccctggcccctcacccctaccagggggagcccccgtccatgctcaggtacgaggagatgactgagcgttggttcccgctggccaacaaccttcctcccgacctggtcaatgtcaggggctatgggtctgccatcctggacaactacctcttcatagtgggcgggtacaggatcactagccaggagatctccgctgcgcattcctacaaccccagcaccaacgagtggctccaggtggcctccatgaaccagaagaggtctaacttcaaacttgtggctgttaattcaaaactctatgccatcggagggcaggccgtttctaacgttgagtgttacaaccccgagcaggatgcgtggaattttgtggcgcccttacccaatcctctggctgagttctctgcctgtgagtgtaagggaaaaatttatgtcattggaggatacactaccagagacagcctctggagatcctgtgttgctacttgtcatgtttcttaggatcagctatcaagaataatctacttgctgcccagcctggcttctgtattaagtagtcgaccggaacatgaacattttgcagtactgcccctcttccgacatgtggacgctctttgaaacatgtgacgtccacattcgcaagcagcagatggtgtctgtggaagagaccatctacatcgtgggggggtgtctccacgagctggggcccaaccgcaggagcagccagagcgaggacatgctcaccgtgcagtcctacaacaccgtcacccgccagtggctctacctcaaggagaacacgtccaaatcgggtcttaacttgacttgtgcgctccataacgacggcatctacatcatgagcagagacgtcaccctgtcgaccagcttggaacaccgagtgttcctcaagtacaacatcttttcagatagttgggaagcatttcggcgttttccagcttttggacataacttgctggtttcttctctttatctgcccaataaagc

SEQ ID NO: 145351 - DNA, 3425 bp, Homo sapiens
  Payload ID: 8732
  Gene Symbol: KLHL5
  Gene Name: kelch-like family member 5
  Uniprot ID: Q96PQ7
  ENST ID: ENST00000261425
  CDS Start-End: 153-2282
ctcccgcctggccgccccggcccgccgtgacccacggccgcctccggagcccgacgcgcagggcatatacttctcttgtcttggttggatgcacaaatctgtgtgcagtgctttttgcccgttgcctagacgatcacttggtttctctgaggatgtctggttctcgtaaagagtttgatgtgaaacagattttgaaaatcagatggaggtggtttggtcatcaagcatcatctcctaattctacagttgacagccagcagggagaattttggaaccgaggacagactggagcaaacggtgggagaaagtttttagatccatgtagcctacaattgcctttggcttcaattggttaccgaaggtccagccaactggattttcagaattcaccttcttggccaatggcatccacctctgaagtccctgcatttgagtttacagcagaagattgtggcggtgcacattggctggatagaccagaagtggatgatggcactagtgaagaagaaaatgaatctgattccagttcatgcaggacttccaatagtagtcagacattatcatcctgtcatactatggagccatgtacatcagatgaatttttccaagcccttaatcatgccgagcaaacatttaaaaaaatggaaaactatttgagacataaacagttgtgtgatgtaattttagtcgctggtgatcgcagaattccagctcacagattggtgctctcctctgtctcagactattttgctgccatgtttactaatgatgtcagagaggcaagacaagaagaaataaaaatggaaggtgtagaaccaaattcgttgtggtccttgatccagtatgcttatacaggccgccttgaattaaaagaagataatattgagtgcctgttatctacagcttgccttcttcagctttcacaggttgtagaagcatgctgtaagtttttaatgaaacagcttcatccatccaactgtcttggaattcgttcttttgctgatgcccaaggttgtacagatttgcataaagtggctcacaattatactatggagcatttcatggaagtaatcagaaaccaggaatttgtattattaccagccagcgaaattgcaaagctcttggctagtgatgacatgaacattcctaatgaggagacaatattgaatgcacttcttacttgggtccgtcatgatttggaacagagacggaaagatctaagtaaacttttggcttatattaggctacctcttcttgcaccacagttcctggcagacatggaaaataatgtactttttcgggatgatatagaatgtcagaaactcattatggaagcaatgaagtaccatttattaccagagagacgacccatgttacaaagtcctcggacaaaacctaggaagtcaactgttggtacattatttgcagttgggggaatggattcaacaaaaggagcaacaagcattgaaaagtatgatctccgtacaaatatgtggactccagtagcaaatatgaatgggaggaggctacagttcggtgttgcagtgctagatgacaaactgtatgtggttggaggaagagatggactgaagactttgaatactgtagagtgctacaaccccaaaacaaaaacttggagtgtgatgccacctatgtccacacatagacatggccttggtgtggctgtactggaaggtcccatgtatgccgtaggaggacatgatggctggagctatctgaacacagtggaaagatgggaccctcaggctcgccagtggaattttgttgccactatgtctacccctaggagtacagtaggtgtggcagtactaagtggaaaactttatgcagttggtggtcgtgatggaagttcttgtctcaaatcagtagaatgttttgatcctcatactaataagtggacactgtgtgcacagatgtcaaaaaggagaggtggcgtaggagtgacgacctggaatggactgctgtatgctataggggggcacgatgctcccgcatccaacttgacttccagactctcagactgtgtggaaagatatgatcccaaaacagacatgtggactgcagtagcatccatgagcatcagcagagatgcagtgggggtctgtttacttggtgataagttatatgctgttggggggtatgatggacaggcataccttaatactgtggaggcttatgatccccagacaaatgagtggacccaggttgctccactgtgcctaggaagagctggagcttgtgttgtgactgtaaaattataatttagtgccccgttttctacatgaagacaccgtcttcctttattaatttagtataattattctatcaatggatacatttttagtaaatgtgcattgtcacaatcctgggcacaaagtgcctgatgtcaaaatgaagatagtaaaacaagggaggaagcagtggatggaccaggattaattcctttcatttcttagtaaattaaaacctgcagctggtggattgtgatcacacattcccgaagtaataagtgaggacgaatgcactgctctggaacataacccagtgctaactgggggtttcatttattcagtcaagcacatcttactcacatccagatttattttcctacagtgcaaacacaccagatgaaactttaaaatgttactttttgtaagcttatcataaatgagttgcagtaatttgtttgcttgtttgtttaaccacaaccactattttaatgatatactaaagataacactatttagttttttcagaaacatctgcattatatgtgtgttggttgtggattttgtttctaaaattggcttagtccaataaataaagaaaagcattaaggacttaaagcaacaataaccaaataaaaacttgataggatctttgaagtctatttaaatattcattccattacatctagactcaccaagaactacatgttatgatgttaagttgaagttgaaacatgatgttttgcattaaatttaagatatgcaaatttatgtagagaaaataaatgttatataccctataatctttcacctaattagtatttaattatatggatttgttttatattataaaagatgttttgattttgtcttttgatattgacaaaattgtttggatatccttatgttctcaagtctgtatctgcctcccctgccttatttcttatgttttgccacagttaacccattgtgcttctttgtaatcaaacagtttgtgggagaatgggcttattgaatgtctaaaaaataagtttaaagtgtttgttaccctaagttttttacatttttaaactctaattacatatgtgaatgttattactctcagtgaattgttattgtttgcaaaaatgcactgggcagtaacattttgtgataaatcctataagatataagtca

SEQ ID NO: 145352 - DNA, 3300 bp, Homo sapiens
  Payload ID: 8732
  Gene Symbol: KLHL5
  Gene Name: kelch-like family member 5
  Uniprot ID: Q96PQ7
  ENST ID: ENST00000261426
  CDS Start-End: 76-2160
tgtttcatctttattcattatcctttgttctttaaaatctgatatattggcataaaagtaattgtagatatatatatgaatgtgatttattttcctttacatatttttgttgtgtacagcagggcatatacttctcttgtcttggttggatgcacaaatctgtgtgcagtgctttttgcccgttgcctagacgatcacttggtttctctgaggatgtctggttctcgtaaagagtttgatgtgaaacagattttgaaaatcagatggaggtggtttggtcatcaagcatcatctcctaattctacagttgacagccagcagggagaattttggaaccgaggacagactggagcaaacggtgggagaaagtttttagatccatgtagcctacaattgcctttggcttcaattggttaccgaaggtccagccaactggattttcagaattcaccttcttggccaatggcatccacctctgaagtccctgcatttgagtttacagcagaagattgtggcggtgcacattggctggatagaccagaagtggatgatggcactagtgaagaagaaaatgaatctgattccagttcatgcagattggtgctctcctctgtctcagactattttgctgccatgtttactaatgatgtcagagaggcaagacaagaagaaataaaaatggaaggtgtagaaccaaattcgttgtggtccttgatccagtatgcttatacaggccgccttgaattaaaagaagataatattgagtgcctgttatctacagcttgccttcttcagctttcacaggttgtagaagcatgctgtaagtttttaatgaaacagcttcatccatccaactgtcttggaattcgttcttttgctgatgcccaaggttgtacagatttgcataaagtggctcacaattatactatggagcatttcatggaagtaatcagaaaccaggaatttgtattattaccagccagcgaaattgcaaagctcttggctagtgatgacatgaacattcctaatgaggagacaatattgaatgcacttcttacttgggtccgtcatgatttggaacagagacggaaagatctaagtaaacttttggcttatattaggctacctcttcttgcaccacagttcctggcagacatggaaaataatgtactttttcgggatgatatagaatgtcagaaactcattatggaagcaatgaagtaccatttattaccagagagacgacccatgttacaaagtcctcggacaaaacctaggaagtcaactgttggtacattatttgcagttgggggaatggattcaacaaaaggagcaacaagcattgaaaagtatgatctccgtacaaatatgtggactccagtagcaaatatgaatgggaggaggctacagttcggtgttgcagtgctagatgacaaactgtatgtggttggaggaagagatggactgaagactttgaatactgtagagtgctacaaccccaaaacaaaaacttggagtgtgatgccacctatgtccacacatagacatggccttggtgtggctgtactggaaggtcccatgtatgccgtaggaggacatgatggctggagctatctgaacacagtggaaagatgggaccctcaggctcgccagtggaattttgttgccactatgtctacccctaggagtacagtaggtgtggcagtactaagtggaaaactttatgcagttggtggtcgtgatggaagttcttgtctcaaatcagtagaatgttttgatcctcatactaataagtggacactgtgtgcacagatgtcaaaaaggagaggtggcgtaggagtgacgacctggaatggactgctgtatgctataggggggcacgatgctcccgcatccaacttgacttccagactctcagactgtgtggaaagatatgatcccaaaacagacatgtggactgcagtagcatccatgagcatcagcagagatgcagtgggggtctgtttacttggtgataagttatatgctgttggggggtatgatggacaggcataccttaatactgtggaggcttatgatccccagacaaatgagtggacccaggttgctccactgtgcctaggaagagctggagcttgtgttgtgactgtaaaattataatttagtgccccgttttctacatgaagacaccgtcttcctttattaatttagtataattattctatcaatggatacatttttagtaaatgtgcattgtcacaatcctgggcacaaagtgcctgatgtcaaaatgaagatagtaaaacaagggaggaagcagtggatggaccaggattaattcctttcatttcttagtaaattaaaacctgcagctggtggattgtgatcacacattcccgaagtaataagtgaggacgaatgcactgctctggaacataacccagtgctaactgggggtttcatttattcagtcaagcacatcttactcacatccagatttattttcctacagtgcaaacacaccagatgaaactttaaaatgttactttttgtaagcttatcataaatgagttgcagtaatttgtttgcttgtttgtttaaccacaaccactattttaatgatatactaaagataacactatttagttttttcagaaacatctgcattatatgtgtgttggttgtggattttgtttctaaaattggcttagtccaataaataaagaaaagcattaaggacttaaagcaacaataaccaaataaaaacttgataggatctttgaagtctatttaaatattcattccattacatctagactcaccaagaactacatgttatgatgttaagttgaagttgaaacatgatgttttgcattaaatttaagatatgcaaatttatgtagagaaaataaatgttatataccctataatctttcacctaattagtatttaattatatggatttgttttatattataaaagatgttttgattttgtcttttgatattgacaaaattgtttggatatccttatgttctcaagtctgtatctgcctcccctgccttatttcttatgttttgccacagttaacccattgtgcttctttgtaatcaaacagtttgtgggagaatgggcttattgaatgtctaaaaaataagtttaaagtgtttgttaccctaagttttttacatttttaaactctaattacatatgtgaatgttattactctcagtgaattgttattgtttgcaaaaatgcactgggcagtaacattttgtgataaatcctataagatataag

SEQ ID NO: 145353 - DNA, 3288 bp, Homo sapiens
  Payload ID: 8732
  Gene Symbol: KLHL5
  Gene Name: kelch-like family member 5
  Uniprot ID: Q96PQ7
  ENST ID: ENST00000381930
  CDS Start-End: 76-2349
tgtttcatctttattcattatcctttgttctttaaaatctgatatattggcataaaagtaattgtagatatatatatgaatgtgatttattttcctttacatatttttgttgtgtacagcagggcatatacttctcttgtcttggttggatgcacaaatctgtgtgcagtgctttttgcccgttgcctagacgatcacttggtttctctgaggatgtctggttctcgtaaagagtttgatgtgaaacagattttgaaaatcagatggaggtggtttggtcatcaagcatcatctcctaattctacagttgacagccagcagggagaattttggaaccgaggacagactggagcaaacggtgggagaaagtttttagatccatgtagcctacaattgcctttggcttcaattggttaccgaaggtccagccaactggattttcagaattcaccttcttggccaatggcatccacctctgaagtccctgcatttgagtttacagcagaagattgtggcggtgcacattggctggatagaccagaagtggatgatggcactagtgaagaagaaaatgaatctgattccagttcatgcaggacttccaatagtagtcagacattatcatcctgtcatactatggagccatgtacatcagatgaatttttccaagcccttaatcatgccgagcaaacatttaaaaaaatggaaaactatttgagacataaacagttgtgtgatgtaattttagtcgctggtgatcgcagaattccagctcacagattggtgctctcctctgtctcagactattttgctgccatgtttactaatgatgtcagagaggcaagacaagaagaaataaaaatggaaggtgtagaaccaaattcgttgtggtccttgatccagtatgcttatacaggccgccttgaattaaaagaagataatattgagtgcctgttatctacagcttgccttcttcagctttcacaggttgtagaagcatgctgtaagtttttaatgaaacagcttcatccatccaactgtcttggaattcgttcttttgctgatgcccaaggttgtacagatttgcataaagtggctcacaattatactatggagcatttcatggaagtaatcagaaaccaggaatttgtattattaccagccagcgaaattgcaaagctcttggctagtgatgacatgaacattcctaatgaggagacaatattgaatgcacttcttacttgggtccgtcatgatttggaacagagacggaaagatctaagtaaacttttggcttatattaggctacctcttcttgcaccacagttcctggcagacatggaaaataatgtactttttcgggatgatatagaatgtcagaaactcattatggaagcaatgaagtaccatttattaccagagagacgacccatgttacaaagtcctcggacaaaacctaggaagtcaactgttggtacattatttgcagttgggggaatggattcaacaaaaggagcaacaagcattgaaaagtatgatctccgtacaaatatgtggactccagtagcaaatatgaatgggaggaggctacagttcggtgttgcagtgctagatgacaaactgtatgtggttggaggaagagatggactgaagactttgaatactgtagagtgctacaaccccaaaacaaaaacttggagtgtgatgccacctatgtccacacatagacatggccttggtgtggctgtactggaaggtcccatgtatgccgtaggaggacatgatggctggagctatctgaacacagtggaaagatgggaccctcaggctcgccagtggaattttgttgccactatgtctacccctaggagtacagtaggtgtggcagtactaagtggaaaactttatgcagttggtggtcgtgatggaagttcttgtctcaaatcagtagaatgttttgatcctcatactaataagtggacactgtgtgcacagatgtcaaaaaggagaggtggcgtaggagtgacgacctggaatggactgctgtatgctataggggggcacgatgctcccgcatccaacttgacttccagactctcagactgtgtggaaagatatgatcccaaaacagacatgtggactgcagtagcatccatgagcatcagcagagatgcagtgggggtctgtttacttggtgataagttatatgctgttggggggtatgatggacaggcataccttaatactgtggaggcttatgatccccagacaaatgagtggacccaggtatggcattcatgtttcattattacactgactctctttttattaaaacaattcttatggtaaaacagatcccctcaatcttgtccaatactgaaatatatggcataaatatgacaatcacgttttgattagcgatgagaaaaagaggcaatgtttaattttataacataattaaaatccagaattacctttgagatgtaagttaatactcagagaaattattaattatctgctaccacttgcatgatgaagtgttctagcctgattaaagctgataggactactggagggctgcaacaatgggaggggagactggaaaataaaaacaaggatagtagtcagaaaactttgaacaacttgcccatgtgtgagcagtcggatttttaaatactcaacccattgatatctgggagcagattaaagtcctgataacctaatgaagatggcaaccctaaattacactgagtaagaaacctgatctggcagtcttactaacagaaagaatttcacccttgtgtatttctgggagggtctagcacttctaaaaatgatcttttgagatctttgcttccatcatcaccaagaacagaatcaggaatttgtgcttgtgtcacccagttcagtacttggtacataaaagacaataaatgtttaactgagccaagattttcttgtatacaaggagccatgataagtatggtcaagaaaacaaagcttctaggccaggcatggtggcttatgcctataatcccagcactttgggaggctgaggcgggcagatcacgaggtcaggagttcaagaccagcctgaccaatatggtgagaccccatctctactaaaaatacaaaaaaattagccgggcatggtggcacgtgcctgtaatcccagctactcggggggctgaggcaggagaatcgcttgaacccaggaggcagaggttgcagtgagcagagatcatgccactgcacttcagcctgggtgacagagtgagactccatctt

SEQ ID NO: 145354 - DNA, 2926 bp, Homo sapiens
  Payload ID: 8732
  Gene Symbol: KLHL5
  Gene Name: kelch-like family member 5
  Uniprot ID: Q96PQ7
  ENST ID: ENST00000508137
  CDS Start-End: 78-1784
ccgccgtgacccacggccgcctccggagcccgacgcggacttccaatagtagtcagacattatcatcctgtcatactatggagccatgtacatcagatgaatttttccaagcccttaatcatgccgagcaaacatttaaaaaaatggaaaactatttgagacataaacagttgtgtgatgtaattttagtcgctggtgatcgcagaattccagctcacagattggtgctctcctctgtctcagactattttgctgccatgtttactaatgatgtcagagaggcaagacaagaagaaataaaaatggaaggtgtagaaccaaattcgttgtggtccttgatccagtatgcttatacaggccgccttgaattaaaagaagataatattgagtgcctgttatctacagcttgccttcttcagctttcacaggttgtagaagcatgctgtaagtttttaatgaaacagcttcatccatccaactgtcttggaattcgttcttttgctgatgcccaaggttgtacagatttgcataaagtggctcacaattatactatggagcatttcatggaagtaatcagaaaccaggaatttgtattattaccagccagcgaaattgcaaagctcttggctagtgatgacatgaacattcctaatgaggagacaatattgaatgcacttcttacttgggtccgtcatgatttggaacagagacggaaagatctaagtaaacttttggcttatattaggctacctcttcttgcaccacagttcctggcagacatggaaaataatgtactttttcgggatgatatagaatgtcagaaactcattatggaagcaatgaagtaccatttattaccagagagacgacccatgttacaaagtcctcggacaaaacctaggaagtcaactgttggtacattatttgcagttgggggaatggattcaacaaaaggagcaacaagcattgaaaagtatgatctccgtacaaatatgtggactccagtagcaaatatgaatgggaggaggctacagttcggtgttgcagtgctagatgacaaactgtatgtggttggaggaagagatggactgaagactttgaatactgtagagtgctacaaccccaaaacaaaaacttggagtgtgatgccacctatgtccacacatagacatggccttggtgtggctgtactggaaggtcccatgtatgccgtaggaggacatgatggctggagctatctgaacacagtggaaagatgggaccctcaggctcgccagtggaattttgttgccactatgtctacccctaggagtacagtaggtgtggcagtactaagtggaaaactttatgcagttggtggtcgtgatggaagttcttgtctcaaatcagtagaatgttttgatcctcatactaataagtggacactgtgtgcacagatgtcaaaaaggagaggtggcgtaggagtgacgacctggaatggactgctgtatgctataggggggcacgatgctcccgcatccaacttgacttccagactctcagactgtgtggaaagatatgatcccaaaacagacatgtggactgcagtagcatccatgagcatcagcagagatgcagtgggggtctgtttacttggtgataagttatatgctgttggggggtatgatggacaggcataccttaatactgtggaggcttatgatccccagacaaatgagtggacccaggttgctccactgtgcctaggaagagctggagcttgtgttgtgactgtaaaattataatttagtgccccgttttctacatgaagacaccgtcttcctttattaatttagtataattattctatcaatggatacatttttagtaaatgtgcattgtcacaatcctgggcacaaagtgcctgatgtcaaaatgaagatagtaaaacaagggaggaagcagtggatggaccaggattaattcctttcatttcttagtaaattaaaacctgcagctggtggattgtgatcacacattcccgaagtaataagtgaggacgaatgcactgctctggaacataacccagtgctaactgggggtttcatttattcagtcaagcacatcttactcacatccagatttattttcctacagtgcaaacacaccagatgaaactttaaaatgttactttttgtaagcttatcataaatgagttgcagtaatttgtttgcttgtttgtttaaccacaaccactattttaatgatatactaaagataacactatttagttttttcagaaacatctgcattatatgtgtgttggttgtggattttgtttctaaaattggcttagtccaataaataaagaaaagcattaaggacttaaagcaacaataaccaaataaaaacttgataggatctttgaagtctatttaaatattcattccattacatctagactcaccaagaactacatgttatgatgttaagttgaagttgaaacatgatgttttgcattaaatttaagatatgcaaatttatgtagagaaaataaatgttatataccctataatctttcacctaattagtatttaattatatggatttgttttatattataaaagatgttttgattttgtcttttgatattgacaaaattgtttggatatccttatgttctcaagtctgtatctgcctcccctgccttatttcttatgttttgccacagttaacccattgtgcttctttgtaatcaaacagtttgtgggagaatgggcttattgaatgtctaaaaaataagtttaaagtgtttgttaccctaagttttttacatttttaaactctaattacatatgtgaatgttattactctcagtgaattgttattgtttgcaaaaatgcactgggcagtaacattttgtgataaatcctataagatataagtc

SEQ ID NO: 145355 - DNA, 2690 bp, Homo sapiens
  Payload ID: 8732
  Gene Symbol: KLHL5
  Gene Name: kelch-like family member 5
  Uniprot ID: Q96PQ7
  ENST ID: ENST00000504108
  CDS Start-End: 284-2551
actgcaacggggatagtgttttctgtctctgtcatttgtggtttaagaaaaagggggtggtgttctgcatttgaaaggactttaatgaatgctgtcagtgtttgtgagacctaatggtcagtatgggaaaggagagccgggaaagtggtctagctgcttcaggataggtggatgagagtttgctctgattgaacggaatgttccaccgtgtttcatctttattcattatcctttgttctttaaaatctgatatattggcataaaagtaattgtagatatatatatgaatgtgatttattttcctttacatatttttgttgtgtacagcagggcatatacttctcttgtcttggttggatgcacaaatctgtgtgcagtgctttttgcccgttgcctagacgatcacttggtttctctgaggatgtctggttctcgtaaagagtttgatgtgaaacagattttgaaaatcagatggaggtggtttggtcatcaagcatcatctcctaattctacagttgacagccagcagggagaattttggaaccgaggacagactggagcaaacggtgggagaaagtttttagatccatgtagcctacaattgcctttggcttcaattggttaccgaaggtccagccaactggattttcagaattcaccttcttggccaatggcatccacctctgaagtccctgcatttgagtttacagcagaagattgtggcggtgcacattggctggatagaccagaagtggatgatggcactagtgaagaagaaaatgaatctgattccagttcatgcaggacttccaatagtagtcagacattatcatcctgtcatactatggagccatgtacatcagatgaatttttccaagcccttaatcatgccgagcaaacatttaaaaaaatggaaaactatttgagacataaacagttgtgtgatgtaattttagtcgctggtgatcgcagaattccagctcacagattggtgctctcctctgtctcagactattttgctgccatgtttactaatgatgtcagagaggcaagacaagaagaaataaaaatggaaggtgtagaaccaaattcgttgtggtccttgatccagtatgcttatacaggccgccttgaattaaaagaagataatattgagtgcctgttatctacagcttgccttcttcagctttcacaggttgtagaagcatgctgtaagtttttaatgaaacagcttcatccatccaactgtcttggaattcgttcttttgctgatgcccaaggttgtacagatttgcataaagtggctcacaattatactatggagcatttcatggaagtaatcagaaaccaggaatttgtattattaccagccagcgaaattgcaaagctcttggctagtgatgacatgaacattcctaatgaggagacaatattgaatgcacttcttacttgggtccgtcatgatttggaacagagacggaaagatctaagtaaacttttggcttatattaggctacctcttcttgcaccacagttcctggcagacatggaaaataatgtactttttcgggatgatatagaatgtcagaaactcattatggaagcaatgaagtaccatttattaccagagagacgacccatgttacaaagtcctcggacaaaacctaggaagtcaactgttggtacattatttgcagttgggggaatggattcaacaaaaggagcaacaagcattgaaaagtatgatctccgtacaaatatgtggactccagtagcaaatatgaatgggaggaggctacagttcggtgttgcagtgctagatgacaaactgtatgtggttggaggaagagatggactgaagactttgaatactgtagagtgctacaaccccaaaacaaaaacttggagtgtgatgccacctatgtccacacatagacatggccttggtgtggctgtactggaaggtcccatgtatgccgtaggaggacatgatggctggagctatctgaacacagtggaaagatgggaccctcaggctcgccagtggaattttgttgccactatgtctacccctaggagtacagtaggtgtggcagtactaagtggaaaactttatgcagttggtggtcgtgatggaagttcttgtctcaaatcagtagaatgttttgatcctcatactaataagtggacactgtgtgcacagatgtcaaaaaggagaggtggcgtaggagtgacgacctggaatggactgctgtatgctataggggggcacgatgctcccgcatccaacttgacttccagactctcagactgtgtggaaagatatgatcccaaaacagacatgtggactgcagtagcatccatgagcatcagcagagatgcagtgggggtctgtttacttggtgataagttatatgctgttggggggtatgatggacaggcataccttaatactgtggaggcttatgatccccagacaaatgagtggacccaggttgctccactgtgcctaggaagagctggagcttgtgttgtgactgtaaaattataatttagtgccccgttttctacatgaagacaccgtcttcctttattaatttagtataattattctatcaatggatacatttttagtaaatgtgcattgtcacaatcctgggcacaaagtgcctgatgtcaaaatgaagata

SEQ ID NO: 145356 - DNA, 909 bp, Homo sapiens
  Payload ID: 8732
  Gene Symbol: KLHL5
  Gene Name: kelch-like family member 5
  ENST ID: ENST00000515612
  CDS Start-End: 1-847
ccgtacaaatatgtggactccagtagcaaatatgaatgggaggaggctacagttcggtgttgcagtgctagatgacaaactgtatgtggttggaggaagagatggactgaagactttgaatactgtagagtgctacaaccccaaaacaaaaacttggagtgtgatgccacctatgtccacacatagacatggccttggtgtggctgtactggaaggtcccatgtatgccgtaggaggacatgatggctggagctatctgaacacagtggaaagatgggaccctcaggctcgccagtggaattttgttgccactatgtctacccctaggagtacagtaggtgtggcagtactaagtggaaaactttatgcagttggtggtcgtgatggaagttcttgtctcaaatcagtagaatgttttgatcctcatactaataagtggacactgtgtgcacagatgtcaaaaaggagaggtggcgtaggagtgacgacctggaatggactgctgtatgctataggggggcacgatgctcccgcatccaacttgacttccagactctcagactgtgtggaaagatatgatcccaaaacagacatgtggactgcagtagcatccatgagcatcagcagagatgcagtgggggtctgtttacttggtgataagttatatgctgttggggggtatgatggacaggcataccttaatactgtggaggcttatgatccccagacaaatgagtggacccaggtattttcacatacttttgaggacagcaaagatcacctggtggccatcaagcagaccatctggaggcaaaactccttatctgaggaattcagaagtcattagactgccctattatctaaagccggcatcttgtactaggcttctttaccaaaaatgtatttaat

SEQ ID NO: 145357 - DNA, 585 bp, Homo sapiens
  Payload ID: 8732
  Gene Symbol: KLHL5
  Gene Name: kelch-like family member 5
  ENST ID: ENST00000514399
  CDS Start-End: 1-109
agcagaagattgtggcggtgcacattggctggatagaccagaagtggatgatggcactagtgaagaagaaaatgaatctgattccagttcatgcagctctccagactaatatagagaatactaagtaacatgtctctaagatgacagctactaattcctgttaccttcactttcactgaaatgtgtgctatttagggaaatgaaggacattcctccaggagagtttaagggaatgtagaggggctagatgtgattatctggtgaaaaggggacaggaagaaggggaaatcagttagaagaaagaaaataaggaaaaaaataggacttccaatagtagtcagacattatcatcctgtcatactatggagccatgtacatcagatgaatttttccaagcccttaatcatgccgagcaaacatttaaaaaaatggaaaactatttgagacataaacagttgtgtgatgtaattttagtcgctggtgatcgcagaattccagctcacagattggtgctctcctctgtctcagactattttgctgccatgtttactaatgatgtcagagaggcaagacaagaagaaataa

SEQ ID NO: 145358 - DNA, 6298 bp, Homo sapiens
  Payload ID: 8733
  Gene Symbol: KLHL6
  Gene Name: kelch-like family member 6
  Uniprot ID: Q8WZ60
  ENST ID: ENST00000341319
  CDS Start-End: 37-1902
gggcctgcctgacacttgggcgctccttcagtctcgatgttgatggcaggacaaaggggcgcctggaccatgggtgatgtggtcgagaagagtttggaagggcccctggcaccttctacagatgagccctcccagaaaacaggagacttggtcgagatcttaaatggggaaaaggtcaaatttgacgacgcgggactctccttaattcttcagaatggcctggaaaccctgcgaatggaaaacgctctgacagatgtcatcttgtgtgtggacattcaggaattctcctgccaccgcgtggtgcttgccgcagccagcaactatttcagggccatgttctgcaacgatttaaaggaaaagtatgagaaaaggatcattattaaaggggttgatgctgagaccatgcacactctgttggactacacgtacaccagcaaggcgctgatcaccaagcagaatgtccagcgggtcctggaggctgctaacctcttccagttcctgcggatggtggatgcctgtgccagcttcctcactgaagccttgaacccagaaaactgcgttggaatactgaggctggctgacacacactcgctggacagtctaaagaagcaggttcagagttacatcattcaaaactttgtgcagattctgaactctgaggagtttcttgacctgcccgtggacactctgcaccacatcttgaagagtgatgacctttacgtgaccgaggaggctcaggtgtttgagaccgtgatgagctgggtccggcacaagccatcagaacgactctgcttactcccctatgtcctcgagaacgtgcgcttaccgcttctggacccgtggtactttgtggagacggtggaagcagatcctctcatcaggcagtgcccagaggtcttcccgctgctccaggaagccaggatgtaccacctttctggcaatgagatcatttcggaacgcaccaagcccaggatgcatgagttccagtctgaggtgttcatgatcattggcggctgcacgaaggatgaacggtttgtggcagaggtgacctgcctggaccccctgaggcgcagccgcctggaggtggccaagctcccgctaacagagcatgagctggagagtgagaataagaagtgggtggagtttgcatgcgtgacattgaaaaatgaggtctacatctcaggtggcaaagaaacacagcatgatgtttggaaatataattcttcgatcaacaagtggattcagattgagtatttaaacataggccgctggaggcataagatggtggtgttgggtggcaaggtctatgtgatcggaggctttgacggcttacagagaatcaacaatgtggagacctacgacccctttcacaactgctggtcagaggccgcacccctccttgtccatgtcagttcctttgcagccaccagccataagaagaagctgtatgtgatcgggggagggcccaatgggaaactggccacagacaagactcagtgttatgacccttccaccaacaagtggagtttgaaggcggccatgcccgtggaggctaaatgcatcaatgcagtgagtttccgggaccgcatctatgtcgttggtggggccatgagagcgctgtacgcctacagcccgctggaagacagctggtgcctggtgacccagctcagccacgagcgggccagctgcggtatcgcgccctgcaacaaccggctctacatcaccggcgggcgggacgagaagaacgaggttatcgccacggtgctgtgctgggaccccgaggcccagaaactgacagaggagtgcgtcctgccccggggcgtgtcgcaccacggcagcgtcaccatcaggaagtcgtacacccacatccgcaggatcgtgcccggagcagtgtctgtctgacggcaggatggggagctggagagcccccccgaccctcagcgtacccgcctcacctctcaccctcctccagtcccacttcaggcagcaggctcgagtttgaggccatacatcaggggatccccttgactcactttgggggaaccttggaagtcacagtttggggtcacttgagaccggccaggaatgtttgcatgacctacctcaggaggggaggcgaggaagagtaatatttagcattcaggacccacccaccctatgccggcttctgtgccaggcacttccttttatcggttcatttaacctggtgactggctcttatcacttctagtttacaggtgagggaaccaagtttcacagaggctaagtggcgtgcccctgatcactcagatagcaagtagctaccccaggagtctaaaatccaggtctttcatctccgaagtcaatgctctttccaccatgctgcctatctcagagcaggaaaaacaaacaaaaaacaacaacaaaacctggctcttgctgggcgtggcggctcacgcctgtaatcccagccctatgggaggctgaggcgggcggatgacctgaggtcaggagttcaagaccagcctggccaacatggtgagaccgccccgtctctactaaaaatacaaaaattagccgcgtgcagtggcaggcgcctgtaattccagctactcaggaggctgaggcaggaggatcacttgaacttgggaggtggaggttgcagtgagccgagatcgccacactgcactgcagcccgggaaacaaaagtgaagctctgtcttcaaaacaaaaacaaaaacaaaaacaaaaacaaagaaacctggctcatttcttgtttcggcaagtctgctaaaagattcactcagcacagcagggaaataaaggtgtttcctgctttctttccttttctttcttattctgcatcctccctcgtccccgccctttaccaatatttaaaccaaggagtcatttgggctccttgccaagaacatctcataggttcttccacttgaaaggtctgggggatgggcttgggaaggcctgtttgctttgaaagagatgaaatacttgtgttctgtcctcctcccattgaaaccctcttttttttttttttgagatgaagtcgcccaggctggagtgcagtggcatgatctcggctcactgcaacctctgtcaccctggttcaagtgattttcctgcctcagcctcctgagtagctgggattacaggcacctgccaccgcgcctggctaatttttgtagttttagtagagacggggtttcaccatcttggccaggctggtcttgaacgcctgaccttgtgatctgcccgcctcggcctcccgaagtgctgggattacaggtgtgagccactgggcccggtctttttttttttaaatgatcataagatggcccattttggaccggaactgtcattgccagacagaattgtacctttagcacattctggtgccctggcctcttagtgttcaccagttgtactgcaatatagacaagatgtctctagagactcaaactactgttttattaaaaaagtaaacacctgagcacagctggcctacacaggagcgacagattctccttgatggtacactttctagtttttacacagtgatttaggtccacgttcctgataccccatcctcctgaagccttcgttttcaagacttttaaaaagcacttctacttggttttttgatcagtgtagctcaattgtgacttaaagaacagaatctgtccttcactgtaagagctacagctttcaaatgagctcactggaaattcattctaatccccaagctggagaaacaggttaagagatcctgtttcatatgctgtatttaaaaagcaacaatgataacaacatagtaactgcgttacccaatggactttattttcatcatatgatttcaattctctttatagagttttatttcatatccggtgtggcttgttcttttcagcagtttgggaagttagttattagagttgatagtgaattgaattttcattaaacagtcacggttagaagaagctaatatttgaaacagattttaaaaacttgaaaaattacaggtgagatttctgtttatgccagattattgaagataaatataaatgtatgttggtgtgtgaaatgctctgtgccttagaagcgtgacagttcagctctctgctgtggaaagtaacacagggcaatagaaacatatttgtggaattttagaacaaactattgctgactcatgagcactataataaccatcaggaagctcccaactgaagcaatgtaacagtgtaatctagttcaattcagcaaacattcatggagttcttcatgtctgtcaagccttgaggacacccacgaatggcaaatctccacgctagacactcaatacaggtaaataggccaccagttaatattcttgtttttattttcttcaagttagctaaaaatgagatgcgtatgaagtgaggaggctggatccaagtcttgattgcctttcagggggtcaaggtggtaagctgtgcagtgaagtcaaccagtggccatggcttacatgtttgtctctttgagatcgccaccagaaccatttgtgaactgatttgtgaaggaaaagtcagtcttactccaaagactattgcagggaggaacttccagagaggaaatccaatgacaatggtactggcatacacagggagcctcccttcaaaaagacagcgcccctagtcagggaggggatggcggtcctttgataagacccataggcaaacttcgagcccatcagcaggtcaaccctatgctgggaaagtgaggatttgggatttctgtgctataaacctgattctaaatgtaggacccaagtttctggactacttcagaatacctaaatgaatcatggaaacactctttatgattttttacaacaccagatatgcaggtgaattgtggaaaatgtcatgtagctgacactcaagaaatagggattcctaataatggcatgggtagggaacagatacacctggttagaaggtctagggttctgtatatgaagctgccagtctgtagctcttcgagaaagaaagttcaagtcatttgggggaaacttaagaatagtcatcagggttttagcttctaggcaccagccaaggatgagaacttctaaaatctaaaatccatttcaagaaataaagacgaacacatttgcaggaaggtaactgttataacccacaccatcagcagggggaaagccaagctgagaataaacccagagacaaagaaccctcggactcaggcaggacatggcaggatgttctggcacagcagactggagactgaggcagggcctgtgagtggacagagcacccctggctgggaagaagaagatggggtaggaggaggtcaggttccaaggatgcaggtctggaaaatgatatcggaggccctggagtttgtgagcttggctctagtcccaagaagggtgagggagaataagggtaagggagtattctaggcaaggaactaaggaaggaatccccttcttagagcagaggcacaagttagagcaggcccagcatttgggccaacttactgtggggcctctgagctgctcagctgggtctcctgtcctagagggaaggtggcccagagtctttggtggagcggaatctgtagatgaggttaagggactccagttgccaaggttgatctgaaacaggcagggagctaagctcatcagaacaccaacagattcatgttctcgtcttagctttcatctattctggtctcaatggcttcgggaaacacacatatacacatacaccatgcccttgaactcaaagcaaactacgctctcagggaaatacaaatatcacgttcttatagctgtaaagtatagcttagctatttatagaagactatgaggtactgttgtgagttatttgcttatcctgttttattctgaaaaatgaaagtgctcaatagaatttttaacgttggcaacaccataaggatttcttatgttaagtcccaacttggggttgcaaaatcattttttcccttaatacctgggtgttgtattagatctcataatttgacaagttaaccttttagaaatccacatatatctcaaatctggctactgcaaaaccagttttgacaggtcagattttcatatgtataggtataaatagccaacactcagtgaacaaaatcctttaagcattttggttacataaagttgtatgttttaagtgatcaaactaagaatattgtttataggttttaaaaaccaaaccaataaaatttttatttattcaataaaatatgcacagaacagatgcaaatgtgttatatacaa

SEQ ID NO: 145359 - DNA, 5453 bp, Homo sapiens
  Payload ID: 8733
  Gene Symbol: KLHL6
  Gene Name: kelch-like family member 6
  ENST ID: ENST00000468734
  CDS Start-End: 1-1833
atgggtgatgtggtcgagaagagtttggaagggcccctggcaccttctacagatgagccctcccagaaaacaggagacttggtcgagatcttaaatggggaaaaggtcaaatttgacgacgcgggactctccttaattcttcagaatggcctggaaaccctgcgaatggaaaacgctctgacagatgtcatcttgtgtgtggacattcaggaattctcctgccaccgcgtggtgcttgccgcagccagcaactatttcagggccatgttctgcaacgatttaaaggaaaagtatgagaaaaggatcattattaaaggggttgatgctgagaccatgcacactctgttggactacacgtacaccagcaaggcgctgatcaccaagcagaatgtccagcgggtcctggaggctgctaacctcttccagttcctgcggatggtggatgcctgtgccagcttcctcactgaagccttgaacccagaaaactgcgttggaatactgaggctggctgacacacactcgctggacagtctaaagaagcaggttcagagttacatcattcaaaactttgtgcagattctgaactctgaggagtttcttgacctgcccgtggacactctgcaccacatcttgaagagtgatgacctttacgtgaccgaggaggctcaggtgtttgagaccgtgatgagctgggtccggcacaagccatcagaacgactctgcttactcccctatgtcctcgagaacgtgcgcttaccgcttctggacccgtggtactttgtggagacggtggaagcagatcctctcatcaggcagtgcccagaggtcttcccgctgctccaggaagccaggatgtaccacctttctggcaatgagatcatttcggaacgcaccaagcccaggatgcatgagttccagtctgaggtgttcatgatcattggcggctgcacgaaggatgaacggtttgtggcagaggtgacctgcctggaccccctgaggcgcagccgcctggaggtggccaagctcccgctaacagagcatgagctggagagtgagaataagaagtgggtggagtttgcatgcgtgacattgaaaaatgaggtctacatctcaggtggcaaagaaacacagcatgatgtttggaaatataattcttcgatcaacaagtggattcagattgagtatttaaacataggccgctggaggcataagatggtggtgttgggtggcaaggtctatgtgatcggaggctttgacggcttacagagaatcaacaatgtggagacctacgacccctttcacaactgctggtcagaggccgcacccctccttgtccatgtcagttcctttgcagccaccagccataagaagaagctgtatgtgatcgggggagggcccaatgggaaactggccacagacaagactcagtgttatgacccttccaccaacaagtggagtttgaaggcggccatgcccgtggaggctaaatgcatcaatgcagtgagtttccgggaccgcatctatgtcgttggtggggccatgagagcgctgtacgcctacagcccgctggaagacagctggtgcctggtgacccagctcagccacgagcgggccagctgcggtatcgcgccctgcaacaaccggctctacatcaccggcgggcgggacgagaagaacgaggttatcgccacggtgctgtgctgggaccccgaggcccagaaactgacagaggagtgcgtcctgccccggggcgtgtcgcaccacggcagcgtcaccatcaggaagtcgtacacccacatccgcaggatcgtgcccggagcagtgtctgtctgacggcaggatggggagctggagagcccccccgaccctcagcgtacccgcctcacctctcaccctcctccagtcccacttcaggcagcaggctcgagtttgaggccatacatcaggggatccccttgactcactttgggggaaccttggaagtcacagtttggggtcacttgagaccggccaggaatgtttgcatgacctacctcaggaggggaggcgaggaagagtaatatttagcattcaggacccacccaccctatgccggcttctgtgccaggcacttccttttatcggttcatttaacctggtgactggctcttatcacttctagtttacaggtgagggaaccaagtttcacagaggctaagtggcgtgcccctgatcactcagatagcaagtagctaccccaggagtctaaaatccaggtctttcatctccgaagtcaatgctctttccaccatgctgcctatctcagagcaggaaaaacaaacaaaaaacaacaacaaaacctggctcttgctgggcgtggcggctcacgcctgtaatcccagccctatgggaggctggtcttgaacgcctgaccttgtgatctgcccgcctcggcctcccgaagtgctgggattacaggtgtgagccactgggcccggtctttttttttttaaatgatcataagatggcccattttggaccggaactgtcattgccagacagaattgtacctttagcacattctggtgccctggcctcttagtgttcaccagttgtactgcaatatagacaagatgtctctagagactcaaactactgttttattaaaaaagtaaacacctgagcacagctggcctacacaggagcgacagattctccttgatggtacactttctagtttttacacagtgatttaggtccacgttcctgataccccatcctcctgaagccttcgttttcaagacttttaaaaagcacttctacttggttttttgatcagtgtagctcaattgtgacttaaagaacagaatctgtccttcactgtaagagctacagctttcaaatgagctcactggaaattcattctaatccccaagctggagaaacaggttaagagatcctgtttcatatgctgtatttaaaaagcaacaatgataacaacatagtaactgcgttacccaatggactttattttcatcatatgatttcaattctctttatagagttttatttcatatccggtgtggcttgttcttttcagcagtttgggaagttagttattagagttgatagtgaattgaattttcattaaacagtcacggttagaagaagctaatatttgaaacagattttaaaaacttgaaaaattacaggtgagatttctgtttatgccagattattgaagataaatataaatgtatgttggtgtgtgaaatgctctgtgccttagaagcgtgacagttcagctctctgctgtggaaagtaacacagggcaatagaaacatatttgtggaattttagaacaaactattgctgactcatgagcactataataaccatcaggaagctcccaactgaagcaatgtaacagtgtaatctagttcaattcagcaaacattcatggagttcttcatgtctgtcaagccttgaggacacccacgaatggcaaatctccacgctagacactcaatacaggtaaataggccaccagttaatattcttgtttttattttcttcaagttagctaaaaatgagatgcgtatgaagtgaggaggctggatccaagtcttgattgcctttcagggggtcaaggtggtaagctgtgcagtgaagtcaaccagtggccatggcttacatgtttgtctctttgagatcgccaccagaaccatttgtgaactgatttgtgaaggaaaagtcagtcttactccaaagactattgcagggaggaacttccagagaggaaatccaatgacaatggtactggcatacacagggagcctcccttcaaaaagacagcgcccctagtcagggaggggatggcggtcctttgataagacccataggcaaacttcgagcccatcagcaggtcaaccctatgctgggaaagtgaggatttgggatttctgtgctataaacctgattctaaatgtaggacccaagtttctggactacttcagaatacctaaatgaatcatggaaacactctttatgattttttacaacaccagatatgcaggtgaattgtggaaaatgtcatgtagctgacactcaagaaatagggattcctaataatggcatgggtagggaacagatacacctggttagaaggtctagggttctgtatatgaagctgccagtctgtagctcttcgagaaagaaagttcaagtcatttgggggaaacttaagaatagtcatcagggttttagcttctaggcaccagccaaggatgagaacttctaaaatctaaaatccatttcaagaaataaagacgaacacatttgcaggaaggtaactgttataacccacaccatcagcagggggaaagccaagctgagaataaacccagagacaaagaaccctcggactcaggcaggacatggcaggatgttctggcacagcagactggagactgaggcagggcctgtgagtggacagagcacccctggctgggaagaagaagatggggtaggaggaggtcaggttccaaggatgcaggtctggaaaatgatatcggaggccctggagtttgtgagcttggctctagtcccaagaagggtgagggagaataagggtaagggagtattctaggcaaggaactaaggaaggaatccccttcttagagcagaggcacaagttagagcaggcccagcatttgggccaacttactgtggggcctctgagctgctcagctgggtctcctgtcctagagggaaggtggcccagagtctttggtggagcggaatctgtagatgaggttaagggactccagttgccaaggttgatctgaaacaggcagggagctaagctcatcagaacaccaacagattcatgttctcgtcttagctttcatctattctggtctcaatggcttcgggaaacacacatatacacatacaccatgcccttgaactcaaagcaaactacgctctcagggaaatacaaatatcacgttcttatagctgtaaagtatagcttagctatttatagaagactatgaggtactgttgtgagttatttgcttatcctgttttattctgaaaaatgaaagtgctcaatagaatttttaacgttggcaacaccataaggatttcttatgttaagtcccaacttggggttgcaaaatcattttttcccttaatacctgggtgttgtattagatctcataatttgacaagttaaccttttagaaatccacatatatctcaaatctggctactgcaaaaccagttttgacaggtcagattttcatatgtataggtataaatagccaacactcagtgaacaaaatcctttaagcattttggttacataaagttgtatgttttaagtgatcaaactaagaatattgtttataggttttaaaaaccaaaccaataaaatttttatttattcaataaaatatgcacagaacaga

SEQ ID NO: 145360 - DNA, 969 bp, Homo sapiens
  Payload ID: 8734
  Gene Symbol: KLHL7
  Gene Name: kelch-like family member 7
  Uniprot ID: Q8IXQ5
  ENST ID: ENST00000322275
  CDS Start-End: 243-743
gggttctgcccggggacgcagcccagttggtagcgtcgctccctgagcgtttctaagggggccgcccggccttgtctttcggcagtggccgagccaccgccgcctgccgcgcgttccagagctgggcgctgcagctgcactgccgatcgccgtgtttggtcgatagaatccccagtgtgcccagagagtgcgacccctcgcccggcccggcgagccccgggcgtgaaccgagctgagggaggatggcagcctctggggtggagaagagcagcaagaagaagaccgagaagaaacttgctgctcgggaagaagctaaattgttggcgggtttcatgggcgtcatgaataacatgcggaaacagaaaacgttgtgtgacgtgatcctcatggtccaggaaagaaagatacctgctcatcgtgttgttcttgctgcagccagtcatttttttaacttaatgttcacaactaacatgcttgaatcaaagtcctttgaagtagaactcaaagatgctgaacctgatattattgaacaactggtggaatttgcttatactgctagaatttccgtgaatagcaacaatgttcagtctttgctggatgcagcaaaccaatatcagattgaacctgtgaagaaaatgtgtgttgattttttgaaagaacaagttgatgcttcaaattgtcttggagaagcagaaaaagttgatcagagccttccagagtgtggtatgcttttcactgtgtgatgatccttagtggcacatgaatgaacgtccagatgtttgtgcagtagcccacccttatctgcaggatacgttccaagacccccagtgaatgcctgaaactgcagatagtactgaatcctatatatactgtgttttttatgatacatacatgcctatgatgaagtttaatttctaaattagacagtaaaagattaacaacaataataataaaatagaacaactttaa

SEQ ID NO: 145361 - DNA, 5620 bp, Homo sapiens
  Payload ID: 8734
  Gene Symbol: KLHL7
  Gene Name: kelch-like family member 7
  Uniprot ID: Q8IXQ5
  ENST ID: ENST00000339077
  CDS Start-End: 244-2004
cgggttctgcccggggacgcagcccagttggtagcgtcgctccctgagcgtttctaagggggccgcccggccttgtctttcggcagtggccgagccaccgccgcctgccgcgcgttccagagctgggcgctgcagctgcactgccgatcgccgtgtttggtcgatagaatccccagtgtgcccagagagtgcgacccctcgcccggcccggcgagccccgggcgtgaaccgagctgagggaggatggcagcctctggggtggagaagagcagcaagaagaagaccgagaagaaacttgctgctcgggaagaagctaaattgttggcgggtttcatgggcgtcatgaataacatgcggaaacagaaaacgttgtgtgacgtgatcctcatggtccaggaaagaaagatacctgctcatcgtgttgttcttgctgcagccagtcatttttttaacttaatgttcacaactaacatgcttgaatcaaagtcctttgaagtagaactcaaagatgctgaacctgatattattgaacaactggtggaatttgcttatactgctagaatttccgtgaatagcaacaatgttcagtctttgctggatgcagcaaaccaatatcagattgaacctgtgaagaaaatgtgtgttgattttttgaaagaacaagttgatgcttcaaattgtcttggtataagtgtgctagcggagtgtctagattgtcctgaattgaaagcaactgcagatgactttattcatcagcactttactgaagtttacaaaactgatgaatttcttcaacttgatgtcaagcgagtaacacatcttctcaaccaggacactctgactgtgagagcagaggatcaggtttatgatgctgcagtcaggtggttgaaatacgatgaacctaatcgccagccatttatggttgatatccttgctaaagtcaggtttcctcttatatcaaagaatttcttaagtaaaacggtacaagctgaaccacttattcaagacaatcctgaatgccttaagatggtgataagtggaatgaggtaccatctactgtctccagaggaccgagaagaacttgtagatggcacaagacctagaagaaagaaacatgactaccgcatagccctatttggaggctctcaaccacagtcttgtagatattttaacccaaaggattatagctggacagacatccgctgcccctttgaaaaacgaagagatgcagcatgcgtgttttgggacaatgtagtatacattttgggaggctctcagcttttcccaataaagcgaatggactgctataatgtagtgaaggatagctggtattcgaaactgggtcctccgacacctcgagacagccttgctgcatgtgctgcagaaggcaaaatttatacatctggaggttcagaagtaggaaactcagctctgtatttatttgagtgctatgatacgagaactgaaagctggcacacaaagcccagcatgctgacccagcgctgcagccatgggatggtggaagccaatggcctaatctatgtttgtggtggaagtttaggaaacaatgtttctgggagagtgcttaattcctgtgaagtttatgatcctgccacagaaacatggactgagctgtgtccaatgattgaagccaggaagaatcatgggctggtatttgtaaaagacaagatatttgctgtgggtggtcagaatggtttaggtggtctggacaatgtggaatattacgatattaagttgaacgaatggaagatggtctcaccaatgccatggaagggtgtaacagtgaaatgtgcagcagttggctctatagtttatgtcttggctggttttcagggtgttggtcgattaggacacattctcgaatataataccgaaacagacaaatgggttgccaactccaaagttcgtgcttttccagtcacaagttgtttaatttgtgttgtcgatacttgtggagcaaatgaagagacccttgaaacatgaaaaatgagtggacttcagactcatcagagactctaaaatatagccaccagtgctttgttccaggagtttggtgacaaagttttggtttggtgttttggtaaagaaagtttcaagtgaaatgaggttcctataaaatagatgtttcttttatatggatttccttaattcaaagatcatattttagctggccacaaaaccaagaacatatctagcaagaaaacttgaaaaagtataagcatttgttaaaaatgtgaatttcttgaatgaatttcacatttgtaactatgattttggcagaatagaagattggctcatcagtgaagcgcagtatcttagctctagattctattttcatgcatcacagaagtgctatacggttaggtctgtttgtgctcagtcaagaactaagaaatagtatgaattgtaagtcaagatgggcaactcagatggagcagcttagtctcacagtttgcttgtctatttattttatttagtgccaaatgtattccattttaaaagtaagccagagtgagtcaaggcatatacacactttctcacaaaacttcctaaacagatttgggggtttaatatgtccaactcctcatgaaatatattcaatccacttaaatatattccatctttttaacataaaatgtaaagcttagcacccatcattaatttatgtctctgttttatccagtggttaaaaaaggattctgcctctttagtcctcactgttaaataaaacccaatcatagtaagtgattaactagcaaaaagtaaagctatttatagcaaatttctagatcattagaaaagcactggtagttgtacaatatcagtgttgactttgaacttctttaacgagatcatgaattcttttcccttagccaaaacatgaaatatttaacctagttgtctctaaaagttttgtaatcatgagttagatatatgtcatctcctattcattgcttttatgtgatcaataaatcttttacaaacccaactactcatttccttcctagtaatactttgcctttttcactgtgtatggaatgaaacatgtaaagctgtcacaatcaatgtttttatctgataatattaaatattttttaacttaaaataggccactcagtttgttcttcaagtattttaggtaatggttgtttttagaatttgtgaaccagtgtctcttaattttcagttttctttatatagaggttataatagtcttaaaccctaaaaatgtttaaatcaaaaaggaattaggaaaaacataatgataggtatatttctatttgtgtagggttttttaatgtacagctttattgagatataattcacataccatacaattcaccatttaaagtatactattcaggccaggcacagtggctcacgcctgtaatcccagcactttgggaggccaaggtgggtagatcatttgaggtcagcagttcaagaccaccctggccaacatgatgagaccccgtctctactaaaaatacaaaaattagccaggcctggtggtgtgcacttgtaatcccagctattcaggagactgaggcaggaggattgcttgaacctgacaggcagaggttgcagtgagctgagatcaagccactgcaccccagcctgggcaacagagcaagactaaaaaaaaaaaaaaaaaaaaaaaaatgtattattcagtggtttttaatatatccacagagttacgcaaccatcaccacaattttagaacattttcatcaccccaaaaagaaaccttgtactgattagcaatggttccctatttcccccaacgcccctgtatttcctagggctaccataacaaactactgcaaacttggtggctttaaagaacagaaatttattctctcacaattcaggaagccagcactcctaaatcaagttgtcagcagggttagttccttctggagggtctgcagcagaaaccacacatgcctctcccctagcttctggtggttgccagcaatcctcagcattctttggcttgtagctgcagcacttcagtctctgtctctgtcttcgcatgggctttttccctgtgtgtctctgtatcttcacatggtgttcttataaggacaacataggagccagacacagtggctcaggccggtaatttcaacactttgggaggtggaggcagtaggatcacttgaggctaggagttcaagaccctgtctctacaaaaaaataaaaagttagcaggtgtggtatatacctgcagttctagctactcagaaggctgaggtgggaggatcacttgagcccaggagttcaaggatgtagtgagctatgattgtgccactgcactccagcctgggtgacagactgagaccctgtctcattaaaaaaaaaaaaaaaaaagctgggcgctgtgtctcacgcccttaatcccagcactttgggaggccgaggcgggtggattacctgaggtcaggagtttgagaccagcctggacaacatgccaaaaccccgtctctactaaaaatacaaaaattagccaggtatggtggtgtgcacctgtagtcccagctactcaggaggctgaggtaggagaattgcttgaacctgggaggcagaggttgcagtgagctgagattgcgccacttcattccagcctgggtgacagagcaagacaccttctcaaagcaaaatacaaacaaaaaaaggacaacatagggcccgcaatccagtatgaccttattttaattacacctgtaaagaccccatttccaaacgaggacacattctgagcttctggatagacatgaatttggggagatgctgttcaacacagaaaacctcccaaacaccatagccctaggcaaccactaatctactttctgtctctagatttgattattctgaacatttttagtagggttttcaattttgcactctattgaaaaatgtggctagtttaattttttgagagtgaaatatccatttattatattacaatatagctatataatttgacaatctcctatgtagaatatacagtacctgtctaagatattttaagtacaccagcatttccttttaggctatgtcaattgactagaacacactatagtaaatacatacacaggtttgatgtggattataatgaagtggtttttttccttagtaatctgtatcataattcccaattagtgtctttttctgccttggaaatttctacagaattgtcaatatcaggatagtgcgtaaaagtacactcaccatactgacaagcacattttctattttgttgcccaaaactccctgtcctgtaaagtgctctgcttgctttttagtagacatttgataagttaatgttatatcctttgcaatgatattattttgatgacaaagtaagtttatgctttcaaaaatcacaattcggtcagaaaagtttagcatcttaaaaaaattgttgctatttgaaaaaaacaaaacaaaacatatacttgtgactttgtggtccagctggcaaaaacttgacatatcatcccatgaaaattttaagtcatgaattattttgacatgacaatattgctaacaaaatcaaaatcagccgtttaataaacaattattccaccaa

SEQ ID NO: 145362 - DNA, 3231 bp, Homo sapiens
  Payload ID: 8734
  Gene Symbol: KLHL7
  Gene Name: kelch-like family member 7
  Uniprot ID: Q8IXQ5
  ENST ID: ENST00000409689
  CDS Start-End: 525-2141
cgcagttggtagaggggcgcgtaaaacaattctcgagcaaaagtgcttctcgtctgccgaggatgtagctcccaagtcagactcctgggggactcctcaggctggctttcgccgtcgggtatcggttgtgtaacagctctgccctagttatctctttgtggggcgaggatccttccattggcgagccgttttaaggtgccgtgagatcttgtgtgaagaaacccgttggcatagcccaaaccgaagcccccaaagggaggagagttgctggcctgacatcagctgctcttaaataaggatccccgccccctcctgtgttccccggtggagctagttgaagaggagtcctcctgttcgtgctaatttagagcagaagcagccatcgataaataccatgccatcttctaagggcactgtgcgcctctgttattaagaggagctctttgttctgtccttggtgtgtggtgcattcgtgaaattctgcagcacatcggcgaaagaaaacgttgtgtgacgtgatcctcatggtccaggaaagaaagatacctgctcatcgtgttgttcttgctgcagccagtcatttttttaacttaatgttcacaactaacatgcttgaatcaaagtcctttgaagtagaactcaaagatgctgaacctgatattattgaacaactggtggaatttgcttatactgctagaatttccgtgaatagcaacaatgttcagtctttgctggatgcagcaaaccaatatcagattgaacctgtgaagaaaatgtgtgttgattttttgaaagaacaagttgatgcttcaaattgtcttggtataagtgtgctagcggagtgtctagattgtcctgaattgaaagcaactgcagatgactttattcatcagcactttactgaagtttacaaaactgatgaatttcttcaacttgatgtcaagcgagtaacacatcttctcaaccaggacactctgactgtgagagcagaggatcaggtttatgatgctgcagtcaggtggttgaaatacgatgaacctaatcgccagccatttatggttgatatccttgctaaagtcaggtttcctcttatatcaaagaatttcttaagtaaaacggtacaagctgaaccacttattcaagacaatcctgaatgccttaagatggtgataagtggaatgaggtaccatctactgtctccagaggaccgagaagaacttgtagatggcacaagacctagaagaaagaaacatgactaccgcatagccctatttggaggctctcaaccacagtcttgtagatattttaacccaaaggattatagctggacagacatccgctgcccctttgaaaaacgaagagatgcagcatgcgtgttttgggacaatgtagtatacattttgggaggctctcagcttttcccaataaagcgaatggactgctataatgtagtgaaggatagctggtattcgaaactgggtcctccgacacctcgagacagccttgctgcatgtgctgcagaaggcaaaatttatacatctggaggttcagaagtaggaaactcagctctgtatttatttgagtgctatgatacgagaactgaaagctggcacacaaagcccagcatgctgacccagcgctgcagccatgggatggtggaagccaatggcctaatctatgtttgtggtggaagtttaggaaacaatgtttctgggagagtgcttaattcctgtgaagtttatgatcctgccacagaaacatggactgagctgtgtccaatgattgaagccaggaagaatcatgggctggtatttgtaaaagacaagatatttgctgtgggtggtcagaatggtttaggtggtctggacaatgtggaatattacgatattaagttgaacgaatggaagatggtctcaccaatgccatggaagggtgtaacagtgaaatgtgcagcagttggctctatagtttatgtcttggctggttttcagggtgttggtcgattaggacacattctcgaatataataccgaaacagacaaatgggttgccaactccaaagttcgtgcttttccagtcacaagttgtttaatttgtgttgtcgatacttgtggagcaaatgaagagacccttgaaacatgaaaaatgagtggacttcagactcatcagagactctaaaatatagccaccagtgctttgttccaggagtttggtgacaaagttttggtttggtgttttggtaaagaaagtttcaagtgaaatgaggttcctataaaatagatgtttcttttatatggatttccttaattcaaagatcatattttagctggccacaaaaccaagaacatatctagcaagaaaacttgaaaaagtataagcatttgttaaaaatgtgaatttcttgaatgaatttcacatttgtaactatgattttggcagaatagaagattggctcatcagtgaagcgcagtatcttagctctagattctattttcatgcatcacagaagtgctatacggttaggtctgtttgtgctcagtcaagaactaagaaatagtatgaattgtaagtcaagatgggcaactcagatggagcagcttagtctcacagtttgcttgtctatttattttatttagtgccaaatgtattccattttaaaagtaagccagagtgagtcaaggcatatacacactttctcacaaaacttcctaaacagatttgggggtttaatatgtccaactcctcatgaaatatattcaatccacttaaatatattccatctttttaacataaaatgtaaagcttagcacccatcattaatttatgtctctgttttatccagtggttaaaaaaggattctgcctctttagtcctcactgttaaataaaacccaatcatagtaagtgattaactagcaaaaagtaaagctatttatagcaaatttctagatcattagaaaagcactggtagttgtacaatatcagtgttgactttgaacttctttaacgagatcatgaattcttttcccttagccaaaacatgaaatatttaacctagttgtctctaaaagttttgtaatcatgagttagatatatgtcatctcctattcattgcttttatgtgatcaataaatcttttacaaacccaactactcatttccttcctagtaatactttgcctttttcactgtgtatggaatgaaacatgtaaagctgtcacaatcaatgttttt

SEQ ID NO: 145363 - DNA, 1233 bp, Homo sapiens
  Payload ID: 8734
  Gene Symbol: KLHL7
  Gene Name: kelch-like family member 7
  Uniprot ID: Q8IXQ5
  ENST ID: ENST00000410047
  CDS Start-End: 575-1009
agttggtagaggggcgcgtaaaacaattctcgagcaaaagtgcttctcgtctgccgaggatgtagctcccaagtcagactcctgggggactcctcaggctggctttcgccgtcgggtatcggttgtgtaacagctctgccctagttatctctttgtggggcgaggatccttccattggcgagccgttttaaggtgccgtgagatcttgtgtgaagaaacccgttggcatagcccaaaccgaagcccccaaagggaggagagttgctggcctgacatcagctgctcttaaataaggatccccgccccctcctgtgttccccggtggagctagttgaagaggagtcctcctgttcgtgctaatttagagcagaagcagccatcgataaataccatgccatcttctaagggcactgtgcgcctctgttattaagaggagctctttgttctgtccttggtgtgtggtgcattcgtgaaattctgcagcacatcggcgaaagtgatttaaatctaccacccagctgtagttgaatctacaatctgctcagggatttatactcaatgccaatttgatatcatgctgggagggactgattgcagaaccttcttgacaagccacataaatctaaagaaaacgttgtgtgacgtgatcctcatggtccaggaaagaaagatacctgctcatcgtgttgttcttgctgcagccagtcatttttttaacttaatgttcacaactaacatgcttgaatcaaagtcctttgaagtagaactcaaagatgctgaacctgatattattgaacaactggtggaatttgcttatactgctagaatttccgtgaatagcaacaatgttcagtctttgctggatgcagcaaaccaatatcagattgaacctgtgaagaaaatgtgtgttgattttttgaaagaacaagttgatgcttcaaattgtcttggagaagcagaaaaagttgatcagagccttccagagtgtggtatgcttttcactgtgtgatgatccttagtggcacatgaatgaacgtccagatgtttgtgcagtagcccacccttatctgcaggatacgttccaagacccccagtgaatgcctgaaactgcagatagtactgaatcctatatatactgtgttttttatgatacatacatgcctatgatgaagtttaatttctaaattagacagtaaaagattaacaacaataataataaaatagaacaacttt

SEQ ID NO: 145364 - DNA, 418 bp, Homo sapiens
  Payload ID: 8734
  Gene Symbol: KLHL7
  Gene Name: kelch-like family member 7
  ENST ID: ENST00000414163
  CDS Start-End: 1-282
gtcaggtttcctcttatatcaaagaatttcttaagtaaaacggtacaagctgaaccacttattcaagacaatcctgaatgccttaagatggtgataagtggaatgaggtaccatctactgtctccagaggaccgagaagaacttgtagatggcacaagacctagaagaaagaaacatgactaccgcatagccctatttggaggctctcaaccacagtcttgtagatattttaacccaaagttgaaaagagatgcatattcttctacacgagcctggaagtgagactgtaacttcagaattctcatttgttgtcttgccttgctcttataaatgagtcattcctaattgcactttgaaaatttatgggaaaatttaaataattgaggaatgaactaccaataaaaacattttcattcca

SEQ ID NO: 145365 - DNA, 3165 bp, Homo sapiens
  Payload ID: 8734
  Gene Symbol: KLHL7
  Gene Name: kelch-like family member 7
  ENST ID: ENST00000521082
  CDS Start-End: 270-392
aagtgcgcaggctcctgggcagggctcgggttctgcccggggacgcagcccagttggtagcgtcgctccctgagcgtttctaagggggccgcccggccttgtctttcggcagtggccgagccaccgccgcctgccgcgcgttccagagctgggcgctgcagctgcactgccgatcgccgtgtttggtcgatagaatccccagtgtgcccagagagtgcgacccctcgcccggcccggcgagccccgggcgtgaaccgagctgagggaggatggcagcctctggggtggagaagagcagcaagaagaagaccgagaagaaacttgctgctcgggaagaagctaaattgttggcgggtttcatgggcgtcatgaataacatgcggaaacagtgatttaaatctaccacccagctgtagttgaatctacaatctgctcagggatttatactcaatgccaatttgatatcatgctgggagggactgattgcagaaccttcttgacaagccacataaatctaaagaaaacgttgtgtgacgtgatcctcatggtccaggaaagaaagatacctgctcatcgtgttgttcttgctgcagccagtcatttttttaacttaatgttcacaactaacatgcttgaatcaaagtcctttgaagtagaactcaaagatgctgaacctgatattattgaacaactggtggaatttgcttatactgctagaatttccgtgaatagcaacaatgttcagtctttgctggatgcagcaaaccaatatcagattgaacctgtgaagaaaatgtgtgttgattttttgaaagaacaagttgatgcttcaaattgtcttggtataagtgtgctagcggagtgtctagattgtcctgaattgaaagcaactgcagatgactttattcatcagcactttactgaagtttacaaaactgatgaatttcttcaacttgatgtcaagcgagtaacacatcttctcaaccaggacactctgactgtgagagcagaggatcaggtttatgatgctgcagtcaggtggttgaaatacgatgaacctaatcgccagccatttatggttgatatccttgctaaagtcaggtttcctcttatatcaaagaatttcttaagtaaaacggtacaagctgaaccacttattcaagacaatcctgaatgccttaagatggtgataagtggaatgaggtaccatctactgtctccagaggaccgagaagaacttgtagatggcacaagacctagaagaaagaaacatgactaccgcatagccctatttggaggctctcaaccacagtcttgtagatattttaacccaaaggattatagctggacagacatccgctgcccctttgaaaaacgaagagatgcagcatgcgtgttttgggacaatgtagtatacattttgggaggctctcagcttttcccaataaagcgaatggactgctataatgtagtgaaggatagctggtattcgaaactgggtcctccgacacctcgagacagccttgctgcatgtgctgcagaaggcaaaatttatacatctggaggttcagaagtaggaaactcagctctgtatttatttgagtgctatgatacgagaactgaaagctggcacacaaagcccagcatgctgacccagcgctgcagccatgggatggtggaagccaatggcctaatctatgtttgtggtggaagtttaggaaacaatgtttctgggagagtgcttaattcctgtgaagtttatgatcctgccacagaaacatggactgagctgtgtccaatgattgaagccaggaagaatcatgggctggtatttgtaaaagacaagatatttgctgtgggtggtcagaatggtttaggtggtctggacaatgtggaatattacgatattaagttgaacgaatggaagatggtctcaccaatgccatggaagggtgtaacagtgaaatgtgcagcagttggctctatagtttatgtcttggctggttttcagggtgttggtcgattaggacacattctcgaatataataccgaaacagacaaatgggttgccaactccaaagttcgtgcttttccagtcacaagttgtttaatttgtgttgtcgatacttgtggagcaaatgaagagacccttgaaacatgaaaaatgagtggacttcagactcatcagagactctaaaatatagccaccagtgctttgttccaggagtttggtgacaaagttttggtttggtgttttggtaaagaaagtttcaagtgaaatgaggttcctataaaatagatgtttcttttatatggatttccttaattcaaagatcatattttagctggccacaaaaccaagaacatatctagcaagaaaacttgaaaaagtataagcatttgttaaaaatgtgaatttcttgaatgaatttcacatttgtaactatgattttggcagaatagaagattggctcatcagtgaagcgcagtatcttagctctagattctattttcatgcatcacagaagtgctatacggttaggtctgtttgtgctcagtcaagaactaagaaatagtatgaattgtaagtcaagatgggcaactcagatggagcagcttagtctcacagtttgcttgtctatttattttatttagtgccaaatgtattccattttaaaagtaagccagagtgagtcaaggcatatacacactttctcacaaaacttcctaaacagatttgggggtttaatatgtccaactcctcatgaaatatattcaatccacttaaatatattccatctttttaacataaaatgtaaagcttagcacccatcattaatttatgtctctgttttatccagtggttaaaaaaggattctgcctctttagtcctcactgttaaataaaacccaatcatagtaagtgattaactagcaaaaagtaaagctatttatagcaaatttctagatcattagaaaagcactggtagttgtacaatatcagtgttgactttgaacttctttaacgagatcatgaattcttttcccttagccaaaacatgaaatatttaacctagttgtctctaaaagttttgtaatcatgagttagatatatgtcatctcctattcattgcttttatgtgatcaataaatcttttacaaaccc

SEQ ID NO: 145366 - DNA, 5621 bp, Homo sapiens
  Payload ID: 8735
  Gene Symbol: KLHL8
  Gene Name: kelch-like family member 8
  Uniprot ID: Q9P2G9
  ENST ID: ENST00000273963
  CDS Start-End: 343-2205
gctcgcgggggctgaggcgagaggacgccaagcgcccgccggggctccgcggggccgcgcaggagagcgcgcgtccgccgggtgctcgcgcggggttggtgaggttccgctgagggcggccggggctctgggagcgtggtaacgtggctgcaaccttagcgacatcaggaagaacagggtcgaggatcgagtcacagcaaactgtacaatggcagttgagtgggttttgaaaaacgtctgaattgtagtgtctacatctaccttctgccttctctctaccctttgaaaaaaaataaatggcatgtttgagaagagagctctattaaaagaggaatattgcaaatggcttcagattctatgagtagtaaacaagctaggaatcacattacaaaggggaaaaggcaacaacagcaccagcaaataaagaacagatcctcaattagtgatggtgatggagaagattcctttatttttgaagcaaatgaagcttggaaagattttcatggttctcttcttcgattttatgaaaatggagaactctgtgatgtcacactcaaggttggctcaaagctaatctcttgtcacaagctggtattggcttgtgttattccctactttagagccatgtttctttctgaaatggctgaagccaagcaaacgctgattgagattagagattttgatggtgatgcaatagaagacttggtaaagtttgtctattcttcacggctcactttgactgttgacaatgtccagcctctcttatatgcagcctgtattctgcaggttgaactggtggctagagcttgttgtgaatacatgaagttacattttcatccctccaattgcctggcagtaagagcctttgcagaaagtcacaatcgaatagacttaatggacatggcggatcagtatgcctgtgaccattttactgaagtagtggagtgtgaagactttgtaagtgtatcaccgcagcacctccataagcttttgtcctccagtgatctaaatattgaaaatgaaaagcaggtctataatgctgccatcaagtggcttcttgccaatcctcagcatcattccaaatggttggatgaaacacttgcacaggttcgcctgccattgttgccggttgattttcttatgggtgttgtggcaaaagaacagattgtcaagcaaaatctaaaatgtagagatttactggatgaagcaagaaattaccaccttcacttgagtagcagagcagtacctgactttgaatactccattcggactaccccaaggaagcatactgctggtgtgctgttttgtgtaggtggtcgaggtggatctggtgacccctttcgcagtattgaatgctattctatcaacaaaaacagttggttctttggaccagaaatgaatagtcgaaggcgacatgtgggtgtaatctctgtggaaggtaaagtgtatgcagtaggtggacatgatggaaatgaacatttagggagtatggagatgtttgatcctctcactaataaatggatgatgaaggcatcaatgaacacaaagaggcgaggaattgccttggcttccttaggaggcccaatttatgcaattggagggttagatgacaatacttgcttcaatgatgtggagagatatgacatagaatctgatcagtggagtacagtggcaccaatgaatactccccgtggaggagttggctctgttgctctagtaaaccatgtttatgcagtaggtggcaatgatggaatggcttctttatctagcgtggagagatatgatccacatctggataagtggatagaagttaaagaaatgggtcagcgaagagcaggcaatggagttagcaagcttcatggttgcttatacgtagttggtggttttgatgataattctcctctgagttcagttgagcggtatgacccccgaagcaacaagtgggattatgtggcagcacttactactcccagaggtggagtgggaatcgcaacagtgatgggcaaaatctttgcagttggtggtcataatggcaatgcatacttaaatacagtagaagcgtttgatccagtgctgaataggtgggagcttgttggatctgtgtctcactgcagagctggagcaggagtagctgtgtgttcctgtttaactagccaaattcgagatgtaggtcatggatccaataatgtggttgactgtatgtgatttgagttctggccaccaacaatttagtcatatctgataggtacaaaagaaaaccaagattttgatatgaccacctttcaacactttttactgcaactagagtcttatttaaatgttaactgttgtattgtgactaagtacaacttttggaatgatacctgaagaattattagtaatagagttaaatttgatacttcctgcttttgcaaataatggagtagggaagaagatagtcgaacttaaaatcatacctaccctgaaaaatgcttaaagtagtgccaaaaatcttgaaatctctctctctctctctatttggatgaatcaaaatgtaatttgttgagttttgccttttcttttgcctaaagatgttaacgtcaggcagtgggtttttcctagaggagagattagtacctattcattaacacaaggatacataagagacttgccccttttgaagatcatttctacttggtgctgatgaatttatgcctagctttttttttctaggtggtgatttttcaatttcttttatatttacggaagtagaaaaaatgttctgtctttttgaatgccacttagctgcattttcagaagcttataggctataagaagcctttaatttcagtttgaattgctaggacaccaaaagacctagctgggctaactccatccaaatgattttacagttttattttttcatcttttgcaaaaagtatttgttacataatcaaaaggtgaaccagaggaaatattgaacaaggttttagatctgatgttattctggtgcccaattgagagaccttgagaaagaatgatgcagattacatgactctaatgtgggcagtctgaaaatatctttaactgtcttctttgatcatttgattttggatccaagatttatcatctctctattttgctatttgccaccatcctggtttttctgactgtacagaatcaatctgcatttatttattatcagaaatgaatgcatttttacaaaaacctttttgtagactgtagtttattgattagttcaagcccatcacgaactaattaaacatattgttggtaaaaacagagattgaaattactgtttttatcatatttaaatccctctggtgtatttattgaaatttaattaaaaatatttctacatattgatttgaagccaggatattgatggacctacagatttaacagctcttcaaagttttaactagcattataaaatggcctattcattatatgtatatttttttataaatatttatcaagaacatgaaaatattttattttgtatttgcagtgcagtttggcacctctcttccaggccttcctaagtttttgttagttgtgtcttcgaatttattgtagttcaccgctggtcagtaatctggttcataaggaagctggggcagtgaaaaacacttcgttgatccatccagccctaaagttcattgactaatagctcatgcatcttattaaatgggattctggacttctacaatagtgtggaaagccacatcacaaaaaaagccacatcacaaaaaaaagccagtgcctattgagtatatcaaaccaaaaaagaaaaaaaaaagttttaagaggggtcaggctggcagataaaagtctcttatgaagcagatataaatccagtaagctatttttttctacctatgggcaagttcataagtcattgctggatctgaaccagtgttcttttgtgtaagtacaaccatatttcagtcagtccagaggcagttaaccctgtagcacttactagactggtgacaactggctggatgtggagaataagtgtcaaaacctggcttcaatgtctatttcttatgtctaatggagttcttatattacagtgtttgtttagctatggttactaatatgtttgttatatttattttcggggagaggatcttgttattgtttcctgagattatttaaaatgttttttctttgatgtatttctgtctttcttatatgtaaggagttataagggttattatattttcatttctggtttttactatacaatggttatctaacatactaagttggtaccctacctacccgtaaaatatgaaatactcagaagtaaagtgtgtgggcaatcagaagcatagccttgaaggacctgacagcagtatgaaaagataaataggccaggcatggtggctcacgcctgtgatcccagcactttgggaggccgaggtgggtggaccacctgagatcaggtgttcaagaccagcctgaccaacatggtgaaaccctgtctctactaaaagtacaaaaattagccaggcgtggtggcgcatacctgtaattccagctactcaggaggctgaggcaggagaattgcttgaacccaggaggtggaggttgcaatgagccgaggttgagccatcgcactccagcggtgaaacaagagtgaaactccatctcaaaaaaaaaaaaaaaaaaaagataaaaaagcagaatcaatatgtgcacagttctctttatcaggcaaaaacacgtttattgagacatgaaatgagaatcaggctgaaggaatcatgcagctgaaagatgattatattcatagaaatgaagagatgaaatattcaaagaagatggctactttattgtgagacttaccactttaacctcatatgttaacagcacctaccaaaaaatgatatgagatagagctaaaatactgaaattgcaaatggacaaaataaatcatgaaaatttgtttattatttcttcaataaatatttctaggtgctttgtgattctttcatttagtcattaaagccattgctttactatattgcgttgccactttaaaaacaagttacttgacattgtttttgacagatttcactatatacttatgtaattaattgattatttctaaaatgtttgaataaactttgtactccctctaaggagtattttattcattcttttaattcccaaatgaactttgaacttacagtgctgttgaatgccttggtaaggacttcttgaaattgcataaactattcttgtaaatggtaaacttgagaattttctttgtttcttttttctctatgtcttaaagaatgcctttagaatctaattcatgttgtatcagttaagaatgtttctgtggtttctcgtatcagatgtgtaaagaaattattactgggatgccattggctatgtctctttccccttcatgtaaaattccaagtgtcagtaaaacttctctataatattttcttaaaaccatttataaatttgtgttataatactccagaaaatcaatgtaataagtggtcatatatatcaccaactatggatatcaaaaagttggggtcacatcagtgctatttatttaattaaaatacattgcatatttctattagcacaaa

SEQ ID NO: 145367 - DNA, 4049 bp, Homo sapiens
  Payload ID: 8735
  Gene Symbol: KLHL8
  Gene Name: kelch-like family member 8
  ENST ID: ENST00000425278
  CDS Start-End: 260-1573
gctcgcgcggggttggtgaggttccgctgagggcggccggggctctgggagcgtggtaacgtggctgcaaccttagcgacatcaggaagaacagggtcgaggatcgagtcacagcaaactgtacaatggcagttgagtgggttttgaaaaacgtctgaattgtagtgtctacatctaccttctgccttctctctaccctttgaaaaaaaataaatggcatgtttgagaagagagctctattaaaagaggaatattgcaaatggcttcagattctatgagtagtaaacaagctaggaatcacattacaaaggggaaaaggcaacaacagcaccagcaaataaagaacagatcctcaattagtgatggtgatggagaagattcctttatttttgaagcaaatgaagcttggaaagattttcatggttctcttcttcgattttatgaaaatggagaactctgtgatgtcacactcaaggttcgcctgccattgttgccggttgattttcttatgggtgttgtggcaaaagaacagattgtcaagcaaaatctaaaatgtagagatttactggatgaagcaagaaattaccaccttcacttgagtagcagagcagtacctgactttgaatactccattcggactaccccaaggaagcatactgctggtgtgctgttttgtgtaggtggtcgaggtggatctggtgacccctttcgcagtattgaatgctattctatcaacaaaaacagttggttctttggaccagaaatgaatagtcgaaggcgacatgtgggtgtaatctctgtggaaggtaaagtgtatgcagtaggtggacatgatggaaatgaacatttagggagtatggagatgtttgatcctctcactaataaatggatgatgaaggcatcaatgaacacaaagaggcgaggaattgccttggcttccttaggaggcccaatttatgcaattggagggttagatgacaatacttgcttcaatgatgtggagagatatgacatagaatctgatcagtggagtacagtggcaccaatgaatactccccgtggaggagttggctctgttgctctagtaaaccatgtttatgcagtaggtggcaatgatggaatggcttctttatctagcgtggagagatatgatccacatctggataagtggatagaagttaaagaaatgggtcagcgaagagcaggcaatggagttagcaagcttcatggttgcttatacgtagttggtggttttgatgataattctcctctgagttcagttgagcggtatgacccccgaagcaacaagtgggattatgtggcagcacttactactcccagaggtggagtgggaatcgcaacagtgatgggcaaaatctttgcagttggtggtcataatggcaatgcatacttaaatacagtagaagcgtttgatccagtgctgaataggtgggagcttgttggatctgtgtctcactgcagagctggagcaggagtagctgtgtgttcctgtttaactagccaaattcgagatgtaggtcatggatccaataatgtggttgactgtatgtgatttgagttctggccaccaacaatttagtcatatctgataggtacaaaagaaaaccaagattttgatatgaccacctttcaacactttttactgcaactagagtcttatttaaatgttaactgttgtattgtgactaagtacaacttttggaatgatacctgaagaattattagtaatagagttaaatttgatacttcctgcttttgcaaataatggagtagggaagaagatagtcgaacttaaaatcatacctaccctgaaaaatgcttaaagtagtgccaaaaatcttgaaatctctctctctctctctatttggatgaatcaaaatgtaatttgttgagttttgccttttcttttgcctaaagatgttaacgtcaggcagtgggtttttcctagaggagagattagtacctattcattaacacaaggatacataagagacttgccccttttgaagatcatttctacttggtgctgatgaatttatgcctagctttttttttctaggtggtgatttttcaatttcttttatatttacggaagtagaaaaaatgttctgtctttttgaatgccacttagctgcattttcagaagcttataggctataagaagcctttaatttcagtttgaattgctaggacaccaaaagacctagctgggctaactccatccaaatgattttacagttttattttttcatcttttgcaaaaagtatttgttacataatcaaaaggtgaaccagaggaaatattgaacaaggttttagatctgatgttattctggtgcccaattgagagaccttgagaaagaatgatgcagattacatgactctaatgtgggcagtctgaaaatatctttaactgtcttctttgatcatttgattttggatccaagatttatcatctctctattttgctatttgccaccatcctggtttttctgactgtacagaatcaatctgcatttatttattatcagaaatgaatgcatttttacaaaaacctttttgtagactgtagtttattgattagttcaagcccatcacgaactaattaaacatattgttggtaaaaacagagattgaaattactgtttttatcatatttaaatccctctggtgtatttattgaaatttaattaaaaatatttctacatattgatttgaagccaggatattgatggacctacagatttaacagctcttcaaagttttaactagcattataaaatggcctattcattatatgtatatttttttataaatatttatcaagaacatgaaaatattttattttgtatttgcagtgcagtttggcacctctcttccaggccttcctaagtttttgttagttgtgtcttcgaatttattgtagttcaccgctggtcagtaatctggttcataaggaagctggggcagtgaaaaacacttcgttgatccatccagccctaaagttcattgactaatagctcatgcatcttattaaatgggattctggacttctacaatagtgtggaaagccacatcacaaaaaaagccacatcacaaaaaaaagccagtgcctattgagtatatcaaaccaaaaaagaaaaaaaaaagttttaagaggggtcaggctggcagataaaagtctcttatgaagcagatataaatccagtaagctatttttttctacctatgggcaagttcataagtcattgctggatctgaaccagtgttcttttgtgtaagtacaaccatatttcagtcagtccagaggcagttaaccctgtagcacttactagactggtgacaactggctggatgtggagaataagtgtcaaaacctggcttcaatgtctatttcttatgtctaatggagttcttatattacagtgtttgtttagctatggttactaatatgtttgttatatttattttcggggagaggatcttgttattgtttcctgagattatttaaaatgttttttctttgatgtatttctgtctttcttatatgtaaggagttataagggttattatattttcatttctggtttttactatacaatggttatctaacatactaagttggtaccctacctacccgtaaaatatgaaatactcagaagtaaagtgtgtgggcaatcagaagcatagccttgaaggacctgacagcagtatgaaaagataaataggccaggcatggtggctcacgcctgtgatcccagcactttgggaggccgaggtgggtggaccacctgagatcaggtgttcaagaccagcctgaccaacatggtgaaaccctgtctctactaaaagtacaaaaattagccaggcgtggtggcgcatacctgtaattccagctactcaggaggctgaggcaggagaattgcttgaacccaggaggtggaggttgcaatgagccgaggttgagccatcgcactccagcggtgaaacaagagtgaaactccatctcaaaaaaaaaaaaaaaaaaa

SEQ ID NO: 145368 - DNA, 3245 bp, Homo sapiens
  Payload ID: 8735
  Gene Symbol: KLHL8
  Gene Name: kelch-like family member 8
  Uniprot ID: Q9P2G9
  ENST ID: ENST00000512111
  CDS Start-End: 386-2248
aaattcgagccctcgtgcaccaaccgaaactccacagctgagagggcttggggcccggacagcaggagatccagcccctgagcaaccttccacggcttttgtcgcccccattggcgggaggagcagggttatgctcccggctcccgtaggggagctccagcctctggctctgtcagcctccccggcagctccttgactccttcctcccagtctttcgaagaggggcccaggcagtcacagcaaactgtacaatggcagttgagtgggttttgaaaaacgtctgaattgtagtgtctacatctaccttctgccttctctctaccctttgaaaaaaaataaatggcatgtttgagaagagagctctattaaaagaggaatattgcaaatggcttcagattctatgagtagtaaacaagctaggaatcacattacaaaggggaaaaggcaacaacagcaccagcaaataaagaacagatcctcaattagtgatggtgatggagaagattcctttatttttgaagcaaatgaagcttggaaagattttcatggttctcttcttcgattttatgaaaatggagaactctgtgatgtcacactcaaggttggctcaaagctaatctcttgtcacaagctggtattggcttgtgttattccctactttagagccatgtttctttctgaaatggctgaagccaagcaaacgctgattgagattagagattttgatggtgatgcaatagaagacttggtaaagtttgtctattcttcacggctcactttgactgttgacaatgtccagcctctcttatatgcagcctgtattctgcaggttgaactggtggctagagcttgttgtgaatacatgaagttacattttcatccctccaattgcctggcagtaagagcctttgcagaaagtcacaatcgaatagacttaatggacatggcggatcagtatgcctgtgaccattttactgaagtagtggagtgtgaagactttgtaagtgtatcaccgcagcacctccataagcttttgtcctccagtgatctaaatattgaaaatgaaaagcaggtctataatgctgccatcaagtggcttcttgccaatcctcagcatcattccaaatggttggatgaaacacttgcacaggttcgcctgccattgttgccggttgattttcttatgggtgttgtggcaaaagaacagattgtcaagcaaaatctaaaatgtagagatttactggatgaagcaagaaattaccaccttcacttgagtagcagagcagtacctgactttgaatactccattcggactaccccaaggaagcatactgctggtgtgctgttttgtgtaggtggtcgaggtggatctggtgacccctttcgcagtattgaatgctattctatcaacaaaaacagttggttctttggaccagaaatgaatagtcgaaggcgacatgtgggtgtaatctctgtggaaggtaaagtgtatgcagtaggtggacatgatggaaatgaacatttagggagtatggagatgtttgatcctctcactaataaatggatgatgaaggcatcaatgaacacaaagaggcgaggaattgccttggcttccttaggaggcccaatttatgcaattggagggttagatgacaatacttgcttcaatgatgtggagagatatgacatagaatctgatcagtggagtacagtggcaccaatgaatactccccgtggaggagttggctctgttgctctagtaaaccatgtttatgcagtaggtggcaatgatggaatggcttctttatctagcgtggagagatatgatccacatctggataagtggatagaagttaaagaaatgggtcagcgaagagcaggcaatggagttagcaagcttcatggttgcttatacgtagttggtggttttgatgataattctcctctgagttcagttgagcggtatgacccccgaagcaacaagtgggattatgtggcagcacttactactcccagaggtggagtgggaatcgcaacagtgatgggcaaaatctttgcagttggtggtcataatggcaatgcatacttaaatacagtagaagcgtttgatccagtgctgaataggtgggagcttgttggatctgtgtctcactgcagagctggagcaggagtagctgtgtgttcctgtttaactagccaaattcgagatgtaggtcatggatccaataatgtggttgactgtatgtgatttgagttctggccaccaacaatttagtcatatctgataggtacaaaagaaaaccaagattttgatatgaccacctttcaacactttttactgcaactagagtcttatttaaatgttaactgttgtattgtgactaagtacaacttttggaatgatacctgaagaattattagtaatagagttaaatttgatacttcctgcttttgcaaataatggagtagggaagaagatagtcgaacttaaaatcatacctaccctgaaaaatgcttaaagtagtgccaaaaatcttgaaatctctctctctctctctatttggatgaatcaaaatgtaatttgttgagttttgccttttcttttgcctaaagatgttaacgtcaggcagtgggtttttcctagaggagagattagtacctattcattaacacaaggatacataagagacttgccccttttgaagatcatttctacttggtgctgatgaatttatgcctagctttttttttctaggtggtgatttttcaatttcttttatatttacggaagtagaaaaaatgttctgtctttttgaatgccacttagctgcattttcagaagcttataggctataagaagcctttaatttcagtttgaattgctaggacaccaaaagacctagctgggctaactccatccaaatgattttacagttttattttttcatcttttgcaaaaagtatttgttacataatcaaaaggtgaaccagaggaaatattgaacaaggttttagatctgatgttattctggtgcccaattgagagaccttgagaaagaatgatgcagattacatgactctaatgtgggcagtctgaaaatatctttaactgtcttctttgatcatttgattttggatccaagatttatcatctctctattttgctatttgccaccatcctggtttttctgactgtacagaatcaatctgcatttatttattatcagaaatgaatgcatttttac

SEQ ID NO: 145369 - DNA, 2399 bp, Homo sapiens
  Payload ID: 8735
  Gene Symbol: KLHL8
  Gene Name: kelch-like family member 8
  ENST ID: ENST00000506985
  CDS Start-End: 198-431
ggctgcaaccttagcgacatcaggaagaacagggtcgaggatcgagtcacagcaaactgtacaatggcagttgagtgggttttgaaaaacgtctgaattgtagtgtctacatctaccttctgccttctctctaccctttgaaaaaaaataaatggcatgtttgagaagagagctctattaaaagaggaatattgcaaatggcttcagattctatgagtagtaaacaagctaggaatcacattacaaaggggaaaaggcaacaacagcaccagcaaataaagaacagatcctcaattagtgatggtgatggagaagattcctttatttttgaagcaaatgaagcttggaaagattttcatggttctcttcttcgattttatgaaaatggagaactctgtgatgtcacactcaaggtgtgctgttttgtgtaggtggtcgaggtggatctggtgacccctttcgcagtattgaatgctattctatcaacaaaaacagttggttctttggaccagaaatgaatagtcgaaggcgacatgtgggtgtaatctctgtggaaggtaaagtgtatgcagtaggtggacatgatggaaatgaacatttagggagtatggagatgtttgatcctctcactaataaatggatgatgaaggcatcaatgaacacaaagaggcgaggaattgccttggcttccttaggaggcccaatttatgcaattggagggttagatgacaatacttgcttcaatgatgtggagagatatgacatagaatctgatcagtggagtacagtggcaccaatgaatactccccgtggaggagttggctctgttgctctagtaaaccatgtttatgcagtaggtggcaatgatggaatggcttctttatctagcgtggagagatatgatccacatctggataagtggatagaagttaaagaaatgggtcagcgaagagcaggcaatggagttagcaagcttcatggttgcttatacgtagttggtggttttgatgataattctcctctgagttcagttgagcggtatgacccccgaagcaacaagtgggattatgtggcagcacttactactcccagaggtggagtgggaatcgcaacagtgatgggcaaaatctttgcagttggtggtcataatggcaatgcatacttaaatacagtagaagcgtttgatccagtgctgaataggtgggagcttgttggatctgtgtctcactgcagagctggagcaggagtagctgtgtgttcctgtttaactagccaaattcgagatgtaggtcatggatccaataatgtggttgactgtatgtgatttgagttctggccaccaacaatttagtcatatctgataggtacaaaagaaaaccaagattttgatatgaccacctttcaacactttttactgcaactagagtcttatttaaatgttaactgttgtattgtgactaagtacaacttttggaatgatacctgaagaattattagtaatagagttaaatttgatacttcctgcttttgcaaataatggagtagggaagaagatagtcgaacttaaaatcatacctaccctgaaaaatgcttaaagtagtgccaaaaatcttgaaatctctctctctctctctatttggatgaatcaaaatgtaatttgttgagttttgccttttcttttgcctaaagatgttaacgtcaggcagtgggtttttcctagaggagagattagtacctattcattaacacaaggatacataagagacttgccccttttgaagatcatttctacttggtgctgatgaatttatgcctagctttttttttctaggtggtgatttttcaatttcttttatatttacggaagtagaaaaaatgttctgtctttttgaatgccacttagctgcattttcagaagcttataggctataagaagcctttaatttcagtttgaattgctaggacaccaaaagacctagctgggctaactccatccaaatgattttacagttttattttttcatcttttgcaaaaagtatttgttacataatcaaaaggtgaaccagaggaaatattgaacaaggttttagatctgatgttattctggtgcccaattgagagaccttgagaaagaatgatgcagattacatgactctaatgtgggcagtctgaaaatatctttaactgtcttctttgatcatttgattttggatccaagatttatcatctctctattttgctatttgccaccatcctggtttttctgactgtacagaatcaatctgcatttatttattatcagaaatgaatgcatttttacaaaaacctttttgtagactgtagtttattgattagttcaagcccatcacgaactaattaaacatattgttggtaaaaa

SEQ ID NO: 145370 - DNA, 5175 bp, Homo sapiens
  Payload ID: 8735
  Gene Symbol: KLHL8
  Gene Name: kelch-like family member 8
  Uniprot ID: Q9P2G9
  ENST ID: ENST00000498875
  CDS Start-End: 271-1905
gtccgccgggtgctcgcgcggggttggtgaggttccgctgagggcggccggggctctgggagcgtggtaacgtggctgcaaccttagcgacatcaggaagaacagggtcgaggatcgagtcacagcaaactgtacaatggcagttgagtgggttttgaaaaacgtctgaattgtagtgtctacatctaccttctgccttctctctaccctttgaaaaaaaataaatggcatgtttgagaagagagctctattaaaagaggaatattgcaaatggcttcagattctatgagtagtaaacaagctaggaatcacattacaaaggggaaaaggcaacaacagcaccagcaaataaagaacagatcctcaattagtgatggtgatggagaagattcctttatttttgaagcaaatgaagcttggaaagattttcatggttctcttcttcgattttatgaaaatggagaactctgtgatgtcacactcaaggttgaactggtggctagagcttgttgtgaatacatgaagttacattttcatccctccaattgcctggcagtaagagcctttgcagaaagtcacaatcgaatagacttaatggacatggcggatcagtatgcctgtgaccattttactgaagtagtggagtgtgaagactttgtaagtgtatcaccgcagcacctccataagcttttgtcctccagtgatctaaatattgaaaatgaaaagcaggtctataatgctgccatcaagtggcttcttgccaatcctcagcatcattccaaatggttggatgaaacacttgcacaggttcgcctgccattgttgccggttgattttcttatgggtgttgtggcaaaagaacagattgtcaagcaaaatctaaaatgtagagatttactggatgaagcaagaaattaccaccttcacttgagtagcagagcagtacctgactttgaatactccattcggactaccccaaggaagcatactgctggtgtgctgttttgtgtaggtggtcgaggtggatctggtgacccctttcgcagtattgaatgctattctatcaacaaaaacagttggttctttggaccagaaatgaatagtcgaaggcgacatgtgggtgtaatctctgtggaaggtaaagtgtatgcagtaggtggacatgatggaaatgaacatttagggagtatggagatgtttgatcctctcactaataaatggatgatgaaggcatcaatgaacacaaagaggcgaggaattgccttggcttccttaggaggcccaatttatgcaattggagggttagatgacaatacttgcttcaatgatgtggagagatatgacatagaatctgatcagtggagtacagtggcaccaatgaatactccccgtggaggagttggctctgttgctctagtaaaccatgtttatgcagtaggtggcaatgatggaatggcttctttatctagcgtggagagatatgatccacatctggataagtggatagaagttaaagaaatgggtcagcgaagagcaggcaatggagttagcaagcttcatggttgcttatacgtagttggtggttttgatgataattctcctctgagttcagttgagcggtatgacccccgaagcaacaagtgggattatgtggcagcacttactactcccagaggtggagtgggaatcgcaacagtgatgggcaaaatctttgcagttggtggtcataatggcaatgcatacttaaatacagtagaagcgtttgatccagtgctgaataggtgggagcttgttggatctgtgtctcactgcagagctggagcaggagtagctgtgtgttcctgtttaactagccaaattcgagatgtaggtcatggatccaataatgtggttgactgtatgtgatttgagttctggccaccaacaatttagtcatatctgataggtacaaaagaaaaccaagattttgatatgaccacctttcaacactttttactgcaactagagtcttatttaaatgttaactgttgtattgtgactaagtacaacttttggaatgatacctgaagaattattagtaatagagttaaatttgatacttcctgcttttgcaaataatggagtagggaagaagatagtcgaacttaaaatcatacctaccctgaaaaatgcttaaagtagtgccaaaaatcttgaaatctctctctctctctctatttggatgaatcaaaatgtaatttgttgagttttgccttttcttttgcctaaagatgttaacgtcaggcagtgggtttttcctagaggagagattagtacctattcattaacacaaggatacataagagacttgccccttttgaagatcatttctacttggtgctgatgaatttatgcctagctttttttttctaggtggtgatttttcaatttcttttatatttacggaagtagaaaaaatgttctgtctttttgaatgccacttagctgcattttcagaagcttataggctataagaagcctttaatttcagtttgaattgctaggacaccaaaagacctagctgggctaactccatccaaatgattttacagttttattttttcatcttttgcaaaaagtatttgttacataatcaaaaggtgaaccagaggaaatattgaacaaggttttagatctgatgttattctggtgcccaattgagagaccttgagaaagaatgatgcagattacatgactctaatgtgggcagtctgaaaatatctttaactgtcttctttgatcatttgattttggatccaagatttatcatctctctattttgctatttgccaccatcctggtttttctgactgtacagaatcaatctgcatttatttattatcagaaatgaatgcatttttacaaaaacctttttgtagactgtagtttattgattagttcaagcccatcacgaactaattaaacatattgttggtaaaaacagagattgaaattactgtttttatcatatttaaatccctctggtgtatttattgaaatttaattaaaaatatttctacatattgatttgaagccaggatattgatggacctacagatttaacagctcttcaaagttttaactagcattataaaatggcctattcattatatgtatatttttttataaatatttatcaagaacatgaaaatattttattttgtatttgcagtgcagtttggcacctctcttccaggccttcctaagtttttgttagttgtgtcttcgaatttattgtagttcaccgctggtcagtaatctggttcataaggaagctggggcagtgaaaaacacttcgttgatccatccagccctaaagttcattgactaatagctcatgcatcttattaaatgggattctggacttctacaatagtgtggaaagccacatcacaaaaaaagccacatcacaaaaaaaagccagtgcctattgagtatatcaaaccaaaaaagaaaaaaaaaagttttaagaggggtcaggctggcagataaaagtctcttatgaagcagatataaatccagtaagctatttttttctacctatgggcaagttcataagtcattgctggatctgaaccagtgttcttttgtgtaagtacaaccatatttcagtcagtccagaggcagttaaccctgtagcacttactagactggtgacaactggctggatgtggagaataagtgtcaaaacctggcttcaatgtctatttcttatgtctaatggagttcttatattacagtgtttgtttagctatggttactaatatgtttgttatatttattttcggggagaggatcttgttattgtttcctgagattatttaaaatgttttttctttgatgtatttctgtctttcttatatgtaaggagttataagggttattatattttcatttctggtttttactatacaatggttatctaacatactaagttggtaccctacctacccgtaaaatatgaaatactcagaagtaaagtgtgtgggcaatcagaagcatagccttgaaggacctgacagcagtatgaaaagataaataggccaggcatggtggctcacgcctgtgatcccagcactttgggaggccgaggtgggtggaccacctgagatcaggtgttcaagaccagcctgaccaacatggtgaaaccctgtctctactaaaagtacaaaaattagccaggcgtggtggcgcatacctgtaattccagctactcaggaggctgaggcaggagaattgcttgaacccaggaggtggaggttgcaatgagccgaggttgagccatcgcactccagcggtgaaacaagagtgaaactccatctcaaaaaaaaaaaaaaaaaaaagataaaaaagcagaatcaatatgtgcacagttctctttatcaggcaaaaacacgtttattgagacatgaaatgagaatcaggctgaaggaatcatgcagctgaaagatgattatattcatagaaatgaagagatgaaatattcaaagaagatggctactttattgtgagacttaccactttaacctcatatgttaacagcacctaccaaaaaatgatatgagatagagctaaaatactgaaattgcaaatggacaaaataaatcatgaaaatttgtttattatttcttcaataaatatttctaggtgctttgtgattctttcatttagtcattaaagccattgctttactatattgcgttgccactttaaaaacaagttacttgacattgtttttgacagatttcactatatacttatgtaattaattgattatttctaaaatgtttgaataaactttgtactccctctaaggagtattttattcattcttttaattcccaaatgaactttgaacttacagtgctgttgaatgccttggtaaggacttcttgaaattgcataaactattcttgtaaatggtaaacttgagaattttctttgtttcttttttctctatgtcttaaagaatgcctttagaatctaattcatgttgtatcagttaagaatgtttctgtggtttctcgtatcagatgtgtaaagaaattattactgggatgccattggctatgtctctttccccttcatgtaaaattccaagtgtcagtaaaacttctctataatattttcttaaaa

SEQ ID NO: 145371 - DNA, 5710 bp, Homo sapiens
  Payload ID: 8736
  Gene Symbol: KLHL9
  Gene Name: kelch-like family member 9
  Uniprot ID: Q9P2J3
  ENST ID: ENST00000359039
  CDS Start-End: 522-2375
ggaaggagcggctcggtgttggggctaggccggtattctaggcccaagcccaggcccaggcctgtgttcccggcccttgctcaaagacaggccggtggccgctgcgacactctaggtacagcggagggcgcagcgggccgttcgctgaggtgtccggacccgccgccgagcgggccgtggagccacagtacgtggcggcgcctcttccttgcccgaagcggaactgctgaaggagcggcagcgcaggccggacgaggtgaaccaggtcatttaaccgccttcaggtgatgaatcatctgtctaataatcagatttgaggtccacagccctttgtggtcctgctacagggtgattttcagtggatgactgactggcgtggcccgaggggtgccgcagtgactgccttcccttgataaggaaacgagctttctgttctttctggacacctcgttacctgtaaaacattccggttataacttctttatccggcttgcatctctgtgcaagaggaaagctttcacatgaaagtgtcccttggtaacggcgaaatgggcgtctctgcccatttgcagccttgtaaggcaggaaccacacgcttttttaccagcaatactcacagttcggtggtattgcaaggctttgatcagcttagaatagaaggattgctttgtgatgtgaccctggtaccaggtgatggagatgaaatcttccctgttcacagagctatgatggcgtctgctagtgattatttcaaagccatgttcacaggtggaatgaaagaacaagatttgatgtgcattaagcttcatggggtgaacaaggttggtctgaagaaaatcattgattttatttatactgcaaaactttctcttaatatggacaatcttcaggacacacttgaagctgctagctttttacaaatattacccgttttggatttctgtaaagtatttcttatatcaggagtctctttggataactgtgttgaggttggacgaattgctaacacctacaatcttatagaagtggataaatatgttaataatttcatcctgaagaactttcctgctttattgagtactggggagtttctaaaactcccttttgaacgacttgcatttgtgctttccagtaatagtcttaagcactgtaccgaacttgaactctttaaggcagcctgtcgctggctaaggttggaagaccctcggatggattatgctgcaaagttaatgaagaatattcgatttccactgatgacaccacaggatctcatcaattacgtgcagacagtagatttcatgagaacagacaatacctgcgtgaatttgcttttggaagctagcaattaccaaatgatgccatatatgcagccagtgatgcagtcagatagaactgccattcgatctgactccactcacttggttacattaggaggagttttgaggcagcagctggttgtcagtaaagaattacggatgtatgatgaaagggcacaagaatggagatctttagccccaatggatgctccccgttaccagcatggtattgctgtcattggaaactttctttatgtagttggtggtcagagtaattatgatacaaaaggaaaaactgctgttgatacagttttcagatttgatcctcggtataataaatggatgcaggttgcatcattaaatgaaaagcgcacattctttcacttgagtgccctcaaaggacatttgtatgcagttggtgggcgcagtgcagctggtgaactggccacagtagaatgttacaacccaagaatgaatgagtggagctatgttgcaaaaatgagtgaaccccactatggtcatgctggaacagtatatggaggcttaatgtatatttcaggaggaattacccatgacactttccaaaatgagctcatgtgttttgacccagatacagataaatggatgcaaaaggctccaatgactacagtcagaggtctgcattgcatgtgtacagttggagataagctctatgtcattggtggcaatcacttcagaggaacaagtgattatgatgatgttctaagctgtgaatactattcaccaacccttgaccagtggaccccaattgccgccatgttaagaggccaaagtgatgttggagttgccgtctttgaaaataaaatctatgttgttggtggatattcttggaataatcgttgtatggtagaaattgtccagaaatatgacccagaaaaagatgagtggcataaagtttttgatcttccagagtcacttggtggcattcgagcctgtacactcacagtttttccacctgaagaaaaccctgggtcaccttctagagaatcacctctttcagcaccttcagatcattcttaggtctaaggtgtaacacctttgcagtacgtcatgggtgatctaatacttccccttcagttgtatcttcttacagtgattggtacagttattagatataaaggtaactgatgttattcgtcttgtatggcttttagtatgtttatcaagtggctaacaaatgcattctgaaaatgtatttaacatagctgttttaacaaatgaaaaaaagacgtagaaaaatgtttagatgtctttttgtgatgttatataaaattgtagatgactgtggtaaatgtgtaattatgtccattatgcttcaaagttgagttttcatctttgactccaaaatgtcagagggaggccgctctaaactaaaaataacgaaaggttgccaagtattaatactagttacctccctcttttcgtagtttttgtcatgtctgtcaacttactcgattgtgtggttgcattcagaatatttgaagtttcttacgtagacagaaataataaaaatattaactaggaaaaaacagtatagcaccaagccagtatttggtatctctctctagagcgagcaagagagggagagaggaggaaaaaatacacataatacaaacatacatgcatgcacacatacatacatatgtatacacacacataatttgaaaactgattggcacttcaacgatgctgaaattgtttttaaattgaagtttctttcttccacaaagcagccgtttctattcaaatggaaattcagtaccagagaataaatgtctatgtagtcatactgaatttagatagataagggctacagcatactaaatcgacaaccaaatttgtcatgtgactaaaccgttacttcagatgaagcttacattactgttttctgcttgtgtattttctgtagagtacttttacacagattggtaaagttcaggtttcagagaactgcttttgtgcagaaaatttaggttcttttttccacctttttggtcagtaaaacttaatgaaaaaagcaaagaaaaaaatattctgaacaaagctatagggttttaagttcagcctcccaacttagtcatcctaacatgattattttgtgatttggggtgcttgccctggtgctgttccagtccatgtgcatcctgagctgtgtgatctgcctcgaggctatgatctgagcaagcaggagataacattttcttctgcatcaagtgaggaaaaatgtgcttttggccatgtctcaaagacaggaccaacttcagattcccaaagaagccagctacagagcctctggaacactatggtcttacaagcagtactaaaatcaaccctcagcctcttcaatgccaaaggtatccctattggttgagaaccacatggtaatttttaatgggacttttatcagcaaatggagttacaggaattctctgtaatgagtgattctgaagaggtactttcctggaataattgtctacctgaagaaaaaaaatttatatatacattgtgtgtgtgtgtaatacacacacacaaccccctatacctggaagattgtcagcatgtaaatcaggaacaactttctccttattgacaatcccataataaaactcaggaaccaaggcaaaatgaattggcttctaggggtctgaaccttactgcccatacaagtgttgattcattttaatgctgtttatgatttctgcattggcagaaattttcatactttctatgtttttttaattactcagttttttattactaaaaatagcacatttgagtacatttgaaaagtagaaaaattagaaattattaactttattgaataagcaagaagtgcatcctaatcctttgattattaatgaggttgaatatttgtgtgctatcggtagctgtgtttctttgatcagatgttcctgtccttttgcccttctgttatctgttggagttgctttgtttttcgtatcaagttataggatctctttatataataaatgtaatttaacttgcatttgcttgcatttatttcttccctcaatctgttgtagttttacaaaggcaacgctgttcagttaatttttgagatcaaatttgtctttttttttttttgagacagggtctcactgttgtgcagtctggagtgcaatggcacgatgtgtgctcactgaaacctctgcctctcatgttcaggcgattctcccacctcagcctcccgattagctgggattacaggcatgtaccaccaagcccggctaattttgtatttttagtagagatggggttaggggataattttgatatggtttattttttatgtagtatttcagtgcttattctgacatatcaaggtgatactgccctgcctctattttgtacaggcttttccttttattgaaaaaaagtactttttattacatcttatgtctgaacctggtgcttcctattgaaataagtattgctttactaggtaaactgctctatctacatcccccacctccagcttcacccaccctgcctctcatttttttactttcccgtattctgcagttgacagttctcttggtaatcatacaggtagctgactaatgctatgctaatacaggttgagcagccctaatccaaaaatccaaattgctccaaaatttaaaactttttgagggccaacaggatgccacaagtagaaaattccacaccagagctcatgtgacaggttacactcaaaacacagtgaagacttgtttcatgcacaacattattaagactattataattaccttcagactacgtgtctgaaacgtgaaatataaccgaagttttaagtaatattgtttagacttgggtccctcccccaggatacgtcatgtacatgcaaatattccaaaatccaaaacacttctggtcccaagcatttcagataagggatattcaatctgtactgctcattaaacctggagtttcttatagagagaaattttaggtggttgaaatgattaaatggaaagagatttattttcataagctggtaattttttaaagaaagttcagactggaaaaatatttagaggataaaaactaaaagcacataaagcattatgttaacatttcttgttttagtttttcggaaagtattcaaaaattaacatttgttagcttttttgatatgtctattatagaacgtacaggaaaataaaagcaaactaatttatcagtgattccacatgttgaagataatttctattaatagtatattatatatatatatatacgtacatatgtgcaggcatttgtcaaatatttttcaagtatgccagaccttaggctaaaagctggataatgaaaataaatccaccttccaaaga

SEQ ID NO: 145372 - DNA, 2812 bp, Homo sapiens
  Payload ID: 8737
  Gene Symbol: KEL
  Gene Name: Kell blood group, metallo-endopeptidase
  Uniprot ID: P23276
  ENST ID: ENST00000355265
  CDS Start-End: 476-2674
attttgtcatcgcaacactaaacctttgtcggtctggtgctccccaattcatgaattgcttcttacttaaataaactctttaaaattttactgtgcctcatattttttttaatacagaagaaatgagagaaggaagaatattttagaaataaaggaacttcatgggcagagtcacagtgcaagacaaaaggagcagaccaagggcaagattgcttggggagtgaagactccctccctcttctcccctgagaagctgagataaagggggaggagaagcctgggtgccccccactgataagcaggctccacccagaggccagtcctgtgtgtctggggacaaggcgaaagagcagcagaagtgccccttctccaggatcaaggaactggggcggggggtgtttcctggaccccagtcctccgaatcagctcctagagtggaaccaggaaggattctggagccacagaagatagacagatggaaggtggggaccaaagtgaggaagagccgagggaacgcagccaggcaggtggaatgggaactctctggagccaagagagcactccagaagagaggctgcccgtggaagggagcaggccatgggcagtggccaggcgggtgctgacagctatcctgattttgggcctgctcctttgtttttctgtgcttttgttctacaacttccagaactgtggccctcgcccctgtgagacatctgtgtgtttggatctccgggatcattacctggcctctgggaacacaagtgtggccccctgcaccgacttcttcagctttgcctgtggaagggccaaagagaccaataattcttttcaggagcttgccacaaagaacaaaaaccgacttcggagaatactggaggtccagaattcctggcacccaggctctggggaggagaaagccttccagttctacaactcctgcatggatacacttgccattgaagctgcagggactggtcccctcagacaagttattgaggagcttggaggctggcgcatctctggtaaatggacttccttaaactttaaccgaacgctgagacttctgatgagtcagtatggccatttccctttcttcagagcctacctaggacctcatcctgcctctccacacacaccagtcatccagatagaccagccagagtttgatgttcccctcaagcaagatcaagaacagaagatctatgcccagatctttcgggaatacctgacttacctgaatcagctgggaaccttgctgggaggagacccaagcaaggtgcaagaacactcttccttgtcaatctccatcacttcacggctgttccagtttctgaggcccctggagcagcggcgggcacagggcaagctcttccagatggtcactatcgaccagctcaaggaaatggcccccgccatcgactggttgtcctgcttgcaagcgacattcacaccgatgtccctgagcccttctcagtccctcgtggtccatgacgtggaatatttgaaaaacatgtcacaactggtggaggagatgctgctaaagcagagggactttctgcagagccacatgatcttagggctggtggtgaccctttctccagccctggacagtcaattccaggaggcacgcagaaagctcagccagaaactgcgggaactgacagagcaaccacccatgcctgcccgcccacgatggatgaagtgcgtggaggagacaggcacgttcttcgagcccacgctggcggctttgtttgttcgtgaggcctttggcccgagcacccgaagtgctgccatgaaattattcactgcgatccgggatgccctcatcactcgcctcagaaaccttccctggatgaatgaggagacccagaacatggcccaggacaaggttgctcaactgcaggtggagatgggggcttcagaatgggccctgaagccagagctggcccgacaagaatacaacgatatacagcttggatcgagcttcctgcagtctgtcctgagctgtgtccggtccctccgagctagaattgtccagagcttcttgcagcctcacccccaacacaggtggaaggtgtccccttgggacgtcaatgcttactattcggtatctgaccatgtggtagtctttccagctggactcctccaacccccattcttccaccctggctatcccagagccgtgaactttggcgctgctggcagcatcatggcccacgagctgttgcacatcttctaccagctcttactgcctgggggctgcctcgcctgtgacaaccatgccctccaggaagctcacctgtgcctgaagcgccattatgctgcctttccattacctagcagaacctccttcaatgactccctcacattcttagagaatgctgcagacgttggggggctagccatcgcgctgcaggcatacagcaagaggctgttacggcaccatggggagactgtcctgcccagcctggacctcagcccccagcagatcttctttcgaagctatgcccaggtgatgtgtaggaagcccagcccccaggactctcacgacactcacagccctccacacctccgagtccacgggcccctcagcagcaccccagcctttgccaggtatttccgctgtgcacgtggtgctctcttgaacccctccagccgctgccagctctggtaacttggttaccaaagatgccacagcacagaaatatcgaccaacacctccctggtcacatccatggaatcagagcaagatttcctttctgcttctgttccaaaaataaaagctggcacttggcttccgcttgtctcttaa

SEQ ID NO: 145373 - DNA, 556 bp, Homo sapiens
  Payload ID: 8737
  Gene Symbol: KEL
  Gene Name: Kell blood group, metallo-endopeptidase
  ENST ID: ENST00000460479
  CDS Start-End: 1-556
gcaaaagtcctgcccccactggaggggagggaatgaaggtggggaccaaagtgaggaagagccgagggaacgcagccaggcaggtggaatgggaactctctggagccaagagagcactccagaagagaggctgcccgtggaagggagcaggccatgggcagtggccaggcgggtgctgacagctatcctgattttgggcctgctcctttgtttttctgtgcttttgttctacaacttccagaactgtggccctcgcccctgtgagacatctgtgtgtttggatctccgggatcattacctggcctctgggaacacaagtgtggccccctgcaccgacttcttcagctttgcctgtggaagggccaaagagaccaataattcttttcaggagcttgccacaaagaacaaaaaccgacttcggagaatactggaggtccagaattcctggcacccaggctctggggaggagaaagccttccagttctacaactcctgcatggatacacttgccattgaagctgcagggactggtcccctcagacaagttattgaggag

SEQ ID NO: 145374 - DNA, 649 bp, Homo sapiens
  Payload ID: 8737
  Gene Symbol: KEL
  Gene Name: Kell blood group, metallo-endopeptidase
  ENST ID: ENST00000476829
  CDS Start-End: 96-649
gaactggggcggggggtgtttcctggaccccagtcctccgaatcagctcctagagtggaaccaggaaggattctggagccacagaagatagacagatggaaggtggggaccaaagtgaggaagagccgagggaacgcagccaggcaggtggaatgggaactctctggagccaagagagcactccagaagagaggctgcccgtggaagggagcaggccatgggcagtggccaggcgggtgctgacagctatcctgattttgggcctgctcctttgtttttctgtgcttttgttctacaacttccagaactgtggccctcgcccctgtgagacatctgtgtgtttggatctccgggatcattacctggcctctgggaacacaagtgtggccccctgcaccgacttcttcagctttgcctgtggaagggccaaagagaccaataattcttttcaggagcttgccacaaagaacaaaaaccgacttcggagaatactggaggtccagaattcctggcacccaggctctggggaggagaaagccttccagttctacaactcctgcatggatacacttgccattgaagctgcagggactggtcccctcagacaagttattgaggagatctttcgggaatacctgacttacctgaa

SEQ ID NO: 145375 - DNA, 786 bp, Homo sapiens
  Payload ID: 8737
  Gene Symbol: KEL
  Gene Name: Kell blood group, metallo-endopeptidase
  ENST ID: ENST00000467543
  CDS Start-End: 175-786
agaagtgccccttctccaggatcaaggaactggggcggggggtgtttcctggaccccagtcctccgaatcagctcctagagtggaaccaggaaggattctggagccacagaagatagacagatggtggggaccaaagtgaggaagagccgagggaacgcagccaggcaggtggaatgggaactctctggagccaagagagcactccagaagagaggctgcccgtggaagggagcaggccatgggcagtggccaggcgggtgctgacagctatcctgattttgggcctgctcctttgtttttctgtgcttttgttctacaacttccagaactgtggccctcgcccctgtgagacatctgtgtgtttggatctccgggatcattacctggcctctgggaacacaagtgtggccccctgcaccgacttcttcagctttgcctgtggaagggccaaagagaccaataattcttttcaggagcttgccacaaagaacaaaaaccgacttcggagaatactggaggtccagaattcctggcacccaggctctggggaggagaaagccttccagttctacaactcctgcatggatacacttgccattgaagctgcagggactggtcccctcagacaagttattgaggagcttggaggctggcgcatctctggtaaatggacttccttaaactttaaccgaacgctgagacttctgatgagtcagtatggccatttccctttcttcagagcctacctaggacctcatcctgcctctccacacacaccagtcatc

SEQ ID NO: 145376 - DNA, 2812 bp, Homo sapiens; identical to SEQ ID NO: 145372
  Payload ID: 8737
  Gene Symbol: KEL
  Gene Name: Kell blood group, metallo-endopeptidase
  Uniprot ID: P23276
  ENST ID: ENST00000615381
  CDS Start-End: 476-2674

SEQ ID NO: 145377 - DNA, 556 bp, Homo sapiens; identical to SEQ ID NO: 145373
  Payload ID: 8737
  Gene Symbol: KEL
  Gene Name: Kell blood group, metallo-endopeptidase
  ENST ID: ENST00000631527
  CDS Start-End: 1-556

SEQ ID NO: 145378 - DNA, 786 bp, Homo sapiens; identical to SEQ ID NO: 145375
  Payload ID: 8737
  Gene Symbol: KEL
  Gene Name: Kell blood group, metallo-endopeptidase
  ENST ID: ENST00000632261
  CDS Start-End: 175-786

SEQ ID NO: 145379 - DNA, 649 bp, Homo sapiens; identical to SEQ ID NO: 145374
  Payload ID: 8737
  Gene Symbol: KEL
  Gene Name: Kell blood group, metallo-endopeptidase
  ENST ID: ENST00000633704
  CDS Start-End: 96-649

SEQ ID NO: 145380 - DNA, 2451 bp, Homo sapiens
  Payload ID: 8738
  Gene Symbol: KRT1
  Gene Name: keratin 1, type II
  Uniprot ID: P04264
  ENST ID: ENST00000252244
  CDS Start-End: 60-1994
agaggagtgtttagctccttcccttactctaccttgctcctacttttctctaagtcaacatgagtcgacagtttagttccaggtctgggtaccgaagtggagggggcttcagctctggctctgctgggatcatcaactaccagcgcaggaccaccagcagctccacacgccgcagtggaggaggtggtgggagattttcaagctgtggtggtggtggtggtagctttggtgctggtggtggatttggaagtcggagtcttgttaaccttggtggcagtaaaagcatctccataagtgtggctagaggaggtggacgtggtagtggctttggtggtggttatggtggtggtggctttggtggtggtggctttggtggtggtggctttggtggaggtggcattgggggtggtggctttggtggttttggcagtggtggtggtggttttggtggaggtggctttgggggtggtggatatgggggtggttatggtcctgtctgccctcctggtggcatacaagaagtcactatcaaccagagccttcttcagcccctcaatgtggagattgaccctgagatccaaaaggtgaagtctcgagaaagggagcaaatcaagtcactcaacaaccaatttgcctccttcattgacaaggtgaggttcctggagcagcagaaccaggtactgcaaacaaaatgggagctgctgcagcaggtagatacctccactagaacccataatttagagccctactttgagtcattcatcaacaatctccgaaggagagtggaccaactgaagagtgatcaatctcggttggattcggaactgaagaacatgcaggacatggtggaggattaccggaacaagtatgaggatgaaatcaacaagcggacaaatgcagagaatgaatttgtgaccatcaagaaggatgtggatggtgcttatatgaccaaggtggaccttcaggccaaacttgacaacttgcagcaggaaattgatttccttacagcactctaccaagcagagttgtctcagatgcagactcaaatcagtgaaactaatgtcatcctctctatggacaacaaccgcagtctcgacctggacagcatcattgctgaggtcaaggcccagtacgaggatatagcccagaagagcaaagctgaggccgagtccttgtaccagagcaagtatgaagagctgcagatcactgctggcagacatggggatagtgtgagaaattcaaagatagaaatttctgagctgaatcgtgtgatccagagacttagatctgaaatcgacaatgtcaagaagcagatctccaacttgcagcagtccatcagtgatgcagagcagcgtggcgagaatgccctcaaggatgccaagaacaagctgaatgacctggaggatgccctgcagcaggccaaggaagacctggcccgcctgctgcgcgactaccaggagctgatgaacacaaagctggccctggatctggagattgccacctacaggaccctcctggagggagaagaaagcaggatgtctggagaatgtgccccgaacgtgagtgtgtctgtgagcacaagccacaccaccatcagtggaggtggcagccgaggaggtggcggcggtggctacggctctggaggtagcagctatggctccggaggtggtagctatggttctggaggtggcggcggcggcggccgtggcagctatggctccggaggtagcagctacggctccggaggtggcagctatggctctggaggtggcggcggcggccatggcagctacggctccggaagcagcagtgggggctacagaggtggctctggaggcggcggcggcggcagctctggcggccggggctctggcggcgggagctctggaggctccataggaggccggggatccagctctgggggtgtcaagtcctctggtggcagttccagcgtgaagtttgtttctaccacttattccggagtaaccagataaagagatgccctctgtttcattagctctagttctcccccagcatcactaacaaatatgcttggcaagaccgaggtcgatttgtcccagccttaccggagaaaagagctatggttagttacactagctcatcctattcccccagctctttcttttctgctgtttcccaatgaagttttcagatcagtggcaatctcagtcccctggctatgaccctgctttgttctttccctgagaaacagttcagcagtgaccaccacccacatgacatttcaaagcacctccttaagccagccagagtaggaccagttagacccagggtgtggacagctccttagcatcttatctctgtgctgttttggttttgtacataaggtgtaagcaagttgtttttcttttgtggagaggtcttaaactccccatttccttgttttgctgcaataaactgcatttgaaattc

SEQ ID NO: 145381 - DNA, 2124 bp, Homo sapiens
  Payload ID: 8739
  Gene Symbol: KRT10
  Gene Name: keratin 10, type I
  Uniprot ID: P13645
  ENST ID: ENST00000269576
  CDS Start-End: 11-1765
cagcatcaccatgtctgttcgatacagctcaagcaagcactactcttcctcccgcagtggaggaggaggaggaggaggaggatgtggaggaggaggaggagtgtcatccctaagaatttctagcagcaaaggctcccttggtggaggatttagctcaggggggttcagtggtggctcttttagccgtgggagctctggtgggggctgctttgggggctcatcaggtggctatggaggattaggaggttttggtggaggtagctttcgtggaagctatggaagtagcagctttggtgggagttatggaggcatctttggagggggcagtttcggaggtggcagctttggtgggggcagctttggtggaggcggctttggtggaggcggctttggaggaggctttggtggtggatttggaggagatggtggccttctctctggaaatgaaaaagtaaccatgcagaatctgaatgaccgcctggcttcctacttggacaaagttcgggctctggaagaatcaaactatgagctggaaggcaaaatcaaggagtggtatgaaaagcatggcaactcacatcagggggagcctcgtgactacagcaaatactacaaaaccatcgatgaccttaaaaatcagattctcaacctaacaactgataatgccaacatcctgcttcagatcgacaatgccaggctggcagctgatgacttcaggctgaagtatgagaatgaggtagctctgcgccagagcgtggaggctgacatcaacggcctgcgtagggtgctggatgagctgaccctgaccaaggctgacctggagatgcaaattgagagcctgactgaagagctggcctatctgaagaagaaccacgaggaggaaatgaaagaccttcgaaatgtgtccactggtgatgtgaatgtggaaatgaatgctgccccgggtgttgatctgactcaacttctgaataacatgagaagccaatatgaacaacttgctgaacaaaaccgcaaagatgctgaagcctggttcaatgaaaagagcaaggaactgactacagaaattgataataacattgaacagatatccagctataaatctgagattactgaattgagacgtaatgtacaagctctggagatagaactacagtcccaactggccttgaaacaatccctggaagcctccttggcagaaacagaaggtcgctactgtgtgcagctctcacagattcaggcccagatatccgctctggaagaacagttgcaacagattcgagctgaaaccgagtgccagaatactgaataccaacaactcctggatattaagatccgactggagaatgaaattcaaacctaccgcagcctgctagaaggagagggaagttccggaggcggcggacgcggcggcggaagtttcggcggcggctacggcggcggaagctccggcggcggaagctccggcggcggccacggcggcggccacggcggcagttccggcggcggctacggaggcggaagctccggcggcggaagctccggcggcggctacgggggcggaagctccagcggcggccacggcggcagttccagcggcggctacggtggtggcagttccggcggcggcggcggcggctacgggggcggcagctccggcggcggcagcagctccggcggcggatacggcggcggcagctccagcggaggccacaagtcctcctcttccgggtccgtgggcgagtcttcatctaagggaccaagatactaacaaaaccagagtaatcaagacaattattgaagaggtggcgcccgacggtagagttctttcatctatggttgaatcagaaaccaagaaacactactattaaactgcatcaagaggaaagagtctcccttcacacagaccattatttacagatgcatggaaaacaaagtctccaagaaaacacttctgtcttgatggtctatggaaatagaccttgaaaataaggtgtctacaaggtgttttgtggtttctgtatttcttcttttcactttaccagaaagtgttctttaatggaaagaaaaacaactttctgttctcatttactaatgaatttcaataaactttcttactgatgcaaacta

SEQ ID NO: 145382 - DNA, 1867 bp, Homo sapiens
  Payload ID: 8740
  Gene Symbol: KRT12
  Gene Name: keratin 12, type I
  Uniprot ID: Q99456
  ENST ID: ENST00000251643
  CDS Start-End: 25-1509
agttgtggccaccttccccaggccatggatctctccaacaacaccatgtcactctcagtgcgcacccccggactgtcccggcggctctcctcgcagagtgtgataggcagacccaggggcatgtctgcttccagtgttggaagtggttatgggggaagtgcctttggctttggagccagctgtgggggaggcttttctgctgcttccatgtttggttctagttccggctttgggggtggctccggaagttccatggcaggaggactgggtgctggttatgggagagccctgggtggaggtagctttggagggctggggatgggatttgggggcagcccaggaggtggctctctaggtattctctcgggcaatgatggaggccttctttctggatcagaaaaagaaactatgcaaaatcttaatgatagattagcttcctacctggataaggtgcgagctctagaagaggctaatactgagctagaaaataaaattcgagaatggtatgaaacacgaggaactgggactgcagatgcttcacagagcgattacagcaaatattatccactgattgaagacctcaggaataagatcatttcagccagcattggaaatgcccagctcctcttgcagattgacaatgcgagactagctgctgaggacttcaggatgaagtatgagaatgaactggccctgcgccagggcgtagaggccgacatcaatggcctgcgccgggtgctggacgagctgaccctgaccaggaccgacctggagatgcagatcgagagcctgaacgaggagctggcctacatgaagaagaaccacgaggatgagctccaaagcttccgggtgggcggcccaggcgaggtcagcgtagaaatggacgctgcccccggagtggacctcaccaggctcctcaatgatatgcgggcgcagtatgaaaccatcgctgagcagaatcggaaggacgctgaagcctggttcattgaaaagagcggggagctccgtaaggagattagcaccaacaccgagcagcttcagtccagcaagagcgaggtcaccgacctgcgtcgcgcctttcagaacctggagatcgagctacagtcccagctcgccatgaagaaatccctggaggactccttggccgaagccgagggcgattactgcgcgcagctgtcccaggtgcagcagctcatcagcaacctggaggcacagctgctccaggtgcgcgcggacgcagagcgccagaacgtggaccaccagcggctgctgaatgtcaaggcccgcctggagctggagattgagacctaccgccgcctgctggacggggaggcccaaggtgatggtttggaggaaagtttatttgtgacagactccaaatcacaagcacagtcaactgattcctctaaagacccaaccaaaacccgaaaaatcaagacagttgtgcaggagatggtgaatggtgaggtggtctcatctcaagttcaggaaattgaagaactaatgtaaaatttcacaagatctgccccatgattggttccttaggaacaagaaatttacaagtagaaattattcctttcagagtaacatgctgtattacttcaatccctatttttgtctgttccattttctttggattccctattcacattgaatcctttttgcccttctgaaacaatattcagtcacaagtcattttggtcatgttggtctttgtaacaaatcaaaattaccttatatccttctggacctggagtagtcttttaacgaactttcttctggtaacccggaatattttttaatcatagagctttaatcaagtagtattgttttaatagagttaattgtaataaaagatgaatggtaa

SEQ ID NO: 145383 - DNA, 1867 bp, Homo sapiens; identical to SEQ ID NO: 145382
  Payload ID: 8740
  Gene Symbol: KRT12
  Gene Name: keratin 12, type I
  Uniprot ID: Q99456
  ENST ID: ENST00000572470
  CDS Start-End: 25-1509

SEQ ID NO: 145384 - DNA, 1699 bp, Homo sapiens
  Payload ID: 8741
  Gene Symbol: KRT13
  Gene Name: keratin 13, type I
  Uniprot ID: P13646
  ENST ID: ENST00000246635
  CDS Start-End: 48-1424
ggccaagcaagcttctatctgcacctgctctcaatcctgctctcaccatgagcctccgcctgcagagctcctctgccagctatggaggtggtttcgggggtggctcttgccagctgggaggaggccgtggtgtctctacctgttcaactcggtttgtgtccgggggatcagctgggggctatggaggcggcgtgagctgtggttttggtggaggggctggtagtggctttggaggtggctatggaggtggccttggaggtggctatggaggtggccttggaggtggctttggtgggggttttgctggtggctttgttgactttggtgcttgtgatggcggcctcctcactggcaatgagaagatcaccatgcagaacctcaacgaccgcctggcttcctacctggagaaggtgcgcgccctggaggaggccaacgctgacctggaggtgaagatccgtgactggcacctgaagcagagcccagctagccctgagcgggactacagcccctactacaagaccattgaagagctccgggacaagatcctgaccgccaccattgaaaacaaccgggtcatcctggagattgacaatgccaggctggctgcggacgacttcaggctcaagtatgagaatgagctggccctgcgccagagcgtggaggccgacatcaacggcctgcgccgggtgctggatgagctcactctgtctaagactgacctggagatgcagatcgagagcctgaatgaagagctagcctacatgaagaagaaccatgaagaggagatgaaggaatttagcaaccaggtggtcggccaggtcaacgtggagatggatgccaccccaggcattgacctgacccgcgtgctggcagagatgagggagcagtacgaggccatggcagagaggaaccgccgggatgctgaggaatggttccacaccaagagtgcagagctgaacaaggaggtgtctaccaacactgccatgattcagaccagcaagacagagatcacggagctcaggcgcacgctccaaggcctggagattgagctgcagtcccagctgagcatgaaagcggggctggagaacacggtggcagagacggagtgccgctatgccctgcagctgcagcagatccagggactcatcagcagcatcgaggcccagctgagcgagctccgcagtgagatggagtgccagaaccaagagtacaagatgctgctggacatcaagacacgtctggagcaggagatcgccacctaccgcagcctgctcgagggccaggacgccaagatgattggtttcccttcctcagcaggaagcgtcagcccccgtagcacctctgttaccacgacttctagtgcctctgttaccaccacctctaatgcctctggtcgccgcacttctgatgtccgtaggccttaaatctgcctggcgtcccctccctctgtcttcagcacccagaggaggagagagccggcagttccctgcaggagagaggaggggctgctggacccaaggctcagtccctctgctctcaggaccccctgtcctgactctctcctgatggtgggccctctgtgctcttctcttccggtcggatctctctcctctctgacctggatacgctttggtttctcaacttctctaccccaaagaaaagattattcaataaagtttcctgcctttctgcaaacata

SEQ ID NO: 145385 - DNA, 1673 bp, Homo sapiens
  Payload ID: 8741
  Gene Symbol: KRT13
  Gene Name: keratin 13, type I
  Uniprot ID: P13646
  ENST ID: ENST00000336861
  CDS Start-End: 48-1310
ggccaagcaagcttctatctgcacctgctctcaatcctgctctcaccatgagcctccgcctgcagagctcctctgccagctatggaggtggtttcgggggtggctcttgccagctgggaggaggccgtggtgtctctacctgttcaactcggtttgtgtccgggggatcagctgggggctatggaggcggcgtgagctgtggttttggtggaggggctggtagtggctttggaggtggctatggaggtggccttggaggtggctatggaggtggccttggaggtggctttggtgggggttttgctggtggctttgttgactttggtgcttgtgatggcggcctcctcactggcaatgagaagatcaccatgcagaacctcaacgaccgcctggcttcctacctggagaaggtgcgcgccctggaggaggccaacgctgacctggaggtgaagatccgtgactggcacctgaagcagagcccagctagccctgagcgggactacagcccctactacaagaccattgaagagctccgggacaagatcctgaccgccaccattgaaaacaaccgggtcatcctggagattgacaatgccaggctggctgcggacgacttcaggctcaagtatgagaatgagctggccctgcgccagagcgtggaggccgacatcaacggcctgcgccgggtgctggatgagctcactctgtctaagactgacctggagatgcagatcgagagcctgaatgaagagctagcctacatgaagaagaaccatgaagaggagatgaaggaatttagcaaccaggtggtcggccaggtcaacgtggagatggatgccaccccaggcattgacctgacccgcgtgctggcagagatgagggagcagtacgaggccatggcagagaggaaccgccgggatgctgaggaatggttccacaccaagagtgcagagctgaacaaggaggtgtctaccaacactgccatgattcagaccagcaagacagagatcacggagctcaggcgcacgctccaaggcctggagattgagctgcagtcccagctgagcatgaaagcggggctggagaacacggtggcagagacggagtgccgctatgccctgcagctgcagcagatccagggactcatcagcagcatcgaggcccagctgagcgagctccgcagtgagatggagtgccagaaccaagagtacaagatgctgctggacatcaagacacgtctggagcaggagatcgccacctaccgcagcctgctcgagggccaggacgccaagaagcgtcagcccccgtagcacctctgttaccacgacttctagtgcctctgttaccaccacctctaatgcctctggtcgccgcacttctgatgtccgtaggccttaaatctgcctggcgtcccctccctctgtcttcagcacccagaggaggagagagccggcagttccctgcaggagagaggaggggctgctggacccaaggctcagtccctctgctctcaggaccccctgtcctgactctctcctgatggtgggccctctgtgctcttctcttccggtcggatctctctcctctctgacctggatacgctttggtttctcaacttctctaccccaaagaaaagattattcaataaagtttcctgcctttctgcaaacata

SEQ ID NO: 145386 - DNA, 572 bp, Homo sapiens
  Payload ID: 8741
  Gene Symbol: KRT13
  Gene Name: keratin 13, type I
  ENST ID: ENST00000590425
  CDS Start-End: 78-572
agttggcaccaagtcagagggtggggaagggaggagagaagataaccagcccctatggaggtgtataaaagatcaccatgcagaacctcaacgaccgcctggcttcctacctggagaaggtgcgcgccctggaggaggccaacgctgacctggaggtgaagatccgtgactggcacctgaagcagagcccagctagccctgagcgggactacagcccctactacaagaccattgaagagctccgggacaagatcctgaccgccaccattgaaaacaaccgggtcatcctggagattgacaatgccaggctggctgcggacgacttcaggctcaagtatgagaatgagctggccctgcgccagagcgtggaggccgacatcaacggcctgcgccgggtgctggatgagctcactctgtctaagactgacctggagatgcagatcgagagcctgaatgaagagctagcctacatgaagaagaaccatgaagaggagatgaaggaatttagcaaccaggtggtcggccaggtcaacgtggagatggatgccaccccaggcattgacctgacccgc

SEQ ID NO: 145387 - DNA, 1219 bp, Homo sapiens
  Payload ID: 8741
  Gene Symbol: KRT13
  Gene Name: keratin 13, type I
  ENST ID: ENST00000464634
  CDS Start-End: 63-254
acagtcctcggcccaggccaagcaagcttctatctgcacctgctctcaatcctgctctcaccatgagcctccgcctgcagagctcctctgccagctatggaggtggtttcgggggtggctcttgccagctgggaggaggccgtggtgtctctacctgttcaactcgatcaccatgcagaacctcaacgaccgcctggcttcctacctggagaaggtgcgcgccctggaggaggccaacgctgacctggaggtgaagatccgtgactggcacctgaagcagagcccagctagccctgagcgggactacagcccctactacaagaccattgaagagctccgggacaagatcctgaccgccaccattgaaaacaaccgggtcatcctggagattgacaatgccaggctggctgcggacgacttcaggctcaagtatgagaatgagctggccctgcgccagagcgtggaggccgacatcaacggcctgcgccgggtgctggatgagctcactctgtctaagactgacctggagatgcagatcgagagcctgaatgaagagctagcctacatgaagaagaaccatgaagaggagatgaaggaatttagcaaccaggtggtcggccaggtcaacgtggagatggatgccaccccaggcattgacctgacccgcgtgctggcagagatgagggagcagtacgaggccatggcagagaggaaccgccgggatgctgaggaatggttccacaccaagagtgcagagctgaacaaggaggtgtctaccaacactgccatgattcagaccagcaagacagagatcacggagctcaggcgcacgctccaaggcctggagattgagctgcagtcccagctgagcatgaaagcggggctggagaacacggtggcagagacggagtgccgctatgccctgcagctgcagcagatccagggactcatcagcagcatcgaggcccagctgagcgagctccgcagtgagatggagtgccagaaccaagagtacaagatgctgctggacatcaagacacgtctggagcaggagatcgccacctaccgcagcctgctcgagggccaggacgccaagtaggtcctctccagcctctttcttaggatagtgactgcaggacccgtgggtgtcagagcaggcagggccttagagatccaccccctcatgtcagagaggagacccctcactgtctgactttac

SEQ ID NO: 145388 - DNA, 549 bp, Homo sapiens
  Payload ID: 8741
  Gene Symbol: KRT13
  Gene Name: keratin 13, type I
  ENST ID: ENST00000587435
  CDS Start-End: 64-549
cacagtcctcggcccaggccaagcaagcttctatctgcacctgctctcaatcctgctctcaccatgagcctccgcctgcagagctcctctgccagctatggaggtggtttcgggggtggctcttgccagctgggaggaggccgtggtgtctctacctgttcaactcggtttgtgtccgggggatcagctgggggctatggaggcggcgtgagctgtggttttggtggaggggctggtagtggctttggaggtggctatggaggtggccttggaggtggctatggaggtggccttggaggtggctttggtgggggttttgctggtggctttgttgactttggtgcttgtgatggcggcctcctcactggcaatgagaagatcaccatgcagaacctcaacgaccgcctggcttcctacctggagaaggtgcgcgccctggaggaggccaacgctgacctggagatgcagatcgagagcctgaatgaagagctagcctacatgaagaagaaccatgaagaggagatgaaggaatttagcaaccaggtggtc

SEQ ID NO: 145389 - DNA, 1456 bp, Homo sapiens
  Payload ID: 8741
  Gene Symbol: KRT13
  Gene Name: keratin 13, type I
  ENST ID: ENST00000587544
  CDS Start-End: 64-1311
cacagtcctcggcccaggccaagcaagcttctatctgcacctgctctcaatcctgctctcaccatgagcctccgcctgcagagctcctctgccagctatggaggtggtttcgggggtggctcttgccagctgggaggaggccgtggtgtctctacctgttcaactcggtttgtgtccgggggatcagctgggggctatggaggcggcgtgagctgtggttttggtggaggggctggtagtggctttggaggtggctatggaggtggccttggaggtggctatggaggtggccttggaggtggctttggtgggggttttgctggtggctttgttgactttggtgcttgtgatggcggcctcctcactggcaatgagaagatcaccatgcagaacctcaacgaccgcctggcttcctacctggagaaggtgcgcgccctggaggaggccaacgctgacctggaggtgaagatccgtgactggcacctgaagcagagcccagctagccctgagcgggactacagcccctactacaagaccattgaagagctccgggacaagatcctgaccgccaccattgaaaacaaccgggtcatcctggagattgacaatgccaggctggctgcggacgacttcaggctcaagtatgagaatgagctggccctgcgccagagcgtggaggccgacatcaacggcctgcgccgggtgctggatgagctcactctgtctaagactgacctggagatgcagatcgagagcctgaatgaagagctagcctacatgaagaagaaccatgaagaggagatgaaggaatttagcaaccaggtggtcggccaggtcaacgtggagatggatgccaccccaggcattgacctgacccgcgtgctggcagagatgagggagcagtacgaggccatggcagagaggaaccgccgggatgctgaggaatggttccacaccaagagtgcagagctgaacaaggaggtgtctaccaacactgccatgattcagaccagcaagacagagatcacggagctcaggcgcacgctccaaggcctggagattgagctgcagtcccagctgagcatgaaagcggggctggagaacacggtggcagagacggagtgccgctatgccctgcagctgcagcagatccagggactcatcagcagcatcgaggcccagctgagcgagctccgcagtgagatggagtgccagaaccaagagtacaagatgctgctggacatcaagacacgtctggagcaggagatcgccacctaccgcagcctgctcgagggccaggacgccaagtaggtcctctccagcctctttcttaggatagtgactgcaggacccgtgggtgtcagagcaggcagggccttagagatccaccccctcatgtcagagaggagacccctcactgtctgactttacggggacatttccttggtaggctgca

SEQ ID NO: 145390 - DNA, 1662 bp, Homo sapiens
  Payload ID: 8742
  Gene Symbol: KRT14
  Gene Name: keratin 14, type I
  Uniprot ID: P02533
  ENST ID: ENST00000167586
  CDS Start-End: 88-1506
aaagcactcgcatccctttccaatttacccgagcaccttctcttcactcagccaactgctcgctcgctcacctccctcctctgcaccatgaccacctgcagccgccagttcacctcctccagctccatgaagggctcctgcggcatcgggggcggcatcgggggcggctccagccgcatctcctccgtcctggccggagggtcctgccgcgcccccagcacctacgggggcggcctgtctgtctcatcctcccgcttctcctctgggggagcctgcgggctggggggcggctatggcggtggcttcagcagcagcagcagcagctttggtagtggctttgggggaggatatggtggtggccttggtgctggcttgggtggtggctttggtggtggctttgctggtggtgatgggcttctggtgggcagtgagaaggtgaccatgcagaacctcaatgaccgcctggcctcctacctggacaaggtgcgtgctctggaggaggccaacgccgacctggaagtgaagatccgtgactggtaccagaggcagcggcctgctgagatcaaagactacagtccctacttcaagaccattgaggacctgaggaacaagattctcacagccacagtggacaatgccaatgtccttctgcagattgacaatgcccgtctggccgcggatgacttccgcaccaagtatgagacagagttgaacctgcgcatgagtgtggaagccgacatcaatggcctgcgcagggtgctggacgaactgaccctggccagagctgacctggagatgcagattgagagcctgaaggaggagctggcctacctgaagaagaaccacgaggaggagatgaatgccctgagaggccaggtgggtggagatgtcaatgtggagatggacgctgcacctggcgtggacctgagccgcattctgaacgagatgcgtgaccagtatgagaagatggcagagaagaaccgcaaggatgccgaggaatggttcttcaccaagacagaggagctgaaccgcgaggtggccaccaacagcgagctggtgcagagcggcaagagcgagatctcggagctccggcgcaccatgcagaacctggagattgagctgcagtcccagctcagcatgaaagcatccctggagaacagcctggaggagaccaaaggtcgctactgcatgcagctggcccagatccaggagatgattggcagcgtggaggagcagctggcccagctccgctgcgagatggagcagcagaaccaggagtacaagatcctgctggacgtgaagacgcggctggagcaggagatcgccacctaccgccgcctgctggagggcgaggacgcccacctctcctcctcccagttctcctctggatcgcagtcatccagagatgtgacctcctccagccgccaaatccgcaccaaggtcatggatgtgcacgatggcaaggtggtgtccacccacgagcaggtccttcgcaccaagaactgaggctgcccagccccgctcaggcctaggaggccccccgtgtggacacagatcccactggaagatcccctctcctgcccaagcacttcacagctggaccctgcttcaccctcaccccctcctggcaatcaatacagcttcattatctgagttgcataa

SEQ ID NO: 145391 - DNA, 5237 bp, Homo sapiens
  Payload ID: 8743
  Gene Symbol: KRT15
  Gene Name: keratin 15, type I
  Uniprot ID: P19012
  ENST ID: ENST00000254043
  CDS Start-End: 3587-4957
aaatgtactcagcaccctgctaaggaggctggagaccccatcacggccatggcaatcccgaaggaggagctgtttcaaggttggttatgaacatgtaaccccagagccccgctgctgtagcctggactgggacccccttctgccccctccctagctgtcctgttctggcctccagcacccacaaaccaccacccccaacttaacttctcaggaagccttggagctggagggagaggcctggctgcacccccagctgggactgcccagaggcgcttgtccctgcccatgaaagcctcccttgtcacagctgaaaccttccctctgcctcaggggcccctggaatgtggctgcggggcggggtctgggcccacacaggtggggcaggtgactgtcaggtctcaggcctgagtgtcaggaatgaagcctgcctttgtgtgtgcacagtgcagggtggggctggactggggacacttttctgtctcagcctggagacctgggataggagggagaggggagtggggaagttgaggggagtgcctttacatcctgctggtcatcgtggccacttcagtctgttgagcatttcctgtgagtcatcttgctccaactgagagtcaggctgagctggagttatttccattttcctgattggtagactaaggctcagagagaggaggcggcattacccaaagccgcacagctggtaaatgggaaaagaggggtttaaaggtaagtctctgggctccaggacacaccccctctccctggcatttccctggggaacaggagaggtgtgggagggttctaaggttgttggagacttcattctccttgtgccctcaaatgctcactatggccctgaggggagtctgtgttaatggcctaagtttaaatcaggaaccaggctcagagaggctgagtctctttccactgggctgcactgcctcattctaaggagaaaaggccagctccacagatggccccatctggctgcagtgggcaaaggtcagaaactggcacagcatcctgggcaggctgcctggggcagggcccggggctacagcctgggctggggccagacagagctttatcttcgcaaggccatcccacctggtgctaatgaggaggctccgggccccacccagatctggagctcacagtagcggtttggactgaaaccagggatttgtgcgtggggcagtgaggggggcagctgccgcccctggcctgggcctgagagtatagagaaagccacctcgaggggctgctggaggagagtcaggtgcagaaggggatctggctggggtccagcccttcctcaccctggggtgaaaggcgagtaattgttcttgagttaattgctggggccacaatgtctgcagaggcttttaatgagctctggatgatctgagtttgattatttttctttcggaggaaaagacaataccctcccacccatgagacaataccacactgtctgtgcccagcattggaggccaggctcactgcgaagatggatgagaaggaacccacccccagccttgctggctggcagttccccttgccagcccagctcagatgcaggaatttggggtctgcaggaaggactctttccctgtgccctgtttggttgagggtgtgaggacctgtttgagtcctggctttgccccttaccagtggtgccacctggcacaagttgcttcacctctccaagtttcaatttcattctttctgaatcttgggtgggggtcaccctctgttgtgaggatgagaggaggtgatggatgcaaaagtgctttgtaaatcacaaagtgcagggtagaagtaaaggattatgctattatagcaaaataagaacctaagaacaacctgcgttgccccataggagctggctatggaaggtcgatgccgttgagcctaagaacatgctcaggctcacagggcatgttctgatgcccaacgacaaagcccctcctggtgagggcactcaggcgcaggtgccggtcatgcaccctggcccctgcatgtctggcacctgggtggggatccaggagggggcaggatgggggctcttgggccacagggcttccctggaagtgagagttgagagcgccccttgccacagggaaacagagacttaaaaaggtaaatgtccacagtcttaccatggtaattggtagggtcaggatttgaacccaggcctcacagtcttaccatgataattgataaagccaggattcaaacccgggcctgagggactccagagccctgtccacttcaccatgctgcaacctgggctaggaatcctcctcctgagtttctgtaagccctggggccaggtccagagggctgagccacacctccaagtggcactgcccacaggtatcaggtgtccctggaaaggtgtccctgagctggtggcagagaaaagggctctcctgagtgttcaactccccgtctgtgtgaagcaatgccttggtcttcaagatctccggtgtcttccagcctgcctgccagtctcccttctcttcccttccacagcattcaggcacatagagccttctgcagcggcccgtccccagccagcacttgacaggacagatgggggctaatctggccctgctaagcagcgacatgcctctcctggagaaggcaggggcttcctggaacttgccccagccttatcagcggaggtttgccccaacacatcccagaaacgagcaaaggttcagcgccgtgcagttggcaggtgtcgggatcatcagtcatccccttgtcagtcccaagcctgctgggcttttgtgagggtgccaggaacacaggctggaggatggcaggaggggagtagaggtgggaggaggggagtccatctgcagcaccaggtaaggggatggatgctggctcctctggtcacctcagctggaacactactcaaggtccctggctcctgtcctccacctgcccccaggggccctgcattcccatccccagggcctccactctccctgagccctgcagtctctcactcactcactcactcactcattcactcactcactcactcacagggttttgagttggataacacagcataatgatcggccagtggactcccaaactaagaacacggagctgtcctcttggggagaggctcagggctcggggaagtgaagtccagctgagggcacagttggcctgagctgctctcagtacaggcagaggccttggtagctgtgctgtgatgagagttcgctccctgctgctctcttctggcatggagagatgaacctgtaatccaagtgttaaaaccgtgccctggggaaaaacactattaattctgaatcatctcttttgttgcattaaaaaaaaatagaagagaaaaacttcacatgacccactcaaggtgtgcaggcagctgtgtttgtcaggaaggcagaaggagttggctttgctttaggggaggagacgaggtcccacaacaccctctgaagggtatataaggagccccagcgtgcagcctggcctggtacctcctgccagcatctcttgggtttgctgagaactcacgggctccagctacctggccatgaccaccacatttctgcaaacttcttcctccacctttgggggtggctcaacccgagggggttccctcctggctgggggaggtggctttggtggggggagtctctctgggggaggtggaagccgaagtatctcagcttcttctgctaggtttgtctcttcagggtcaggaggaggatatgggggtggcatgagggtctgtggctttggtggaggggctggtagtgttttcggtggaggctttggagggggcgttggtgggggttttggtggtggctttggtggtggcgatggtggtctcctctctggcaatgagaaaattaccatgcagaacctcaatgaccgcctggcctcctacctggacaaggtacgtgccctggaggaggccaatgctgacctggaggtgaagatccatgactggtaccagaagcagaccccaaccagcccagaatgcgactacagccaatacttcaagaccattgaagagctccgggacaagatcatggccaccaccatcgacaactcccgggtcatcctggagatcgacaatgccaggctggctgcggacgacttcaggctcaagtatgagaatgagctggccctgcgccagggcgttgaggctgacatcaacggcttgcgccgagtcctggatgagctgaccctggccaggactgacctggagatgcagatcgagggcctgaatgaggagctagcctacctgaagaagaaccacgaagaggagatgaaggagttcagcagccagctggccggccaggtcaatgtggagatggacgcagcaccgggtgtggacctgacccgtgtgctggcagagatgagggagcagtacgaggccatggcggagaagaaccgccgggatgtcgaggcctggttcttcagcaagactgaggagctgaacaaagaggtggcctccaacacagaaatgatccagaccagcaagacggagatcacagacctgagacgcacgatgcaggagctggagatcgagctgcagtcccagctcagcatgaaagctgggctggagaactcactggccgagacagagtgccgctatgccacgcagctgcagcagatccaggggctcattggtggcctggaggcccagctgagtgagctccgatgcgagatggaggctcagaaccaggagtacaagatgctgcttgacataaagacacggctggagcaggagatcgctacttaccgcagcctgctcgagggccaggatgccaagatggctggcattgccatcagggaagcctcttcaggaggtggtggtagcagcagcaatttccacatcaatgtagaagagtcagtggatggacaggtggtttcttcccacaagagagaaatctaagtgtctattgcaggagaaacgtcccttgccactccccactctcatcaggccaagtggaggactggccagagggcctgcacatgcaaactccagtccctgccttcagagagctgaaaagggtccctcggtcttttatttcagggctttgcatgcgctctattccccctctgcctctccccaccttctttggagcaaggagatgcagctgtattgtgtaacaagctcatttgtacagtgtctgttcatgtaataaagaattacttttccttttgcaaatatc

SEQ ID NO: 145392 - DNA, 3758 bp, Homo sapiens
  Payload ID: 8743
  Gene Symbol: KRT15
  Gene Name: keratin 15, type I
  ENST ID: ENST00000393974
  CDS Start-End: 2605-3480
agctctggatgatctgagtttgattatttttctttcggaggaaaagacaataccctcccacccatgagacaataccacactgtctgtgcccagcattggaggccaggctcactgcgaagatggatgagaaggaacccacccccagccttgctggctggcagttccccttgccagcccagctcagatgcaggaatttggggtctgcaggaaggactctttccctgtgccctgtttggttgagggtgtgaggacctgtttgagtcctggctttgccccttaccagtggtgccacctggcacaagttgcttcacctctccaagtttcaatttcattctttctgaatcttgggtgggggtcaccctctgttgtgaggatgagaggaggtgatggatgcaaaagtgctttgtaaatcacaaagtgcagggtagaagtaaaggattatgctattatagcaaaataagaacctaagaacaacctgcgttgccccataggagctggctatggaaggtcgatgccgttgagcctaagaacatgctcaggctcacagggcatgttctgatgcccaacgacaaagcccctcctggtgagggcactcaggcgcaggtgccggtcatgcaccctggcccctgcatgtctggcacctgggtggggatccaggagggggcaggatgggggctcttgggccacagggcttccctggaagtgagagttgagagcgccccttgccacagggaaacagagacttaaaaaggtaaatgtccacagtcttaccatggtaattggtagggtcaggatttgaacccaggcctcacagtcttaccatgataattgataaagccaggattcaaacccgggcctgagggactccagagccctgtccacttcaccatgctgcaacctgggctaggaatcctcctcctgagtttctgtaagccctggggccaggtccagagggctgagccacacctccaagtggcactgcccacaggtatcaggtgtccctggaaaggtgtccctgagctggtggcagagaaaagggctctcctgagtgttcaactccccgtctgtgtgaagcaatgccttggtcttcaagatctccggtgtcttccagcctgcctgccagtctcccttctcttcccttccacagcattcaggcacatagagccttctgcagcggcccgtccccagccagcacttgacaggacagatgggggctaatctggccctgctaagcagcgacatgcctctcctggagaaggcaggggcttcctggaacttgccccagccttatcagcggaggtttgccccaacacatcccagaaacgagcaaaggttcagcgccgtgcagttggcaggtgtcgggatcatcagtcatccccttgtcagtcccaagcctgctgggcttttgtgagggtgccaggaacacaggctggaggatggcaggaggggagtagaggtgggaggaggggagtccatctgcagcaccaggtaaggggatggatgctggctcctctggtcacctcagctggaacactactcaaggtccctggctcctgtcctccacctgcccccaggggccctgcattcccatccccagggcctccactctccctgagccctgcagtctctcactcactcactcactcactcattcactcactcactcactcacagggttttgagttggataacacagcataatgatcggccagtggactcccaaactaagaacacggagctgtcctcttggggagaggctcagggctcggggaagtgaagtccagctgagggcacagttggcctgagctgctctcagtacaggcagaggccttggtagctgtgctgtgatgagagttcgctccctgctgctctcttctggcatggagagatgaacctgtaatccaagtgttaaaaccgtgccctggggaaaaacactattaattctgaatcatctcttttgttgcattaaaaaaaaatagaagagaaaaacttcacatgacccactcaaggtgtgcaggcagctgtgtttgtcaggaaggcagaaggagttggctttgctttaggggaggagacgaggtcccacaacaccctctgaagggtatataaggagccccagcgtgcagcctggcctggtacctcctgccagcatctcttgggtttgctgagaactcacgggctccagctacctggccatgaccaccacatttctgcaaacttcttcctccacctttgggggtggctcaacccgagggggttccctcctggctgggggaggtggctttggtggggggagtctctctgggggaggtggaagccgaagtatctcagcttcttctgctaggtttgtctcttcagggtcaggaggaggatatgggggtggcatgagggtctgtggctttggtggaggggctggtagtgttttcggtggaggctttggagggggcgttggtgggggttttggtggtggctttggtggtggcgatggtggtctcctctctggcaatgagaaaattaccatgcagaacctcaatgaccgcctggcctcctacctggacaaggtacgtgccctggaggaggccaatgctgacctggaggtgaagatccatgactggtaccagaagcagaccccaaccagcccagaatgcgactacagccaatacttcaagaccattgaagagctccgggacaaggtatgagaatgagctggccctgcgccagggcgttgaggctgacatcaacggcttgcgccgagtcctggatgagctgaccctggccaggactgacctggagatgcagatcgagggcctgaatgaggagctagcctacctgaagaagaaccacgaagaggagatgaaggagttcagcagccagctggccggccaggtcaatgtggagatggacgcagcaccgggtgtggacctgacccgtgtgctggcagagatgagggagcagtacgaggccatggcggagaagaaccgccgggatgtcgaggcctggttcttcagcaagactgaggagctgaacaaagaggtggcctccaacacagaaatgatccagaccagcaagacggagatcacagacctgagacgcacgatgcaggagctggagatcgagctgcagtcccagctcagcatgaaagctgggctggagaactcactggccgagacagagtgccgctatgccacgcagctgcagcagatccaggggctcattggtggcctggaggcccagctgagtgagctccgatgcgagatggaggctcagaaccaggagtacaagatgctgcttgacataaagacacggctggagcaggagatcgctacttaccgcagcctgctcgagggccaggatgccaagatggctggcattgccatcagggaagcctcttcaggaggtggtggtagcagcagcaatttccacatcaatgtagaagagtcagtggatggacaggtggtttcttcccacaagagagaaatctaagtgtctattgcaggagaaacgtcccttgccactccccactctcatcaggccaagtggaggactggccagagggcctgcacatgcaaactccagtccctgccttcagagagctgaaaagggtccctcggtcttttatttcagggctttgcatgcgctctattccccctctgcctctccccaccttctttggagcaaggagatgcagctgtattgtgtaacaagctcatttgtacagtgtctgttcatgtaataaagaattacttttccttttgcaaata

SEQ ID NO: 145393 - DNA, 2394 bp, Homo sapiens
  Payload ID: 8743
  Gene Symbol: KRT15
  Gene Name: keratin 15, type I
  Uniprot ID: P19012
  ENST ID: ENST00000393976
  CDS Start-End: 747-2117
gcacagctggtaaatgggaaaagaggggtttaaagcattcaggcacatagagccttctgcagcggcccgtccccagccagcacttgacaggacagatgggggctaatctggccctgctaagcagcgacatgcctctcctggagaaggcaggggcttcctggaacttgccccagccttatcagcggaggtttgccccaacacatcccagaaacgagcaaaggttcagcgccgtgcagttggcaggtgtcgggatcatcagtcatccccttgtcagtcccaagcctgctgggcttttgtgagggtgccaggaacacaggctggaggatggcaggaggggagtagaggtgggaggaggggagtccatctgcagcaccaggtaaggggatggatgctggctcctctggtcacctcagctggaacactactcaaggtccctggctcctgtcctccacctgcccccaggggccctgcattcccatccccagggcctccactctccctgagccctgcagtctctcactcactcactcactcactcattcactcactcactcactcacagggtgtgcaggcagctgtgtttgtcaggaaggcagaaggagttggctttgctttaggggaggagacgaggtcccacaacaccctctgaagggtatataaggagccccagcgtgcagcctggcctggtacctcctgccagcatctcttgggtttgctgagaactcacgggctccagctacctggccatgaccaccacatttctgcaaacttcttcctccacctttgggggtggctcaacccgagggggttccctcctggctgggggaggtggctttggtggggggagtctctctgggggaggtggaagccgaagtatctcagcttcttctgctaggtttgtctcttcagggtcaggaggaggatatgggggtggcatgagggtctgtggctttggtggaggggctggtagtgttttcggtggaggctttggagggggcgttggtgggggttttggtggtggctttggtggtggcgatggtggtctcctctctggcaatgagaaaattaccatgcagaacctcaatgaccgcctggcctcctacctggacaaggtacgtgccctggaggaggccaatgctgacctggaggtgaagatccatgactggtaccagaagcagaccccaaccagcccagaatgcgactacagccaatacttcaagaccattgaagagctccgggacaagatcatggccaccaccatcgacaactcccgggtcatcctggagatcgacaatgccaggctggctgcggacgacttcaggctcaagtatgagaatgagctggccctgcgccagggcgttgaggctgacatcaacggcttgcgccgagtcctggatgagctgaccctggccaggactgacctggagatgcagatcgagggcctgaatgaggagctagcctacctgaagaagaaccacgaagaggagatgaaggagttcagcagccagctggccggccaggtcaatgtggagatggacgcagcaccgggtgtggacctgacccgtgtgctggcagagatgagggagcagtacgaggccatggcggagaagaaccgccgggatgtcgaggcctggttcttcagcaagactgaggagctgaacaaagaggtggcctccaacacagaaatgatccagaccagcaagacggagatcacagacctgagacgcacgatgcaggagctggagatcgagctgcagtcccagctcagcatgaaagctgggctggagaactcactggccgagacagagtgccgctatgccacgcagctgcagcagatccaggggctcattggtggcctggaggcccagctgagtgagctccgatgcgagatggaggctcagaaccaggagtacaagatgctgcttgacataaagacacggctggagcaggagatcgctacttaccgcagcctgctcgagggccaggatgccaagatggctggcattgccatcagggaagcctcttcaggaggtggtggtagcagcagcaatttccacatcaatgtagaagagtcagtggatggacaggtggtttcttcccacaagagagaaatctaagtgtctattgcaggagaaacgtcccttgccactccccactctcatcaggccaagtggaggactggccagagggcctgcacatgcaaactccagtccctgccttcagagagctgaaaagggtccctcggtcttttatttcagggctttgcatgcgctctattccccctctgcctctccccaccttctttggagcaaggagatgcagctgtattgtgtaacaagctcatttgtacagtgtctgttcatgtaataaagaattacttttccttttgcaaat

SEQ ID NO: 145394 - DNA, 903 bp, Homo sapiens
  Payload ID: 8743
  Gene Symbol: KRT15
  Gene Name: keratin 15, type I
  ENST ID: ENST00000458290
  CDS Start-End: 242-903
gaagaggccccaaaagaagtcccacttcttcctggtggagaggtgagggctgcaggcccaaccctatgagtgatgggggcaagtgagggacactagttccacgcccgcatgctgccaaatgtactcagcaccctgctaaggaggctggagaccccatcacggccatggcaatcccgaaggaggagctgtttcaaggtacgtgccctggaggaggccaatgctgacctggaggtgaagatccatgactggtaccagaagcagaccccaaccagcccagaatgcgactacagccaatacttcaagaccattgaagagctccgggacaaggtatgagaatgagctggccctgcgccagggcgttgaggctgacatcaacggcttgcgccgagtcctggatgagctgaccctggccaggactgacctggagatgcagatcgagggcctgaatgaggagctagcctacctgaagaagaaccacgaagaggagatgaaggagttcagcagccagctggccggccaggtcaatgtggagatggacgcagcaccgggtgtggacctgacccgtgtgctggcagagatgagggagcagtacgaggccatggcggagaagaaccgccgggatgtcgaggcctggttcttcagcaagactgaggagctgaacaaagaggtggcctccaacacagaaatgatccagaccagcaagacggagatcacagacctgagacgcacgatgcaggagctggagatcgagctgcagtcccagctcagcatgaaagctgggctggagaactcactggccgagacagagtgccgctatgccacgcagctgcagcagatccaggggctcattggtggcctggaggcccagctgagtgagctccgatgcgagatggaggctcagaa

SEQ ID NO: 145395 - DNA, 959 bp, Homo sapiens
  Payload ID: 8743
  Gene Symbol: KRT15
  Gene Name: keratin 15, type I
  ENST ID: ENST00000497016
  CDS Start-End: 472-717
ggagtggggaagttgaggggagtgcctttacatcctgctggtcatcgtggccacttcagtctgttgagcatttcctgtgagtcatcttgctccaactgagagtcaggctgagctggagttatttccattttcctgattggtagactaaggctcagagagaggaggcggcattacccaaagccgcacagctggtaaatgggaaaagaggggtttaaagcattcaggcacatagagccttctgcagcggcccgtccccagccagcacttgacaggacagatgggggctaatctggccctgctaagcagcgacatgcctctcctggagaaggcaggggcttcctggaacttgccccagccttatcagcggaggtttgccccaacacatcccagaaacgagcaaaggttcagcgccgtgcagttggcaggtacgtgccctggaggaggccaatgctgacctggaggtgaagatccatgactggtaccagaagcagaccccaaccagcccagaatgcgactacagccaatacttcaagaccattgaagagctccgggacaagatcatggccaccaccatcgacaactcccgggtcatcctggagatcgacaatgccaggctggctgcggacgacttcaggctcaagtatgagaatgagctggccctgcgccagggcgttgaggctgacatcaacggcttgcgccgagtcctggatgagctgaccctggccaggactgacctggagatgcagatcgagggcctgaatgaggagctagcctacctgaagaagaaccacgaagaggagatgaaggagttcagcagccagctggccggccaggtcaatgtggagatggacgcagcaccgggtgtggacctgacccgtgtgctggcagagatgagggagcagtacgaggccatggcggagaagaaccgccgggatgtcgaggcctggttcttcagcaag

SEQ ID NO: 145396 - DNA, 780 bp, Homo sapiens
  Payload ID: 8743
  Gene Symbol: KRT15
  Gene Name: keratin 15, type I
  ENST ID: ENST00000470004
  CDS Start-End: 182-331
catcttgctccaactgagagtcaggctgagctggagttatttccattttcctgattggtagactaaggctcagagagaggaggcggcattacccaaagccgcacagctggtaaatgggaaaagaggggtttaaaggtacgtgccctggaggaggccaatgctgacctggaggtgaagatccatgactggtaccagaagcagaccccaaccagcccagaatgcgactacagccaatacttcaagaccattgaagagctccgggacaaggttgctactggctggaatgttctgtagatccatggctgtgtccaaggtgtgcaggaggcagtgaccatgagttgtccacagtggggctggtggagtgtctctgagagagctattgtcagagctggctgcaccccactgccccactctcctgggcaaccaattcccacaggcaatactgcctccttggtctttcgtgccctggagataaggaaggcagctcctcaggtgtctcaaggaggctggatgggacaaaacaagaaatggacactgaaaatcatggccaccaccatcgacaactcccgggtcatcctggagatcgacaatgccaggctggctgcggacgacttcaggctcaagtatgagaatgagctggccctgcgccagggcgttgaggctgacatcaacggcttgcgccgagtcctggatgagctgaccctggccaggactgacctggagatgcagatcgagggcctgaatgaggagctagcctacctgaagaagaaccacgaagag

SEQ ID NO: 145397 - DNA, 1644 bp, Homo sapiens
  Payload ID: 8744
  Gene Symbol: KRT16
  Gene Name: keratin 16, type I
  Uniprot ID: P08779
  ENST ID: ENST00000301653
  CDS Start-End: 66-1487
gccttcctgagcacctttccttctttcagccaactgctcactcgctcacctccctccttggcaccatgaccacctgcagccgccagttcacctcctccagctccatgaagggctcctgcggcatcggaggcggcatcgggggcggctccagccgcatctcctccgtcctggccggagggtcctgccgtgcccccagcacctacgggggcggcctgtctgtctcctctcgcttctcctctgggggagcctgcgggctggggggcggctatggcggtggcttcagcagcagcagcagctttggtagtggcttcgggggaggatatggtggtggccttggtgctggcttcggtggtggcttgggtgctggctttggtggtggttttgctggtggtgatgggcttctggtgggcagtgagaaggtgaccatgcagaacctcaatgaccgcctggcctcctacctggacaaggtgcgtgctctggaggaggccaacgccgacctggaagtgaagatccgtgactggtaccagaggcagcggcccagtgagatcaaagactacagtccctacttcaagaccatcgaggacctgaggaacaagatcattgcggccaccattgagaatgcgcagcccattttgcagattgacaatgccaggctggcagccgatgacttcaggaccaagtatgagcatgaactggccctgcggcagactgtggaggccgacgtcaatggcctgcgccgggtgttggatgagctgaccctggccaggactgacctggagatgcagatcgaaggcctgaaggaggagctggcctacctgaggaagaaccacgaggaggagatgcttgctctgagaggtcagaccggcggagatgtgaacgtggagatggatgctgcacctggcgtggacctgagccgcatcctgaatgagatgcgtgaccagtacgagcagatggcagagaaaaaccgcagagacgctgagacctggttcctgagcaagaccgaggagctgaacaaagaagtggcctccaacagcgaactggtacagagcagccgcagtgaggtgacggagctccggagggtgctccagggcctggagattgagctgcagtcccagctcagcatgaaagcatccctggagaacagcctggaggagaccaaaggccgctactgcatgcagctgtcccagatccagggactgattggcagtgtggaggagcagctggcccagctacgctgtgagatggagcagcagagccaggagtaccagatcttgctggatgtgaagacgcggctggagcaggagattgccacctaccgccgcctgctggagggcgaggatgcccacctttcctcccagcaagcatctggccaatcctattcttcccgcgaggtcttcacctcctcctcgtcctcttcgagccgtcagacccggcccatcctcaaggagcagagctcatccagcttcagccagggccagagctcctagaactgagctgcctctaccacagcctcctgcccaccagctggcctcacctcctgaaggcccgggtcaggaccctgctctcctggcgcagttcccagctatctcccctgctcctctgctggtggtgggctaataaagctgactttctggttgatgcaaa

SEQ ID NO: 145398 - DNA, 499 bp, Homo sapiens
  Payload ID: 8744
  Gene Symbol: KRT16
  Gene Name: keratin 16, type I
  ENST ID: ENST00000590990
  CDS Start-End: 354-499
acttttccttcctcctgccctgaagcctgtggctctggcttgtccacccgaggctgggggccctgcagcagccccctctctcccctcagcttctctgcccccctccttagcccccaagctgcctcctgccttcccagtctgagttggctggggagcttgtaaaacagccccaccagcaggcttgtcctgagcggtgctgatgcgggagttggagcagggctgcaaatcttcatggggactctgacgatctgtctggttggagaatcactgcaagtcaaggcgtggcattggccaatggtgtttcccggctgcctcagccaactgctcactcgctcacctccctccttggcaccatgaccacctgcagccgccagttcacctcctccagctccatgaagggctcctgcggcatcggaggcggcatcgggggcggctccagccgcatctcctccgtcctggccggagggtcctgccgtgcccccagcacctacgggggcgg

SEQ ID NO: 145399 - DNA, 910 bp, Homo sapiens
  Payload ID: 8744
  Gene Symbol: KRT16
  Gene Name: keratin 16, type I
  ENST ID: ENST00000593067
  CDS Start-End: 423-910
gctgaataatccagagtgaggagttggacgggaccgggagtgatgaaatccagaggggaacctggagtcagcagttaggagggccccgccttccccagctgcatataaaggtgcgtgctctggaggaggccaacgccgacctggaagtgaagatccgtgactggtaccagaggcagcggcccagtgagatcaaagactacagtccctacttcaagaccatcgaggacctgaggaacaagatcattgcggccaccattgagaatgcgcagcccattttgcagattgacaatgccaggctggcagccgatgacttcaggaccaagtatgagcatgaactggccctgcggcagactgtggaggccgacgtcaatggcctgcgccgggtgttggatgagctgaccctggccaggactgacctggagatgcagatcgaaggcctgaaggaggagctggcctacctgaggaagaaccacgaggaggagatgcttgctctgagaggtcagaccggcggagatgtgaacgtggagatggatgctgcacctggcgtggacctgagccgcatcctgaatgagatgcgtgaccagtacgagcagatggcagagaaaaaccgcagagacgctgagacctggttcctgagcaagaccgaggagctgaacaaagaagtggcctccaacagcgaactggtacagagcagccgcagtgaggtgacggagctccggagggtgctccagggcctggagattgagctgcagtcccagctcagcatgaaagcatccctggagaacagcctggaggagaccaaaggccgctactgcatgcagctgtcccagatccagggactgattggcagtgtggaggagcagctggcccagctacgctgtgagatggagcagcagagccaggagtacca

SEQ ID NO: 145400 - DNA, 1524 bp, Homo sapiens
  Payload ID: 8745
  Gene Symbol: KRT17
  Gene Name: keratin 17, type I
  Uniprot ID: Q04695
  ENST ID: ENST00000311208
  CDS Start-End: 69-1367
ctacacaacttggggcccctctcctctccagcccttctcctgtgtgcctgcctcctgccgccgccaccatgaccacctccatccgccagttcacctcctccagctccatcaagggctcctccggcctggggggcggctcgtcccgcacctcctgccggctgtctggcggcctgggtgccggctcctgcaggctgggatctgctggcggcctgggcagcaccctcgggggtagcagctactccagctgctacagctttggctctggtggtggctatggcagcagctttgggggtgttgatgggctgctggctggaggtgagaaggccaccatgcagaacctcaatgaccgcctggcctcctacctggacaaggtgcgtgccctggaggaggccaacactgagctggaggtgaagatccgtgactggtaccagaggcaggccccggggcccgcccgtgactacagccagtactacaggacaattgaggagctgcagaacaagatcctcacagccaccgtggacaatgccaacatcctgctacagattgacaatgcccgtctggctgctgatgacttccgcaccaagtttgagacagagcaggccctgcgcctgagtgtggaggccgacatcaatggcctgcgcagggtgctggatgagctgaccctggccagagccgacctggagatgcagattgagaacctcaaggaggagctggcctacctgaagaagaaccacgaggaggagatgaacgccctgcgaggccaggtgggtggtgagatcaatgtggagatggacgctgccccaggcgtggacctgagccgcatcctcaacgagatgcgtgaccagtatgagaagatggcagagaagaaccgcaaggatgccgaggattggttcttcagcaagacagaggaactgaaccgcgaggtggccaccaacagtgagctggtgcagagtggcaagagtgagatctcggagctccggcgcaccatgcaggccttggagatagagctgcagtcccagctcagcatgaaagcatccctggagggcaacctggcggagacagagaaccgctactgcgtgcagctgtcccagatccaggggctgattggcagcgtggaggagcagctggcccagcttcgctgcgagatggagcagcagaaccaggaatacaaaatcctgctggatgtgaagacgcggctggagcaggagattgccacctaccgccgcctgctggagggagaggatgcccacctgactcagtacaagaaagaaccggtgaccacccgtcaggtgcgtaccattgtggaagaggtccaggatggcaaggtcatctcctcccgcgagcaggtccaccagaccacccgctgaggactcagctaccccggccggccacccaggaggcagggaggcagccgccccatctgccccacagtctccggcctctccagcctcagccccctgcttcagtcccttccccatgcttccttgcctgatgacaataaagcttgttgactcagctatgaaa

SEQ ID NO: 145401 - DNA, 1438 bp, Homo sapiens
  Payload ID: 8745
  Gene Symbol: KRT17
  Gene Name: keratin 17, type I
  ENST ID: ENST00000540235
  CDS Start-End: 238-1287
ctcctgtgtgcctgcctcctgccgccgccaccatgaccacctccatccgccagttcacctcctccagctccatcaagggctcctccggcctggggggcggctcgtcccgcacctcctgccggctgtctggcggcctgggtgccggctcctgcaggctgggatctgctggcggcctgggcagcaccctcgggggtagcagctactccagctgctacagctttggctctggtggtggctatggcagcagctttgggggtgttgatgggctgctggctggaggtgagaaggccaccatgcagaacctcaatggccaacactgagctggaggtgaagatccgtgactggtaccagaggcaggccccggggcccgcccgtgactacagccagtactacaggacaattgaggagctgcagaacaagatcctcacagccaccgtggacaatgccaacatcctgctacagattgacaatgcccgtctggctgctgatgacttccgcaccaagtttgagacagagcaggccctgcgcctgagtgtggaggccgacatcaatggcctgcgcagggtgctggatgagctgaccctggccagagccgacctggagatgcagattgagaacctcaaggaggagctggcctacctgaagaagaaccacgaggaggagatgaacgccctgcgaggccaggtgggtggtgagatcaatgtggagatggacgctgccccaggcgtggacctgagccgcatcctcaacgagatgcgtgaccagtatgagaagatggcagagaagaaccgcaaggatgccgaggattggttcttcagcaagacagaggaactgaaccgcgaggtggccaccaacagtgagctggtgcagagtggcaagagtgagatctcggagctccggcgcaccatgcaggccttggagatagagctgcagtcccagctcagcatgaaagcatccctggagggcaacctggcggagacagagaaccgctactgcgtgcagctgtcccagatccaggggctgattggcagcgtggaggagcagctggcccagcttcgctgcgagatggagcagcagaaccaggaatacaaaatcctgctggatgtgaagacgcggctggagcaggagattgccacctaccgccgcctgctggagggagaggatgcccacctgactcagtacaagaaagaaccggtgaccacccgtcaggtgcgtaccattgtggaagaggtccaggatggcaaggtcatctcctcccgcgagcaggtccaccagaccacccgctgaggactcagctaccccggccggccacccaggaggcagggaggcagccgccccatctgccccacagtctccggcctctccagcctcagccccctgcttcagtcccttccccatgcttccttgcctgatgacaataaagcttgttgactcagct

SEQ ID NO: 145402 - DNA, 566 bp, Homo sapiens
  Payload ID: 8745
  Gene Symbol: KRT17
  Gene Name: keratin 17, type I
  ENST ID: ENST00000590038
  CDS Start-End: 420-566
tcctttaaggccgagcctgccatgggggtctggtggggtactgagtatcgggggaagaagaggcacctttcagcccttcagactcctgtttgcccctcctctgccaataatacagcacggggcaagggaggggctgggcgagaagagaggccctgaggcaggaagatctgctcagaaccctggtgtgggctcagccacccccatccaatgacctgactactctcccttctcctcagatcctcacagccaccgtggacaatgccaacatcctgctacagattgacaatgcccgtctggctgctgatgacttccgcaccaagtttgagacagagcaggccctgcgcctgagtgtggaggccgacatcaatggcctgcgcagggtgctggatgagctgaccctggccagagccgacctggagatgcagattgagaacctcaaggaggagctggcctacctgaagaagaaccacgaggagatgaacgccctgcgaggccaggtgggtggtgagatcaatgtggagatggacgctgccccaggcgtggacctgagccgcatcctcaacgag

SEQ ID NO: 145403 - DNA, 695 bp, Homo sapiens
  Payload ID: 8745
  Gene Symbol: KRT17
  Gene Name: keratin 17, type I
  ENST ID: ENST00000577817
  CDS Start-End: 1-695
ggctcctccggcctggggggcggctcgtcccgcacctcctgccggctgtctggcggcctgggtgccggctcctgcaggctgggatctgctggcggcctgggcagcaccctcgggggtagcagctactccagctgctacagctttggctctggtggtggctatggcagcagctttgggggtgttgatgggctgctggctggaggtgagaaggccaccatgcagaacctcaatgaccgcctggcctcctacctggacaaggtgcgtgccctggaggaggccaacactgagctggaggtgaagatccgtgactggtaccagaggcaggccccggggcccgcccgtgactacagccagtactacaggacaattgaggagctgcagaacaagatcctcacagccaccgtggacaatgccaacatcctgctacagattgacaatgcccgtctggctgctgatgacttccgcaccaaggtgctggatgagctgaccctggccagagccgacctggagatgcagattgagaacctcaaggaggagctggcctacctgaagaagaaccacgaggaggagatgaacgccctgcgaggccaggtgggtggtgagatcaatgtggagatggacgctgccccaggcgtggacctgagccgcatcctcaacgagatgcgtgaccagtatgagaagatggcagagaagaa

SEQ ID NO: 145404 - DNA, 697 bp, Homo sapiens
  Payload ID: 8745
  Gene Symbol: KRT17
  Gene Name: keratin 17, type I
  ENST ID: ENST00000463128
  CDS Start-End: 413-697
gaaagcatagctggagggcccgcctgaatcacaggtgacgggcctgagaccagaggcacgcacacgcacggcactcagcacgaggatttggagaaatgaggtgcgtgccctggaggaggccaacactgagctggaggtgaagatccgtgactggtaccagaggcaggccccggggcccgcccgtgactacagccagtactacaggacaattgaggagctgcagaacaagatcctcacagccaccgtggacaatgccaacatcctgctacagattgacaatgcccgtctggctgctgatgacttccgcaccaagtttgagacagagcaggccctgcgcctgagtgtggaggccgacatcaatggcctgcgcagggtgctggatgagctgaccctggccagagccgacctggagatgcagattgagaacctcaaggaggagctggcctacctgaagaagaaccacgaggaggagatgaacgccctgcgaggccaggtgggtggtgagatcaatgtggagatggacgctgccccaggcgtggacctgagccgcatcctcaacgagatgcgtgaccagtatgagaagatggcagagaagaaccgcaaggatgccgaggattggttcttcagcaagacagaggaactgaaccgcgaggtggccaccaacagtgagctggtgcagagtggcaagagtgagatc

SEQ ID NO: 145405 - DNA, 1562 bp, Homo sapiens
  Payload ID: 8746
  Gene Symbol: KRT18
  Gene Name: keratin 18, type I
  Uniprot ID: P05783
  ENST ID: ENST00000388835
  CDS Start-End: 211-1503
cggagggcgcgggggtggggcccggggcggagcggcccggggcggagggcgcgggctccgagccgtccacctgtggctccggcttccgaagcggctccggggcgggggcggggcctcactctgcgatataactcgggtcgcgcggctcgcgcaggccgccaccgtcgtccgcaaagcctgagtcctgtcctttctctctccccggacagcatgagcttcaccactcgctccaccttctccaccaactaccggtccctgggctctgtccaggcgcccagctacggcgcccggccggtcagcagcgcggccagcgtctatgcaggcgctgggggctctggttcccggatctccgtgtcccgctccaccagcttcaggggcggcatggggtccgggggcctggccaccgggatagccgggggtctggcaggaatgggaggcatccagaacgagaaggagaccatgcaaagcctgaacgaccgcctggcctcttacctggacagagtgaggagcctggagaccgagaaccggaggctggagagcaaaatccgggagcacttggagaagaagggaccccaggtcagagactggagccattacttcaagatcatcgaggacctgagggctcagatcttcgcaaatactgtggacaatgcccgcatcgttctgcagattgacaatgcccgtcttgctgctgatgactttagagtcaagtatgagacagagctggccatgcgccagtctgtggagaacgacatccatgggctccgcaaggtcattgatgacaccaatatcacacgactgcagctggagacagagatcgaggctctcaaggaggagctgctcttcatgaagaagaaccacgaagaggaagtaaaaggcctacaagcccagattgccagctctgggttgaccgtggaggtagatgcccccaaatctcaggacctcgccaagatcatggcagacatccgggcccaatatgacgagctggctcggaagaaccgagaggagctagacaagtactggtctcagcagattgaggagagcaccacagtggtcaccacacagtctgctgaggttggagctgctgagacgacgctcacagagctgagacgtacagtccagtccttggagatcgacctggactccatgagaaatctgaaggccagcttggagaacagcctgagggaggtggaggcccgctacgccctacagatggagcagctcaacgggatcctgctgcaccttgagtcagagctggcacagacccgggcagagggacagcgccaggcccaggagtatgaggccctgctgaacatcaaggtcaagctggaggctgagatcgccacctaccgccgcctgctggaagatggcgaggactttaatcttggtgatgccttggacagcagcaactccatgcaaaccatccaaaagaccaccacccgccggatagtggatggcaaagtggtgtctgagaccaatgacaccaaagttctgaggcattaagccagcagaagcagggtaccctttggggagcaggaggccaataaaaagttcagagttca

SEQ ID NO: 145406 - DNA, 1420 bp, Homo sapiens
  Payload ID: 8746
  Gene Symbol: KRT18
  Gene Name: keratin 18, type I
  Uniprot ID: P05783
  ENST ID: ENST00000388837
  CDS Start-End: 70-1362
gcagcctcgagggccaacaacacctgctgtccgtgtccatgcccggttggccaccccgtttctgggggcatgagcttcaccactcgctccaccttctccaccaactaccggtccctgggctctgtccaggcgcccagctacggcgcccggccggtcagcagcgcggccagcgtctatgcaggcgctgggggctctggttcccggatctccgtgtcccgctccaccagcttcaggggcggcatggggtccgggggcctggccaccgggatagccgggggtctggcaggaatgggaggcatccagaacgagaaggagaccatgcaaagcctgaacgaccgcctggcctcttacctggacagagtgaggagcctggagaccgagaaccggaggctggagagcaaaatccgggagcacttggagaagaagggaccccaggtcagagactggagccattacttcaagatcatcgaggacctgagggctcagatcttcgcaaatactgtggacaatgcccgcatcgttctgcagattgacaatgcccgtcttgctgctgatgactttagagtcaagtatgagacagagctggccatgcgccagtctgtggagaacgacatccatgggctccgcaaggtcattgatgacaccaatatcacacgactgcagctggagacagagatcgaggctctcaaggaggagctgctcttcatgaagaagaaccacgaagaggaagtaaaaggcctacaagcccagattgccagctctgggttgaccgtggaggtagatgcccccaaatctcaggacctcgccaagatcatggcagacatccgggcccaatatgacgagctggctcggaagaaccgagaggagctagacaagtactggtctcagcagattgaggagagcaccacagtggtcaccacacagtctgctgaggttggagctgctgagacgacgctcacagagctgagacgtacagtccagtccttggagatcgacctggactccatgagaaatctgaaggccagcttggagaacagcctgagggaggtggaggcccgctacgccctacagatggagcagctcaacgggatcctgctgcaccttgagtcagagctggcacagacccgggcagagggacagcgccaggcccaggagtatgaggccctgctgaacatcaaggtcaagctggaggctgagatcgccacctaccgccgcctgctggaagatggcgaggactttaatcttggtgatgccttggacagcagcaactccatgcaaaccatccaaaagaccaccacccgccggatagtggatggcaaagtggtgtctgagaccaatgacaccaaagttctgaggcattaagccagcagaagcagggtaccctttggggagcaggaggccaataaaaagttcagagttc

SEQ ID NO: 145407 - DNA, 1696 bp, Homo sapiens
  Payload ID: 8746
  Gene Symbol: KRT18
  Gene Name: keratin 18, type I
  ENST ID: ENST00000550600
  CDS Start-End: 55-1230
aacaacacctgctgtccgtgtccatgcccggttggccaccccgtttctgggggcatgagcttcaccactcgctccaccttctccaccaactaccggtccctgggctctgtccaggcgcccagctacggcgcccggccggtcagcagcgcggccagcgtctatgcaggcgctgggggctctggttcccggatctccgtgtcccgctccaccagcttcaggggcggcatggggtccgggggcctggccaccgggatagccgggggtctggcaggaatgggaggcatccagaacgagaaggagaccatgcaaagcctgaacgaccgcctggcctcttacctggacagagtgaggagcctggagaccgagaaccggaggctggagagcaaaatccgggagcacttggagaagaagggaccccaggtcagagactggagccattacttcaagatcatcgaggacctgagggctcagatcttcgcaaatactgtggacaatgcccgcatcgttctgcagattgacaatgcccgtcttgctgctgatgactttagagtcaagtatgagacagagctggccatgcgccagtctgtggagaacgacatccatgggctccgcaaggtcattgatgacaccaatatcacacgactgcagctggagacagagatcgaggctctcaaggaggagctgctcttcatgaagaagaaccacgaagaggaagtaaaaggcctacaagcccagattgccagctctgggttgaccgtggaggtagatgcccccaaatctcaggacctcgccaagatcatggcagacatccgggcccaatatgacgagctggctcggaagaaccgagaggagctagacaagtactggtctcagcagattgaggagagcaccacagtggtcaccacacagtctgctgaggttggagctgctgagacgacgctcacagagctgagacgtacagtccagtccttggagatcgacctggactccatgagaaatctgaaggccagcttggagaacagcctgagggaggtggaggcccgctacgccctacagatggagcagctcaacgggatcctgctgcaccttgagtcagagctggcacagacccgggcagagggacagcgccaggcccaggagtatgaggccctgctgaacatcaaggtcaagctggaggctgagatcgccacctaccgccgcctgctggaagatggcgaggactttaagtgagtggggctctcctacccacacgtgctgggatcaggagatcacttctccccaaagtctgagcttttggaagcaccccatgtgtctgttcactggtatccactgagcactgggccgttgctccgtgggtgctcctgtgtcttcaagggagtaacagttacagaggtctcccccttgaagaaagcaaactaagtattgtccctagctgtacttagtatgcaaatgaagtttggccttgagtttcccttttctggaggaagaggctgagggtgatttggagataaaggtagaggtcaggaggctttttccctctacctttcttgtctcccttctactccacggggctgtttataacttgggcttggtcttctgttacagtcttggtgatgccttggacagcagcaactccatgcaaaccatccaaaagaccaccacccgccggatagtggatggcaaagtggtgtctgag

SEQ ID NO: 145408 - DNA, 1390 bp, Homo sapiens
  Payload ID: 8747
  Gene Symbol: KRT19
  Gene Name: keratin 19, type I
  Uniprot ID: P08727
  ENST ID: ENST00000361566
  CDS Start-End: 62-1264
gctcctcccgcgaatcgcagcttctgagaccagggttgctccgtccgtgctccgcctcgccatgacttcctacagctatcgccagtcgtcggccacgtcgtccttcggaggcctgggcggcggctccgtgcgttttgggccgggggtcgcctttcgcgcgcccagcattcacgggggctccggcggccgcggcgtatccgtgtcctccgcccgctttgtgtcctcgtcctcctcgggggcctacggcggcggctacggcggcgtcctgaccgcgtccgacgggctgctggcgggcaacgagaagctaaccatgcagaacctcaacgaccgcctggcctcctacctggacaaggtgcgcgccctggaggcggccaacggcgagctagaggtgaagatccgcgactggtaccagaagcaggggcctgggccctcccgcgactacagccactactacacgaccatccaggacctgcgggacaagattcttggtgccaccattgagaactccaggattgtcctgcagatcgacaatgcccgtctggctgcagatgacttccgaaccaagtttgagacggaacaggctctgcgcatgagcgtggaggccgacatcaacggcctgcgcagggtgctggatgagctgaccctggccaggaccgacctggagatgcagatcgaaggcctgaaggaagagctggcctacctgaagaagaaccatgaggaggaaatcagtacgctgaggggccaagtgggaggccaggtcagtgtggaggtggattccgctccgggcaccgatctcgccaagatcctgagtgacatgcgaagccaatatgaggtcatggccgagcagaaccggaaggatgctgaagcctggttcaccagccggactgaagaattgaaccgggaggtcgctggccacacggagcagctccagatgagcaggtccgaggttactgacctgcggcgcacccttcagggtcttgagattgagctgcagtcacagctgagcatgaaagctgccttggaagacacactggcagaaacggaggcgcgctttggagcccagctggcgcatatccaggcgctgatcagcggtattgaagcccagctgggcgatgtgcgagctgatagtgagcggcagaatcaggagtaccagcggctcatggacatcaagtcgcggctggagcaggagattgccacctaccgcagcctgctcgagggacaggaagatcactacaacaatttgtctgcctccaaggtcctctgaggcagcaggctctggggcttctgctgtcctttggagggtgtcttctgggtagagggatgggaaggaagggacccttacccccggctcttctcctgacctgccaataaaaatttatggtccaaggga

SEQ ID NO: 145409 - DNA, 641 bp, Homo sapiens
  Payload ID: 8747
  Gene Symbol: KRT19
  Gene Name: keratin 19, type I
  ENST ID: ENST00000455635
  CDS Start-End: 53-641
gcgaatcgcagcttctgagaccagggttgctccgtccgtgctccgcctcgccatgacttcctacagctatcgccagtcgtcggccacgtcgtccttcggaggcctgggcggcggctccgtgcgttttgggccgggggtcgcctttcgcgcgcccagcattcacgggggctccggcggccgcggcgtatccgtgtcctccgcccgctttgtgtcctcgtcctcctcgggggcctacggcggcggctacggcggcgtcctgaccgcgtccgacgggctgctggcgggcaacgagaagctaaccatgcagaacctcaacgaccgcctggcctcctacctggacaaggtgcgcgccctggaggcggccaacggcgagctagagattcttggtgccaccattgagaactccaggattgtcctgcagatcgacaatgcccgtctggctgcagatgacttccgaaccaagtttgagacggaacaggctctgcgcatgagcgtggaggccgacatcaacggcctgcgcagggtgctggatgagctgaccctggccaggaccgacctggagatgcagatcgaaggcctgaaggaagagctggcctacctgaagaagaaccatgaggaggaaatcagtacgctgaggggcc

SEQ ID NO: 145410 - DNA, 728 bp, Homo sapiens
  Payload ID: 8747
  Gene Symbol: KRT19
  Gene Name: keratin 19, type I
  ENST ID: ENST00000593096
  CDS Start-End: 186-728
ctgtttgcaaggcctcccagagagcgggccaatgggcggcagatgctggctagggctttggtctctagggtgccgggattcttggtgccaccattgagaactccaggattgtcctgcagatcgacaatgcccgtctggctgcagatgacttccgaaccaagtttgagacggaacaggctctgcgcatgagcgtggaggccgacatcaacggcctgcgcagggtgctggatgagctgaccctggccaggaccgacctggagatgcagatcgaaggcctgaaggaagagctggcctacctgaagaagaaccatgaggaggaaatcagtacgctgaggggccaagtgggaggccaggtcagtgtggaggtggattccgctccgggcaccgatctcgccaagatcctgagtgacatgcgaagccaatatgaggtcatggccgagcagaaccggaaggatgctgaagcctggttcaccagccggactgaagaattgaaccgggaggtcgctggccacacggagcagctccagatgagcaggtccgaggttactgacctgcggcgcacccttcagggtcttgagattgagctgcagtcacagctgagcatgaaagctgccttggaagacacactggcagaaacggaggcgcgctttggagcccagctggcgcatatccaggcgctgatcagcggtattgaagcccagctgggcgatgtgcgagctgatagtgag

SEQ ID NO: 145411 - DNA, 2403 bp, Homo sapiens
  Payload ID: 8748
  Gene Symbol: KRT2
  Gene Name: keratin 2, type II
  Uniprot ID: P35908
  ENST ID: ENST00000309680
  CDS Start-End: 23-1942
ttcctccctggacaaaggcatcatgagttgtcagatctcttgcaaatctcgaggaagaggaggaggtggaggaggattccggggcttcagcagcggctcagctgtggtgtctggtggaagccggagatcaacttccagcttctcctgcttgagccgccatggtggtggtggcgggggcttcggtggaggcggctttggcagtcggagtcttgttggccttggagggaccaagagcatctccattagtgtggctggaggaggtggtggctttggcgccgctggtggatttggtggcagaggaggtggttttggaggcggcagcagctttggaggtggcagcggcttcagtggtggtggtttcggtggaggcggctttggtggaggccgctttggaggttttgggggccctggtggtgttggaggtttagggggtcctggtggctttgggcctggaggataccctggtggcatccacgaagtctctgtcaaccagagcctcctgcagcctctcaacgtgaaagttgacccagagatccagaatgtgaaggcccaagagcgtgagcagatcaaaactctcaacaacaaatttgcctccttcattgacaaggtgcggttcttggagcagcagaaccaggtgttacagaccaaatgggagctgctacaacaaatgaatgttggcacccgccccatcaacctggagcccatcttccaggggtatatcgacagcctcaagagatatctggatgggctcactgcagaaagaacatcacagaattcagagctgaataacatgcaggatcttgtggaggattataagaagaagtatgaggatgaaatcaataagcgcacagctgctgagaatgattttgtgacgcttaaaaaggacgtggacaatgcctacatgataaaggtggagttgcagtccaaggtggacctgctgaaccaggaaattgagtttctgaaagttctctatgatgcggagatatcccagatacatcagagtgtcactgacaccaacgtcatcctctccatggacaacagccgcaacctggacttggatagcatcatcgccgaggtcaaggcccagtatgaggagatcgcccagaggagcaaggaagaagcggaggccctgtaccacagcaagtatgaggagctccaggtgactgtcgggagacatggagacagcctgaaagagatcaagatagagatcagcgagctgaaccgcgtgatccagaggctgcagggggagatcgcacatgtgaagaagcagtgtaagaatgtgcaagatgccatcgcagatgccgagcagcgtggggagcatgccctcaaggatgccaggaacaagttgaatgacctggaggaggccctgcagcaggccaaggaggacttggcgcggctgctgcgtgactaccaggagctgatgaacgtgaagctggccctagatgtggagatcgccacctaccgcaaactgctggagggcgaggagtgcaggatgtctggagacctcagcagcaatgtgactgtgtctgtgacaagcagcaccatttcatcaaatgtggcatccaaggctgcctttggaggttctggaggtagagggtccagttccggaggaggatacagctctggaagcagcagttatggctctggaggccgacagtctggctccagaggcggtagtggaggaggaggttctatctctggaggaggatatggctctggcggtggttctggaggaagatacggatctggtggtggctctaagggagggtccatctctggaggaggatatggctctggaggtggaaaacacagctctggaggtggctctagaggaggctccagctctggaggaggatatggctctggaggtgggggttctagctctgtaaagggtagctcaggtgaagcttttggttccagcgtgaccttctcttttagataaagatgagcccccaccaccaccgactctcccaacccagactctcccactccagaatgtagaagcctgtctctgtacctctaactggcagcaagttaaatttttgtcatttatctctgatggcactttgagggaaaagaatgtccacatacagtttttgaaagatcttctctccaaaccagttagttagagccagtgacgcctctgtgttctggggcggaatctgtgctgtctaggtttgtgcttctagccatgcccattcccgcccccaccatgcctctttgcattgcccattttccagatgtgtattctgttgaggacccaggcccatccagggatttcatctctaagcctggcagtgctggggggaaatgtgtttctgtgtatatagctcctcttgtccactctgctttcggaagtgctgtggtctgggggtcttcataataaacctcatttgcaattca

SEQ ID NO: 145412 - DNA, 1737 bp, Homo sapiens
  Payload ID: 8749
  Gene Symbol: KRT20
  Gene Name: keratin 20, type I
  Uniprot ID: P35900
  ENST ID: ENST00000167588
  CDS Start-End: 43-1317
caaccatcctgaagctacaggtgctccctcctggaatctccaatggatttcagtcgcagaagcttccacagaagcctgagctcctccttgcaggcccctgtagtcagtacagtgggcatgcagcgcctcgggacgacacccagcgtttatgggggtgctggaggccggggcatccgcatctccaactccagacacacggtgaactatgggagcgatctcacaggcggcggggacctgtttgttggcaatgagaaaatggccatgcagaacctaaatgaccgtctagcgagctacctagaaaaggtgcggaccctggagcagtccaactccaaacttgaagtgcaaatcaagcagtggtacgaaaccaacgccccgagggctggtcgcgactacagtgcatattacagacaaattgaagagctgcgaagtcagattaaggatgctcaactgcaaaatgctcggtgtgtcctgcaaattgataatgctaaactggctgctgaggacttcagactgaagtatgagactgagagaggaatacgtctaacagtggaagctgatctccaaggcctgaataaggtctttgatgacctaaccctacataaaacagatttggagattcaaattgaagaactgaataaagacctagctctcctcaaaaaggagcatcaggaggaagtcgatggcctacacaagcatctgggcaacactgtcaatgtggaggttgatgctgctccaggcctgaaccttggcgtcatcatgaatgaaatgaggcagaagtatgaagtcatggcccagaagaaccttcaagaggccaaagaacagtttgagagacagactgcagttctgcagcaacaggtcacagtgaatactgaagaattaaaaggaactgaggttcaactaacggagctgagacgcacctcccagagccttgagatagaactccagtcccatctcagcatgaaagagtctttggagcacactctagaggagaccaaggcccgttacagcagccagttagccaacctccagtcgctgttgagctctctggaggcccaactgatgcagattcggagtaacatggaacgccagaacaacgaataccatatccttcttgacataaagactcgacttgaacaggaaattgctacttaccgccgccttctggaaggagaagacgtaaaaactacagaatatcagttaagcaccctggaagagagagatataaagaaaaccaggaagattaagacagtcgtgcaagaagtagtggatggcaaggtcgtgtcatctgaagtcaaagaggtggaagaaaatatctaaatagctaccagaaggagatgctgctgaggttttgaaagaaatttggctataatcttatctttgctccctgcaagaaatcagccataagaaagcactattaatactctgcagtgattagaaggggtggggtggcgggaatcctatttatcagactctgtaattgaatataaatgttttactcagaggagctgcaaattgcctgcaaaaatgaaatccagtgagcactagaatatttaaaacatcattactgccatctttatcatgaagcacatcaattacaagctgtagaccacctaatatcaatttgtaggtaatgttcctgaaaattgcaatacatttcaattatactaaacctcacaaagtagaggaatccatgtaaattgcaaataaaccactttctaattttttcctgtttctgaa

SEQ ID NO: 145413 - DNA, 1737 bp, Homo sapiens; identical to SEQ ID NO: 145412
  Payload ID: 8749
  Gene Symbol: KRT20
  Gene Name: keratin 20, type I
  Uniprot ID: P35900
  ENST ID: ENST00000576098
  CDS Start-End: 43-1317

SEQ ID NO: 145414 - DNA, 2764 bp, Homo sapiens
  Payload ID: 8750
  Gene Symbol: KRT222
  Gene Name: keratin 222, type II
  ENST ID: ENST00000394049
  CDS Start-End: 58-234
gcagcgactcatcctatcgataaggttcagttagccaaggtggaggatgggaaaagaatggaactgtcccagctactcaatgagatcagggcaaactatgaaaagatcctcaccagaaatcagatagagacggtgctctcaacaaggatccaggtaatgatttcatacagacaggcaccttccagaataaggagacagtccatgtctacccaattcctgtcccggcctctctgagctagaagaagacataagcaaaaaaatggacaaagatgaagaggctttgaaggcagctcaagcagaactcaaggaggcccgacgccagtggcaccacctgcaagtggaaattgaatctctccatgctgtggaaaggggccttgaaaactccctacatgccagcgagcagcattaccagatgcagctgcaagacctagagactgtgattgaaggactagaaaaagagctacaggaagtaaggcgcggcatcgaaaagcagcttcaagagcacgagatgcttctcaacacgaagatgaggctggaacaagaaatagcaacttatcgccacctcctagaaaaagaagaaatcagatattatggttgtatccaaggtgggaaaaaagacaaaaagcctaccacaagtagagttggttttgttttaccatcagccattataaatgaaatatcttttactacaaaagtcccacaaaagtatgagaatgaaaatgtagaaacagtaaccaaacaggcaatcttaaatgggagtatcgttaaggagagcactgaagctcatggcactattcagacagagaaagtggatgaagttattaaagaatgggaaggttctttctttaaagataaccctcgattgaggaaaaagtctgtttctcttcgatttgatcttcatttagcagccactgatgaagggtgtttagagactaagcaggataatctaccagatatagaagtcaggcttatcatgagaagatcatgcagtattccctctatcaaacctccatcaacagctaattaatccaaagatagtatttgacttgattggaaaatgttaggatggaccaaggtgggccataccaactccctctgtcccaaaatgtaagttattacgtatgtatggaaaatgttatgatcaatatgtggttctcttcagaagaaaaaaacaataaaggacatttctctgaatctaattatggagatagacatatatatatatatatgaatgagagggagtagcttaaaaataaaatcacaaatccagtacagtctctttctttatattctcccaatagtcttctttttcccttgaaacttcatcagagactgtaagcattaacctggtttagtaaagtctttgtaatttttttcaatggctgaatacgctaaggaaaaaagaattgtttgaataggattgtgttaagagtcacactgagttattcaccattattccatgactggttaaacctacaatgtttgttctatttttcaaaaagagcaattataaacaagtttttaaagggggactcactattcacctaatgaggattcttctttttgagataaatcatttgtatactgagaaaaatgagttattttccatgagaaattctgagcaaactatagaacacaccccagggctaatttgagataagtacaattaagttaatctacatatatctaaaaggttttttttgtaataagtatctgatttccggaagatttactttactcaaggaactttaaaggttgtatcccccaccaaaaaaagaaaaaaaatcagaaggccaactgcgcaaacaaaacatgaaaagcaaattgaaaaggtagttactatagttatcagaacagttacccaccatcccagtttttccaactgtaaagctaaatgtgattagattgtttgctataagccgtagataagatactatatgaagtattataaatatttcttgcaatcatttatgtgaactaagataacggtattgttatctaagctaagagtatttagaggatttgtttttaaatcgttcaaattgtaataaatatgggtagaaaatatatttgtgaataagtgaggtattgttgcaaagtttttaaaataacctaatttgtttaatacaggtatatttaagatcttaataaatacctgttttaagacattagaaatttataagttcttaattcttttctaagcagaaaaagtagctgagtacaactcaccatactttttcccagctaaagtatcatctaagggctatagctacgttagcattttagtacagcctttaaaatatttctctctctctctcctctctcttctcctctatctctctctccatatatacttattatatatatacatatatataatttatatatatgtatatatatatttcaaccagaaaaatgtatgttttaaccaggaaaatattatgttaaataatctttaacataatacagggatataaaatttttaattttctttcaattacttcagattccttttagtctggtttattctatttagtgaaaagggatgattttgttttgtcaaggatataacagcatgttaagtgcttattcttgcataagcatctgacctaaaatacatcctatacataaaaaatgtttcatttgatattgctaaatgctactaactttattaaagctttaaaaatgcaatcatataagctattgtactaaagttactgtactaagcaacagtgatcataataaagcaatatatctagcataa

SEQ ID NO: 145415 - DNA, 1712 bp, Homo sapiens
  Payload ID: 8750
  Gene Symbol: KRT222
  Gene Name: keratin 222, type II
  Uniprot ID: Q8N1A0
  ENST ID: ENST00000394052
  CDS Start-End: 43-930
atcgataaggttcagttagccaaggtggaggatgggaaaagaatggaactgtcccagctactcaatgagatcagggcaaactatgaaaagatcctcaccagaaatcagatagagacggtgctctcaacaaggatccagctagaagaagacataagcaaaaaaatggacaaagatgaagaggctttgaaggcagctcaagcagaactcaaggaggcccgacgccagtggcaccacctgcaagtggaaattgaatctctccatgctgtggaaaggggccttgaaaactccctacatgccagcgagcagcattaccagatgcagctgcaagacctagagactgtgattgaaggactagaaaaagagctacaggaagtaaggcgcggcatcgaaaagcagcttcaagagcacgagatgcttctcaacacgaagatgaggctggaacaagaaatagcaacttatcgccacctcctagaaaaagaagaaatcagatattatggttgtatccaaggtgggaaaaaagacaaaaagcctaccacaagtagagttggttttgttttaccatcagccattataaatgaaatatcttttactacaaaagtcccacaaaagtatgagaatgaaaatgtagaaacagtaaccaaacaggcaatcttaaatgggagtatcgttaaggagagcactgaagctcatggcactattcagacagagaaagtggatgaagttattaaagaatgggaaggttctttctttaaagataaccctcgattgaggaaaaagtctgtttctcttcgatttgatcttcatttagcagccactgatgaagggtgtttagagactaagcaggataatctaccagatatagaagtcaggcttatcatgagaagatcatgcagtattccctctatcaaacctccatcaacagctaattaatccaaagatagtatttgacttgattggaaaatgttaggatggaccaaggtgggccataccaactccctctgtcccaaaatgtaagttattacgtatgtatggaaaatgttatgatcaatatgtggttctcttcagaagaaaaaaacaataaaggacatttctctgaatctaattatggagatagacatatatatatatatatgaatgagagggagtagcttaaaaataaaatcacaaatccagtacagtctctttctttatattctcccaatagtcttctttttcccttgaaacttcatcagagactgtaagcattaacctggtttagtaaagtctttgtaatttttttcaatggctgaatacgctaaggaaaaaagaattgtttgaataggattgtgttaagagtcacactgagttattcaccattattccatgactggttaaacctacaatgtttgttctatttttcaaaaagagcaattataaacaagtttttaaagggggactcactattcacctaatgaggattcttctttttgagataaatcatttgtatactgagaaaaatgagttattttccatgagaaattctgagcaaactatagaacacaccccagggctaatttgagataagtacaattaagttaatctacatatatctaaaaggttttttttgtaataagtatctgatttccggaagatttactttactcaaggaactttaaaggttgtatcccccaccaaaaaaagaaaaaaaatcagaaggccaactgcgcaaacaa

SEQ ID NO: 145416 - DNA, 1116 bp, Homo sapiens
  Payload ID: 8750
  Gene Symbol: KRT222
  Gene Name: keratin 222, type II
  ENST ID: ENST00000581564
  CDS Start-End: 47-223
tcctatcgataaggttcagttagccaaggtggaggatgggaaaagaatggaactgtcccagctactcaatgagatcagggcaaactatgaaaagatcctcaccagaaatcagatagagacggtgctctcaacaaggatccaggtaatgatttcatacagacaggcaccttccagaataaggagacagtccatgtctacccaattcctgtcccggcctctctgagctagaagaagacataagcaaaaaaatggacaaagatgaagaggctttgaaggcagctcaagcagaactcaaggaggcccgacgccagtggcaccacctgcaagtggaaattgaatctctccatgctgtggaaaggggccttgaaaactccctacatgccagcgagcagcattaccagatgcagctgcaagacctagagactgtgattgaaggactagaaaaagagctacaggaagtaaggcgcggcatcgaaaagcagcttcaagagcacgagatgcttctcaacacgaagatgaggctggaacaagaaatagcaacttatcgccacctcctagaaaaagaagaaatcagatattatggttgtatccaaggtgggaaaaaagacaaaaagcctaccacaagtagagttggttttgttttaccatcaggtgagtttctgacataaataaactcatttgaaaagtgatgtactatttacagggattactttataaggaaattaaatactttaaagtcgaaaaaaaacaagcaatatttgaataaaagtttgaatataatttgtgaacagtaattcaatactgtaatttaatatatcataaatgatattttcacagccattataaatgaaatatcttttactacaaaagtcccacaaaagtatgagaatgaaaatgtagaaacagtaaccaaacaggcaatcttaaatgggagtatcgttaaggagagcactgaagctcatggcactattcagtaagtaaagaaactttgactaagaaataataataaatatatgtaaagaaattaactttgcgtaatcccagtaattactcttctttgtttaaatgtttccaaacatagttttagtatactgtgatttttttttttttttttga

SEQ ID NO: 145417 - DNA, 490 bp, Homo sapiens
  Payload ID: 8750
  Gene Symbol: KRT222
  Gene Name: keratin 222, type II
  ENST ID: ENST00000580719
  CDS Start-End: 83-259
ttccgcgcagaccgagcagactgccgcagcgactcatcctatcgataaggttcagttagccaaggtggaggatgggaaaagaatggaactgtcccagctactcaatgagatcagggcaaactatgaaaagatcctcaccagaaatcagatagagacggtgctctcaacaaggatccaggtaatgatttcatacagacaggcaccttccagaataaggagacagtccatgtctacccaattcctgtcccggcctctctgagaagcactccttgttttttgtttgttattgttgctgttggctttcttgttagctagaagaagacataagcaaaaaaatggacaaagatgaagaggctttgaaggcagctcaagcagaactcaaggaggcccgacgccagtggcaccacctgcaagtggaaattgaatctctccatgctgtggaaaggggccttgaaaactccctacatgccagcgagcagcattaccagat

SEQ ID NO: 145418 - DNA, 1987 bp, Homo sapiens
  Payload ID: 8751
  Gene Symbol: KRT23
  Gene Name: keratin 23, type I
  Uniprot ID: Q9C075
  ENST ID: ENST00000209718
  CDS Start-End: 426-1694
gggaaatcctgagcgcaggccagggttgtttggttttgaggtgtgctgggatgaaaggcaccctggaagtggaaggtaaatgaacaatggaaaaacttcacggcaagattagaaagatacctgagcccaatacccgcctgatgtcgtgggccacacctccgggttaccaggggaagggaggaagcaaactgtcatattgatgtggctctaaacaacaacagtgtgcgaaggcccaggggcactttgggattgaccaagaggaaacacaagttgcacaatgatacaatcttgttggtacaattgtcagagaagggaactcccacagcaaaggccataaaaccatccagggcagtctggggcggctcagttctgcggtgccagggagtggagcagagctcagccccgtcccaaacacagatgggaccatgaactccggacacagcttcagccagaccccctcggcctccttccatggcgccggaggtggctggggccggcccaggagcttccccagggctcccaccgtccatggcggtgcggggggagcccgcatctccctgtccttcaccacgcggagctgcccaccccctggagggtcttggggttctggaagaagcagccccctactaggcggaaatgggaaggccaccatgcagaatctcaacgaccgcctggcctcctacctggagaaggttcgcgccctggaggaggccaacatgaagctggaaagccgcatcctgaaatggcaccagcagagagatcctggcagtaagaaagattattcccagtatgaggaaaacatcacacacctgcaggagcagatagtggatggtaagatgaccaatgctcagattattcttctcattgacaatgccaggatggcagtggatgacttcaacctcaagtatgaaaatgaacactcctttaagaaagacttggaaattgaagtcgagggcctccgaaggaccttagacaacctgaccattgtcacaacagacctagaacaggaggtggaaggaatgaggaaagagctcattctcatgaagaagcaccatgagcaggaaatggagaagcatcatgtgccaagtgacttcaatgtcaatgtgaaggtggatacaggtcccagggaagatctgattaaggtcctggaggatatgagacaagaatatgagcttataataaagaagaagcatcgagacttggacacttggtataaagaacagtctgcagccatgtcccaggaggcagccagtccagccactgtgcagagcagacaaggtgacatccacgaactgaagcgcacattccaggccctggagattgacctgcagacacagtacagcacgaaatctgctttggaaaacatgttatccgagacccagtctcggtactcctgcaagctccaggacatgcaagagatcatctcccactatgaggaggaactgacgcagctacgccatgaactggagcggcagaacaatgaataccaagtgctgctgggcatcaaaacccacctggagaaggaaatcaccacgtaccgacggctcctggagggagagagtgaagggacacgggaagaatcaaagtcgagcatgaaagtgtctgcaactccaaagatcaaggccataacccaggagaccatcaacggaagattagttctttgtcaagtgaatgaaatccaaaagcacgcatgagaccaatgaaagtttccgcctgttgtaaaatctattttcccccaaggaaagtccttgcacagacaccagtgagtgagttctaaaagatacccttggaattatcagactcagaaacttttattttttttttctgtaacagtctcaccagacttctcataatgctcttaatatattgcacttttctaatcaaagtgcgagtttatgagggtaaagctctactttcctactgcagccttcagattctcatcattttgcatctattttgtagccaataaaactccgcactagctgca

SEQ ID NO: 145419 - DNA, 1485 bp, Homo sapiens
  Payload ID: 8751
  Gene Symbol: KRT23
  Gene Name: keratin 23, type I
  Uniprot ID: Q9C075
  ENST ID: ENST00000436344
  CDS Start-End: 339-1196
acaacggctacattcctcccccagggccaagggaaatcctgagcgcaggccagggttgtttggttttgaggtgtgctgggatgaaaggcaccctggaagtggaaggttcggtcattcattaattaattacatctataattgagggtttgttcttaagagcgagtcctttgaaagtactttccttcaaacagtgactgccacaaaggcatcagatattcaccaccttctcggctgcctcagcacagcaagctttattctgggacctgagatcctgttctgagctggctttcccttctccaggctcgctcaccctccctttagagatagtggatggtaagatgaccaatgctcagattattcttctcattgacaatgccaggatggcagtggatgacttcaacctcaagtatgaaaatgaacactcctttaagaaagacttggaaattgaagtcgagggcctccgaaggaccttagacaacctgaccattgtcacaacagacctagaacaggaggtggaaggaatgaggaaagagctcattctcatgaagaagcaccatgagcaggaaatggagaagcatcatgtgccaagtgacttcaatgtcaatgtgaaggtggatacaggtcccagggaagatctgattaaggtcctggaggatatgagacaagaatatgagcttataataaagaagaagcatcgagacttggacacttggtataaagaacagtctgcagccatgtcccaggaggcagccagtccagccactgtgcagagcagacaaggtgacatccacgaactgaagcgcacattccaggccctggagattgacctgcagacacagtacagcacgaaatctgctttggaaaacatgttatccgagacccagtctcggtactcctgcaagctccaggacatgcaagagatcatctcccactatgaggaggaactgacgcagctacgccatgaactggagcggcagaacaatgaataccaagtgctgctgggcatcaaaacccacctggagaaggaaatcaccacgtaccgacggctcctggagggagagagtgaagggacacgggaagaatcaaagtcgagcatgaaagtgtctgcaactccaaagatcaaggccataacccaggagaccatcaacggaagattagttctttgtcaagtgaatgaaatccaaaagcacgcatgagaccaatgaaagtttccgcctgttgtaaaatctattttcccccaaggaaagtccttgcacagacaccagtgagtgagttctaaaagatacccttggaattatcagactcagaaacttttattttttttttctgtaacagtctcaccagacttctcataatgctcttaatatattgcacttttctaatcaaagtgcgagtttatgagggtaaagctctactttcctactgcagccttcagattctcatcattttgcatctattttgtagccaataaaactccgcactagc

SEQ ID NO: 145420 - DNA, 1987 bp, Homo sapiens; identical to SEQ ID NO: 145418
  Payload ID: 8751
  Gene Symbol: KRT23
  Gene Name: keratin 23, type I
  Uniprot ID: Q9C075
  ENST ID: ENST00000574480
  CDS Start-End: 426-1694

SEQ ID NO: 145421 - DNA, 1485 bp, Homo sapiens; identical to SEQ ID NO: 145419
  Payload ID: 8751
  Gene Symbol: KRT23
  Gene Name: keratin 23, type I
  Uniprot ID: Q9C075
  ENST ID: ENST00000571258
  CDS Start-End: 339-1196

SEQ ID NO: 145422 - DNA, 1462 bp, Homo sapiens
  Payload ID: 8751
  Gene Symbol: KRT23
  Gene Name: keratin 23, type I
  ENST ID: ENST00000462312
  CDS Start-End: 473-586
ggcagatgaaatataagattcatcaaccacatttgacagcccatggcaggtttcctgttttccatcgtccctctgcaggtcacagacacacagagcccagccgtggcaggctcagccggggtccggggctgctaacaacggctacattcctcccccagggccaagggaaatcctgagcgcaggccagggttgtttggttttgaggtgtgctgggatgaaaggcaccctggaagtggaaggttcggtcattcattaattaattacatctataattgagggtttgttcttaagagcgagtcctttgaaagtactttccttcaaacagtgactgccacaaaggcatcagatattcaccaccttctcggctgcctcagcacagcaagctttattctgggacctgagatcctgttctgagctggctttcccttctccaggctcgctcaccctccctttagagatagtggatggtaagatgaccaatgctcagattattcttctcattgacaatgccaggatggcagtggatgacttcaacctcaagaaatggagaagcatcatgtgccaagtgacttcaatgtcaatgtgaaggtggatacaggtcccagggaagatctgattaaggtcctggaggatatgagacaagaatatgagcttataataaagaagaagcatcgagacttggacacttggtataaagaacagtctgcagccatgtcccaggaggcagccagtccagccactgtgcagagcagacaaggtgacatccacgaactgaagcgcacattccaggccctggagattgacctgcagacacagtacagcacgaaatctgctttggaaaacatgttatccgagacccagtctcggtactcctgcaagctccaggacatgcaagagatcatctcccactatgaggaggaactgacgcagctacgccatgaactggagcggcagaacaatgaataccaagtgctgctgggcatcaaaacccacctggagaaggaaatcaccacgtaccgacggctcctggagggagagagtgaagggacacgggaagaatcaaagtcgagcatgaaagtgtctgcaactccaaagatcaaggccataacccaggagaccatcaacggaagattagttctttgtcaagtgaatgaaatccaaaagcacgcatgagaccaatgaaagtttccgcctgttgtaaaatctattttcccccaaggaaagtccttgcacagacaccagtgagtgagttctaaaagatacccttggaattatcagactcagaaacttttattttttttttctgtaacagtctcaccagacttctcataatgctcttaatatattgcacttttctaatcaaagtgcgagtttatgagggtaaagctctactttcctactgcagccttcagattctcatcattttgcatctattttgtagccaataaaactccgcactagc

SEQ ID NO: 145423 - DNA, 687 bp, Homo sapiens
  Payload ID: 8751
  Gene Symbol: KRT23
  Gene Name: keratin 23, type I
  ENST ID: ENST00000581268
  CDS Start-End: 1-450
gggaaggccaccatgcagaatctcaacgaccgcctggcctcctacctggagaaggttcgcgccctggaggaggccaacatgaagctggaaagccgcatcctgaaatggcaccagcagagagatcctggcagtaagaaagattattcccagtatgaggaaaacatcacacacctgcaggagcagatagtggatggtaagatgaccaatgctcagattattcttctcattgacaatgccaggatggcagtggatgacttcaacctcaagtatgaaaatgaacactcctttaagaaagacttggaaattgaagtcgagggcctccgaaggaccttagacaacctgaccattgtcacaacagacctagaacaggaggtggaaggaatgaggaaagagctcattctcatgaagaagcaccatgagcaggtacaactccccaggaacacctgctaataagcacagctcttagcctgcacatctcaggctgattcgacagctacagaagaaaccaccacctggatgccaatccccttgtccttcaccctaaatagtctttagaaaaacatacaaatatctaatgtttctaatttcaaggttagctagtcacatgtcaaatacaacaaccaaaatgcaatcataattaatgatgaattggtcaacagttttgttaatacacaatgtttacctaga

SEQ ID NO: 145424 - DNA, 700 bp, Homo sapiens
  Payload ID: 8751
  Gene Symbol: KRT23
  Gene Name: keratin 23, type I
  ENST ID: ENST00000574395
  CDS Start-End: 348-461
cccatggcaggtttcctgttttccatcgtccctctgcaggtcacagacacacagagcccagccgtggcaggctcagccggggtccggggctgctaacaacggctacattcctcccccagggccaagggaaatcctgagcgcaggccagggttgtttggttttgaggtgtgctgggatgaaaggcaccctggaagtggaagtgactgccacaaaggcatcagatattcaccaccttctcggctgcctcagcacagcaagctttattctgggacctgagatcctgttctgagctggctttcccttctccaggctcgctcaccctccctttagagatagtggatggtaagatgaccaatgctcagattattcttctcattgacaatgccaggatggcagtggatgacttcaacctcaagaaatggagaagcatcatgtgccaagtgacttcaatgtcaatgtgaaggtggatacaggtcccagggaagatctgattaaggtcctggaggatatgagacaagaatatgagcttataataaagaagaagcatcgagacttggacacttggtataaagaacagtctgcagccatgtcccaggaggcagccagtccagccactgtgcagagcagacaaggtgacatccacgaactgaagcgcacattccaggccctggagattgacctgcagacacagtacagcacg

SEQ ID NO: 145425 - DNA, 1462 bp, Homo sapiens; identical to SEQ ID NO: 145422
  Payload ID: 8751
  Gene Symbol: KRT23
  Gene Name: keratin 23, type I
  ENST ID: ENST00000571504
  CDS Start-End: 473-586

SEQ ID NO: 145426 - DNA, 687 bp, Homo sapiens; identical to SEQ ID NO: 145423
  Payload ID: 8751
  Gene Symbol: KRT23
  Gene Name: keratin 23, type I
  ENST ID: ENST00000584517
  CDS Start-End: 1-450

SEQ ID NO: 145427 - DNA, 700 bp, Homo sapiens; identical to SEQ ID NO: 145424
  Payload ID: 8751
  Gene Symbol: KRT23
  Gene Name: keratin 23, type I
  ENST ID: ENST00000494691
  CDS Start-End: 348-461

SEQ ID NO: 145428 - DNA, 865 bp, Homo sapiens
  Payload ID: 8751
  Gene Symbol: KRT23
  Gene Name: keratin 23, type I
  ENST ID: ENST00000485751
  CDS Start-End: 710-865
agccgtggcaggctcagccggggtccggggctgctaacaacggctacattcctcccccagggccaagggaaatcctgagcgcaggccagggttgtttggttttgaggtgtgctgggatgaaaggcaccctggaagtggaaggttcggtcattcattaattaattacatctataattgagggtttgttcttaagagcgagtcctttgaaagtactttccttcaaacagtgactgccacaaaggcatcagatattcaccaccttctcggctgcctcagcacagcaagctttattctgggacctgagatcctgttctgagctggctttcccttctccaggctcgctcaccctccctttagaggtaaatgaacaatggaaaaacttcacggcaagattagaaagatacctgagcccaatacccgcctgatgtcgtgggccacacctccgggttaccaggggaagggaggaagcaaactgtcatattgatgtggctctaaacaacaacagtgtgcgaaggcccaggggcactttgggattgaccaagaggaaacacaagttgcacaatgatacaatcttgttggtacaattgtcagagaagggaactcccacagcaaaggccataaaaccatccagggcagtctggggcggctcagttctgcggtgccagggagtggagcagagctcagccccgtcccaaacacagatgggaccatgaactccggacacagcttcagccagaccccctcggcctccttccatggcgccggaggtggctggggccggcccaggagcttccccagggctcccaccgtccatggcggtgcggggggagcccgcatctccctgtccttcaccacgcggagctgc

SEQ ID NO: 145429 - DNA, 865 bp, Homo sapiens; identical to SEQ ID NO: 145428
  Payload ID: 8751
  Gene Symbol: KRT23
  Gene Name: keratin 23, type I
  ENST ID: ENST00000572233
  CDS Start-End: 710-865

SEQ ID NO: 145430 - DNA, 1881 bp, Homo sapiens
  Payload ID: 8752
  Gene Symbol: KRT24
  Gene Name: keratin 24, type I
  Uniprot ID: Q2M2I5
  ENST ID: ENST00000264651
  CDS Start-End: 58-1635
actcttcgtcatcacctctcctattcgcctggacaagctcatgtttgcaggagcaccatgtcttgctcgtctcgcgcctcctcctccagggctggaggcagcagctcagccagggtgtctgctggtggaagcagcttcagcagtggaagcagatgtggtctggggggcagctcggcccagggcttccgaggaggagccagcagctgcagcctgagtggggggtctagcggtgcttttgggggcagctttggagggggctttggtagctgctcagtagggggtggttttgggggagcttcaggctctgggacaggatttggtgggggttctagctttggcggggtctctggatttggcaggggttctggattctgtgggagttctagattcagcagtggtgctactggaggcttctacagctatggtggtggtatgggaggtggtgttggcgatggggggcttttctctggaggggaaaagcaaaccatgcagaacctcaatgaccgcttggccaattacctagacaaggtcagagccctggaggaggctaacactgatctggagaacaaaatcaaggagtggtatgacaaatatgggcctgggtctggagacggtggatcgggaagagattatagcaaatactattcaataattgaagatctcagaaaccagatcattgctgccactgttgaaaatgctgggatcattttgcacattgacaatgccagattggctgctgatgacttcagactgaagtatgagaacgagctgtgtctccggcagagcgtggaggctgacatcaatggcctgcggaaagtcctggatgacctgactatgacccgctctgacctggagatgcagattgagagtttcaccgaggagctagcctacctgaggaagaaccacgaggaggaaatgaagaatatgcaaggaagctctggaggggaggtgaccgtagaaatgaatgctgcgccagggaccgacctgaccaaattactgaatgacatgagggcgcagtacgaggagctggctgagcaaaaccgccgagaggctgaggagcggttcaacaagcagagcgcatcactacaagcacaaatctccactgatgctggggcagccacttctgccaagaatgagataacagaactaaaacgtaccctgcaagccctggaaattgagcttcagtcccaactggccatgaaaagctccctggagggaaccctggctgacacagaagctggctacgtggctcagctgtcagaaattcaaacgcagatcagtgccctggaggaggagatctgccagatctggggtgagactaaatgccagaacgcagagtacaagcaattgctggacatcaagacacgcctggaggtggagatcgagacctaccgccgcctgctcgatggagagggaggtggttctagttttgcagaatttggtggtagaaactcaggatctgtaaacatgggatccagggatctggtatctggtgactcaagatctggaagctgttctggtcaaggacgagattcaagcaagactagagtgactaagactatcgtagaggagttggtggatggcaaggttgtctcgtctcaagtcagcagtatttctgaggtgaaagttaaataaggaacttccagatcaacaaaagtgtctttcaaagaaaaaaaaatcaagaaggacacaagcgaagaaatggcatcaatctaggcatctttctggataatttcaggaaaagcttcagtccagaaatggatgactagccaacttttctgcatcttcttatttcctcattagaatgctcttgaaatagctgaattaacaactttgctttaattgtttctatgcttcaataaatttacttttgcaagttaa

SEQ ID NO: 145431 - DNA, 1670 bp, Homo sapiens
  Payload ID: 8753
  Gene Symbol: KRT25
  Gene Name: keratin 25, type I
  Uniprot ID: Q7Z3Z0
  ENST ID: ENST00000312150
  CDS Start-End: 62-1414
aagaaggcactccattctggctttcacaaatacagctctgcaacgcgtttgccctgataccatgtctcttcgactttccagtgcatccaggaggtcctgtcctcgtcccaccactggatcactcagactctatggtgggggaaccagctttggtactggaaattcttgtggcatttcagggattggaagtggcttctctagtgccttcggaggcagctcatcgggaggaaacacagggggaggtaatccctgtgctggcttcactgtgaatgagcgggggctcctttctggcaatgagaaggtgaccatgcagaacctcaatgaccgcctggcatcctacctggacagtgtgcatgctctggaggaggccaacgctgacctggagcagaagatcaagggctggtatgagaaatttgggcctggctcttgccgtggtcttgatcatgactatagcagatatttcccaataattgatgaccttaaaaatcagatcatcgcatccaccaccagcaatgctaatgctgttctgcagatcgataatgccaggcttacagctgatgatttcagactcaagtatgaaaatgagctggctcttcaccagagtgtagaggctgatgtcaatgggttacgaagagttttggatgaaataaccctgtgcagaacagatctggagattcagtatgaaaccctgagtgaggagatgacttacctcaaaaagaaccataaagaggaaatgcaagttctgcagtgcgcagctggaggcaacgtgaacgtggagatgaacgcagcccccggggtggacctcacagttctgctgaacaacatgcgagctgagtacgaagcccttgcagagcagaaccgcagggacgcggaggcctggttcaacgagaagagcgcctccctgcagcagcagatctctgaggatgtcggagccacaacctcagcccggaatgagctgactgaaatgaagcgcactcttcaaaccctggaaattgaacttcagtctctcctagccacgaaacactccctggagtgctccttgacagagaccgagagcaactactgtgcgcagctggcgcagatccaggctcagatcggggccctggaggagcagctgcaccaggtcagaaccgagaccgagggccagaagctggagtatgagcagctcctggacatcaagctccacctggaaaaagaaattgagacctactgtctccttataggaggagatgatggagcctgtaagtctgggggttacaagtctaaagattatggatctggaaatgtgggaagtcaagtcaaagacccagccaaagccatagtggttaagaaagttcttgaggaggtagaccaacgcagcaaaatacttaccaccaggctccactccctggaagagaaatctcaaagcaattaatttgagatgcaacagagaacgtatgccacatagcccctgcgaagaaaaggcattatgtatctgtccagaaaaatgtgcatgtctaagaaaaatgtctaacctgttgtctttctgttactttctttctgggcaatcaatgacagcatctccccattcatctagaagaatgccacacacaaatatgactcatttgattatcctacagaaatctgttgtcaattctttgtattcaataaacctcttctttagcaagtta

SEQ ID NO: 145432 - DNA, 1733 bp, Homo sapiens
  Payload ID: 8754
  Gene Symbol: KRT26
  Gene Name: keratin 26, type I
  Uniprot ID: Q7Z3Y9
  ENST ID: ENST00000335552
  CDS Start-End: 50-1456
tggctttgctcctctttctgggaaggggttgcccggctgtgctgccaccatgtcttttcgactttctggtggatccaggaggatctgctcgcgaactgggtctggtaggctgtccggtggaggaacaggcttcgtggctgggaatgtgtgtgttggatcgggagcaagaagcagcttttcttgtactcttgagggcatctcttctggaggaagcttctgcaatagcggtggagggttgggaagtggtgcctgtgctggttttcttggcaatgagcacagcctcctctctgggaatgaaaaggtgaccatgcagaatctcaacgaccgcctggcatcctacctggaccatgtgcatgctctagaggaggccaacgcagacctggagcagaagatcaagggctggtacgagaaatgtgagcctggctcttcccgggaacacgatcatgactatagcagatacttctcagtcatagaagatcttaaaaggcagattatttctgcgaccatctgcaatgccagcattgttctacaaaatgacaatgccagactgaccgctgatgacttcaggctgaagtatgaaaatgagctggctctgcaccacagtgttgaggccgacaccagtggtcttcgcagagtgttggatgaactgaccctttgtacaaccgacctggagatacagtgtgagaccctcagtgaggaattgacctacctcaaaaaaagtcatgaggaggaaatggaagtcttgcaatatacagctggggggaacgtgaacgtggagatgaatgcaaccccaggagtggacctaactgtcctgttgaacaacatgagggctgagtatgaggacttggctgagcagaaccgcaaagatgctgaagcctggttcaacgagaggagtgcaacgctgcaacaacagatttccgatcatgagggagcagccacagcagccagaaatgagctgaccgaattaaaacgcaatctgcaaaccctggaaatagaacttcagtccctcatggctgtgaaacattcctatgaatgctccttggctgagactgaaggaaattactgcaatcaactccagcaaattcaggatcagataggggtgatggaggaacaactgcaacagattcgaacagaaacagaaggccagaagctggagtatgaacagcttcttgatgtaaaaatatttttagaaaaagaaattgacatttattgcaacttactagatggagaagaaagaaaaagcaaatccacatgttacaaatcaaaaggatacaggcctgtgaattctggaaatcaagccaaagactcaacagaagaaactattgttaaaacagtggttgaggaactggatcaaattggcaatctcctttcactgagagtccactcagttgaagaaaagtcctctaaaataagcaacattacagtagagcaacgagtaccttctaaagcaccataatgaggaaaaagttatttggaaagaaagaaagaaagagagagagagagaaagaaagaaagaaaggctgcctttgcaaaaatcctactggtcaaataacctaaggaaattattcatttctgttcttaaaagggctagaatttgttctccttctcttccttttctcatgttctatgcatgtaatccttttccagagtagaaaaatcctgctctgtccctaatttttgtttttattttgggggccttttttgacatttcattaaaaattcttctattgcaa

SEQ ID NO: 145433 - DNA, 1612 bp, Homo sapiens
  Payload ID: 8755
  Gene Symbol: KRT27
  Gene Name: keratin 27, type I
  Uniprot ID: Q7Z3Y8
  ENST ID: ENST00000301656
  CDS Start-End: 42-1421
gagcatcaccgcagaaacaaaggctccagcctccggacaccatgtctgtgcgcttttcttctacctccaggagacttggctcttgcgggggcactggctctgtgaggctctctagtgggggagcaggctttggggctggaaacacatgcggtgtgccaggcattggaagtggcttctcttgtgcttttgggggcagctcatctgcaggaggctatggcggaggtctgggcgggggaagtgcttcctgtgctgccttcacagggaatgagcacggcctcctctctggcaatgagaaggtgaccatgcagaacctcaacgaccgcttggcctcctacctggagaatgttcgagccctagaggaggccaacgctgacttggagcagaagatcaaggggtggtatgagaaatttggacctggttcttgccgtggccttgatcatgattacagcagatatttcccaattattgacgaacttaagaaccagataatttctgcaactaccagtaatgcccatgttgtcctgcaaaatgataatgcaagactaacagctgatgacttcagactaaagtttgaaaacgagctagcgcttcaccagagcgtggaggcggacatcaatggtttgcgaagagtcctggatgagctgaccttgtgcagaacggacctggagatccagctggaaactctcagtgaggagctcgcttacctcaagaagaatcatgaggaggaaatgaaagctcttcagtgcgcggctggaggcaacgtgaacgtggagatgaacgcggcccccggggtagacctcacggttctgctgaacaatatgcgagctgagtacgaagccctcgcagagcagaaccgcagggacgcggaggcctggttcaacgaaaagagcgcctcgctgcagcagcagatctctgacgacgctggcgccaccacctcagcccggaatgagcttatcgagatgaaacgcactcttcaaacccttgagattgaacttcagtccctcttagcaacgaaacactccctggagtgctccttgacagagaccgagagtaactactgtgcacagctggcacagatccaggctcagatcggggccctggaggagcagctgcaccaggtcagaaccgagaccgagggccagaagctcgagtatgagcagctccttgacatcaaggtccacctggaaaaagaaattgagacctactgcctcctgatagatggagaagatggctcctgttctaaatcaaaaggctatggaggcccaggaaatcaaacaaaagattcatctaaaaccaccattgtcaaaacagttgttgaagagatagatcctcgtggcaaagttctctcatccagagttcacactgtggaagagaaatccaccaaagtcaacaacaagaatgaacagagggtgtcttcctgaactccagcctctgagacagaatggcccccaaattaaaataccaaaatgaagctagtttcctaaataagggtccccttatttttctgcttttcttccaatgaattaagacaagttatttttagaatagtaccatttctttggctttttctctatggtggtgtttcaataaaagttcttcctgttgcaagtca

SEQ ID NO: 145434 - DNA, 1685 bp, Homo sapiens
  Payload ID: 8756
  Gene Symbol: KRT28
  Gene Name: keratin 28, type I
  Uniprot ID: Q7Z3Y7
  ENST ID: ENST00000306658
  CDS Start-End: 67-1461
atgatattctgttctcttgggacattacagttttgcatagacaaggtgaacatttctcaaaacaccatgtctctccaattttctaatggatccaggcatgtttgcttaaggtctggagctggatctgtcagacccctcaatggaggtgcaggctttgcaggcagcagtgcatgtggtggctctgttgctggaagtgaattttcctgtgccttgggagggggcttgggcagtgttcctggtgggagccatgctggtggtgcccttggaaatgctgcttgtattggctttgctggaagcgaagggggactcctctctggaaatgagaaggtgaccatgcaaaatcttaatgaccgcttggcatcctacctggataatgtgcgagctctggaggaggcaaatgctgaattagagagaaaaatcaagggttggtatgaaaaatacggacctggatcttgccgtggacttgatcatgactatagcagatatcacctaacaattgaggatcttaagaataagattatctcctccactactactaatgctaatgtcattctgcagattgataatgccagactggctgctgatgatttcaggctaaagtatgaaaatgagctcacccttcaccaaaacgtagaggccgacatcaacggattacggcgagtcctggacgagctgacgctctgcaggaccgaccaggagctgcaatatgagtctctgagtgaggagatgacatatctcaaaaagaaccacgaagaggagatgaaggctctgcagtgcgcggctgggggcaacgtgaacgtggagatgaacgcggccccgggggtagacctcgcggttttgttgaacaacatgcgagcggagtacgaagcccttgcagagcagaaccgcaaggacgcggaggcctggttcaatgagaagagcgcctcgctgcagcaacagatctcccacgactcaggcgcagccactttcgcccggagccagctcaccgagatgaggcgcaccctgcagaccctggagatccagctgcagtccctgatggccacgaaacactccctggagtgctccttgacagagaccgagagcaactactgtacgcagctggcgcagatccaggctcagatcggggccctggaggagcagctgcaccaggtcagaaccgagaccgagggccagaagctggagtatgagcatctcctcgatgtcaaggtccacttggaaaaagaaattgagacctactgccgcctgatagatggagatggaaattcatgctccaaatcaaagggctttggatcaggaagccctgggaattcatctaaagatttatccaaaaccacactggtaaagacagtggttgaagagctagatcaacgtggtaaagttctttcatcaaggattcactccattgaagaaaagacatctaaaatgaccaacggcaagacagaacaaagggttcctttctagctgtcattttagagaaaagaataatttgggaaaggatcctgtacaattgcattattctaaatatcagagagaatatacacactttttacttttaaagatacattacttagcaaaaatacctgttttcttagttttacaggatattgagtgtttgtttccaataaataaaaaagttgatgtgcattcatttccattcactgatgactaataaataactatttgtg

SEQ ID NO: 145435 - DNA, 2319 bp, Homo sapiens
  Payload ID: 8757
  Gene Symbol: KRT3
  Gene Name: keratin 3, type II
  Uniprot ID: P12035
  ENST ID: ENST00000417996
  CDS Start-End: 76-1962
atttcccatccctcttcctctgactctcagtgtccctgcttaacttacactcttctcttcgccaagctccttaccatgagcagacaagccagcaagacatctggtggcgggagccagggtttctccggccgctctgctgtggtctccggcagcagcaggatgagctgtgtggcccactctgggggagctggcggaggggcctatggcttccggagcggagcaggtggctttggcagtcgcagcctctacaacctgggcggcaacaagagcatctccatcagcgtggcagctggcggctcccgggctggaggctttgggggagggcggagcagctgtgcctttgcaggtggctatggaggtggctttgggagcggctatggaggtggctttggtggtggctttggtggtggcagaggaatgggaggtggctttggtggagctggtggctttggaggggctggtggctttggaggggctggtggctttggtggtcctggtggctttggtgggtctggtggctttggtgggcctggcagcttgggcagtcctggtggctttggccctgggggctttcctgggggaattcaggaagtgactatcaaccagagtctcctgcagcccctcaatgtggagatcgacccccagattgggcaagtaaaggcccaggagcgggaacagatcaagaccctcaacaacaagtttgcctccttcattgacaaggtgcggttcctggagcaacagaacaaagtcctggagaccaagtggaacctgctccagcagcagggcacaagttccatctcaggcacaaacaaccttgagcctctttttgagaatcacatcaactacctgcggagctacctggacaacatcctcggggagagagggcgcctggactctgagctgaagaacatggaggacctggtggaagacttcaagaagaaatatgaggatgaaatcaataaacgtacagctgctgagaatgaatttgtgactctgaagaaggatgtggacagtgcctatatgaacaaggtggagcttcaggccaaagtggatgccttgatagatgagatcgacttcttaaggaccctctacgacgctgagctatctcagatgcagagccacatcagtgacacatctgtggtgctgtccatggacaataatcgctccctggacctggacagcatcattgctgaagttcgtgcacagtatgaggatatcgctcagagaagcaaggccgaagctgaggccctgtaccagaccaagttgggggagctgcagaccacggctggcaggcatggggatgacctaagaaataccaagagcgagatcatagagctcaacagaatgatccagaggctgcgggcagagatcgagggtgtcaagaagcagaatgccaacctgcagacggccattgccgaggccgagcagcatggagagatggccctcaaggatgccaatgccaagctccaagagctgcaggctgctctacagcaggcgaaggatgacctggcgcggctgctacgtgactaccaggagctgatgaatgtcaagctggccctggacgtggagatcgccacctaccgcaagctgctggagggcgaggagtacaggatgtctggagagtgtccgagtgctgtcagcatctccgtggtcagcagcagcacgacttccgcctccgcaggtggctatggaggaggttacggcggaggcatgggcggtggtttaggaggtggcttcagtgcgggcggcggctcaggcagtggctttggccggggaggcggcggtggaatcggcggtggatttggcggcggcagcagcggtttcagcggtggcagcggctttggctccatctctggcgcccgctatggagtcagtggcgggggcttcagctcggccagcaaccggggcggcagcatcaagttctcccagtcctcccagtcctcccagcgctactccagataaagagcacgcatcagcatcgcagccactccagcgcctcccctccgctccccacgcccccatattggcaacacccccagcgccaccccatgctccccaagaacgcggctctgcgctggaaggcttgtggcctcttgctcctccttccagatccccggccaagcccagtcacgagaatttcaggctcttctctccggctccagcctgtgcctgtgattgtccaggtgtggcctaggccgccaccttctgctgccccggagtcccctccctgggtgggatgctcactacagctctgatgtatatagcacacagccccctccgcccctccggtctgtcgccaataaagtgcactgtgtttca

SEQ ID NO: 145436 - DNA, 1596 bp, Homo sapiens
  Payload ID: 8758
  Gene Symbol: KRT31
  Gene Name: keratin 31, type I
  Uniprot ID: Q15323
  ENST ID: ENST00000251645
  CDS Start-End: 54-1304
gagaatttagactctgtcttcagccaggcactccctccctccctcccagcactatgccctacaacttctgcctgcccagcctgagctgccgcaccagctgctcctcccggccctgcgtgccccccagctgccacagctgcaccctgcccggggcctgcaacatccccgccaatgtgagcaactgcaactggttctgcgagggctccttcaatggtagcgagaaggagactatgcagttcctgaacgaccgcctggccagctacctggagaaagtgcgtcagctggagcgggacaacgcggagctggagaacctcatccgggagcggtctcagcagcaggagcccttgctgtgccccagttaccagtcctattttaagaccattgaggagctccagcagaagatcctgtgtaccaagtctgagaatgccaggcttgtggtgcagatcgacaacgccaagctggctgcggatgatttcagaaccaagtaccagaccgagctgtccctgcggcagctggtggagtcggacatcaacggtctgcgcaggatcctggatgagctgaccctgtgcaagtccgacctggaggcccaggtggagtccctgaaggaggagctgctctgcctcaagagcaaccatgagcaggaggtcaataccctgcgctgccagcttggagaccgcctcaatgtggaggtggatgctgctcccactgtggacctgaatcgggtgctgaacgagaccaggagtcagtatgaggccctggtggaaaccaaccgcagggaagtggagcaatggttcaccacgcagaccgaggagctgaacaagcaggtggtatccagctcagagcagctgcagtcctaccaggcggagatcatcgagctgagacgcacagtcaacgccctggagatcgagctgcaggcccagcacaacctgcgagactctctggaaaacacgctgacagagagtgaggcccgctacagctcccagctgtcccaggtgcagagcctgatcaccaacgtggagtcccagctggcggagatccgcagtgacctggagcggcagaaccaggagtaccaggtgctgctggatgtgcgtgcccggctggagtgtgagatcaacacataccggagcctgctggagagcgaggactgcaatctgcccagcaatccctgtgccacgaccaacgcgtgcagcaagcccatcggaccctgtctctccaatccctgtacctcttgtgtccctcctgccccctgcacaccctgtgccccacgcccccgctgtgggccctgcaattccttcgtgcgctagaacctagggaatgccagaggagcaaggatgcagggcccaggactccagagctgtgacctggctctggttcaacaaaaggggcctgaaaacatcatttgcatggctggagttgcccgcgtaaggcagccaagaaactcacccaaagcctgtagcctccccaactactccagactgtcctgctcaccctttccttcctgggggtctgttccttcctatgctcacccagagaactctctgatgtgccagtgggcctcccttttaacctcctaataaatatcatttccttggcaaa

SEQ ID NO: 145437 - DNA, 1596 bp, Homo sapiens
  Payload ID: 8758
  Gene Symbol: KRT31
  Gene Name: keratin 31, type I
  Uniprot ID: Q15323
  ENST ID: ENST00000573281
  CDS Start-End: 54-1304
gagaatttagactctgtcttcagccaggcactcactccctccctcccagcactatgccctacaacttctgcctgcccagcctgagctgccgcaccagctgctcctcccggccctgcgtgccccccagctgccacagctgcaccctgcccggggcctgcaacatccccgccaatgtgagcaactgcaactggttctgcgagggctccttcaatggtagcgagaaggagactatgcagttcctgaacgaccgcctggccagctacctggagaaagtgcgtcagctggagcgggacaacgcggagctggagaacctcatccgggagcggtctcagcagcaggagcccttgctgtgccccagttaccagtcctattttaagaccattgaggagctccagcagaagatcctgtgtaccaagtctgagaatgccaggcttgtggtgcagatcgacaacgccaagctggctgcggatgatttcagaaccaagtaccagaccgagctgtccctgcggcagctggtggagtcggacatcaacggtctgcgcaggatcctggatgagctgaccctgtgcaagtccgacctggaggcccaggtggagtccctgaaggaggagctgctctgcctcaagagcaaccatgagcaggaggtcaataccctgcgctgccagcttggagaccgcctcaatgtggaggtggatgctgctcccactgtggacctgaatcgggtgctgaacgagaccaggagtcagtatgaggccctggtggaaaccaaccgcagggaagtggagcaatggttcaccacgcagaccgaggagctgaacaagcaggtggtatccagctcagagcagctgcagtcctaccaggcggagatcatcgagctgagacgcacagtcaacgccctggagatcgagctgcaggcccagcacaacctgcgagactctctggaaaacacgctgacagagagtgaggcccgctacagctcccagctgtcccaggtgcagagcctgatcaccaacgtggagtcccagctggcggagatccgcagtgacctggagcggcagaaccaggagtaccaggtgctgctggatgtgcgtgcccggctggagtgtgagatcaacacataccggagcctgctggagagcgaggactgcaatctgcccagcaatccctgtgccacgaccaacgcgtgcagcaagcccatcggaccctgtctctccaatccctgtacctcttgtgtccctcctgccccctgcacaccctgtgccccacgcccccgctgtgggccctgcaattccttcgtgcgctagaacctagggaatgccagaggagcaaggatgcagggcccaggactccagagctgtgacctggctctggttcaacaaaaggggcctgaaaacatcatttgcatggctggagttgcccgcgtaaggcagccaagaaactcacccaaagcctgtagcctccccaactactccagactgtcctgctcaccctttccttcctgggggtctgttccttcctatgctcacccagagaactctctgatgtgccagtggccctcccttttaacctcctaataaatatcatttccttggcaaa

SEQ ID NO: 145438 - DNA, 1750 bp, Homo sapiens
  Payload ID: 8759
  Gene Symbol: KRT32
  Gene Name: keratin 32, type I
  Uniprot ID: Q14532
  ENST ID: ENST00000225899
  CDS Start-End: 105-1451
ttctatcatgagccccctcactgcaagggcataaaatggcccgggcggcatggggtctgtagacatccaggtagctgtggctgaggagaaagggcctctccaacatgacatcctcctgctgtgtcaccaacaacttgcaagcctctctcaagagctgcccccggcctgcctcggtctgttccagcggcgtgaactgccggcctgagctgtgcctgggctatgtctgccagcccatggcatgcctgccttcggtctgcctgcccaccaccttccggccagccagctgcctctccaaaacctatctatccagttcctgccaggcagccagtggcatctccggctccatgggccccggcagctggtacagcgaaggggccttcaatggcaatgagaaggaaaccatgcagttccttaacgaccgcctggccagctacctgacgagggtgcggcagctggagcaggagaatgcggagctggagagcaggatccaagaggcctctcactcccaggtgctcaccatgactcctgactaccagtctcatttcaggaccattgaggagctccagcagaagattctgtgtaccaaggcagagaatgccaggatggttgtgaacattgataatgccaaactggctgccgatgacttcagggccaagtacgaggcagagctggccatgcggcagctggtggaggccgacatcaatggcctgcgcaggatcctggatgatctcactctgtgcaaggctgacctggaggcccaggttgagtccctgaaggaggagctgatgtgcctcaaaaagaaccatgaggaggaagtcggttcccttcgatgccagcttggggaccgccttaacatcgaggtggacgctgcacccccggtggacctgaccagggtgctggaggagatgcggtgtcagtacgaggccatggtggaggccaaccgcagggacgtggaggaatggttcaatatgcagatggaggagcttaaccaacaggtggccacaagctctgagcagcttcagaactaccagtcagacatcattgacctgagacgcacggtcaacacgctggagatcgagctgcaggcccagcacagcctgagggactccctggaaaacacgctgacggagagtgaggcccgctacagctcccagctggcccagatgcagtgcatgatcaccaacgttgaggcccagctggctgagatccgggctgacctggagcggcagaaccaggagtaccaggtgctgctggacgtccgggcccggctggagggcgagatcaacacgtaccggagcctgctggagaacgaggactgcaagctgccctgtaacccatgctccactccttcctgcaccacctgtgtgccctccccatgcgtgccccgcaccgtctgtgtgccacgcactgttggcatgccttgctcaccctgcccccagggccgctactgaagtccctttgtgccagtggatcctggagggcctggggctgggcagcctggtattcagtggccaccagaagagcagggccagccccggtcagcaaggaagaccctgagcaggaccgtggatcacctgcaacaagctctgatactccaggggatacttaagccctcatcacttcaaaactgcctcttttttccatgggtgaactgttctctttggtgatgtttctggttgtctgtgctgcctcaaagagcgtgtgttcttagttaactggcaaatagagctgtactcagtggccttgcaaa

SEQ ID NO: 145439 - DNA, 1287 bp, Homo sapiens
  Payload ID: 8760
  Gene Symbol: KRT33A
  Gene Name: keratin 33A, type I
  Uniprot ID: O76009
  ENST ID: ENST00000007735
  CDS Start-End: 46-1260
gagattttggactctgtcttcagctggacactccctccctgcaccatgtcttacagttgtggcctgcccagcctgagctgccgcaccagctgctcctcccggccctgtgtgccccccagctgccacggctgcaccctgcccggggcctgcaacatccccgccaatgtgagcaactgcaactggttctgtgagggctccttcaatggcagtgagaaggagaccatgcagttcctgaacgaccgcctggccagctacctggagaaggtgcgtcagctggagcgggacaacgcggagctggagaacctcatccgggagcggtcacagcagcaggagcccttggtgtgtgccagctaccagtcctacttcaagaccattgaggagctccagcagaagatcctgtgcagcaagtctgagaatgccaggcttgtggtgcagatcgacaatgccaagctggcctcagatgacttcaggaccaaatatgagaccgagctgtccctgcggcagctggtggagtcggacatcaatggcctgcgcaggatcctggatgagctgaccctgtgcaggtctgacctggaggcccaggtggagtccctgaaggaggagctgctgtgcctcaagcagaaccatgagcaggaggttaacaccctgcgctgccagcttggagaccgcctcaacgtggaggtggacgctgctcccactgtggacctgaaccaggtcctgaatgagaccaggagtcagtatgaggccctggtggaaaccaaccgcagggaagtggagcaatggttcgccacgcagaccgaggagctgaacaagcaggtggtatccagctcggagcagctgcagtcctaccaggcggagatcatcgagctgagacgcacggtcaatgccctggagatcgagctgcaggcccagcacaacctgcgagactctctggaaaacacgctgacagagagcgaggcccgctacagctcccagctgtcccaggtgcagagactgatcaccaacgtggagtcccagctggcggagatccgcagtgacctggagcggcagaaccaggagtatcaggtgctgctggacgtgcgggcgcggctggagtgtgagatcaacacgtaccggagcctgctggagagcgaggactgcaagctcccctccaacccctgcgccacaaccaatgcatgtgacaagtccactgggccctgtatctctaatccctgtggcctacgtgctcggtgtgggccttgcaacacatttgggtactagaggccccacaaccaggaggagaagaaa

SEQ ID NO: 145440 - DNA, 1287 bp, Homo sapiens; identical to SEQ ID NO: 145439
  Payload ID: 8760
  Gene Symbol: KRT33A
  Gene Name: keratin 33A, type I
  Uniprot ID: O76009
  ENST ID: ENST00000576236
  CDS Start-End: 46-1260

SEQ ID NO: 145441 - DNA, 1607 bp, Homo sapiens
  Payload ID: 8761
  Gene Symbol: KRT33B
  Gene Name: keratin 33B, type I
  Uniprot ID: Q14525
  ENST ID: ENST00000251646
  CDS Start-End: 51-1265
ggaatcaggttttgaaactgacttccagagctccactgcctccctgcaccatgccctacaacttctgcctgcccagcctgagctgccgcaccagctgctcctcccggccctgtgtgccccccagctgccacggctacaccctgcccggggcctgcaacatccctgccaatgtgagcaactgcaactggttctgcgagggctccttcaatggcagcgagaaggagactatgcagttcctgaacgaccgcctggccagctacctggagaaggtgcgtcagctggagcgggacaacgcggagctggagaacctcatccgggagcggtctcagcagcaggagcccttgctgtgccccagctaccagtcctacttcaagaccattgaggagctccagcagaagatcctgtgcagcaagtctgagaatgccaggctggtggtgcagatcgacaatgccaagctggctgcagatgacttcagaaccaagtaccagacggagcagtccctgcggcagctggtggagtccgacatcaacagcctgcgcaggattctggatgagctgaccctgtgcaggtctgacctggaggcccagatggagtccctgaaggaggagctgctgtccctcaagcagaaccatgagcaggaagtcaacaccttgcgctgccagcttggagaccgcctcaacgtggaggtggacgctgctcccgctgtggacctgaaccaggtcctgaacgagaccaggaatcagtatgaggccctggtggaaaccaaccgcagggaagtggagcaatggttcgccacgcagaccgaggagctgaacaagcaggtggtatccagctcggagcagctgcagtcctaccaggcggagatcatcgagctgagacgcacagtcaatgccctggagatcgagctgcaggcccagcacaacctgcgatactctctggaaaacacgctgacagagagcgaggcccgctacagctcccagctgtcccaggtgcagagcctgatcaccaacgtggagtcccagctggcggagatccgcagtgacctggagcggcagaaccaggagtatcaggtgctgctggacgtgcgggcgcggctggagtgtgagatcaacacataccggagcctgctggagagcgaggactgcaagctgccctccaacccctgcgccaccaccaatgcatgtgaaaagcccattggatcctgtgtcaccaatccttgtggtcctcgttcccgctgtgggccttgcaacacctttgggtactagataccctggggccagcagaagtatagcatgaagacagaactaccatcggtgggccagttctgcctctctgacaaccatcagccaccggaccccaccccgaggcatcaccacaaatcatggtctggaaggagaacaaatgcccagcgtttgggtctgactctgagcctagggctacttgatcctcctcaccccaggtccctctcctgtagtcagtctgagttctgatggtcagaggttggagctgtgacagtggcatacgaggtgttttgttctctctgctgcttctacctttattgcagttccccaaatcgcctaataaactttcctcttgcaaagcagaca

SEQ ID NO: 145442 - DNA, 1607 bp, Homo sapiens; identical to SEQ ID NO: 145441
  Payload ID: 8761
  Gene Symbol: KRT33B
  Gene Name: keratin 33B, type I
  Uniprot ID: Q14525
  ENST ID: ENST00000570596
  CDS Start-End: 51-1265

SEQ ID NO: 145443 - DNA, 1751 bp, Homo sapiens
  Payload ID: 8762
  Gene Symbol: KRT34
  Gene Name: keratin 34, type I
  Uniprot ID: O76011
  ENST ID: ENST00000394001
  CDS Start-End: 32-1342
aaaattagctgaagcattaggaaaggaaactatgctgtatgccaagcccccacccacaattaatggtataaaaggactgcagaggaaggagagactcaaacctgcccacatccacctccagcagcttacctgcttttccattacctgttccagcaccatgtcttacagttgttgcctgcccagcctgggctgccgcaccagctgctcctcccggccctgcgtgccccccagctgccacggctacaccctgcctggggcctgcaacatccccgccaatgtgagcaactgcaactggttctgtgagggctccttcaatggcagcgagaaggagactatgcagttcctgaacgaccgcctggccagctacctggagaaggtgcgtcagctggagcgggacaacgcggagctggagaaactcatccaggagcggtcccagcagcaggagcccttgctgtgccccagctaccagtcctacttcaagaccattgaggagctccagcagaagattctgtgtgccaaggctgagaatgccaggctggtggtgaacattgacaatgccaagctggcctctgacgacttcagaagcaagtaccagacggagcagtccctgaggctgttggtggagtcggacatcaacagcatacgcaggatcctggatgagctgaccctctgcaagtctgacctggagtcccaggtggagtccctgagggaggagctgatctgcttgaagaagaaccatgaggaggaggttaacaccctgcgctcccagcttggagaccgcctcaacgtggaggtggacactgcccccactgtggacctgaaccaggtcctgaacgagaccaggagtcagtatgaggctctggtggaaattaaccgcagggaagtggagcaatggttcgccacgcagaccgaggagctgaacaagcaggtggtatccagctcagagcagctgcagtcctgccaggcggagatcatcgagctgagacgcacagtcaacgccctggagatcgagctgcaggcccagcacaacctgcgagactctctggaaaacacgctgacggagagcgaggcccactacagctcccagctgtcccaggtgcagagcctgatcaccaacgtggagtctcagctggcagagatccgctgtgacctggagcggcagaaccaggagtaccaggtgctgctggacgtgcgtgcccggctggagtgtgagatcaacacgtaccggagcctcctggagagtgaggactgcaagctcccctgcaacccatgcgccaccaccaatgctagtggcaactcctgtggaccctgtggcacctctcaaaagggttgctgtaattgaaaagcttgtatcctctttgaagacatctacaaagccatttagatcaaccacaggaaggatcctcaagtcctgacttttctggagctcagctgacatcaagaaacctcatcttgcctctatgttatttctagaatgctgaaaagctttcctgacccaagcaaagacacacatcatcaacttccaatgtctggacaactccttcctgttgagggtcgagcctgtttgtttctaaagatgttcagctccctgtaatctgagctccagttactacttaaggtgtttcctgaacgtactactgcatttcctgttttccttttttctttggcattctctggaatgcaaggaggagacttcatttacttcccaataaacttcatttctctggcataataaatgtttctcattcata

SEQ ID NO: 145444 - DNA, 1732 bp, Homo sapiens
  Payload ID: 8762
  Gene Symbol: KRT34
  Gene Name: keratin 34, type I
  ENST ID: ENST00000571312
  CDS Start-End: 32-1342
aaaattagctgaagcattaggaaaggaaactatgctgtatgccaagcccccacccacaattaatggtataaaaggactgcagaggaaggagagactcaaacctgcccacatccacctccagcagcttacctgcttttccattacctgttccagcaccatgtcttacagttgttgcctgcccagcctgggctgccgcaccagctgctcctcccggccctgcgtgccccccagctgccacggctacaccctgcctggggcctgcaacatccccgccaatgtgagcaactgcaactggttctgtgagggctccttcaatggcagcgagaaggagactatgcagttcctgaacgaccgcctggccagctacctggagaaggtgcgtcagctggagcgggacaacgcggagctggagaaactcatccaggagcggtcccagcagcaggagcccttgctgtgccccagctaccagtcgtacttcaagaccattgaggagctccagcagaagattctgtgtgccaaggctgagaatgccaggctggtggtgaacattgacaatgccaagctggcctctgacgacttcagaagcaagtaccagacggagcagtccctgaggctgttggtggagtcggacatcaacagcatacgcaggatcctggatgagctgaccctctgcaagtctgacctggagtcccaggtggagtccctgagggaggagctgatctgcttgaagaagaaccatgaggaggaggttaacaccctgcgctcccagcttggagaccgcctcaacgtggaggtggacactgcccccactgtggacctgaaccaggtcctgaacgagaccaggagtcagtatgaggctctggtggaaactaaccgcagggaagtggagcaatggttcgccacgcagaccgaggagctgaacaagcaggtggtatccagctcagagcagctgcagtcctgccaggcggagatcatcgagctgagacgcacagtcaacgccctggagatcgagctgcaggcccagcacaacctgcgagactctctggaaaacacgctgacggagagcgaggcccgctacagctcccagctgtcccaggtgcagagcctgatcaccaacgtggagtctcagctggcagagatccgctgtgacctggagcggcagaaccaggagtaccaggtgctgctggacgtgcgtgcccggctggagtgtgagatcaacacgtaccggagcctcctggagagtgaggactgcaagctcccctgcaacccatgcgccaccaccaatgctagtggcaactcctgtggaccctgtggcacctctcaaaagggttgctgtaattgaaaagcttgtatcctctttgaagacatctacaaagccatttagatcaaccacaggaaggatcctcaagtcctgacttttctggagctcagctgacatcaagaaacctcatcttgcctctatgttatttctagaatgctgaaaagctttcctgacccaagcaaagacacacatcatcaacttccaatgtctggacaactccttcctgttgagggtcgagcctgtttgtttctaaagatgttcagctccctgtaatctgagctccagttactacttaaggtgtttcctgaacgtactactgcatttcctgttttccttttttctttggcattctctggaatgcaaggaggagacttcatttacttcccaataaacttcatttctctggcataa

SEQ ID NO: 145445 - DNA, 1778 bp, Homo sapiens
  Payload ID: 8763
  Gene Symbol: KRT35
  Gene Name: keratin 35, type I
  ENST ID: ENST00000246639
  CDS Start-End: 134-1411
ctggcctcagagacctatcaattgcatctgagttgcaggggccatggcttccaaatgcctcaaggccggcttctcttctgggtctctcaagagcccaggaggggccagtgggggctccactcgtgtgtccgcaatgtactccagcagctcttgcaagcttccaagtctctcccctgtggccagaagtttctctgcctgctcagtgggtctgggcagaagcagctacagggccaccagctgcctccctgctctctgcctccctgctggaggcttcgctaccagctacagtgggggtgggggctggtttggggagggcatcctcactggcaatgagaaggagaccatgcaatccctgaacgaccgcctggccggctacctggagaaggtgcgtcagctggagcaggagaacgccagcctggagagccgcatccgtgagtggtgtgagcagcaggtcccctacatgtgccctgactaccagtcctacttccggaccatcgaggagctccagaagaagactctatgcagcaaggctgagaatgccaggctggtggtggagattgacaatgccaaattggctgcagatgacttcaggaccaagtatgagacggaggtgtccctgcggcagctggtggagtcagacatcaacggcctgcgcaggatcctggatgacctgaccctgtgcaagtctgacctggaggcccaggtggagtccctgaaggaggagctgctctgcctgaagaagaaccatgaggaggaagtgaactcactgcgctgccaacttggtgaccgcctcaatgttgaggtggacgctgccccacctgttgacctgaaccgagttctggaggagatgaggtgccagtatgaaaccctggtggagaataaccgccgggatgctgaagactggttggacacccagagtgaggagctgaaccagcaggtggtgtccagctcagagcagttgcagtcctgccaggcagagatcatcgagctgagacgcacggtcaacgccctggagattgagctgcaggctcagcacagcatgagagatgctttggaatccaccctggcagagacggaggcccgctatagctcccagctggcccagatgcagtgcatgatcaccaacgtggaggcccagctggccgagatccgggctgacctggagcggcagaaccaggagtaccaggtgctgctggacgtccgggcccggctggagtgtgagatcaacacgtaccggggcctgctggagagtgaggacagcaagctcccctgtaacccatgtgcacctgactactcaccctccaagtcatgccttccctgtcttcctgcggcctcctgcggtcctagtgcagcccgcacaaactgcagcccccgccccatttgtgtgccctgcccagggggtcggttctgagagcgggtgacccagatggccatggctattgtctccagggcttgaacttggcctctacccaaacttaacccttgtagcccaatcccctctcttcgcgcagagcccaggcccagggtctggctgaaaaggctttctgcaaatacatgccctaaagtttctcagagcctgtcacaaaggccggctgcccccaaaggtctcaactcctcatcatttcaatgggtgccagggtctctgttctcaggctgcctcctgggtcaggttttccttctaggtgctgttccggtggattctgaaatgcagtagagggcttttgttggcagaacaataaagtgcatttgctcaggcccctgatgcctaacttgcacca

SEQ ID NO: 145446 - DNA, 1670 bp, Homo sapiens
  Payload ID: 8763
  Gene Symbol: KRT35
  Gene Name: keratin 35, type I
  Uniprot ID: Q92764
  ENST ID: ENST00000393989
  CDS Start-End: 44-1411
ctggcctcagagacctatcaattgcatctgagttgcaggggccatggcttccaaatgcctcaaggccggcttctcttctgggtctctcaagagcccaggaggggccagtgggggctccactcgtgtgtccgcaatgtactccagcagctcttgcaagcttccaagtctctcccctgtggccagaagtttctctgcctgctcagtgggtctgggcagaagcagctacagggccaccagctgcctccctgctctctgcctccctgctggaggcttcgctaccagctacagtgggggtgggggctggtttggggagggcatcctcactggcaatgagaaggagaccatgcaatccctgaacgaccgcctggccggctacctggagaaggtgcgtcagctggagcaggagaacgccagcctggagagccgcatccgtgagtggtgtgagcagcaggtcccctacatgtgccctgactaccagtcctacttccggaccatcgaggagctccagaagaagactctatgcagcaaggctgagaatgccaggctggtggtggagattgacaatgccaaattggctgcagatgacttcaggaccaagtatgagacggaggtgtccctgcggcagctggtggagtcagacatcaacggcctgcgcaggatcctggatgacctgaccctgtgcaagtctgacctggaggcccaggtggagtccctgaaggaggagctgctctgcctgaagaagaaccatgaggaggaagtgaactcactgcgctgccaacttggtgaccgcctcaatgttgaggtggacgctgccccacctgttgacctgaaccgagttctggaggagatgaggtgccagtatgaaaccctggtggagaataaccgccgggatgctgaagactggttggacacccagagtgaggagctgaaccagcaggtggtgtccagctcagagcagttgcagtcctgccaggcagagatcatcgagctgagacgcacggtcaacgccctggagattgagctgcaggctcagcacagcatgagagatgctttggaatccaccctggcagagacggaggcccgctatagctcccagctggcccagatgcagtgcatgatcaccaacgtggaggcccagctggccgagatccgggctgacctggagcggcagaaccaggagtaccaggtgctgctggacgtccgggcccggctggagtgtgagatcaacacgtaccggggcctgctggagagtgaggacagcaagctcccctgtaacccatgtgcacctgactactcaccctccaagtcatgccttccctgtcttcctgcggcctcctgcggtcctagtgcagcccgcacaaactgcagcccccgccccatttgtgtgccctgcccagggggtcggttctgagagcggggtctggctgaaaaggctttctgcaaatacatgccctaaagtttctcagagcctgtcacaaaggccggctgcccccaaaggtctcaactcctcatcatttcaatgggtgccagggtctctgttctcaggctgcctcctgggtcaggttttccttctaggtgctgttccggtggattctgaaatgcagtagagggcttttgttggcagaacaataaagtgcatttgctcaggcccctgatgcctaacttgcacc

SEQ ID NO: 145447 - DNA, 1644 bp, Homo sapiens
  Payload ID: 8764
  Gene Symbol: KRT36
  Gene Name: keratin 36, type I
  Uniprot ID: O76013
  ENST ID: ENST00000328119
  CDS Start-End: 1-1404
atggccacccagacctgcacccctaccttctccactgggtctatcaagggcctctgtggcacagcaggcggcatctctcgggtgtcctccatccgttctgtgggctcctgcagggtccccagtctcgccggtgctgcagggtacatctcttctgctaggtcgggcctctctggccttgggagctgcttgcctggctcctacctgtcttctgagtgccacacctctggctttgtggggagcgggggctggttctgcgagggctccttcaacggcagcgagaaggagactatgcagttcctgaacgaccgcctggccaactacctggagaaggtgcgtcagctggagcgggagaacgcggagctggagagccgcatccaggagtggtacgagtttcagatcccatacatctgcccagactaccagtcctacttcaagaccatcgaagatttccagcagaagatcctgctgactaagtctgagaatgccaggctggtcctgcagattgataatgccaagctggctgctgacgacttccggaccaagtatgagacagagctgtctctgcggcagctagtggaggccgacatcaacggcctgcgtaggatcctggatgagctgaccctgtgcaaggctgacctggaggctcaggtggagtccctgaaggaggagctgatgtgcctcaagaagaatcacgaggaggaagtcagtgtactccgttgccaacttggggaccgactgaatgtggaggtggacgctgctcccccagtggatctcaacaagatcctggaggatatgagatgccagtacgaggccctggtggagaataaccgcagagatgtggaggcctggttcaacacccagactgaggagctgaaccagcaggtggtgtccagctcggagcagctgcagtgctgccagacggagatcatcgagctgagacgtacggtcaacgcgctagagattgagctgcaggctcagcacagcatgcggaattccttggaatccaccctggccgaaaccgaggcccgctacagctcccagctggcccagatgcagtgcctgatcagcaacgtggaggcccagctgtctgagatccgctgcgacctggagcggcagaaccaggagtaccaggtgttactggacgtcaaggcccggctggagggcgagatcgctacctaccgccacctgctggagggagaggactgcaagcttcctccccaaccttgtgccacggcatgcaagcctgttattagagttccttctgtccccccggtgccctgtgtcccctctgtgccctgcaccccggctccccaggttggcactcagatccgcaccatcaccgaggagatcagagatgggaaagtcatctcctccagggagcacgtgcagtcccgcccgctgtgacagcccacttggtccaccagggcagggccctgaccacaggaaggaggacacccctgtggctcctggaggcttaacgaccctgcccttctctagaggggtccccctacgcttagcaggtttttctaccaaaacactccccgtattgtgtttccggacttaactgtgcttttacgccatgcaaaaccaggtttcctggaaatttacccaataaagtgtgttctcctggcatagcaaactcaa

SEQ ID NO: 145448 - DNA, 1707 bp, Homo sapiens
  Payload ID: 8764
  Gene Symbol: KRT36
  Gene Name: keratin 36, type I
  Uniprot ID: O76013
  ENST ID: ENST00000393986
  CDS Start-End: 214-1467
gcagcttgaacttagttctcgctgagtcccggctcagggcccttcccttgggtcggggggttggctgtgcagtcaacaataaggaaaaaggcaagacactgagggcagctgaaagacttttacctttgacgagctggtcacctgctccagggaaggtacattcctctccccacaaccctagaggcacctctctggtccacagtgtccctcctgatgctcaggtcgggcctctctggccttgggagctgcttgcctggctcctacctgtcttctgagtgccacacctctggctttgtggggagcgggggctggttctgcgagggctccttcaacggcagcgagaaggagactatgcagttcctgaacgaccgcctggccaactacctggagaaggtgcgtcagctggagcgggagaacgcggagctggagagccgcatccaggagtggtacgagtttcagatcccatacatctgcccagactaccagtcctacttcaagaccatcgaagatttccagcagaagatcctgctgactaagtctgagaatgccaggctggtcctgcagattgataatgccaagctggctgctgacgacttccggaccaagtatgagacagagctgtctctgcggcagctagtggaggccgacatcaacggcctgcgtaggatcctggatgagctgaccctgtgcaaggctgacctggaggctcaggtggagtccctgaaggaggagctgatgtgcctcaagaagaatcacgaggaggaagtcagtgtactccgttgccaacttggggaccgactgaatgtggaggtggacgctgctcccccagtggatctcaacaagatcctggaggatatgagatgccagtacgaggccctggtggagaataaccgcagagatgtggaggcctggttcaacacccagactgaggagctgaaccagcaggtggtgtccagctcggagcagctgcagtgctgccagacggagatcatcgagctgagacgtacggtcaacgcgctagagattgagctgcaggctcagcacagcatgcggaattccttggaatccaccctggccgaaaccgaggcccgctacagctcccagctggcccagatgcagtgcctgatcagcaacgtggaggcccagctgtctgagatccgctgcgacctggagcggcagaaccaggagtaccaggtgttactggacgtcaaggcccggctggagggcgagatcgctacctaccgccacctgctggagggagaggactgcaagcttcctccccaaccttgtgccacggcatgcaagcctgttattagagttccttctgtccccccggtgccctgtgtcccctctgtgccctgcaccccggctccccaggttggcactcagatccgcaccatcaccgaggagatcagagatgggaaagtcatctcctccagggagcacgtgcagtcccgcccgctgtgacagcccacttggtccaccagggcagggccctgaccacaggaaggaggacacccctgtggctcctggaggcttaacgaccctgcccttctctagaggggtccccctacgcttagcaggtttttctaccaaaacactccccgtattgtgtttccggacttaactgtgcttttacgccatgcaaaaccaggtttcctggaaatttacccaataaagtgtgttctcctggcatagcaaactcaa

SEQ ID NO: 145449 - DNA, 1475 bp, Homo sapiens
  Payload ID: 8765
  Gene Symbol: KRT37
  Gene Name: keratin 37, type I
  Uniprot ID: O76014
  ENST ID: ENST00000225550
  CDS Start-End: 1-1350
atgacctccttctacagcacctcctcatgccctctgggttgcaccatggctcctggagcaagaaatgtctttgtctctcctatcgatgttgggtgccagcctgtggcagaggccaatgctgcctccatgtgcctcttggccaacgtggcacacgccaacagagtccgtgtggggtcgactcccctgggccgccccagcctctgtctgcccccaaccagtcacactgcttgtcccttgccagggacctgtcacattcccggcaacatcggaatctgtggggcctacggcaaaaacaccctgaatggccatgagaaggagaccatgaagttcctgaatgaccgcctggccaactacctggagaaggtgcgccagctggagcaggagaatgcagagctggagaccacactcctcgagaggagcaagtgccacgagtccaccgtgtgccccgactaccagtcctacttccgtacaatcgaggagctccagcagaagatcctgtgcagcaaggctgagaatgccaggctgattgtacaaattgacaacgcgaagctggctgctgatgactttaggatcaagctggagagtgagcgctcccttcaccagctggtggaggcggacaagtgcgggacgcagaagctcctggatgacgcgaccctggccaaggccgacctggaggcccagcaggagtccctgaaggaggagcagctctccctcaagagcaaccacgagcaggaagtaaagattctgaggagtcagctgggggagaagttccggatcgagctggacattgagcccaccattgacctgaacagggtgttgggggagatgcgggctcagtacgaggccatggtggagaccaaccaccaggatgtggaacagtggttccaagcccagtctgaaggcatcagcctgcaggccatgtcctgctccgaggagctgcagtgctgccagtcggagatcctggagctgagatgcacggtgaatgccctggaggtggagcgccaagcccagcacaccttgaaggactgtctgcagaactccctgtgtgaagcggaggaccgctacggcacagagctggcccagatgcagagcctcattagcaacttggaagagcagttgtctgagatccgggccgacctggagcggcagaaccaggagtaccaggtgctgctggacgtgaaggcccggttggagaacgagattgccacataccggaaccttctggagagcgaggactgcaaactcccctgcaatccctgttccacgcctgcctcctgtacttcttgtccaagctgtggccctgtcaccggtgggtctccctctggccatggagccagcatggggagatgattctgaaggcccgagttaggagattgaggctggttgcactggggtcaggagtgccctcaccttgcccagtcttccttcaagactagactcactgaggcattttccctaaatcaaccggtagcaga

SEQ ID NO: 145450 - DNA, 1475 bp, Homo sapiens; identical to SEQ ID NO: 145449
  Payload ID: 8765
  Gene Symbol: KRT37
  Gene Name: keratin 37, type I
  Uniprot ID: O76014
  ENST ID: ENST00000574588
  CDS Start-End: 1-1350

SEQ ID NO: 145451 - DNA, 2337 bp, Homo sapiens
  Payload ID: 8766
  Gene Symbol: KRT38
  Gene Name: keratin 38, type I
  Uniprot ID: O76015
  ENST ID: ENST00000246646
  CDS Start-End: 1-1371
atgacctcttcctacagcagctcctcatgccctctgggttgcaccatggctcctggagcaagaaatgtctctgtctctcccatcgacattgggtgccagcctggggcagaggccaacattgcccccatgtgccttttggccaacgtggcacatgccaaccgagtccgtgtggggtccactcccctgggccgccccagcctctgtctgccgcctacctgccacactgcttgtcccttgccagggacctgccacattcctggcaacattggaatctgtggggcctatggtgaaaacaccctgaatggccatgagaaggagaccatgcagttcctgaatgaccgcctggccaactacctggagaaggtgcgccagctggagcaggagaatgcggagctggaggccacactcctcgagaggagcaagtgccacgagtccaccgtgtgccccgactaccagtcttacttccacaccatcgaggagctccaacagaagatcctgtgcagcaaggccgagaatgccaggctgattgtacaaattgacaatgccaagctggctgccgatgactttaggatcaagctggagagtgagcgctccctgcgccagctggtggaggcagacaagtgtgggacacagaagctcctggatgatgcgaccctggccaaggccgacctggaggcccagcaggagtccctgaaggaggagcagctctccctcaagagcaaccacgagcaggaagtaaagattctgaggagtcagctgggggagaagctccggattgagctggacattgagcccaccattgacctgaacagggtgctgggggagatgcgggctcagtatgaggccatgttggagaccaaccgccaggatgtggaacagtggttccaagcccagtctgaaggcatcagcctgcaggacatgtcctgctccgaggagctgcagtgctgccagtcggagatcctggagctgagatgcacggtgaatgccctggaggtggagcgccaagcccagcacaccttgaaggactgtctgcagaactccctgtgtgaagccgaggaccgcttcggcacggagctggcccagatgcagagcctcatcagcaacgtggaggagcagctgtctgagatccgggccgacctggagcggcaaaaccaggagtaccaggtgctgctggacgtgaagacccggctggagaatgagattgccacgtaccggaaccttctggaaagcgaggactgcaaactcccctgcaatccgtgctccacgtctccctcctgcgtgactgccccctgtgctcctcgcccaagctgtggcccctgcaccacctgtgggcccacctgtggagccagcaccaccggaagccgattctgaattcctgtggacccacaggggctggctaaggcgagggatacccaaagagagatgcttgttatacctttagaaaatctggcttctaactttctgtatgtataggcctgtccaaaggctatgagataccagggacagtggaatcttgatggaaatccttcctttcctgctcttggttttcccaggtgagctctatgccctcagtggctggattgcagccacccatggtggctcagaatatctggattggagaggcataaggttgaaaagcattttggagtaggaacacggcatgatttaaaattgcacttgcacttcaagaacaccaactttaacttgaaatttttatagtttatgacaaaggaagtgaagaacagacttcactgtctgagatttcccacatttcttgggttgtttctaacattggcagcctggattatggccctagggagagggaaatagaatcagaattgtacctgaccctgtcttttctaattcccttctcctatcctcctgcctccctatcttggaaactgattaagtggaaactttccttgtatcaaatcctgagttttctctacttcagggtttctagctttgacaaaggaccaggcttgccttttctgtggcaacacagcctcttacatatggcttccatagcttcttgctatgtgaaaggaactttcagattaagaaatttctctcttttttctctataaattctgactctccagacttgtctggctataacccctgtccctgtctaattctcccagtctaaaatctaaacaatgacttcatttttttctagtactttctcctgaagtattgaaacctattgattcaatgggtagagatttgctaagtatgatgtgcttccacctcttctcttcatactctctaccttccttaccatgattcagccacactggcctttctgttccttggacatgcctggagacctgtccc

SEQ ID NO: 145452 - DNA, 1696 bp, Homo sapiens
  Payload ID: 8767
  Gene Symbol: KRT39
  Gene Name: keratin 39, type I
  Uniprot ID: Q6A163
  ENST ID: ENST00000355612
  CDS Start-End: 37-1512
cacagacctggaacaaactaaagccagacacatactatggacaccaagggctgtacaacaaccaattctccttcaaccccatgtcaaaactgctctaggattacaaatgttagtaccatctcttctaacaacggctgccatcctggtggccttacagtcaacaactgtcaaccagctggccacgttctcagaattccctgggaccagggctgccaacccactcctcgcttttgtcgcaagcccatctacctaatgaacaacttcaatgcccgtttttctctggatgactgcagctggtatggtgaaggcatcaacagtaatgagaaggagaccatgcaaatcttgaacgagcgccttgctaactacctgcaaaaggtgcgaatgctagaacgagagaatgctgaactggaatctaaaatccaggaagaaagtaacaaagagctccctgttctatgtcctgattacctgtcttactacactaccattgaggagctccagcagaagatcttgtgtaccaaggccgagaattccagactggtctcgcaaattgacaacaccaaactgactgcagatgacttgagagccaaatacgaagctgaggtgtctctacgccagctggtagagtcagatgccaatggcctcaagcagatcctgaatgtgctgaccctgggcaaggccgacctagaggcacaagtccagtctctgaaagaggagctcctttgcctcaagaacaaccacaaagaggaaatcaattctttacagtgtcagcttggggagagacttgacattgaagtgactgctgccccttctgctgacctaaaccaggttctacaagaaatgagatgtcaatatgagcccatcatggagacaaaccgcaaagatgtggaacagtggttcaacacgcagatagaggagctgaatcaacaagtggtgaccagctctcaacagcagcaatgctgccaaaaggagatcatagaactgagacgcagtgtgaacactctggaggttgaactgcaggcccagcatcgaatgagagattcccaagagtgcatcctaacggagacagaggctcgctacacggccttgctgacccagatccagagtctgattgataacctggaagctcagctggcagagatccggtgtgccctggaaagacagaaccaagaatacgagatcctgctggacgtcaagtcccggctggaatgtgagattaccacataccgcagccttctggagagctcggatggcaagcgtccctgttacccacgtgccaccaaatgtgagccttccccttggacatcttgtaagtccggagccatagaaagcacggccccagcttgcacatcctcatccccctgcagcttaaaggagcactgcagtgcctgcggacccctgtcccggatactggttaaaatttgcaccatcaccaaggagattaaggatgggaaggtcatttcttcttacgagcatgtgcagccttgtttcatcatcagacctgccaaagtctaacatcccaaggtgatgaaaatgacccacatttatgaaacagaggccaatacatgctcctgccagagaggtttaagaaaactccccagtcccttaaggtacttagtttcttactactacagcgggtccccattgctaggtagaatatcttttattctgctccttccctaactcaccactgctaaca

SEQ ID NO: 145453 - DNA, 1696 bp, Homo sapiens; identical to SEQ ID NO: 145452
  Payload ID: 8767
  Gene Symbol: KRT39
  Gene Name: keratin 39, type I
  Uniprot ID: Q6A163
  ENST ID: ENST00000575391
  CDS Start-End: 37-1512

SEQ ID NO: 145454 - DNA, 1689 bp, Homo sapiens
  Payload ID: 8767
  Gene Symbol: KRT39
  Gene Name: keratin 39, type I
  ENST ID: ENST00000580328
  CDS Start-End: 31-585
cctggaacaaactaaagccagacacatactatggacaccaagggctgtacaacaaccaattctccttcaaccccatgtcaaaactgctctaggattacaaatgttagtaccatctcttctaacaacggctgccatcctggtggccttacagtcaacaactgtcaaccagctggccacgttctcagaattccctgggaccagggctgccaacccactcctcgcttttgtcgcaagcccatctacctaatgaacaacttcaatgcccgtttttctctggatgactgcagctggtatggtgaaggcatcaacagtaatgagaaggagaccatgcaaatcttgaacgagcgccttgctaactacctgcaaaaggtgcgaatgctagaacgagagaatgctgaactggaatctaaaatccaggaagaaagtaacaaagagctccctgttctatgtcctgattacctgtcttactacactaccattgaggagctccagcagaagatcttgtgtaccaaggccgagaattccagactggtctcgcaaattgacaacaccaaactgactgcagatgacttgagagccaagtgagaaatctgtggcttagtgaggctaagttactcacccaaagatacgaagctgaggtgtctctacgccagctggtagagtcagatgccaatggcctcaagcagatcctgaatgtgctgaccctgggcaaggccgacctagaggcacaagtccagtctctgaaagaggagctcctttgcctcaagaacaaccacaaagaggaaatcaattctttacagtgtcagcttggggagagacttgacattgaagtgactgctgccccttctgctgacctaaaccaggttctacaagaaatgagatgtcaatatgagcccatcatggagacaaaccgcaaagatgtggaacagtggttcaacacgcagatagaggagctgaatcaacaagtggtgaccagctctcaacagcagcaatgctgccaaaaggagatcatagaactgagacgcagtgtgaacactctggaggttgaactgcaggcccagcatcgaatgagagattcccaagagtgcatcctaacggagacagaggctcgctacacggccttgctgacccagatccagagtctgattgataacctggaagctcagctggcagagatccggtgtgccctggaaagacagaaccaagaatacgagatcctgctggacgtcaagtcccggctggaatgtgagattaccacataccgcagccttctggagagctcggatggcaagcgtccctgttacccacgtgccaccaaatgtgagccttccccttggacatcttgtaagtccggagccatagaaagcacggccccagcttgcacatcctcatccccctgcagcttaaaggagcactgcagtgcctgcggacccctgtcccggatactggttaaaatttgcaccatcaccaaggagattaaggatgggaaggtcatttcttcttacgagcatgtgcagccttgtttcatcatcagacctgccaaagtctaacatcccaaggtgatgaaaatgacccacatttatgaaacagaggccaatacatgctcctgccagagaggtttaagaaaactccccagtcccttaaggtacttagtttcttactactacagcgggtccccattgctaggta

SEQ ID NO: 145455 - DNA, 1689 bp, Homo sapiens; identical to SEQ ID NO: 145454
  Payload ID: 8767
  Gene Symbol: KRT39
  Gene Name: keratin 39, type I
  ENST ID: ENST00000578078
  CDS Start-End: 31-585

SEQ ID NO: 145456 - DNA, 558 bp, Homo sapiens
  Payload ID: 8768
  Gene Symbol: KRT4
  Gene Name: keratin 4, type II
  ENST ID: ENST00000552668
  CDS Start-End: 59-319
actcaccggcctgggccctgtcacttctctgatagctcccagctcgctctctgcagccatgattgccagacagcagtgtgtccgaggcgggccccggggcttcagctgtggctcggccattgtaggcggtggcaagagaggtgccttcagctcagtctccatgtctggaggtgctggccgatgctcttctgggggatttggcagcagaagcctctacaacctcagggggaacaaaagcatctccatgagtgtggctgggtcacgacaaggaggtcaccatcaaccagagcttgctcacccccctccacgtggagattgaccctgagatccagaaagtccggacggaagagcgcgaacagatcaagctcctcaacaacaagtttgcctccttcatcgacaaggtatgaagaggagatcaacaaacgcacagcagccgagaatgactttgtggtcctaaagaaggacgtggatgctgcctacctgaacaaggtggagttggaggccaaggtggacagtcttaatgacgagatcaacttcctgaaggtcctctatgatgcg

SEQ ID NO: 145457 - DNA, 2576 bp, Homo sapiens
  Payload ID: 8768
  Gene Symbol: KRT4
  Gene Name: keratin 4, type II
  Uniprot ID: P19013
  ENST ID: ENST00000551956
  CDS Start-End: 494-2056
gacttgctccggtttgcagagctaggaggtggcaggctgtgcgctcaaactcaggctgtctaactccacattctgtggggtgagaggatgggtgatggggtgtcttttctggaggagggaggtgctgtgagcctagcgagatggaggtacagtgggtgtgggcctggagcgctgggcccaggcaggggcttctgattaggaagccctggggcaccagttcaggttctcccagagagtagtgtgatgggatccagtaacctgtgccctccagatgacttctgtaggtgtgtttagtgacatgctcaacgggtgcgggaaggatgggcttgtgccaagggccaagcccagagatgtttcagatttttccctttatgcccctgcaaccaagccctgctgctccaggacatataagagacgaaggctgagggctccagcactcaccggcctgggccctgtcacttctctgatagctcccagctcgctctctgcagccatgattgccagacagcagtgtgtccgaggcgggccccggggcttcagctgtggctcggccattgtaggcggtggcaagagaggtgccttcagctcagtctccatgtctggaggtgctggccgatgctcttctgggggatttggcagcagaagcctctacaacctcagggggaacaaaagcatctccatgagtgtggctgggtcacgacaaggtgcctgctttgggggtgctggaggctttggcactggtggctttggtggtggatttgggggctccttcagtggtaagggtggccctggcttccccgtctgccccgctgggggaattcaggaggtcaccatcaaccagagcttgctcacccccctccacgtggagattgaccctgagatccagaaagtccggacggaagagcgcgaacagatcaagctcctcaacaacaagtttgcctccttcatcgacaaggtgcagttcttagagcaacagaataaggtcctggagaccaaatggaacctgctccagcagcagacgaccaccacctccagcaaaaaccttgagcccctctttgagacctacctcagtgtcctgaggaagcagctagataccttgggcaatgacaaagggcgcctgcagtctgagctgaagaccatgcaggacagcgtggaggacttcaagactaagtatgaagaggagatcaacaaacgcacagcagccgagaatgactttgtggtcctaaagaaggacgtggatgctgcctacctgaacaaggtggagttggaggccaaggtggacagtcttaatgacgagatcaacttcctgaaggtcctctatgatgcggagctgtcccagatgcagacccatgtcagcgacacgtccgtggtcctttccatggacaacaaccgcaacctggacctggacagcattattgccgaggtccgtgcccagtacgaggagattgcccagaggagcaaggctgaggctgaagccctgtaccagaccaaggtccagcagctccagatctcggttgaccaacatggtgacaacctgaagaacaccaagagtgaaattgcagagctcaacaggatgatccagaggctgcgggcagagatcgagaacatcaagaagcagtgccagactcttcaggtatccgtggctgatgcagagcagcgaggtgagaatgcccttaaagatgcccacagcaagcgcgtagagctggaggctgccctgcagcaggccaaggaggagctggcacgaatgctgcgtgagtaccaggagctcatgagtgtgaagctggccttggacatcgagatcgccacctaccgcaaactgctggagggcgaggagtacagaatgtctggagaatgccagagtgccgtgagcatctctgtggtcagcggtagcaccagcactggaggcatcagcggaggattaggaagtggctccgggtttggcctgagtagtggctttggctccggctctggaagtggctttgggtttggtggcagtgtctctggcagttccagcagcaagatcatctctaccaccaccctgaacaagagacgatagaggagacgaggtccctgcagctcactgtgtccagctgggcccagcactggtgtctctgtgcttccttcacttcacctccatcctctgtctctggggctcatcttactagtatcccctccactatcccatgggctctctctgccccaggatgatcttctgtgctgggacagggactctgcctcttggagtttggtagctacttcttgatttgggcctggtgacccacctggaatgggaaggatgtcagctgacctctcacctcccatggacagagaagaaaatgaccaggagtgtcatctccagaattattggggtcacatatgtcccttcccagtccaatgccatctcccactagatcctgtattatccatctacatcagaaccaaactacttctccaacacccggcagcacttggccctgcaagcttaggatgagaaccacttagtgtcccattctactcctctcattccctcttatccatctgcaggtgaatcttcaataaaatgcttttgtcattca

SEQ ID NO: 145458 - DNA, 1839 bp, Homo sapiens
  Payload ID: 8768
  Gene Symbol: KRT4
  Gene Name: keratin 4, type II
  ENST ID: ENST00000548097
  CDS Start-End: 59-295
actcaccggcctgggccctgtcacttctctgatagctcccagctcgctctctgcagccatgattgccagacagcagtgtgtccgaggcgggccccggggcttcagctgtggctcggccattgtaggcggtggcaagagaggtgccttcagctcagtctccatgtctggaggtgctggccgatgctcttctgggggatttggcagcagaagcctctacaacctcagggggaacaaaagcatctccatgagtgtggctgggtcacgacaaggtgcagttcttagagcaacagaataaggtcctggagaccaaatggaacctgctccagcagcagacgaccaccacctccagcaaaaaccttgagcccctctttgagacctacctcagtgtcctgaggaagcagctagataccttgggcaatgacaaagggcgcctgcagtctgagctgaagaccatgcaggacagcgtggaggacttcaagactaagtatgaagaggagatcaacaaacgcacagcagccgagaatgactttgtggtcctaaagaaggacgtggatgctgcctacctgaacaaggtggagttggaggccaaggtggacagtcttaatgacgagatcaacttcctgaaggtcctctatgatgcggagctgtcccagatgcagacccatgtcagcgacacgtccgtggtcctttccatggacaacaaccgcaacctggacctggacagcattattgccgaggtccgtgcccagtacgaggagattgcccagaggagcaaggctgaggctgaagccctgtaccagaccaaggtccagcagctccagatctcggttgaccaacatggtgacaacctgaagaacaccaagagtgaaattgcagagctcaacaggatgatccagaggctgcgggcagagatcgagaacatcaagaagcagtgccagactcttcaggtatccgtggctgatgcagagcagcgaggtgagaatgcccttaaagatgcccacagcaagcgcgtagagctggaggctgccctgcagcaggccaaggaggagctggcacgaatgctgcgtgagtaccaggagctcatgagtgtgaagctggccttggacatcgagatcgccacctaccgcaaactgctggagggcgaggagtacagaatgtctggagaatgccagagtgccgtgagcatctctgtggtcagcggtagcaccagcactggaggcatcagcggaggattaggaagtggctccgggtttggcctgagtagtggctttggctccggctctggaagtggctttgggtttggtggcagtgtctctggcagttccagcagcaagatcatctctaccaccaccctgaacaagagacgatagaggagacgaggtccctgcagctcactgtgtccagctgggcccagcactggtgtctctgtgcttccttcacttcacctccatcctctgtctctggggctcatcttactagtatcccctccactatcccatgggctctctctgccccaggatgatcttctgtgctgggacagggactctgcctcttggagtttggtagctacttcttgatttgggcctggtgacccacctggaatgggaaggatgtcagctgacctctcacctcccatggacagagaagaaaatgaccaggagtgtcatctccagaattattggggtcacatatgtcccttcccagtccaatgccatctcccactagatcctgtattatccatctacatcagaaccaaactacttctccaacacccggcagcacttggccctgcaagcttaggatgagaaccacttagtgtcccattctactcctctcatt

SEQ ID NO: 145459 - DNA, 1812 bp, Homo sapiens
  Payload ID: 8769
  Gene Symbol: KRT40
  Gene Name: keratin 40, type I
  Uniprot ID: Q6A162
  ENST ID: ENST00000377755
  CDS Start-End: 36-1331
ttttgcagccagtctctgtctttgcttctggaaggatgacttctgactgctcctccacacactgctctcctgagtcctgtggcacggcttccggttgtgcacctgcctcaagctgctccgtggaaacagcttgtctccccggtacctgtgctacatcccgatgtcagactccaagcttcctatccaggtctcgcgggctgactggttgcctcctgccatgctactttactgggagttgtaatagtccctgcttggtggggaactgtgcctggtgtgaggatggggtgttcactagcaatgagaaggagacgatgcagttcctgaatgacagactcgccagctatctggagaaggtgcgcagcctggaggagaccaacgcagagctggaatccaggatccaagaacaatgtgaacaggatatcccaatggtgtgcccggattatcagcgttacttcaacaccattgaagatctccaacaaaagatcttatgcacgaaagcagagaattctagacttgctgtacagcttgacaactgcaaactggccactgatgactttaagtcaaagtacgagagtgaactgtcccttcgccagctgttagaggctgacatcagcagcctgcatgggatcctggaggaactgaccctgtgcaaatctgatctggaggcccatgtggagtctctgaaggaagatctcctttgccttaagaaaaaccatgaagaggaagtcaacttgcttcgtgaacagcttggcgaccgcctcagtgtggagctggacactgcccccacccttgacctcaacagggtcctggatgagatgcgctgtcagtgtgaaacggtgcttgccaacaatcgcagagaagctgaagaatggttggctgttcagacagaagagctgaatcagcagcaactgtccagcgcggagcagctgcagggctgccagatggagatcttggaactgaaacgcacagccagtgctctggaaattgagctccaagcacagcaaagcctgacagaatctctggaatgcaccgtggcagaaaccgaggcccagtacagctcccagctggcccaaattcagtgtctgatcgataacctggagaaccagctggccgagatccgctgcgacctggagcgacagaaccaggagtaccaggtgctcctggacgtgaaggcccggctggagggtgagatcaacacgtactggggcctgctggacagcgaggacagcaggctttcctgtagcccatgttcgaccacatgcacctcgagcaacacttgtgagccatgctcagcctatgtcatctgcactgttgaaaactgctgcttgtgaatgttaaggacagcaggtagaggaatcaaagccagcagcatcctagaaaggagatggggcttcaaccagggacatccaaaccggaagcacaaatccaggaggctctcatatcctggaattgccctccaggtatcctcagtctttctgctttactatttcctctccttccggcttatttgtggtatactggaagcccataaagcattcttgctcatctccaaataaaacgtgttttattcctttagcgtggtaaatatagctctatggctgattactgttgatagaatattcattttatggcaaggaaatcatctaaacccataaccatagtttcaatgtacataaacccaggctgaaaatattttttaactcctcaaatacaaataaattaatgaacccatgagaaatgtcatatatcttagaaaatagttgtgtgtatctttctgaggaaaaatattaggaataaaatatgataaaatgt

SEQ ID NO: 145460 - DNA, 1772 bp, Homo sapiens
  Payload ID: 8769
  Gene Symbol: KRT40
  Gene Name: keratin 40, type I
  Uniprot ID: Q6A162
  ENST ID: ENST00000398486
  CDS Start-End: 162-1457
gctatagcagagatgcgtgcaaagtgctctgggaggagccacatctccacatgaggcagttgaacgacgtttcagctgagtcttgacatctgaaggtctggtgatagctgggtgcaggaatattgtgcaggagggctatgtgtcctggaccatgaagaaggatgacttctgactgctcctccacacactgctctcctgagtcctgtggcacggcttccggttgtgcacctgcctcaagctgctccgtggaaacagcttgtctccccggtacctgtgctacatcccgatgtcagactccaagcttcctatccaggtctcgcgggctgactggttgcctcctgccatgctactttactgggagttgtaatagtccctgcttggtggggaactgtgcctggtgtgaggatggggtgttcactagcaatgagaaggagacgatgcagttcctgaatgacagactcgccagctatctggagaaggtgcgcagcctggaggagaccaacgcagagctggaatccaggatccaagaacaatgtgaacaggatatcccaatggtgtgcccggattatcagcgttacttcaacaccattgaagatctccaacaaaagatcttatgcacgaaagcagagaattctagacttgctgtacagcttgacaactgcaaactggccactgatgactttaagtcaaagtacgagagtgaactgtcccttcgccagctgttagaggctgacatcagcagcctgcatgggatcctggaggaactgaccctgtgcaaatctgatctggaggcccatgtggagtctctgaaggaagatctcctttgccttaagaaaaaccatgaagaggaagtcaacttgcttcgtgaacagcttggcgaccgcctcagtgtggagctggacactgcccccacccttgacctcaacagggtcctggatgagatgcgctgtcagtgtgaaacggtgcttgccaacaatcgcagagaagctgaagaatggttggctgttcagacagaagagctgaatcagcagcaactgtccagcgcggagcagctgcagggctgccagatggagatcttggaactgaaacgcacagccagtgctctggaaattgagctccaagcacagcaaagcctgacagaatctctggaatgcaccgtggcagaaaccgaggcccagtacagctcccagctggcccaaattcagtgtctgatcgataacctggagaaccagctggccgagatccgctgcgacctggagcgacagaaccaggagtaccaggtgctcctggacgtgaaggcccggctggagggtgagatcaacacgtactggggcctgctggacagcgaggacagcaggctttcctgtagcccatgttcgaccacatgcacctcgagcaacacttgtgagccatgctcagcctatgtcatctgcactgttgaaaactgctgcttgtgaatgttaaggacagcaggtagaggaatcaaagccagcagcatcctagaaaggagatggggcttcaaccagggacatccaaaccggaagcacaaatccaggaggctctcatatcctggaattgccctccaggtatcctcagtctttctgctttactatttcctctccttccggcttatttgtggtatactggaagcccataaagcattcttgctcatctccaaataaaacgtgttttattcctttagcgtggtaaatatagctctatggctgattactgttgatagaatattcattttatggcaaggaaatcatcta

SEQ ID NO: 145461 - DNA, 2102 bp, Homo sapiens
  Payload ID: 8769
  Gene Symbol: KRT40
  Gene Name: keratin 40, type I
  ENST ID: ENST00000461923
  CDS Start-End: 153-863
aaaatagtacctacgaagcttgaaggatggctggagcttagggtttgtgagacagaacatcaggaagtgagcccagaaagctgaaggtctggtgatagctgggtgcaggaatattgtgcaggagggctatgtgtcctggaccatgaagaaggatgacttctgactgctcctccacacactgctctcctgagtcctgtggcacggcttccggttgtgcacctgcctcaagctgctccgtggaaacagcttgtctccccggtacctgtgctacatcccgatgtcagactccaagcttcctatccaggtctcgcgggctgactggttgcctcctgccatgctactttactgggagttgtaatagtccctgcttggtggggaactgtgcctggtgtgaggatggggtgttcactagcaatgagaaggagacgatgcagttcctgaatgacagactcgccagctatctggagaaggtgcgcagcctggaggagaccaacgcagagctggaatccaggatccaagaacaatgtgaacaggatatcccaatggtgtgcccggattatcagcgttacttcaacaccattgaagatctccaacaaaagatcttatgcacgaaagcagagaattctagacttgctgtacagcttgacaactgcaaactggccactgatgactttaagtcaaagtacgagagtgaactgtcccttcgccagctgttagaggctgacatcagcagcctgcatgggatcctggaggaactgaccctgtgcaaatctgatctggaggcccatgtggagtctctgaaggaagatctcctttgccttaagaaaaaccatgaagagacgaagaaactgaggcccttctaagtggtgaaaagagattcagcccaggcaatctgaatcaaaatctcacacttttacccactgctccaaaaaacagaagtagaatgccattggatgtcaaatggatttttccccaccattctgtgacattctttacaccatcccactttcaggaagtcaacttgcttcgtgaacagcttggcgaccgcctcagtgtggagctggacactgcccccacccttgacctcaacagggtcctggatgagatgcgctgtcagtgtgaaacggtgcttgccaacaatcgcagagaagctgaagaatggttggctgttcagacagaagagctgaatcagcagcaactgtccagcgcggagcagctgcagggctgccagatggagatcttggaactgaaacgcacagccagtgctctggaaattgagctccaagcacagcaaagcctgacagaatctctggaatgcaccgtggcagaaaccgaggcccagtacagctcccagctggcccaaattcagtgtctgatcgataacctggagaaccagctggccgagatccgctgcgacctggagcgacagaaccaggagtaccaggtgctcctggacgtgaaggcccggctggagggtgagatcaacacgtactggggcctgctggacagcgaggacagcaggctttcctgtagcccatgttcgaccacatgcacctcgagcaacacttgtgagccatgctcagcctatgtcatctgcactgttgaaaactgctgcttgtgaatgttaaggacagcaggtagaggaatcaaagccagcagcatcctagaaaggagatggggcttcaaccagggacatccaaaccggaagcacaaatccaggaggctctcatatcctggaattgccctccaggtatcctcagtctttctgctttactatttcctctccttccggcttatttgtggtatactggaagcccataaagcattcttgctcatctccaaataaaacgtgttttattcctttagcgtggtaaatatagctctatggctgattactgttgatagaatattcattttatggcaaggaaatcatctaaacccataaccatagtttcaatgtacataaacccaggctgaaaatattttttaactcctcaaatacaaataaattaatgaacccatgagaaatgtcatatatcttagaaaatagttgtgtgtatctttctgaggaaaaatattaggaataaaatatgataaaatgt

SEQ ID NO: 145462 - DNA, 2102 bp, Homo sapiens; identical to SEQ ID NO: 145461
  Payload ID: 8769
  Gene Symbol: KRT40
  Gene Name: keratin 40, type I
  ENST ID: ENST00000576064
  CDS Start-End: 153-863

SEQ ID NO: 145463 - DNA, 1772 bp, Homo sapiens; identical to SEQ ID NO: 145460
  Payload ID: 8769
  Gene Symbol: KRT40
  Gene Name: keratin 40, type I
  Uniprot ID: Q6A162
  ENST ID: ENST00000576967
  CDS Start-End: 162-1457

SEQ ID NO: 145464 - DNA, 1812 bp, Homo sapiens; identical to SEQ ID NO: 145459
  Payload ID: 8769
  Gene Symbol: KRT40
  Gene Name: keratin 40, type I
  Uniprot ID: Q6A162
  ENST ID: ENST00000610983
  CDS Start-End: 36-1331

SEQ ID NO: 145465 - DNA, 2531 bp, Homo sapiens
  Payload ID: 8770
  Gene Symbol: KRT5
  Gene Name: keratin 5, type II
  Uniprot ID: P13647
  ENST ID: ENST00000252242
  CDS Start-End: 392-2164
gcatcctttttgggctgctcacagcccccagcctctatggtgaagacatacttgctagcagcgtcaccaacttgctgccaagagatcagtgctgcaaggcaaggttatttctaactgagcagagcctgccaggaagaaagcgtttgcaccccacaccactgtgcaggtgtgaccggtgagctcacagctgccccccaggcatgcccagcccacttaatcattcacagctcgacagctctctcgcccagcccagttctggaagggataaaaagggggcatcaccgttcctgggtaacagagccaccttctgcgtcctgctgagctctgttctctccagcacctcccaacccactagtgcctggttctcttgctccaccaggaacaagccaccatgtctcgccagtcaagtgtgtccttccggagcgggggcagtcgtagcttcagcaccgcctctgccatcaccccgtctgtctcccgcaccagcttcacctccgtgtcccggtccgggggtggcggtggtggtggcttcggcagggtcagccttgcgggtgcttgtggagtgggtggctatggcagccggagcctctacaacctggggggctccaagaggatatccatcagcactagtggtggcagcttcaggaaccggtttggtgctggtgctggaggcggctatggctttggaggtggtgccggtagtggatttggtttcggcggtggagctggtggtggctttgggctcggtggcggagctggctttggaggtggcttcggtggccctggctttcctgtctgccctcctggaggtatccaagaggtcactgtcaaccagagtctcctgactcccctcaacctgcaaatcgaccccagcatccagagggtgaggaccgaggagcgcgagcagatcaagaccctcaacaataagtttgcctccttcatcgacaaggtgcggttcctggagcagcagaacaaggttctggacaccaagtggaccctgctgcaggagcagggcaccaagactgtgaggcagaacctggagccgttgttcgagcagtacatcaacaacctcaggaggcagctggacagcatcgtgggggaacggggccgcctggactcagagctgagaaacatgcaggacctggtggaagacttcaagaacaagtatgaggatgaaatcaacaagcgtaccactgctgagaatgagtttgtgatgctgaagaaggatgtagatgctgcctacatgaacaaggtggagctggaggccaaggttgatgcactgatggatgagattaacttcatgaagatgttctttgatgcggagctgtcccagatgcagacgcatgtctctgacacctcagtggtcctctccatggacaacaaccgcaacctggacctggatagcatcatcgctgaggtcaaggcccagtatgaggagattgccaaccgcagccggacagaagccgagtcctggtatcagaccaagtatgaggagctgcagcagacagctggccggcatggcgatgacctccgcaacaccaagcatgagatctctgagatgaaccggatgatccagaggctgagagccgagattgacaatgtcaagaaacagtgcgccaatctgcagaacgccattgcggatgccgagcagcgtggggagctggccctcaaggatgccaggaacaagctggccgagctggaggaggccctgcagaaggccaagcaggacatggcccggctgctgcgtgagtaccaggagctcatgaacaccaagctggccctggacgtggagatcgccacttaccgcaagctgctggagggcgaggaatgcagactcagtggagaaggagttggaccagtcaacatctctgttgtcacaagcagtgtttcctctggatatggcagtggcagtggctatggcggtggcctcggtggaggtcttggcggcggcctcggtggaggtcttgccggaggtagcagtggaagctactactccagcagcagtgggggtgtcggcctaggtggtgggctcagtgtggggggctctggcttcagtgcaagcagtggccgagggctgggggtgggctttggcagtggcgggggtagcagctccagcgtcaaatttgtctccaccacctcctcctcccggaagagcttcaagagctaagaacctgctgcaagtcactgccttccaagtgcagcaacccagcccatggagattgcctcttctaggcagttgctcaagccatgttttatccttttctggagagtagtctagaccaagccaattgcagaaccacattctttggttcccaggagagccccattcccagcccctggtctcccgtgccgcagttctatattctgcttcaaatcagccttcaggtttcccacagcatggcccctgctgacacgagaacccaaagttttcccaaatctaaatcatcaaaacagaatccccaccccaatcccaaattttgttttggttctaactacctccagaatgtgttcaataaaatgcttttataatataa

SEQ ID NO: 145466 - DNA, 611 bp, Homo sapiens
  Payload ID: 8770
  Gene Symbol: KRT5
  Gene Name: keratin 5, type II
  ENST ID: ENST00000549420
  CDS Start-End: 76-611
gctgagctctgttctctccagcacctcccaacccactagtgcctggttctcttgctccaccaggaacaagccaccatgtctcgccagtcaagtgtgtccttccggagcgggggcagtcgtggcttcggtggccctggctttcctgtctgccctcctggaggtatccaagaggtcactgtcaaccagagtctcctgactcccctcaacctgcaaatcgaccccagcatccagagggtgaggaccgaggagcgcgagcagatcaagaccctcaacaataagtttgcctccttcatcgacaaggtgcggttcctggagcagcagaacaaggttctggacaccaagtggaccctgctgcaggagcagggcaccaagactgtgaggcagaacctggagccgttgttcgagcagtacatcaacaacctcaggaggcagctggacagcatcgtgggggaacggggccgcctggactcagagctgagaaacatgcaggacctggtggaagacttcaagaacaagtatgaggatgaaatcaacaagcgtaccactgctgagaatgagtttgtgatgctgaagaaggatgtagatgctgcctacatgaacaaggtggagct

SEQ ID NO: 145467 - DNA, 539 bp, Homo sapiens
  Payload ID: 8770
  Gene Symbol: KRT5
  Gene Name: keratin 5, type II
  ENST ID: ENST00000551275
  CDS Start-End: 99-539
aacagagccaccttctgcgtcctgctgagctctgttctctccagcacctcccaacccactagtgcctggttctcttgctccaccaggaacaagccaccatgtctcgccagtcaagtgtgtccttccggagcgggggcagtcgtagcttcagcaccgcctctgccatcaccccgtctgtctcccgcaccagcttcacctccgtgtcccggtccgggggtggcggtggtggtggcttcggcagggtcagccttgcgggtgcttgtggagtgggcggctatggctttggaggtggtgccggtagtggatttggtttcggcggtggagctggtggtggctttgggctcggtggcggagctggctttggaggtggcttcggtggccctggctttcctgtctgccctcctggaggtatccaagaggtcactgtcaaccagagtctcctgactcccctcaacctgcaaatcgaccccagcatccagagggtgaggaccgaggagcgcgagcagatcaagaccctcaacaataagtttgcctccttc

SEQ ID NO: 145468 - DNA, 936 bp, Homo sapiens
  Payload ID: 8770
  Gene Symbol: KRT5
  Gene Name: keratin 5, type II
  ENST ID: ENST00000548409
  CDS Start-End: 1-604
tgatgcactgatggatgagattaacttcatgaagatgttctttgatgcggagctgtcccagatgcagacgcatgtctctgacacctcagtggtcctctccatggacaacaaccgcaacctggacctggatagcatcatcgctgaggtcaaggcccagtatgaggagattgccaaccgcagccggacagaagccgagtcctggtatcagaccaagtatgaggagctgcagcagacagctggccggcatggcgatgacctccgcaacaccaagcatgagatctctgagatgaaccggatgatccagaggctgagagccgagattgacaatgtcaagaaacagtgcgccaatctgcagaacgccattgcggatgccgagcagcgtggggagctggccctcaaggatgccaggaacaagctggccgagctggaggaggccctgcagaaggccaagcaggacatggcccggctgctgcgtgagtaccaggagctcatgaacaccaagctggccctggacgtggagatcgccacttaccgcaagctgctggagggcgaggaatgcagactcagtggagaaggagttggaccagtcaacatctgtaagtagctttgaacagacattaacaacgacaataatatgggatatatttagtgccaactcagaattctgctgtttctagatccaaacttttcccatcccagcatatggttatttataataatacacttagtaagttgtgggtggtggaggggaaggacagattgggacaggaagcaatgtggcttatgtctcatctcttaaagggtaagccatgcatcctatgcttcttggaccctgtcccctgccttgtccctagtacctagctccccccagtacctagctcctcccctcagtacctagctcccctcagtacctagctccctgtagtacctagctcc

SEQ ID NO: 145469 - DNA, 542 bp, Homo sapiens
  Payload ID: 8770
  Gene Symbol: KRT5
  Gene Name: keratin 5, type II
  ENST ID: ENST00000546577
  CDS Start-End: 147-542
actgtgcaggtgtgaccggtgagctcacagctgccccccaggcatgcccagcccacttaatcattcacagctcgacagctctctcgcccagcccagttctggaagggataaaaagggggcatcaccgttcctgggaacaagccaccatgtctcgccagtcaagtgtgtccttccggagcgggggcagtcgtagcttcagcaccgcctctgccatcaccccgtctgtctcccgcaccagcttcacctccgtgtcccggtccgggggtggcggtggtggtggcttcggcagggtcagccttgcgggtgcttgtggagtgggtggctatggcagccggagcctctacaacctggggggctccaagaggatatccatcagcactagtggtggcagcttcaggaaccggtttggtgctggtgctggaggcggctatggctttggaggtggtgccggtagtggatttggtttcggcggtggagctggtggtggctttgggctcggtggcggagctggctttggaggtggcttcggtggccctggcttt

SEQ ID NO: 145470 - DNA, 587 bp, Homo sapiens
  Payload ID: 8770
  Gene Symbol: KRT5
  Gene Name: keratin 5, type II
  ENST ID: ENST00000551188
  CDS Start-End: 1-587
ggaccctgctgcaggagcagggcaccaagactgtgaggcagaacctggagccgttgttcgagcagtacatcaacaacctcaggaggcagctggacagcatcgtgggggaacggggccgcctggactcagagctgagaaacatgcaggacctggtggaagacttcaagaacaacctctgaaagctcaaaaaagaacactagagaaattgactaggtatgaggatgaaatcaacaagcgtaccactgctgagaatgagtttgtgatgctgaagaaggatgtagatgctgcctacatgaacaaggtggagctggaggccaaggttgatgcactgatggatgagattaacttcatgaagatgttctttgatgcggagctgtcccagatgcagacgcatgtctctgacacctcagtggtcctctccatggacaacaaccgcaacctggacctggatagcatcatcgctgaggtcaaggcccagtatgaggagattgccaaccgcagccggacagaagccgagtcctggtatcagaccaagtatgaggagctgcagcagacagctggccggcatggcgatgacctccgcaaca

SEQ ID NO: 145471 - DNA, 2310 bp, Homo sapiens
  Payload ID: 8771
  Gene Symbol: KRT6A
  Gene Name: keratin 6A, type II
  Uniprot ID: P02538
  ENST ID: ENST00000330722
  CDS Start-End: 70-1764
agtcctgcttctcttccctctctcctccagcctctcacactctcctcagctctctcatctcctggaaccatggccagcacatccaccaccatcaggagccacagcagcagccgccggggtttcagtgccaactcagccaggctccctggggtcagccgctctggcttcagcagcgtctccgtgtcccgctccaggggcagtggtggcctgggtggtgcatgtggaggagctggctttggcagccgcagtctgtatggcctggggggctccaagaggatctccattggagggggcagctgtgccatcagtggcggctatggcagcagagccggaggcagctatggctttggtggcgccgggagtggatttggtttcggtggtggagccggcattggctttggtctgggtggtggagccggccttgctggtggctttgggggccctggcttccctgtgtgcccccctggaggcatccaagaggtcaccgtcaaccagagtctcctgactcccctcaacctgcaaatcgatcccaccatccagcgggtgcgggctgaggagcgtgaacagatcaagaccctcaacaacaagtttgcctccttcatcgacaaggtgcggttcctggagcagcagaacaaggttctggaaacaaagtggaccctgctgcaggagcagggcaccaagactgtgaggcagaacctggagccgttgttcgagcagtacatcaacaacctcaggaggcagctggacagcattgtcggggaacggggccgcctggactcagagctcagaggcatgcaggacctggtggaggacttcaagaacaaatatgaggatgaaatcaacaagcgcacagcagcagagaatgaatttgtgactctgaagaaggatgtggatgctgcctacatgaacaaggttgaactgcaagccaaggcagacactctcacagacgagatcaacttcctgagagccttgtatgatgcagagctgtcccagatgcagacccacatctcagacacatctgtggtgctgtccatggacaacaaccgcaacctggacctggacagcatcatcgctgaggtcaaggcccaatatgaggagattgctcagagaagccgggctgaggctgagtcctggtaccagaccaagtacgaggagctgcaggtcacagcaggcagacatggggacgacctgcgcaacaccaagcaggagattgctgagatcaaccgcatgatccagaggctgagatctgagatcgaccacgtcaagaagcagtgcgccaacctgcaggccgccattgctgatgctgagcagcgtggggagatggccctcaaggatgccaagaacaagctggaagggctggaggatgccctgcagaaggccaagcaggacctggcccggctgctgaaggagtaccaggagctgatgaatgtcaagctggccctggacgtggagatcgccacctaccgcaagctgctggagggtgaggagtgcaggctgaatggcgaaggcgttggacaagtcaacatctctgtggtgcagtccaccgtctccagtggctatggcggtgccagtggtgtcggcagtggcttaggcctgggtggaggaagcagctactcctatggcagtggtcttggcgttggaggtggcttcagttccagcagtggcagagccattgggggtggcctcagctctgttggaggcggcagttccaccatcaagtacaccaccacctcctcctccagcaggaagagctataagcactaaagtgcgtctgctagctctcggtcccacagtcctcaggcccctctctggctgcagagccctctcctcaggttgcctttcctctcctggcctccagtctcccctgctgtcccaggtagagctgggtatggatgcttagtgccctcacttcttctctctctctctataccatctgagcacccattgctcaccatcagatcaacctctgattttacatcatgatgtaatcaccactggagcttcactgttactaaattattaatttcttgcctccagtgttctatctctgaggctgagcattataagaaaatgacctctgctccttttcattgcagaaaattgccaggggcttatttcagaacaacttccacttactttccactggctctcaaactctctaacttataagtgttgtgaacccccacccaggcagtatccatgaaagcacaagtgactagtcctatgatgtacaaagcctgtatctctgtgatgatttctgtgctcttcgctgtttgcaattgctaaataaagcagatttataatacaata

SEQ ID NO: 145472 - DNA, 2282 bp, Homo sapiens
  Payload ID: 8772
  Gene Symbol: KRT6B
  Gene Name: keratin 6B, type II
  Uniprot ID: P04259
  ENST ID: ENST00000252252
  CDS Start-End: 49-1743
cgcctccagcctctcacactctcctaagccctctcatctcctggaaccatggccagcacatccaccaccatcaggagccacagcagcagccgccggggtttcagtgccaactcagccaggctccctggggtcagccgctctggcttcagcagcatctccgtgtcccgctccaggggcagtggtggcctgggtggcgcatgtggaggagctggctttggcagccgcagtctgtatggcctggggggctccaagaggatctccattggagggggcagctgtgccatcagtggcggctatggcagcagagccggaggcagctatggctttggtggcgccgggagtggatttggtttcggtggtggagccggcattggctttggtctgggtggtggagccggccttgctggtggctttgggggccctggcttccctgtgtgcccccctggaggcatccaagaggtcactgtcaaccagagtctcctgactcccctcaacctgcaaattgaccccgccatccagcgggtgcgggccgaggagcgtgagcagatcaagaccctcaacaacaagtttgcctccttcatcgacaaggtgcggttcctagagcagcagaacaaggttctggacaccaagtggaccctgctgcaggagcagggcaccaagactgtgaggcagaacctggagccgttgttcgagcagtacatcaacaacctcaggaggcagctggacaacatcgtgggggaacggggtcgtctggactcggagctgagaaacatgcaggacctggtggaggacctcaagaacaaatatgaggatgaaatcaacaagcgcacagcagcagagaatgaatttgtgactctgaagaaggatgtggatgctgcctacatgaacaaggttgaactgcaagccaaggcagacactcttacagatgagatcaacttcctgagagccttgtatgatgcagagctgtcccagatgcagacccacatctcagacacatccgtggtgctatccatggacaacaaccgcaacctggacctggacagcatcatcgctgaggtcaaggcccaatatgaggagattgctcagaggagcagggctgaggctgagtcctggtaccagacaaagtacgaggagctgcagatcacagcaggcagacatggggacgacctgcgcaacaccaagcaggagattgctgagatcaaccgcatgatccagaggctgagatctgagatcgaccacgtcaagaagcagtgtgccaacctacaggccgccattgctgatgctgagcagcgtggggagatggccctcaaggatgctaagaacaagctggaagggctggaggatgccctgcagaaggccaagcaggacctggcccggctgctgaaggagtaccaggagctgatgaacgtcaagctggccctggatgtggagatcgccacctaccgcaagctgctggagggcgaggagtgcaggctgaatggcgaaggcgttggacaagtcaacatctctgtagtgcagtccaccgtctccagtggctatggcggtgccagcggtgtcggcagtggcttaggcctgggtggaggaagcagctactcctatggcagtggtcttggcgttggaggcggctttagttccagcagcggcagagccactgggggtggcctcagctctgttggaggcggcagttccaccatcaagtacaccaccacctcctcctccagcaggaagagctacaagcactgaagtgctgccgccagctctcagtcccacagctctcaggcccctctctggcagcagagccctctcctcaggttgcttgtcctcccctggcctccagtctcccctgccctcccgggtagagctgggatgccctcacttttcttctcatcaatacctgttccactgagctcctgttgcttaccatcaagtcaacagttatcagcactcagacatgcgaatgtcctttttagttcccgtattattacaggtatctgagtctgccataattctgagaagaaaatgacctatatccccataagaactgaaactcagtctaggtccagctgcagatgaggagtcctctctttaattgctaaccatcctgcccattatagctacactcaggagttctcatctgacaagtcagttgtcctgatcttctcttgcagtgtccctgaatggcaagtgatgtaccttctgatgcagtctgcattcctgcactgctttctctgctctctttgccttcttttgttctgttgaataaagcatattgagaatgtgaa

SEQ ID NO: 145473 - DNA, 2289 bp, Homo sapiens
  Payload ID: 8773
  Gene Symbol: KRT6C
  Gene Name: keratin 6C, type II
  Uniprot ID: P48668
  ENST ID: ENST00000252250
  CDS Start-End: 49-1743
cgcctccagcctccaacgctcgccacagccctctcatctcctggaaccatggccagcacatccaccaccatcaggagccacagcagcagccgccggggtttcagtgccaactcagccaggctccctggggtcagccgctctggcttcagcagcatctccgtgtcccgctccaggggcagtggtggcctgggtggtgcatgtggaggagctggctttggcagccgcagtctgtatggcctggggggctccaagaggatctccattggagggggcagctgtgccatcagtggcggctatggcagcagagccggaggcagctatggctttggtggcgccgggagtggatttggtttcggtggtggagccggcattggctttggtctgggtggtggagccggccttgctggtggctttgggggccctggcttccctgtgtgcccccctggaggcatccaagaggtcaccgtcaaccagagtctcctgactcccctcaacctgcaaattgaccccgccatccagcgggtgcgggccgaggagcgtgagcagatcaagaccctcaacaacaagtttgcctccttcatcgacaaggtgcggttcctagagcagcagaacaaggttctggacaccaagtggaccctgctgcaggagcagggcaccaagactgtgaggcagaacctggagccgttgttcgagcagtacatcaacaacctcaggaggcagctggacagcatcgtcggggaacggggccgcctggactcggagctgagaaacatgcaggacctggtggaggacctcaagaacaaatatgaggatgaaatcaacaagcgcacagcagcagagaatgaatttgtgactctgaagaaggatgtggatgctgcctacatgaacaaggttgaactgcaagccaaggcagacactctcacagatgagatcaacttcctgagagccttgtatgatgcagagctgtcccagatgcagacccacatctcagacacatccgtggtgctatccatggacaacaaccgcaacctggacctggacagcatcatcgctgaggtcaaggcccaatacgaggagattgctcagaggagccgggctgaggctgagtcctggtaccagaccaagtacgaggagctgcaggtcacagcaggcagacatggggacgacctgcgcaacaccaagcaggagattgctgagatcaaccgcatgatccagaggctgagatctgagatcgaccatgtcaagaagcagtgtgccagcctgcaggctgccattgctgatgctgagcagcgtggggagatggcactcaaggatgctaagaacaagctggaagggctggaggatgccctgcagaaggccaagcaggacctggcccggctgctgaaggagtaccaggagctgatgaatgtcaagctggccctggatgtggagatcgccacctaccgcaagctgctggagggcgaggagtgcaggctgaatggcgaaggcgttggacaagtcaacgtctctgtagtacagtccaccatctccagtggctatggcggtgccagcggtgtcggcagtggcttaggcctgggtggaggaagcagctactcctatggcagtggtcttggcattggaggtggcttcagttccagcagtggcagagccattgggggtggcctcagctctgttggaggcggcagttccaccatcaagtacaccaccacctcctcctccagcaggaagagctacaagcactaaagtgctgcctccagctctcggtcccacagtcctcaggcccttctctggctgcagagccgtctcctcaggttgcctatcctctcctggcctctagtcttccctgctctccgaggtagagctgggtatggatgcttagtgccctcacttctctctgtctatacctgccccatctgagcacccattgctcaccatcagatcaacctttgattttacatcataatgtattcaccaatggagcttcactttgttactaaattattaatttcttgcctccaaaattgttctctctgaggctgagcattataagaaaatgatctctgttccttttcattactgaaaatcgcctggggcttatttcagaacaacttccacttattttccattggcccccaaactccctaagttaaaagtattgtgaacccccgccccgcagtatgcatggaagcacaagtgactagtcgtatgatgtacacagtctttctccctgtgatgatttctctgctctttgctctttgtaatttctaaataaagcaggttttagaataa

SEQ ID NO: 145474 - DNA, 1754 bp, Homo sapiens
  Payload ID: 8774
  Gene Symbol: KRT7
  Gene Name: keratin 7, type II
  Uniprot ID: P08729
  ENST ID: ENST00000331817
  CDS Start-End: 184-1593
agagggcggagggcggccccaggaggggcctggcagcagagaaaggtggcccgcggcagccccgcccctacctgtggaagcccagccgcccgctcccgcggataaaaggcgcggagtgtccccgaggtcagcgagtgcgcgctcctcctcgcccgccgctaggtccatcccggcccagccaccatgtccatccacttcagctccccggtattcacctcgcgctcagccgccttctcgggccgcggcgcccaggtgcgcctgagctccgctcgccccggcggccttggcagcagcagcctctacggcctcggcgcctcacggccgcgcgtggccgtgcgctctgcctatgggggcccggtgggcgccggcatccgcgaggtcaccattaaccagagcctgctggccccgctgcggctggacgccgacccctccctccagcgggtgcgccaggaggagagcgagcagatcaagaccctcaacaacaagtttgcctccttcatcgacaaggtgcggtttctggagcagcagaacaagctgctggagaccaagtggacgctgctgcaggagcagaagtcggccaagagcagccgcctcccagacatctttgaggcccagattgctggccttcggggtcagcttgaggcactgcaggtggatgggggccgcctggaggcggagctgcggagcatgcaggatgtggtggaggacttcaagaataagtacgaagatgaaattaaccaccgcacagctgctgagaatgagtttgtggtgctgaagaaggatgtggatgctgcctacatgagcaaggtggagctggaggccaaggtggatgccctgaatgatgagatcaacttcctcaggaccctcaatgagacggagttgacagagctgcagtcccagatctccgacacatctgtggtgctgtccatggacaacagtcgctccctggacctggacggcatcatcgctgaggtcaaggcgcagtatgaggagatggccaaatgcagccgggctgaggctgaagcctggtaccagaccaagtttgagaccctccaggcccaggctgggaagcatggggacgacctccggaatacccggaatgagatttcagagatgaaccgggccatccagaggctgcaggctgagatcgacaacatcaagaaccagcgtgccaagttggaggccgccattgccgaggctgaggagcgtggggagctggcgctcaaggatgctcgtgccaagcaggaggagctggaagccgccctgcagcggggcaagcaggatatggcacggcagctgcgtgagtaccaggaactcatgagcgtgaagctggccctggacatcgagatcgccacctaccgcaagctgctggagggcgaggagagccggttggctggagatggagtgggagccgtgaatatctctgtgatgaattccactggtggcagtagcagtggcggtggcattgggctgaccctcgggggaaccatgggcagcaatgccctgagcttctccagcagtgcgggtcctgggctcctgaaggcttattccatccggaccgcatccgccagtcgcaggagtgcccgcgactgagccgcctcccaccactccactcctccagccaccacccacaatcacaagaagattcccacccctgcctcccatgcctggtcccaagacagtgagacagtctggaaagtgatgtcagaatagcttccaataaagcagcctcattctgaggcctgagtgatcca

SEQ ID NO: 145475 - DNA, 2265 bp, Homo sapiens
  Payload ID: 8775
  Gene Symbol: KRT71
  Gene Name: keratin 71, type II
  Uniprot ID: Q3SY84
  ENST ID: ENST00000267119
  CDS Start-End: 71-1642
acaaccagcagaaccttttgggattttgccttcctccctcctgcatctgagctttgtctccaccagcaacatgagccgccaattcacctgcaagtcgggagctgccgccaaggggggcttcagtggctgctcagctgtgctctcagggggcagctcatcctccttccgggcagggagcaaagggctcagtgggggctttggcagccggagcctctacagcctggggggtgtccggagcctcaatgtggccagtggcagcgggaagagtggaggctatggatttggccggggccgggccagtggctttgctggaagcatgtttggcagtgtggccctggggcctgtgtgcccaactgtatgcccacctggaggcatccaccaggttaccgtcaatgagagcctcctggcccccctcaacgtggagctggaccccgagatccagaaagtgcgtgcccaggagcgagagcagatcaaggctctgaacaacaagttcgcctccttcatcgacaaggtgcggttcctggagcagcagaaccaggtactggagaccaagtgggagctgctgcagcagctggacctgaacaactgcaagaacaacctggagcccatcctcgagggctacatcagcaacctgcggaagcagctggagacgctgtctggggacagggtgaggctggactcggagctgaggaatgtgcgggacgtagtggaggactacaagaagaggtatgaggaggaaatcaacaagcggacagcagcagagaacgagtttgtgctgctcaagaaggatgtggatgctgcttacgccaataaggtggaactgcaggccaaggtggaatccatggaccaggagatcaagttcttcaggtgtctctttgaagccgagatcactcagatccagtcccacatcagtgacatgtctgtcatcctgtccatggacaacaaccggaacctagacctggacagcatcattgacgaagtccgcacccagtatgaggagattgccttgaagagtaaggccgaggctgaggccctgtaccagaccaagttccaagagcttcagctggcagctggcaggcatggggacgacctcaaaaacaccaagaatgaaatctcggagctcactcggctcatccagagaatccgctcagagatcgagaacgtgaagaagcaggcttccaacctggagacagccatcgctgatgctgagcagcggggagacaacgccctgaaggatgcccgggccaagctggacgagctggagggcgccctgcaccaggccaaggaggagctggcgcggatgctgcgcgagtaccaggagctcatgagcctgaagctggccctggacatggagatcgccacctatcgcaagctactggagagcgaggagtgcaggatgtcaggagaatttccctcccctgtcagcatctccatcatcagcagcaccagtggcggcagtgtctatggcttccggcccagcatggtcagcggtggctatgtggccaacagcagcaactgcatctctggagtgtgcagcgtgagaggcggggagggcaggagccggggcagtgccaacgattacaaagacaccctagggaagggttccagcctgagtgcaccctccaagaaaaccagtcggtagagaagactgccccgggccccgcctcattccatgacccggctctggatcccacactgtacttcccacagcccactctcagctccatctccaccctgctggtcctgctcccatacacctggcactggccttggccacccacttctcccagcctgtgtcttcctgatcctgggaaggcctggatgaccaagcttggtgaaattcctccctgtacacaccctattaactccttggctgtggtcccccagctacaccaccagcccaggtcctggctgccagctttcctcctctgcccggcctctagcgcagtcgctaactactctgctgggctccctgggtctctgcccaaggccccgcacacactgggacctagcatagttcctgcctatgccaggagctggctctgtgtttaagaaaaggaggactgaaggacaaacaaccaagagtggcccagtccccacccccacatctagctcagtctcaaatctgagtgggaccaagtgcaattcagggcctttttctccactcacctgcacccagaagcagagaaaagcaggcactgttcacttttcctttattcttaatggccttcctctgttgcaacctcaataaacagcacaatctca

SEQ ID NO: 145476 - DNA, 2015 bp, Homo sapiens
  Payload ID: 8776
  Gene Symbol: KRT72
  Gene Name: keratin 72, type II
  Uniprot ID: Q14CN4
  ENST ID: ENST00000293745
  CDS Start-End: 87-1622
atttaaggggcgagctgggccgagaacgcagcggctgtttgcgccccttctgcctcccgcgcggccagcaccggtacttgcgagccatgagccgccaactgacccatttcccccgcggggagcgcctgggcttcagcggttgctccgcggtcctctctggcgggatcggcagcagctccgcctcattccgggcccgggtcaagggctcggcctcctttggcagcaagagcctctcctgccttgggggcagccgaagcctggcgctcagcgctgctgcacggcggggcggcggccgcctgggcggcttcgtgggcaccgccttcggcagcgccgggctggggcccaagtgtccctccgtgtgcccacccgggggcatccctcaggtcaccgtcaacaagagcctcctggccccgctcaacgtggagatggaccccgagatccagagggtgcgcgcccaggagcgggagcagatcaaggcgctaaacaacaagttcgcctccttcatcgacaaggtgcggttcctggagcagcagaatcaggtgctagagaccaagtggaacctcctacagcagctggacttgaacaactgcaggaagaacctggagcccatttatgagggctacatcagcaacctgcagaagcagctggagatgctgtctggggacggggtgaggctggattcggagctgaggaacatgcaggatttggtggaggactacaagaagaggtatgaggtggagattaacagacgcacagctgctgagaatgagtttgtggtgctcaagaaggacgtggatgctgcttacatgaataaggttgagctccaggccaaggtggactccttgacagatgagattaaattcttcaagtgcctttatgaaggggagatcactcagatccagtcccacatcagcgacacgtccatcgtcctgtcaatggacaacaaccgggatctggacctggacagcatcattgccgaggtccgtgcccagtacgaggagattgccctaaagagcaaggccgaggctgagaccctgtaccagaccaagatccaggagctgcaggtcacagcaggccagcatggggatgacctcaagctcaccaaggctgaaatctctgagctcaaccgcctgatccagaggatccgctcagagatagggaatgtgaagaagcagtgtgccgatctggagacggccatcgccgacgctgaacagcggggggactgcgccctgaaagatgcccgggccaagctggatgagctggagggcgccctgcaccaggccaaggaggagctggcacggatgctgcgtgagtaccaggagctcgtgagcctgaagctggccctggatatggagatcgccacctaccgcaagctgctggagagcgaggagtgcaggatgtctggcgaatatccaaattctgtgagcatctccgtcatcagcagcaccaatgctggggcaggaggggctggcttcagcatgggctttggcgcctcaagcagttatagctacaaaactgcagctgcagacgtcaagaccaaaggcagctgtggcagtgagctcaaggatccccttgccaaaacctcggggagcagctgtgccaccaaaaaggcctccagatgatggacaagtggttggctctgtgagcagaaggcttcccaactcacccgtctcctccctctccttccctgggctccctttccaagtcaagaaatgctttgtctgtcactacagtcccaaccccatttcctctccctgttgtcctcaaggtgtgatgcttcgatgcaaggagtccagtcaggagctctctcagtggcctccttcttggtcccgtttcgttgggtcattgcctgaaatgcaaagacaacacttacccaggatgtttccccaaggccagctacaagcccctctgcccccatgcctttcttgggccttcactaccaagggactctcttcatcttctgattgggattgtgtccagtcctctgcttcttctgcaataaatgattaaatctg

SEQ ID NO: 145477 - DNA, 1764 bp, Homo sapiens
  Payload ID: 8776
  Gene Symbol: KRT72
  Gene Name: keratin 72, type II
  Uniprot ID: Q14CN4
  ENST ID: ENST00000354310
  CDS Start-End: 87-1496
atttaaggggcgagctgggccgagaacgcagcggctgtttgcgccccttctgcctcccgcgcggccagcaccggtacttgcgagccatgagccgccaactgacccatttcccccgcggggagcgcctgggcttcagcggttgctccgcggtcctctctggcgggatcggcagcagctccgcctcattccgggcccgggtcaagggctcggcctcctttggcagcaagagcctctcctgccttgggggcagccgaagcctggcgctcagcgctgctgcacggcggggcggcggccgcctgggcggcttcgtgggcaccgccttcggcagcgccgggctggggcccaagtgtccctccgtgtgcccacccgggggcatccctcaggtcaccgtcaacaagagcctcctggccccgctcaacgtggagatggaccccgagatccagagggtgcgcgcccaggagcgggagcagatcaaggcgctaaacaacaagttcgcctccttcatcgacaaggtgcggttcctggagcagcagaatcaggtgctagagaccaagtggaacctcctacagcagctggacttgaacaactgcaggaagaacctggagcccatttatgagggctacatcagcaacctgcagaagcagctggagatgctgtctggggacggggtgaggctggattcggagctgaggaacatgcaggatttggtggaggactacaagaagaggtatgaggtggagattaacagacgcacagctgctgagaatgagtttgtggtgctcaagaaggacgtggatgctgcttacatgaataaggttgagctccaggccaaggtggactccttgacagatgagattaaattcttcaagtgcctttatgaaggggagatcactcagatccagtcccacatcagcgacacgtccatcgtcctgtcaatggacaacaaccgggatctggacctggacagcatcattgccgaggtccgtgcccagtacgaggagattgccctaaagagcaaggccgaggctgagaccctgtaccagaccaagtgtgccgatctggagacggccatcgccgacgctgaacagcggggggactgcgccctgaaagatgcccgggccaagctggatgagctggagggcgccctgcaccaggccaaggaggagctggcacggatgctgcgtgagtaccaggagctcgtgagcctgaagctggccctggatatggagatcgccacctaccgcaagctgctggagagcgaggagtgcaggatgtctggcgaatatccaaattctgtgagcatctccgtcatcagcagcaccaatgctggggcaggaggggctggcttcagcatgggctttggcgcctcaagcagttatagctacaaaactgcagctgcagacgtcaagaccaaaggcagctgtggcagtgagctcaaggatccccttgccaaaacctcggggagcagctgtgccaccaaaaaggcctccagatgatggacaagtggttggctctgtgagcagaaggcttcccaactcacccgtctcctccctctccttccctgggctccctttccaagtcaagaaatgctttgtctgtcactacagtcccaaccccatttcctctccctgttgtcctcaaggtgtgatgcttcgatgcaaggagtccagtcaggagctctctcagtggcctccttcttggtcccgtttcgttgggtcattgcctgaaatgcaaagacaacacttacccaggatgtttccccaa

SEQ ID NO: 145478 - DNA, 1813 bp, Homo sapiens
  Payload ID: 8776
  Gene Symbol: KRT72
  Gene Name: keratin 72, type II
  Uniprot ID: Q14CN4
  ENST ID: ENST00000537672
  CDS Start-End: 12-1547
acttgcgagccatgagccgccaactgacccatttcccccgcggggagcgcctgggcttcagcggttgctccgcggtcctctctggcgggatcggcagcagctccgcctcattccgggcccgggtcaagggctcggcctcctttggcagcaagagcctctcctgccttgggggcagccgaagcctggcgctcagcgctgctgcacggcggggcggcggccgcctgggcggcttcgtgggcaccgccttcggcagcgccgggctggggcccaagtgtccctccgtgtgcccacccgggggcatccctcaggtcaccgtcaacaagagcctcctggccccgctcaacgtggagatggaccccgagatccagagggtgcgcgcccaggagcgggagcagatcaaggcgctaaacaacaagttcgcctccttcatcgacaaggtgcggttcctggagcagcagaatcaggtgctagagaccaagtggaacctcctacagcagctggacttgaacaactgcaggaagaacctggagcccatttatgagggctacatcagcaacctgcagaagcagctggagatgctgtctggggacggggtgaggctggattcggagctgaggaacatgcaggatttggtggaggactacaagaagaggtatgaggtggagattaacagacgcacagctgctgagaatgagtttgtggtgctcaagaaggacgtggatgctgcttacatgaataaggttgagctccaggccaaggtggactccttgacagatgagattaaattcttcaagtgcctttatgaaggggagatcactcagatccagtcccacatcagcgacacgtccatcgtcctgtcaatggacaacaaccgggatctggacctggacagcatcattgccgaggtccgtgcccagtacgaggagattgccctaaagagcaaggccgaggctgagaccctgtaccagaccaagatccaggagctgcaggtcacagcaggccagcatggggatgacctcaagctcaccaaggctgaaatctctgagctcaaccgcctgatccagaggatccgctcagagatagggaatgtgaagaagcagtgtgccgatctggagacggccatcgccgacgctgaacagcggggggactgcgccctgaaagatgcccgggccaagctggatgagctggagggcgccctgcaccaggccaaggaggagctggcacggatgctgcgtgagtaccaggagctcgtgagcctgaagctggccctggatatggagatcgccacctaccgcaagctgctggagagcgaggagtgcaggatgtctggcgaatatccaaattctgtgagcatctccgtcatcagcagcaccaatgctggggcaggaggggctggcttcagcatgggctttggcgcctcaagcagttatagctacaaaactgcagctgcagacgtcaagaccaaaggcagctgtggcagtgagctcaaggatccccttgccaaaacctcggggagcagctgtgccaccaaaaaggcctccagatgatggacaagtggttggctctgtgtgatgcttcgatgcaaggagtccagtcaggagctctctcagtggcctccttcttggtcccgtttcgttgggtcattgcctgaaatgcaaagacaacacttacccaggatgtttccccaaggccagctacaagcccctctgcccccatgcctttcttgggccttcactaccaagggactctcttcatcttctgattgggattgtgtccagtcctctgcttcttctgcaataaatgattaaatctg

SEQ ID NO: 145479 - DNA, 1679 bp, Homo sapiens
  Payload ID: 8776
  Gene Symbol: KRT72
  Gene Name: keratin 72, type II
  ENST ID: ENST00000550829
  CDS Start-End: 1-430
tttcccccgcggggagcgcctgggcttcagcggttgctccgcggtcctctctggcgggatcggcagcagctccgcctcattccgggcccgggtcaagggctcggcctcctttggcagcaagagcctctcctgccttgggggcagccgaagcctggcgctcagcgctgctgcacggcggggcggcggccgcctgggcggcttcgtgggcaccgccttcggcagcgccgggctggggcccaagtgtccctccgtgtgcccacccgggggcatccctcaggtcaccgtcaacaagagcctcctggccccgctcaacgtggagatggaccccgagatccagagggtgcgcgcccaggagcgggagcagatcaaggcgctaaacaacaagttcgcctccttcatcgacaagaaaacaccagcatttatagcatgagaagctacctctgtctcatgaaaactcactgaggcagaggcagatggtaccattgcttaagccctcttcctgattccatatagaccgggtcctatttcttgtcttggagatccaggtgcggttcctggagcagcagaatcaggtgctagagaccaagtggaacctcctacagcagctggacttgaacaactgcaggaagaacctggagcccatttatgagggctacatcagcaacctgcagaagcagctggagatgctgtctggggacggggtgaggctggattcggagctgaggaacatgcaggatttggtggaggactacaagaagaggtatgaggtggagattaacagacgcacagctgctgagaatgagtttgtggtgctcaagaaggacgtggatgctgcttacatgaataaggttgagctccaggccaaggtggactccttgacagatgagattaaattcttcaagtgcctttatgaaggggagatcactcagatccagtcccacatcagcgacacgtccatcgtcctgtcaatggacaacaaccgggatctggacctggacagcatcattgccgaggtccgtgcccagtacgaggagattgccctaaagagcaaggccgaggctgagaccctgtaccagaccaagatccaggagctgcaggtcacagcaggccagcatggggatgacctcaagctcaccaaggctgaaatctctgagctcaaccgcctgatccagaggatccgctcagagatagggaatgtgaagaagcagtgtgccgatctggagacggccatcgccgacgctgaacagcggggggactgcgccctgaaagatgcccgggccaagctggatgagctggagggcgccctgcaccaggccaaggaggagctggcacggatgctgcgtgagtaccaggagctcgtgagcctgaagctggccctggatatggagatcgccacctaccgcaagctgctggagagcgaggagtgcaggatgtctggcgaatatccaaattctgtgagcatctccgtcatcagcagcaccaatgctggggcaggaggggctggcttcagcatgggctttggcgcctcaagcagttatagctacaaaactgcagctgcagacgtcaagaccaaaggcagctgtggcagtgagctcaaggatccccttgccaaaacctcggggagcagctgtgccaccaaaaaggcctccagatgatggacaagtggttggctctgtgag

SEQ ID NO: 145480 - DNA, 574 bp, Homo sapiens
  Payload ID: 8776
  Gene Symbol: KRT72
  Gene Name: keratin 72, type II
  ENST ID: ENST00000549979
  CDS Start-End: 1-574
gcttcagcggttgctccgcggtcctctctggcgggatcggcagcagctccgcctcattccgggcccgggtcaagggctcggcctcctttggcagcaagagcctctcctgccttgggggcagccgaagcctggcgctcagcgctgctgcacggcggggcggcggccgcctgggcggcttcgtgggcaccgccttcggcagcgccgggctggggcccaagtgtccctccgtgtgcccacccgggggcatccctcaggtcaccgtcaacaagagcctcctggccccgctcaacgtggagatggaccccgagatccagagggtgcgcgcccaggagcgggagcagatcaaggcgctaaacaacaagttcgcctccttcatcgacaagaccgggtcctatttcttgtcttggagatccaggtgcggttcctggagcagcagaatcaggtgctagagaccaagtggaacctcctacagcagctggacttgaacaactgcaggaagaacctggagcccatttatgagggctacatcagcaacctgcagaagcagctggagatgctgtctggggacggggtg

SEQ ID NO: 145481 - DNA, 2284 bp, Homo sapiens
  Payload ID: 8777
  Gene Symbol: KRT73
  Gene Name: keratin 73, type II
  Uniprot ID: Q86Y46
  ENST ID: ENST00000305748
  CDS Start-End: 36-1658
tcagcatcttatccccactttctggcctccccaccatgagccgccaattcacctacaagtcgggagctgctgccaaggggggcttcagcggctgctccgctgtgctctcagggggcagctcatcctcctaccgagcagggggcaaagggctcagtggaggcttcagcagtcggagcctttacagcctggggggtgcccggagcatctctttcaatgtggccagtggcagtgggtgggcaggaggctatggatttggccggggccgggccagtggctttgctggcagcatgtttggcagtgtggccttggggtccgtgtgtccgtcgttgtgcccgcccgggggtatccatcaggtcaccatcaacaagagcctcctggcacccctgaacgtggagctggaccctgaaatccagaaagtgcgtgcccaggagcgggagcagatcaaggtgctgaacaacaagttcgcctccttcattgacaaggtgcggttcctggagcagcagaaccaggtgctggagaccaagtgggagctgctacagcagctggacctgaacaactgcaagaataacctggagcccatccttgagggctacatcagcaacctgcggaagcagctggagacgctgtctggggacagggtgaggctggactcggagctgaggagcgtgcgcgaagtggtggaggactacaagaagaggtatgaagaagaaataaacaagcgcacaactgctgagaatgaatttgtggtgcttaagaaggacgtggacgcagcttacacgagcaaagtggagctgcaggccaaggtggatgccctggatggagaaatcaagttcttcaagtgtctgtacgagggggagactgctcagatccagtcccacatcagcgacacgtccatcatcctgtccatggacaacaaccggaacctggacctggacagcatcattgctgaggtccgtgcccagtatgaggagatcgcccggaagagcaaggccgaggccgaggccctgtaccagaccaagttccaggagctgcagctagcagccggccggcatggggatgacctgaaacacaccaaaaatgagatctcagagctgacccgtctcatccaaagactgcgctcggagattgagagtgtgaagaagcagtgtgccaacctggagacggccatcgctgacgccgagcagcggggggactgtgccctcaaggatgccagggccaagctggatgagctggagggcgccctgcagcaggccaaggaggagctggcacggatgctgcgcgagtaccaagagcttttgagcgtgaagctgtccctggatattgagatcgccacctaccgcaagctgctggagggcgaggagtgcaggatgtccggagaatataccaactccgtgagcatttcggtcatcaacagctccatggccgggatggcaggcacaggggctggctttggattcagcaatgctggcacctacggctactggcccagctctgtcagcgggggctacagcatgctgcctgggggctgtgtcactggcagtgggaactgtagcccccgtggggaagccaggaccaggctggggagtgcaagtgaattcagggactcccagggaaagaccttagctctaagctcacccaccaaaaaaaccatgagataaaagtgcaacacagcccatttcccagtagtctgccttgccctggcagactgctccggactcttctaggaaattcctctgtctcatttgtcctcatctccttcttgctttgctttgctgtggacctctcctccttctccttgacctctctgcctcagtctttgttaatgttgaatcaggatttgagagctggagcccatctttctgcctccatccaaagaggccttttaactcagcctccccttctggaagaagacttggccttttctctgcctgcatgtccctgtgcagaggaaggctgtctctcaagggtaaccccaatctgcctgtgctgctctttcataccctgtctcagtaactatttggccatgtgctccctgggtacacaagttttcagatctactgatagacctgcaggaactctctcatgttagagcaatactggctcaggcaaaacacctggtgggaagttgtatcttgtatagccactgcatattacatagccaggagtaccccttgaggctaattctaccaaccaagggatttgtgctcttcatctgtgggtacttgtccttgtttaggcctcacctccctgctcctgtgtcttaccaataaacttataaagccca

SEQ ID NO: 145482 - DNA, 917 bp, Homo sapiens
  Payload ID: 8777
  Gene Symbol: KRT73
  Gene Name: keratin 73, type II
  ENST ID: ENST00000552855
  CDS Start-End: 1-858
gaagaaataaacaagcgcacaactgctgagaatgaatttgtggtgcttaagaaggagactgctcagatccagtcccacatcagcgacacgtccatcatcctgtccatggacaacaaccggaacctggacctggacagcatcattgctgaggtccgtgcccagtatgaggagatcgcccggaagagcaaggccgaggccgaggccctgtaccagaccaagttccaggagctgcagctagcagccggccggcatggggatgacctgaaacacaccaaaaatgagatctcagagctgacccgtctcatccaaagactgcgctcggagattgagagtgtgaagaagcagtgtgccaacctggagacggccatcgctgacgccgagcagcggggggactgtgccctcaaggatgccagggccaagctggatgagctggagggcgccctgcagcaggccaaggaggagctggcacggatgctgcgcgagtaccaagagcttttgagcgtgaagctgtccctggatattgagatcgccacctaccgcaagctgctggagggcgaggagtgcaggatgtccggagaatataccaactccgtgagcatttcggtcatcaacagctccatggccgggatggcaggcacaggggctggctttggattcagcaatgctggcacctacggctactggcccagctctgtcagcgggggctacagcatgctgcctgggggctgtgtcactggcagtgggaactgtagcccccgtggggaagccaggaccaggctggggagtgcaagtgaattcagggactcccagggaaagaccttagctctaagctcacccaccaaaaaaaccatgagataaaagtgcaacacagcccatttcccagtagtctgccttgccctggcagactgctccggact

SEQ ID NO: 145483 - DNA, 2788 bp, Homo sapiens
  Payload ID: 8778
  Gene Symbol: KRT74
  Gene Name: keratin 74, type II
  Uniprot ID: Q7RTS7
  ENST ID: ENST00000305620
  CDS Start-End: 49-1638
ccttggagactgcttttctccagctctgtcaactcaacctttcccaccatgagtcggcaactgaacatcaagtccagtggtgacaagggcaacttcagtgtgcattcggcagtggtgccaaggaaggctgtgggtagcctggcttcttactgtgcagctggcagaggggctggcgctggctttggcagtcggagcctctatagccttggagggaatcggcgtatttctttcaatgtggctggtggcggcgttcgggctggaggttacggcttcaggcctggctctgggtatggagggggccgggccagtggctttgctggcagtatgtttggcagtgtggccctggggcctgcatgtttgtctgtgtgcccacctgggggcatccaccaggtcactgtcaacaagagcctcttggcccccctcaacgtggagctggaccctgagatccagaaggtgcgcgcccaggagcgggaacagatcaaggtgctgaacgacaagttcgcctccttcattgacaaggtacgcttcctagagcagcagaaccaggttctagaaaccaagtgggagctgctgcagcagctggacctgaacaactgcaagaagaacctggagcccatccttgagggctacatcagcaacctgcggaagcagctggagacactgtctggggacagggtgaggctggactcggagctgagaagcatgagggatctggtggaggactataagaagagatatgaagtggagattaaccggcgcacgacagcagagaatgagtttgtggtgcttaagaaggatgcagatgcagcctacgcagtcaaggtggagcttcaggccaaagtggactcactggacaaagaaatcaagttcctcaagtgtctgtatgatgcagagatcgctcagatccagactcacgccagtgagacctctgtcatcctgtccatggacaacaaccgggacctggaccttgacagcatcatcgctgaggtccgcatgcattatgaggagatcgccctgaagagcaaggccgaggccgaggccctgtaccagaccaagatccaggagctgcagctggcagccagtcggcatggtgacgacctgaaacacaccaggagcgagatggtggagctgaaccggctcatccagaggatccggtgtgagatcgggaatgtgaagaagcagcgtgccagcctggagacggccatcgctgacgctgagcagcggggagacaatgccctgaaggatgcccaggccaagctggatgagctggagggcgccctgcaccaggccaaggaggagctggcgcggatgctgcgcgagtaccaggagctcatgagcctgaaactggccctggacatggagattgccacctaccgcaagctgctggagggcgaggagtgcaggatgtctggtgagaatccatcctctgtgagcatctctgtcatcagcagtagcagctacagctaccaccaccccagctctgcgggtgttgaccttggggccagcgctgtggcaggcagctctggcagcacccagagcgggcagaccaagaccacagaggcgcgagggggagacctcaaggacacccagggcaagagcaccccagccagcatcccagcaaggaaagccacccgctagacccatggcctcacccacctcagcacttggaagaagaggtgactttgccacccccaaaggtgtctgccacacccaagttcccaggccctgagttttaaaactgtctgtagtacactcaactgtctgcatcgtggtttagcttttactttcaagctctgattgacacagtcaccttccctgtttccttaggtcccatgtggactaacgacttctcattttcctcgctgcctttggctggcaggaggctttggaggcacaagccattataaccttcttggccctaaggaagctgtgatcatccctagaaagagggaaggagcaggagacgacaggggaggggctggtttgttctgtgcttaggccaagttagctactgtctgagaggttttacatcccctgccagcatggtggggtgacacgagacctgtaagcaggtggtgagaagttagacagcctttacttgctccatcagaaacaactttgcaggatgacgccaatatttaggacaccacgtgtacatctgtagaccaccagctgcacccatctccacaaagccaagtgaaggtgtattggggattctctgccagcctgtgtcacccacccacctccttcattatcagcaatagctaccatcatttgtcaagcacctactagatgccagacaccctacacatattgcctcctgttctcatccattcctgcaaagaagatgcaatgagcatccttggaacagactgggagcctgatcccaagaggctgctgaactggccccagtcacccacctatgtgccagagtcaggcctggccgacacaaggatctatgctttttctgtggtgtgtcactgcctttttaacaaaagggctgtcaaagtcaccattctttttgatgagggcagcgtaattacattgccttttgtcaggactgtgggtatgtgatttgtcttccacagtctctctggggctgtgtcctacatagcttctgactctcaatttttggtgccatgagctgagctcagtgagtggagctggcttttctgtcgctgagtgctactgcctagtccagatgtcgtggctcagggtgtaaatattcctaagaatggcagcatctatttcctcttttgtttgaattaaagactctgaatttctgctg

SEQ ID NO: 145484 - DNA, 2858 bp, Homo sapiens
  Payload ID: 8778
  Gene Symbol: KRT74
  Gene Name: keratin 74, type II
  ENST ID: ENST00000549343
  CDS Start-End: 40-1671
ctgcttttctccagctctgtcaactcaacctttcccaccatgagtcggcaactgaacatcaagtccagtggtgacaagggcaacttcagtgtgcattcggcagtggtgccaaggaaggctgtgggtagcctggcttcttactgtgcagctggcagaggggctggcgctggctttggcagtcggagcctctatagccttggagggaatcggcgtatttctttcaatgtggctggtggcggcgttcgggctggaggttacggcttcaggcctggctctgggtatggagggggccgggccagtggctttgctggcagtatgtttggcagtgtggccctggggcctgcatgtttgtctgtgtgcccacctgggggcatccaccaggtcactgtcaacaagagcctcttggcccccctcaacgtggagctggaccctgagatccagaaggtgcgcgcccaggagcgggaacagatcaaggtgctgaacgacaagttcgcctccttcattgacaaggtacgcttcctagagcagcagaaccaggttctagaaaccaagtgggagctgctgcagcagctggacctgaacaactgcaagaagaacctggagcccatccttgagggctacatcagcaacctgcggaagcagctggagacactgtctggggacagggtgaggctggactcggagctgagaagcatgagggatctggtggaggactataagaagagatatgaagtggagattaaccggcgcacgacagcagagaatgagtttgtggtgcttaagaaggatgcagatgcagcctacgcagtcaaggtggagcttcaggccaaagtggactcactggacaaagaaatcaagttcctcaagtgtctgtatgatgcagagatcgctcagatccagactcacgccagtgagacctctgtcatcctgtccatggacaacaaccgggacctggaccttgacagcatcatcgctgaggtccgcatgcattatgaggagatcgccctgaagagcaaggccgaggccgaggccctgtaccagaccaagatccaggagctgcagctggcagccagtcggcatggtgacgacctgaaacacaccaggagcgagatggtggagctgaaccggctcatccagaggatccggtgtgagatcgggaatgtgaagaagcagattttttctgtgtccaatgaacctgccccatgtcccctttggcgtgccagcctggagacggccatcgctgacgctgagcagcggggagacaatgccctgaaggatgcccaggccaagctggatgagctggagggcgccctgcaccaggccaaggaggagctggcgcggatgctgcgcgagtaccaggagctcatgagcctgaaactggccctggacatggagattgccacctaccgcaagctgctggagggcgaggagtgcaggatgtctggtgagaatccatcctctgtgagcatctctgtcatcagcagtagcagctacagctaccaccaccccagctctgcgggtgttgaccttggggccagcgctgtggcaggcagctctggcagcacccagagcgggcagaccaagaccacagaggcgcgagggggagacctcaaggacacccagggcaagagcaccccagccagcatcccagcaaggaaagccacccgctagacccatggcctcacccacctcagcacttggaagaagaggtgactttgccacccccaaaggtgtctgccacacccaagttcccaggccctgagttttaaaactgtctgtagtacactcaactgtctgcatcgtggtttagcttttactttcaagctctgattgacacagtcaccttccctgtttccttaggtcccatgtggactaacgacttctcattttcctcgctgcctttggctggcaggaggctttggaggcacaagccattataaccttcttggccctaaggaagctgtgatcatccctagaaagagggaaggagcaggagacgacaggggaggggctggtttgttctgtgcttaggccaagttagctactgtctgagaggttttacatcccctgccagcatggtggggtgacacgagacctgtaagcaggtggtgagaagttagacagcctttacttgctccatcagaaacaactttgcaggatgacgccaatatttaggacaccacgtgtacatctgtagaccaccagctgcacccatctccacaaagccaagtgaaggtgtattggggattctctgccagcctgtgtcacccacccacctccttcattatcagcaatagctaccatcatttgtcaagcacctactagatgccagacaccctacacatattgcctcctgttctcatccattcctgcaaagaagatgcaatgagcatccttggaacagactgggagcctgatcccaagaggctgctgaactggccccagtcacccacctatgtgccagagtcaggcctggccgacacaaggatctatgctttttctgtggtgtgtcactgcctttttaacaaaagggctgtcaaagtcaccattctttttgatgagggcagcgtaattacattgccttttgtcaggactgtgggtatgtgatttgtcttccacagtctctctggggctgtgtcctacatagcttctgactctcaatttttggtgccatgagctgagctcagtgagtggagctggcttttctgtcgctgagtgctactgcctagtccagatgtcgtggctcagggtgtaaatattcctaagaatggcagcatctatttcctcttttgtttgaattaaagactctgaatttctgctgtatattcattaagttgtccttgagtgttgtcagaggt

SEQ ID NO: 145485 - DNA, 2324 bp, Homo sapiens
  Payload ID: 8779
  Gene Symbol: KRT75
  Gene Name: keratin 75, type II
  Uniprot ID: O95678
  ENST ID: ENST00000252245
  CDS Start-End: 222-1877
agccagtggcccttacaccatttcccgagggatgccgagtgtgagctcagggttggcggatgcccagggaatgccatcagaaggccctctccactagcagtgccccgcccccacaggatgctcataaaagccacgagaccagggctctccagccacctgtcttctccactgcctgtaccagcccacctcaggtgccttctcgccggccttcctcacccaccatgtctcggcagtcctccatcaccttccagtctggcagccgcaggggcttcagcaccacctcggccatcaccccggcagctggccgctcccgcttcagctctgtctctgtggcccgctctgcagcagggagtgggggcctgggaaggatcagcagtgctggggccagctttggaagccgcagcctctacaacctggggggtgccaagcgggtctccatcaatgggtgtggcagcagctgccgaagtggctttggtggcagggccagcaacaggtttggagtcaacagtggatttggctatgggggtggagttggaggaggcttcagtggccccagcttccccgtgtgtccccctggaggcatccaagaggtcactgtcaaccagagtctcctgactcctcttcacctgcaaatcgaccccaccatccagcgggtgcgggccgaggagcgcgagcagatcaagaccctcaacaataagttcgcctccttcatcgacaaggtgaggttcttggagcagcagaacaaggtcctggagaccaagtgggccctcctgcaggagcagggctccaggactgtgaggcagaacctagagcccctctttgattcctataccagtgagctccgacggcagctggaaagcatcaccaccgagaggggcaggcttgaagctgaactgaggaacatgcaggatgttgtggaagatttcaaagtcaggtacgaagatgaaattaacaagcgcacagctgctgagaatgaatttgtagccctgaaaaaggacgtagatgctgcctatatgaacaaggtggagctggaagccaaggtcaaatctctgcccgaggagatcaacttcatccactcagtctttgatgcagagctgtcccagttgcagacccaggtcggtgacacatccgtggtgctgtccatggacaacaaccgcaacctggacctggatagtatcatcgccgaggtcaaagcacaatacgaggacattgccaaccgcagccgggccgaggctgagtcctggtaccagaccaagtacgaggagctgcaggtcaccgcaggcagacatggggatgaccttcgaaacaccaaacaagagatctctgaaatgaaccgcatgatccagaggctgagagctgagattgacagcgtcaagaagcagtgttccagcttgcaaacggccattgctgatgcagagcagcggggagaactggctctcaaggatgcacgggccaagctggtggaccttgaggaggccctgcagaaggccaagcaggacatggctcggctcctgcgtgagtaccaggagctgatgaacatcaagctggccctggacgtggagatcgccacctaccgcaagctgctggaaggcgaggagtgcaggttgagtggagagggagtttctccagttaacatttctgtggtcacctctactctttccagtggctatggaagcggcagcagcattggaggtggaaacctgggcctcggtgggggcagcggctactccttcaccaccagtggtgggcatagcctgggtgcaggcctgggaggttctggattcagtgccaccagcaaccggggcttagggggcagtggttctagcgtcaagtttgtctccaccacatcctccagccagaagagctacacgcactaagagagccccatggctccctctaccctgccttgaggcctgtttgcagtcacacctggacaccagggtcctcctccttcctctctccttgtaaggtgcacctgtgctgctgggagcctggagtactggctatacccattcccaggcctaagccagcctctccctcctgacagtgcccagactgccagcagcacccgtctgttacacatgtgaaaccaaagcctgctctctcctaaggctctcattcagcctatcttgcgaggcccgggcagctggaaagtcctcctccagctccacctccctccctccctccagatgcagaggctggggagtctctcaatgccaggttgtcacccacctgtctcatagtgtttataagtggcctgctgggagtgagtgctccctctgttccctccctggaatgtgtctattaaatgcatgtgtcacctg

SEQ ID NO: 145486 - DNA, 2529 bp, Homo sapiens
  Payload ID: 8780
  Gene Symbol: KRT76
  Gene Name: keratin 76, type II
  Uniprot ID: Q01546
  ENST ID: ENST00000332411
  CDS Start-End: 55-1971
atccctctcagctcttgctaagtgatcactagcttgcctccaagctctctcactatgaacagacaagtttgcaagaaatccttcagtggcaggagccagggtttctctggccgctctgctgtggtctccggcagcagcaggatgagctgtgtggcccgctctgggggagctggtggaggggcctgtggcttcaggagcggagcaggcagctttggcagtcgcagcctctacaacctgggcagcaacaagagcatctccatcagcgtggcagctggcagctcccgggctggaggctttgggggagggcggagcagctgtggctttgcaggtggctatggaggtggctttgggggcagctatggtggtggctttggtggtggcagaggagtaggtagtggttttggaggggctggtggctttggtggagctggtggctttggtggtcctggtgtatttggtgggcctggcagctttggtggtcctggtggctttggccctgggggctttcctgggggaattcaggaagtgattgtaaaccagagtctcctgcagcccctcaatgtggagatcgacccccagattgggcaagtaaaggcccaggagcgggaacagatcaagaccctcaacaacaagtttgcctccttcatcgacaaggtgcggttcctggaacagcagaacaaggtcctggagaccaagtgggaactgctccagcagcagaccacaggctcagggcccagcagcctggagccttgttttgaatcctacatcagcttcctatgcaagcagctagattcacttctaggggagagggggaacctggagggagagctgaaaagcatgcaggacctggtggaagacttcaaaaagaagtatgaagatgaaatcaacaaacgcactgccgcagagaatgagtttgtggggctcaagaaggatgtggatgcggctttcatgaacaaggtggagctgcaggccaaagtggacagcctgacagatgaagtcagcttcctgaggaccctctatgagatggagctgtcccagatgcaaagccatgccagtgacacgtctgtggttctgtccatggacaacaaccgctgcctggacctgggcagcatcattgccgaggtccgcgcccagtatgaggagattgcccagaggagcaagtctgaagctgaggccctgtaccagaccaagcttggggagctgcagaccacagctggcaggcatggggatgacctgaggaacaccaagagtgagatcatggagctcaacaggatgatccagaggctacgggctgagattgaaaatgtcaagaagcagaatgccaacctgcagacggcaattgcagaggctgagcagcgtggagagatggccctcaaggacgccaatgccaagctccaagacttgcagactgccctacagaaggctaaggatgacctggctcggctcctgcgtgactaccaggagctgatgaacgtcaagctggccctggatgtggagattgccacctaccgcaagctgctggagggagaggagtgcaggatgtctggagaatgtcagagtgccgtgtgcatttcagtggtcagcaatgtcaccagcacaagtggcagctctggcagtagccgtggagtttttggaggggtcagtggcagtggcagtggtggctacaaaggcggcagcagcagcagcagcagcagtggctatggagtcagtggcggcagcggcagtggctatggaggggtcagcagtggcagcactgggggcaggggtagcagcgggagctaccagagcagcagtagtgggagcaggctcggcggtgcaggtagcatctccgtgagccacagtggaatgggctccagctctggcagcatccagacttctggaggaagtggctacaagtctggtggtggaggcagcaccagtatccgcttctcccagaccacgagctcaagccagcatagctccaccaagtgatctactgttccaaatctctataaccacctgcttcccactcagcctgcaatagtgtttcccactctctgcttggcatcaatagatgcataagggtcaaccacatttttcctcaagttccctggagaagaagctgaactcctggtttctccatccccatgaccttcccagggccatggaggtcctgctgctggtctgggatgatgatgcccctggaaaccttcctgcaatggccccttactttggacagcaacccctgagcccaagccagttttggccttcacagcctggcctgttcccactctggcccatctccctttcttactgggagttggagatttgaagccagtcatctcagcactgtctgaggagggcagagccatgggttctgtgctggagggtgcacggccaagatctccagactgctggttcccagggaaccctccctacatctgggcttcagatcctgactcccttctgtcccctaattccctgagctgtagatcctctggtgatgagtatgttgcactttcttttctcaataaattgcactgaacttca

SEQ ID NO: 145487 - DNA, 3305 bp, Homo sapiens
  Payload ID: 8781
  Gene Symbol: KRT77
  Gene Name: keratin 77, type II
  Uniprot ID: Q7Z794
  ENST ID: ENST00000341809
  CDS Start-End: 30-1766
tgcctgcttctctggatgctccagcaaacatgagccaccaatttagttctcagtccgcgtttagttcaatgagcaggcgggtttatagtaccagctcttctgcaggctctggtggtgggagtccggcagtgggttctgtgtgttatgctcgagggaggtgtggtggtggtggatatgggatccatggaagggggtttggctctaggagcctctacaatctgggtggcagtagaagcatctccattaatctaatggggaggagcaccagtggtttctgccagggtgggggagtagggggatttggagggggcagaggctttggggttggcagcaccggggctggtggctttggaggaggtggttttgggggtgctggatttgggactagcaattttgggcttgggggctttggtccttattgtcctcctgggggcatccaagaggtgaccattaaccagagcctcctagagccacttcacctggaggtggaccctgaaattcagaggatcaagacccaggagcgggagcagattatggttctcaacaacaagtttgcctccttcattgacaaggtgcgattcctggagcagcagaaccaggtgctacaaacaaaatgggagttgctgcagcaggtgaacacctcaactggaaccaacaacctggagcccctcttggagaactacatcggtgacctgcggaggcaggtggatttgctcagtgcggagcagatgcgccagaacgcggaggtcaggagcatgcaggatgtcgtggaggactacaagagcaagtatgaggatgaaatcaacaagaggactggcagcgagaatgactttgtcgtcctgaagaaggatgtggatgctgcttatgtgagcaaagtggacctggagtccagggtggacactctgactggggaggtcaatttcttgaaatatttatttttgacggagctgtctcaggtgcagactcacatcagcgacaccaacgtcatcctgtccatggacaataaccgttccctggacctggacagcatcatcgatgcagtgcggacccagtatgaactgattgcacagaggagcaaggacgaggccgaagccctgtaccagaccaagtaccaggagctccagatcacggcagggagacatggagacgacctgaagaacagcaagatggagattgcagagctcaaccgcaccgtccagaggctgcaggcagagatcagcaacgtgaagaagcagattgaacagatgcagtcactcatttcggatgctgaggagagaggcgagcaggccctccaggatgcgtggcagaagctgcaggacctggaggaggccctgcagcagtccaaggaggagctggcccggctgctgcgtgactaccaggccatgctgggggtcaagctgtccctggatgtggagatcgccacctaccgccagctgctggagggcgaggagagcaggatgtcaggagagctgcagagccatgtgagcatctccgtgcagaacagccaggtgagcgtcaacggcggcgcgggaggcggcggcagctacggctcaggaggctacggcggcggcagcggtgggggctatggcggcggaagaagctaccgcggaggcggggcacgaggcaggagtggaggcggttatggcagcggctgcggcggcggtggcgggagctacggagggagcggcagaagcggccgcggatcctcgcgcgtgcagatcatccagacctccaccaacacctcccacaggcggatcttggagtagaggcctcgtttctgccacacatcacgcctgcccctcaccgccctctcctcaaactcctcccctccacgcccttcctgatcccctctcattcacttttcttaatgggtctcagcaattttgccaataaattcgactctaatgggggaagcagggtggataagtccaaacagcagatctctctttggagggcactggcttgcagtcagattcacagctaggcacattctcactcagaccccgctctgctggccctgctgctgttcctgctcccacctttttggaagatcggtagcccagggtgagcacaaacattccagttagaggcagaggctgcgtgagttggcaaggtagggagaagtcattgttatcattcctctgcctccaagtagaatgcccttatgccccagttcaagccactgcagctaagtattaatccccagtgctaaaagataccaggcatctagtttagcaatggagggaaacagaaacagcctgtagagagcatcgacaaggcgcataatggagagttggtatctcaaccccaagctccctttgctgtacctgggctgctctgtgaacaagaatccacgcccccctgccctgctggggaccacataatgatccctttgggggaagttgctgattgcagggcaagctagcttggtaaggaaaacctctgcaccagcggcctattcctgcctcttggtccatagcctcatacactcatgttgatggatagtatagatttgctgcccacaccagatatctgtaaggcatcactgtcctgattctgaacctctgtttcaggaagcattctcccctgtgtaaacaactcaaggtggaagtatttcagagggcatagggtcatgaatccttacccaaaggaagcctgttttagcagtggatgcaggagttgatgaacagacaagcaagttctgcttctgtcctgtttcctcctgacagctccattcttttgaagcctgacccttcctaagctctgcatcataaccactctgagaattgccccattgggtgggcatgtgaagcccagctctgttccatccaggtgcctcgggcctgaggagtctgaggatctgacttgggtcttggaagggttccaaccccaagtcagtcaggaagctgcccatttttttgcaaggcattttaatgccctttcccagacctctctagtccctcctgccttctgttctctgtagctgtgagccctttgtgagaatatgactcttaattttgaatcttatgtaagaggcttgagatgtgctggagagggcaggaagaggaaagtatcaggccttgagagagggaatgtagctttgcttctatgatctggagtcaccttcacttgctagctgagtcctaacacaacttccaagtccatgattctcttggggcattggatgggctcagtgtgggtctcttaggctgttcttgtgacttcatcatttcctggttcaaagttgtactgtcaaggggcagcatttctggtatttctataataaatttttctgtgatctcaaa

SEQ ID NO: 145488 - DNA, 2212 bp, Homo sapiens
  Payload ID: 8781
  Gene Symbol: KRT77
  Gene Name: keratin 77, type II
  ENST ID: ENST00000553168
  CDS Start-End: 30-776
tgcctgcttctctggatgctccagcaaacatgagccaccaatttagttctcagtccgcgtttagttcaatgagcaggcgggtttatagtaccagctcttctgcaggctctggtggtgggagtccggcagtgggttctgtgtgttatgctcgagggaggtgtggtggtggtggatatgggatccatggaagggggtttggctctaggagcctctacaatctgggtggcagtagaagcatctccattaatctaatggggaggagcaccagtggtttctgccagggtgggggagtagggggatttggagggggcagaggctttggggttggcagcaccggggctggtggctttggaggaggtggttttgggggtgctggatttgggactagcaattttgggcttgggggctttggtccttattgtcctcctgggggcatccaagaggtgaccattaaccagagcctcctagagccacttcacctggaggtggaccctgaaattcagaggatcaagacccaggagcgggagcagattatggttctcaacaacaagtttgcctccttcattgacaagagaaaggaaccttggggtcatcagtgtctcagatgctccgaaacaccatttccttacgttggcatggataaattgagtgtggagggtgcgattcctggagcagcagaaccaggtgctacaaacaaaatgggagttgctgcagcaggtgaacacctcaactggaaccaacaacctggagcccctcttggagaactacatcggtgacctgcggaggcaggtggatttgctcagtgcggagcagatgcgccagaacgcggaggtcaggagcatgcaggatgtcgtggaggactacaagagcaagtatgaggatgaaatcaacaagaggactggcagcgagaatgactttgtcgtcctgaagaaggatgtggatgctgcttatgtgagcaaagtggacctggagtccagggtggacactctgactggggaggtcaatttcttgaaatatttatttttgacggagctgtctcaggtgcagactcacatcagcgacaccaacgtcatcctgtccatggacaataaccgttccctggacctggacagcatcatcgatgcagtgcggacccagtatgaactgattgcacagaggagcaaggacgaggccgaagccctgtaccagaccaagtaccaggagctccagatcacggcagggagacatggagacgacctgaagaacagcaagatggagattgcagagctcaaccgcaccgtccagaggctgcaggcagagatcagcaacgtgaagaagcagattgaacagatgcagtcactcatttcggatgctgaggagagaggcgagcaggccctccaggatgcgtggcagaagctgcaggacctggaggaggccctgcagcagtccaaggaggagctggcccggctgctgcgtgactaccaggccatgctgggggtcaagctgtccctggatgtggagatcgccacctaccgccagctgctggagggcgaggagagcaggatgtcaggagagctgcagagccatgtgagcatctccgtgcagaacagccaggtgagcgtcaacggcggcgcgggaggcggcggcagctacggctcaggaggctacggcggcggcagcggtgggggctatggcggcggaagaagctaccgcggaggcggggcacgaggcaggagtggaggcggttatggcagcggctgcggcggcggtggcgggagctacggagggagcggcagaagcggccgcggatcctcgcgcgtgcagatcatccagacctccaccaacacctcccacaggcggatcttggagtagaggcctcgtttctgccacacatcacgcctgcccctcaccgccctctcctcaaactcctcccctccacgcccttcctgatcccctctcattcacttttcttaatgggtctcagcaattttgccaataaattcgactctaatgggggaagcagggtggataagtccaaacagcagatctctctttggagggcactggcttgcagtcagattcacagctaggcacattctcactcagaccccgctctgctggccctgctgctgttcctgctcccacctttttggaagatcggtagcccagggtgagcacaaacattccagttagaggcagaggctgcgtgagttggcaaggtagggagaagtca

SEQ ID NO: 145489 - DNA, 1778 bp, Homo sapiens
  Payload ID: 8782
  Gene Symbol: KRT78
  Gene Name: keratin 78, type II
  Uniprot ID: Q8N1N4
  ENST ID: ENST00000304620
  CDS Start-End: 65-1627
agaaactcacacaccttgacaatctgtctgtccgtctgcagctgcgtgactgtctgtctctgccatgtctctctccccatgccgggcccagaggggcttcagcgctcgctcagcctgttctgctcgctcaaggggccgcagcaggggaggcttcagcagcaggggcggcttcagcagcaggagccttaattcctttggggggtgcctggaaggctctcgtgggagtacctgggggtcagggggtaggctgggggtgcggtttggggagtggagtggtgggcctgggctctccctgtgccctccggggggcatccaagaagtgaccatcaaccagaatctgctgaccccactgaagattgagatcgatccccagttccaggtggtgcggacgcaggagacccaggagatcagaaccctcaacaaccagtttgcttccttcattgacaaggtgcggttcctggagcagcagaacaaggtcctggagacgaagtggcatctgctgcagcaacaggggttgagtggcagccagcagggcctggagcctgtctttgaggcctgcctggatcagctcaggaagcagctggagcagctccagggagaacgaggggctctggatgctgagttgaaggcctgccgggaccaggaggaggagtataagtccaagtatgaggaggaggcccacaggcgtgccacacttgagaacgactttgtggtcctcaagaaggatgtggatggggttttcctgagcaagatggagttggagggcaagctggaggctctgagagagtacctctacttcttgaagcatctgaatgaagaagagctgggccagctccagacccaggccagcgacacgtctgtggtgctgtccatggacaacaaccgctacctggacttcagcagcatcatcactgaggtccgcgcccggtacgaggagatcgcccggagcagcaaggctgaggctgaggccttgtaccagaccaagtaccaggaacttcaggtgtctgcccagcttcatggggacaggatgcaggaaacgaaagtccagatctctcagctacaccaagagattcagaggctgcagagtcagactgagaacctcaagaagcagaacgccagcctgcaggccgccatcactgatgctgagcagcgtggggagctggccctcaaggacgctcaggccaaggtggacgagctggaggctgctctgaggatggccaagcagaacctggcccggctgctgtgcgagtaccaggagctgacgagcacgaagctttccctggatgtggagattgccacttaccgcaggctgctggagggcgaggagtgcaggatgtctggggagtgcaccagccaggtcactatctcctcggtgggaggcagcgctgtcatgtctggaggagttggtggaggcttggggagcacttgtggactcggtagtgggaaaggcagccctgggtcctgctgcaccagcattgtgactggaggctccaacatcattctgggctctgggaaggaccctgttttggattcctgctctgtgtctggctccagcgctggctccagctgccacaccatcctgaagaagacagttgagtcgagtctgaagacatccatcacctactgagcgacccagcagccacctccttcctgaacacatttggcccactccccccatcagccggctctgcaaggccaactccgtgtccgctgcccacagcccaagccagcccacagcggatgctgcaaaaatcaataaagtctcccctcctgctgtt

SEQ ID NO: 145490 - DNA, 2554 bp, Homo sapiens
  Payload ID: 8782
  Gene Symbol: KRT78
  Gene Name: keratin 78, type II
  Uniprot ID: Q8N1N4
  ENST ID: ENST00000359499
  CDS Start-End: 13-1245
gttcagagtgtcatggaaggtcatgaggcttcccctgcccaggttgggcagggggacaggggaaaggtgcggttcctggagcagcagaacaaggtcctggagacgaagtggcatctgctgcagcaacaggggttgagtggcagccagcagggcctggagcctgtctttgaggcctgcctggatcagctcaggaagcagctggagcagctccagggagaacgaggggctctggatgctgagttgaaggcctgccgggaccaggaggaggagtataagtccaagtatgaggaggaggcccacaggcgtgccacacttgagaacgactttgtggtcctcaagaaggatgtggatggggttttcctgagcaagatggagttggagggcaagctggaggctctgagagagtacctctacttcttgaagcatctgaatgaagaagagctgggccagctccagacccaggccagcgacacgtctgtggtgctgtccatggacaacaaccgctacctggacttcagcagcatcatcactgaggtccgcgcccggtacgaggagatcgcccggagcagcaaggctgaggctgaggccttgtaccagaccaagtaccaggaacttcaggtgtctgcccagcttcatggggacaggatgcaggaaacgaaagtccagatctctcagctacaccaagagattcagaggctgcagagtcagactgagaacctcaagaagcagaacgccagcctgcaggccgccatcactgatgctgagcagcgtggggagctggccctcaaggacgctcaggccaaggtggacgagctggaggctgctctgaggatggccaagcagaacctggcccggctgctgtgcgagtaccaggagctgacgagcacgaagctttccctggatgtggagattgccacttaccgcaggctgctggagggcgaggagtgcaggatgtctggggagtgcaccagccaggtcactatctcctcggtgggaggcagcgctgtcatgtctggaggagttggtggaggcttggggagcacttgtggactcggtagtgggaaaggcagccctgggtcctgctgcaccagcattgtgactggaggctccaacatcattctgggctctgggaaggaccctgttttggattcctgctctgtgtctggctccagcgctggctccagctgccacaccatcctgaagaagacagttgagtcgagtctgaagacatccatcacctactgagcgacccagcagccacctccttcctgaacacatttggcccactccccccatcagccggctctgcaaggccaactccgtgtccgctgcccacagcccaagccagcccacagcggatgctgcaaaaatcaataaagtctcccctcctgctgttctgaatgctctaagtgcttgcacacctcacccagcaaaacaaaagctgtgtggctccccagcttcctctcctcggaaggcaattgtggcatatctgtgtccagacgtgttctattggtatctcactccacatcccagccactctatcaagggatccttcaagctctccagtgtgttccttggggtgccctccatctcccacaactccactgatgttttagctgtgcttgtagctcacttcctcatcaactgcctgttttaagaggttctagtcctgactggggcagcccccttccttcttgttcctccttcttcctgactgtgcaccaaaattttctccttttaggaaccttctctaattcccatgtctaaactactgggcccttcctgtccctggcagtctggctgcacctgttgctgtcctgggtgctatgtctgtctggctctggtaagggactcagcttctctattagcctggcactcctgcatccaggatgaggatgtgctcagcttgtgcctgggggctctgatggagattggggttcaaactctgcccctacccccttatctgttggctctcatcttatccttgggcaagtgtgaacatgaggctggaaacttctcctccttcctctccttcaggaagctctgcaggaagccaggagtgtgggaatcaggtggggtgccaggaggggctggaaggatcaccttttctacacacccccagcagcctcatgggtgcctgcagttgctctttccccattctcgctttccagacccaggtgggggacctggctcaaccccaaactccatagtctgggctgcaggaggtcacactacgcctctccttgctttagagggagggcagacctttcctcagattcatgaatcgctccatccaaattatgcaagaaggcttttcagctttgtgtgaaggagaccagagccggtgaggatgtggcttgaatcccagctctgctgtttcctagtggtgtgaccttgatcaagcagcttgacctcttcagttacctcatctgtaaaaagagattaataataatatgtacctcacagggctgtgtggcgacagtgccactaggatcccagaaggaaactaaattcatccaaggtagttcaattaaattgactttttgaaaaagta

SEQ ID NO: 145491 - DNA, 458 bp, Homo sapiens
  Payload ID: 8782
  Gene Symbol: KRT78
  Gene Name: keratin 78, type II
  ENST ID: ENST00000547920
  CDS Start-End: 1-124
ggatgtggagattgccacttaccgcaggctgctggagggcgaggagtgcagcctcggtgggaggcagcgctgtcatgtctggaggagttggtggaggcttggggagcacttgtggactcggtagtgggaaaggcagccctgggtcctgctgcaccagcattgtgactggaggctccaacatcattctgggctctgggaaggaccctgttttggattcctgctctgtgtctggctccagcgctggctccagctgccacaccatcctgaagaagacagttgagtcgagtctgaagacatccatcacctactgagcgacccagcagccacctccttcctgaacacatttggcccactccccccatcagccggctctgcaaggccaactccgtgtccgctgcccacagcccaagccagcccacagcggatgctgcaaaaatcaataaagtctcccctcctgc

SEQ ID NO: 145492 - DNA, 2068 bp, Homo sapiens
  Payload ID: 8783
  Gene Symbol: KRT79
  Gene Name: keratin 79, type II
  Uniprot ID: Q5XKE5
  ENST ID: ENST00000330553
  CDS Start-End: 36-1643
gccctctcatcctgccctccggcccctctgcagctatgaggtcctccgtctctcggcaaacatactccacaaaagggggcttcagctccaactctgccagcggagggagtgggtcccaggcccgcaccagcttcagctcagtgacggtgtctcggagcagtggcagtggtggcggggcccactgtggccccggcacaggtggctttggcagccgaagcctctataacttggggggccacaagagtatctctgtcagtgtggccggaggggccttgttggggcgggctctggggggctttggctttggcagcagggcatttatgggacagggggctggcaggcagacgtttgggcctgcttgtcctcctggggggatccaggaggtcactgtcaaccagagcctgctgacccccctccatgtggagattgaccccgagatccagcgagtgcgcactcaggagcgggagcagatcaagaccctcaacaacaagttcgcctccttcatcgacaaggtgcggttcctggagcaacagaataaggtgctggagaccaagtgggcactgctgcaggagcagggccagaacttgggtgtcaccaggaacaacctggagcccctctttgaggcctacctgggtagcatgcggagcacgctggacagacttcagagcgagcgggggaggctggactcagagctcaggaacgtgcaggaccttgtggaggacttcaagaacaagtacgaggatgaaatcaacaagcacactgctgcagagaacgagtttgtggtgctcaagaaggatgtggatgcagcatacatgggccggatggatctgcatggcaaagtgggcaccttgacccaggagattgacttcctgcagcaactctatgaaatggagctgagccaagtgcagacccacgtgtctaacaccaatgtggtgctgtccatggacaacaaccgcaacctggacctggacagcatcatcgccgaggtcaaggcccagtatgagctgattgcccagaggagccgggctgaggccgaggcctggtaccagaccaagtatgaggagctgcaggtgactgctgggaagcatggggacaacctgcgggacaccaagaacgagattgctgagctcacccgcactatccagaggctgcagggggaggctgatgcagccaagaagcagtgtcagcagctgcagacggccattgcggaagcggagcagcgtggggagctggcactcaaggatgctcagaagaagcttggggatctggatgtggccctgcaccaggccaaggaggacctgacacggctgctgcgtgactaccaggagctgatgaatgtcaagctggccctggacgtggagattgccacctaccgcaagcttctggagagcgaggagagcaggatgtctggagaatgtcccagtgcagtcagcatttctgtgactggcaactccaccactgtgtgcggaggtggcgcagccagctttggaggtggcatctccctgggtgggagtgggggggccaccaagggtggattcagcacaaatgtgggctatagcaccgtcaagggagggccagtctctgcgggcacctccatcctgcggaagaccactacggtcaagacgtccagccagaggtattagctgctgagccctgcaagggcccctgcaatcctgtccctgccctcctcaccccacctctgctgtcctttccagtcacttctcaggagcaggaacagccaggggacctcagacccagggtattttcataccagactatttgcatcttgggaagcgctcaaatctactcaggttttctccttggtcctgcagtaggatgggagggaaggttaaagttgccagcttgagtgatgtgcttgggtgacttgggggtgaccttttgaccaccgagaggaggctgaatttctcaagccattaggagagagagaaattgggagtggtccccaaagacccttcaacctccccagtcccccaccagacccaccctctccctgaatctacccacatcccccttccctgtctgtgtctcaataaatggtgcaactgca

SEQ ID NO: 145493 - DNA, 761 bp, Homo sapiens
  Payload ID: 8783
  Gene Symbol: KRT79
  Gene Name: keratin 79, type II
  ENST ID: ENST00000549255
  CDS Start-End: 1-360
ctgcaccaggccaaggaggacctgacacggctgctgcgtgactaccaggagctgatgaatgtcaagctggccctggacgtggagattgccacctaccgcaagcttctggagagcgaggagagcaggatgtctggagaatgtcccagtgcagtcagcatttgtgagtatttactccccacttcctgctccacccctggccaggccccagaactctgctcagtttatgcaacctgtacctgtcctaaagcatgctctcctccattcgagcccctggagacaggttcagagggtcctagttctgggcttctctatccatttcccatagctctgctgcttgattttgttctgattccccactgatttctgggtctcccccagccctctctggcatggccgccctgactaatccagaccctttgctttgcagctgtgactggcaactccaccactgtgtgcggaggtggcgcagccagctttggaggtggcatctccctgggtgggagtgggggggccaccaagggtggattcagcacaaatgtgggctatagcaccgtcaagggagggccagtctctgcgggcacctccatcctgcggaagaccactacggtcaagacgtccagccagaggtattagctgctgagccctgcaagggcccctgcaatcctgtccctgccctcctcaccccacctctgctgtcctttccagtcacttctcaggagcaggaacagccaggggacctcagacccagggtattttcatac

SEQ ID NO: 145494 - DNA, 1882 bp, Homo sapiens
  Payload ID: 8784
  Gene Symbol: KRT8
  Gene Name: keratin 8, type II
  Uniprot ID: P05787
  ENST ID: ENST00000293308
  CDS Start-End: 197-1648
gacctaaacctcctgccttccacccacagcatgccctgcctggccccacccaggcctggggtgccttgctcagctccccaatctccaacctcccacaggccattcctgagagctctcctcaccaagaagcagcttctccgctccttctaggatctccgcctggttcggcccgcctgcctccactcctgcctctaccatgtccatcagggtgacccagaagtcctacaaggtgtccacctctggcccccgggccttcagcagccgctcctacacgagtgggcccggttcccgcatcagctcctcgagcttctcccgagtgggcagcagcaactttcgcggtggcctgggcggcggctatggtggggccagcggcatgggaggcatcaccgcagttacggtcaaccagagcctgctgagcccccttgtcctggaggtggaccccaacatccaggccgtgcgcacccaggagaaggagcagatcaagaccctcaacaacaagtttgcctccttcatagacaaggtacggttcctggagcagcagaacaagatgctggagaccaagtggagcctcctgcagcagcagaagacggctcgaagcaacatggacaacatgttcgagagctacatcaacaaccttaggcggcagctggagactctgggccaggagaagctgaagctggaggcggagcttggcaacatgcaggggctggtggaggacttcaagaacaagtatgaggatgagatcaataagcgtacagagatggagaacgaatttgtcctcatcaagaaggatgtggatgaagcttacatgaacaaggtagagctggagtctcgcctggaagggctgaccgacgagatcaacttcctcaggcagctatatgaagaggagatccgggagctgcagtcccagatctcggacacatctgtggtgctgtccatggacaacagccgctccctggacatggacagcatcattgctgaggtcaaggcacagtacgaggatattgccaaccgcagccgggctgaggctgagagcatgtaccagatcaagtatgaggagctgcagagcctggctgggaagcacggggatgacctgcggcgcacaaagactgagatctctgagatgaaccggaacatcagccggctccaggctgagattgagggcctcaaaggccagagggcttccctggaggccgccattgcagatgccgagcagcgtggagagctggccattaaggatgccaacgccaagttgtccgagctggaggccgccctgcagcgggccaagcaggacatggcgcggcagctgcgtgagtaccaggagctgatgaacgtcaagctggccctggacatcgagatcgccacctacaggaagctgctggagggcgaggagagccggctggagtctgggatgcagaacatgagtattcatacgaagaccaccagcggctatgcaggtggtctgagctcggcctatgggggcctcacaagccccggcctcagctacagcctgggctccagctttggctctggcgcgggctccagctccttcagccgcaccagctcctccagggccgtggttgtgaagaagatcgagacacgtgatgggaagctggtgtctgagtcctctgacgtcctgcccaagtgaacagctgcggcagcccctcccagcctacccctcctgcgctgccccagagcctgggaaggaggccgctatgcagggtagcactgggaacaggagacccacctgaggctcagccctagccctcagcccacctggggagtttactacctggggaccccccttgcccatgcctccagctacaaaacaattcaattgctttttttttttggtccaaaataaaacctcagctagctctgc

SEQ ID NO: 145495 - DNA, 918 bp, Homo sapiens
  Payload ID: 8784
  Gene Symbol: KRT8
  Gene Name: keratin 8, type II
  ENST ID: ENST00000548998
  CDS Start-End: 51-918
cctcccatgcctagctgctgctcttagggaccctgtggctaggtgcgcggatggaaatccagtgctcccggattttgctctccagcctccggttctcggtctccaggctcctcactctgtccaggatctccgcctggttcggcccgcctgcctccactcctgcctctaccatgtccatcagggtgacccagaagtcctacaaggtgtccacctctggcccccgggccttcagcagccgctcctacacgagtgggcccggttcccgcatcagctcctcgagcttctcccgagtgggcagcagcaactttcgcggtggcctgggcggcggctatggtggggccagcggcatgggaggcatcaccgcagttacggtcaaccagagcctgctgagcccccttgtcctggaggtggaccccaacatccaggccgtgcgcacccaggagaaggagcagatcaagaccctcaacaacaagtttgcctccttcatagacaaggtacggttcctggagcagcagaacaagatgctggagaccaagtggagcctcctgcagcagcagaagacggctcgaagcaacatggacaacatgttcgagagctacatcaacaaccttaggcggcagctggagactctgggccaggagaagctgaagctggaggcggagcttggcaacatgcaggggctggtggaggacttcaagaacaagtatgaggatgagatcaataagcgtacagagatggagaacgaatttgtcctcatcaagaaggatgtggatgaagcttacatgaacaaggtagagctggagtctcgcctggaagggctgaccgacgagatcaacttcctcaggcagctatatgaagaggagatccgggagctgcagtcccagatctcggacacatctgtggtgctgtccatggaca

SEQ ID NO: 145496 - DNA, 1755 bp, Homo sapiens
  Payload ID: 8784
  Gene Symbol: KRT8
  Gene Name: keratin 8, type II
  Uniprot ID: P05787
  ENST ID: ENST00000546897
  CDS Start-End: 157-1608
gtaaagctctcaaccctgtccccttccccctctctcctgggaaagagccctcccatgcctagctgctgctcttagggaccctgtggctaggtgcgcggatggaaatccaggatctccgcctggttcggcccgcctgcctccactcctgcctctaccatgtccatcagggtgacccagaagtcctacaaggtgtccacctctggcccccgggccttcagcagccgctcctacacgagtgggcccggttcccgcatcagctcctcgagcttctcccgagtgggcagcagcaactttcgcggtggcctgggcggcggctatggtggggccagcggcatgggaggcatcaccgcagttacggtcaaccagagcctgctgagcccccttgtcctggaggtggaccccaacatccaggccgtgcgcacccaggagaaggagcagatcaagaccctcaacaacaagtttgcctccttcatagacaaggtacggttcctggagcagcagaacaagatgctggagaccaagtggagcctcctgcagcagcagaagacggctcgaagcaacatggacaacatgttcgagagctacatcaacaaccttaggcggcagctggagactctgggccaggagaagctgaagctggaggcggagcttggcaacatgcaggggctggtggaggacttcaagaacaagtatgaggatgagatcaataagcgtacagagatggagaacgaatttgtcctcatcaagaaggatgtggatgaagcttacatgaacaaggtagagctggagtctcgcctggaagggctgaccgacgagatcaacttcctcaggcagctatatgaagaggagatccgggagctgcagtcccagatctcggacacatctgtggtgctgtccatggacaacagccgctccctggacatggacagcatcattgctgaggtcaaggcacagtacgaggatattgccaaccgcagccgggctgaggctgagagcatgtaccagatcaagtatgaggagctgcagagcctggctgggaagcacggggatgacctgcggcgcacaaagactgagatctctgagatgaaccggaacatcagccggctccaggctgagattgagggcctcaaaggccagagggcttccctggaggccgccattgcagatgccgagcagcgtggagagctggccattaaggatgccaacgccaagttgtccgagctggaggccgccctgcagcgggccaagcaggacatggcgcggcagctgcgtgagtaccaggagctgatgaacgtcaagctggccctggacatcgagatcgccacctacaggaagctgctggagggcgaggagagccggctggagtctgggatgcagaacatgagtattcatacgaagaccaccagcggctatgcaggtggtctgagctcggcctatgggggcctcacaagccccggcctcagctacagcctgggctccagctttggctctggcgcgggctccagctccttcagccgcaccagctcctccagggccgtggttgtgaagaagatcgagacacgtgatgggaagctggtgtctgagtcctctgacgtcctgcccaagtgaacagctgcggcagcccctcccagcctacccctcctgcgctgccccagagcctgggaaggaggccgctatgcagggtagcactgggaacaggagacccacctgaggctcagccctagccctcagcccacctggggagtttactacctg

SEQ ID NO: 145497 - DNA, 2126 bp, Homo sapiens
  Payload ID: 8784
  Gene Symbol: KRT8
  Gene Name: keratin 8, type II
  Uniprot ID: P05787
  ENST ID: ENST00000552551
  CDS Start-End: 434-1885
atgctgtccacttcctctgtaaagctctcaaccctgtccccttccccctctctcctgggaaagagccctcccatgcctagctgctgctcttagggaccctgtggctaggtgcgcggatggaaatccaggtatgcccaaccccctcccggtggagtaggggttgggtggttatggaatgacggaaagaggcaaaggagtgtataattggagggtcagacaaggctgggagttgaggtccctcctaccccttacctgagccctcaggtcctcgatgatcttgaagtaatggctccagtctctgacctggggtcccttcttctccaagtgctcccggattttgctctccagcctccggttctcggtctccaggctcctcactctgtccaggatctccgcctggttcggcccgcctgcctccactcctgcctctaccatgtccatcagggtgacccagaagtcctacaaggtgtccacctctggcccccgggccttcagcagccgctcctacacgagtgggcccggttcccgcatcagctcctcgagcttctcccgagtgggcagcagcaactttcgcggtggcctgggcggcggctatggtggggccagcggcatgggaggcatcaccgcagttacggtcaaccagagcctgctgagcccccttgtcctggaggtggaccccaacatccaggccgtgcgcacccaggagaaggagcagatcaagaccctcaacaacaagtttgcctccttcatagacaaggtacggttcctggagcagcagaacaagatgctggagaccaagtggagcctcctgcagcagcagaagacggctcgaagcaacatggacaacatgttcgagagctacatcaacaaccttaggcggcagctggagactctgggccaggagaagctgaagctggaggcggagcttggcaacatgcaggggctggtggaggacttcaagaacaagtatgaggatgagatcaataagcgtacagagatggagaacgaatttgtcctcatcaagaaggatgtggatgaagcttacatgaacaaggtagagctggagtctcgcctggaagggctgaccgacgagatcaacttcctcaggcagctatatgaagaggagatccgggagctgcagtcccagatctcggacacatctgtggtgctgtccatggacaacagccgctccctggacatggacagcatcattgctgaggtcaaggcacagtacgaggatattgccaaccgcagccgggctgaggctgagagcatgtaccagatcaagtatgaggagctgcagagcctggctgggaagcacggggatgacctgcggcgcacaaagactgagatctctgagatgaaccggaacatcagccggctccaggctgagattgagggcctcaaaggccagagggcttccctggaggccgccattgcagatgccgagcagcgtggagagctggccattaaggatgccaacgccaagttgtccgagctggaggccgccctgcagcgggccaagcaggacatggcgcggcagctgcgtgagtaccaggagctgatgaacgtcaagctggccctggacatcgagatcgccacctacaggaagctgctggagggcgaggagagccggctggagtctgggatgcagaacatgagtattcatacgaagaccaccagcggctatgcaggtggtctgagctcggcctatgggggcctcacaagccccggcctcagctacagcctgggctccagctttggctctggcgcgggctccagctccttcagccgcaccagctcctccagggccgtggttgtgaagaagatcgagacacgtgatgggaagctggtgtctgagtcctctgacgtcctgcccaagtgaacagctgcggcagcccctcccagcctacccctcctgcgctgccccagagcctgggaaggaggccgctatgcagggtagcactgggaacaggagacccacctgaggctcagccctagccctcagcccacctggggagtttactacctggggaccccccttgcccatgcctccagctacaaaacaattcaattgctttttttttttggtccaaaataaaacctcagctagctctgccaatgtc

SEQ ID NO: 145498 - DNA, 1165 bp, Homo sapiens
  Payload ID: 8784
  Gene Symbol: KRT8
  Gene Name: keratin 8, type II
  ENST ID: ENST00000546826
  CDS Start-End: 345-1165
gtgtctcctcctctttacaggcctttccttacctccctccatgctgtccacttcctctgtaaagctctcaaccctgtccccttccccctctctcctgggaaagagccctcccatgcctagctgctgctcttagggaccctgtggctaggtgcgcggatggaaatccagccctcaggtcctcgatgatcttgaagtaatggctccagtctctgacctggggtcccttcttctccaagtgctcccggattttgctctccagcctccggttctcggtctccaggctcctcactctgtccaggatctccgcctggttcggcccgcctgcctccactcctgcctctaccatgtccatcagggtgacccagaagtcctacaaggtgtccacctctggcccccgggccttcagcagccgctcctacacgagtgggcccggttcccgcatcagctcctcgagcttctcccgagtgggcagcagcaactttcgcggtggcctgggcggcggctatggtggggccagcggcatgggaggcatcaccgcagttacggtcaaccagagcctgctgagcccccttgtcctggaggtggaccccaacatccaggccgtgcgcacccaggagaaggagcagatcaagaccctcaacaacaagtttgcctccttcatagacaaggtacggttcctggagcagcagaacaagatgctggagaccaagtggagcctcctgcagcagcagaagacggctcgaagcaacatggacaacatgttcgagagctacatcaacaaccttaggcggcagctggagactctgggccaggagaagctgaagctggaggcggagcttggcaacatgcaggggctggtggaggacttcaagaacaagtatgaggatgagatcaataagcgtacagagatggagaacgaatttgtcctcatcaagaaggatgtggatgaagcttacatgaacaaggtagagctggagtctcgcctggaagggctgaccgacgagatcaacttcctcaggcagctatatgaagaggagatccgggagctgcagtcccagatctcggacacatctgtggtgctgtccatggacaacagccgctccctggacatggacagcatcattgctgaggtcaaggcacagtacgaggatattgccaaccgcag

SEQ ID NO: 145499 - DNA, 250 bp, Homo sapiens
  Payload ID: 8784
  Gene Symbol: KRT8
  Gene Name: keratin 8, type II
  ENST ID: ENST00000547176
  CDS Start-End: 1-106
gctggagactctgggccaggagaagctgaagctggaggcggagcttggcaacatgcaggggctggtggaggacttcaagaacaagatgtggatgaagcttacatgaacaaggtagagctggagtctcgcctggaagggctgaccgacgagatcaacttcctcaggcagctatatgaagaggagatccgggagctgcagtcccagatctcggacacatctgtggtgctgtccatggacaacagccgctccc

SEQ ID NO: 145500 - DNA, 1687 bp, Homo sapiens
  Payload ID: 8784
  Gene Symbol: KRT8
  Gene Name: keratin 8, type II
  Uniprot ID: P05787
  ENST ID: ENST00000552150
  CDS Start-End: 21-1556
attcagcaaatgtttgcggaatgaatggggtgagctggagccaggacctgcaggaagggatctccgcctggttcggcccgcctgcctccactcctgcctctaccatgtccatcagggtgacccagaagtcctacaaggtgtccacctctggcccccgggccttcagcagccgctcctacacgagtgggcccggttcccgcatcagctcctcgagcttctcccgagtgggcagcagcaactttcgcggtggcctgggcggcggctatggtggggccagcggcatgggaggcatcaccgcagttacggtcaaccagagcctgctgagcccccttgtcctggaggtggaccccaacatccaggccgtgcgcacccaggagaaggagcagatcaagaccctcaacaacaagtttgcctccttcatagacaaggtacggttcctggagcagcagaacaagatgctggagaccaagtggagcctcctgcagcagcagaagacggctcgaagcaacatggacaacatgttcgagagctacatcaacaaccttaggcggcagctggagactctgggccaggagaagctgaagctggaggcggagcttggcaacatgcaggggctggtggaggacttcaagaacaagtatgaggatgagatcaataagcgtacagagatggagaacgaatttgtcctcatcaagaaggatgtggatgaagcttacatgaacaaggtagagctggagtctcgcctggaagggctgaccgacgagatcaacttcctcaggcagctatatgaagaggagatccgggagctgcagtcccagatctcggacacatctgtggtgctgtccatggacaacagccgctccctggacatggacagcatcattgctgaggtcaaggcacagtacgaggatattgccaaccgcagccgggctgaggctgagagcatgtaccagatcaagtatgaggagctgcagagcctggctgggaagcacggggatgacctgcggcgcacaaagactgagatctctgagatgaaccggaacatcagccggctccaggctgagattgagggcctcaaaggccagagggcttccctggaggccgccattgcagatgccgagcagcgtggagagctggccattaaggatgccaacgccaagttgtccgagctggaggccgccctgcagcgggccaagcaggacatggcgcggcagctgcgtgagtaccaggagctgatgaacgtcaagctggccctggacatcgagatcgccacctacaggaagctgctggagggcgaggagagccggctggagtctgggatgcagaacatgagtattcatacgaagaccaccagcggctatgcaggtggtctgagctcggcctatgggggcctcacaagccccggcctcagctacagcctgggctccagctttggctctggcgcgggctccagctccttcagccgcaccagctcctccagggccgtggttgtgaagaagatcgagacacgtgatgggaagctggtgtctgagtcctctgacgtcctgcccaagtgaacagctgcggcagcccctcccagcctacccctcctgcgctgccccagagcctgggaaggaggccgctatgcagggtagcactgggaacaggagacccacctgaggctcagccctagccctcagcccacctg

SEQ ID NO: 145501 - DNA, 765 bp, Homo sapiens
  Payload ID: 8784
  Gene Symbol: KRT8
  Gene Name: keratin 8, type II
  ENST ID: ENST00000546542
  CDS Start-End: 226-765
gctcttgggatctatgcatttttctggaagggacttcaatgtgtggggtgtgtgtgtgtgtgtgtgtgtatgcacgcgtgcattgtgaagagagcttgtctgtgtgtctgtctttttaagtttgtctgtcctccaaggagggggcttctgggtctctctgtccttctgggtaggggtcctatgtgcctgtctttctgtgagcctgggtgtctctcctagagaaggatggggaagaaactgtacatctgtcctcccagtaggtggtcacccccttccctgggtcagggctatgtcacctgtccctctcctcaaggggatctggctgtcatctgttggtcctctgagttcagtttcatccagtccccacatcacaccctgcagtatcttccagagaacccagccccagccatcaggatctccgcctggttcggcccgcctgcctccactcctgcctctaccatgtccatcagggtgacccagaagtcctacaaggtgtccacctctggcccccgggccttcagcagccgctcctacacgagtgggcccggttcccgcatcagctcctcgagcttctcccgagtgggcagcagcaactttcgcggtggcctgggcggcggctatggtggggccagcggcatgggaggcatcaccgcagttacggtcaaccagagcctgctgagcccccttgtcctggaggtggaccccaacatccaggccgtgcgcacccaggagaaggagcagatcaagaccctcaacaacaagttt

SEQ ID NO: 145502 - DNA, 523 bp, Homo sapiens
  Payload ID: 8784
  Gene Symbol: KRT8
  Gene Name: keratin 8, type II
  ENST ID: ENST00000546900
  CDS Start-End: 185-523
actttcacacagcaggagccaggccgggttttgcagccctgggactccgctgcctgaggggccccgggcccccggcggccccgaggattgggcccttcacgctgactggctcctgggaggcattgtgggaacgggaggagggaaatcctggggcagagtacggttcctggagcagcagaacaagatgctggagaccaagtggagcctcctgcagcagcagaagacggctcgaagcaacatggacaacatgttcgagagctacatcaacaaccttaggcggcagctggagactctgggccaggagaagctgaagctggaggcggagcttggcaacatgcaggggctggtggaggacttcaagaacaagtatgaggatgagatcaataagcgtacagagatggagaacgaatttgtcctcatcaagaaggatgtggatgaagcttacatgaacaaggtagagctggagtctcgcctggaagggctgaccgacgagatcaacttcctcaggcagctatatgaagag

SEQ ID NO: 145503 - DNA, 2437 bp, Homo sapiens
  Payload ID: 8784
  Gene Symbol: KRT8
  Gene Name: keratin 8, type II
  ENST ID: ENST00000619952
  CDS Start-End: 149-247
tcctctttacaggcctttccttacctccctccatgctgtccacttcctctgtaaagctctcaaccctgtccccttccccctctctcctgggaaagagccctcccatgcctagctgctgctcttagggaccctgtggctaggtgcgcggatggaaatccagtgctcccggattttgctctccagcctccggttctcggtctccaggctcctcactctgtccaggtggaggaggtgctggcgagtttgaaatttgggagtcttgaccgggcgcagtggctcacgcctgtaatctcagcactttgggaggcctaggtgggcggatcacgaggtcaggagatcgagaccatcctagccaacatggtgaaaccccctctctactaaaatacaaaaaattagccggacgtgatggtgcacgcctgtagtctcagctacttgggaggctgaggaaggggaatcgcttgaacctgggaggcggaggttgcagtgagccgagatcgcgccactgcagcctggcgacagagtgagactctgtctcaaaaaaaaaaaaaaaaaaaaagaaaaaagaaatttgggggtctggtggtgtgcgggtggaatggcctgtgagtccctctagctgtccttaacctgcagcccaaattatccacttgtggaggggatcttgggggcatcctggagccccaggagtcccggggaagaaaggctgggagctggagaagaggaggagaagcaatgcccagcctcatagctgcttgcttacacactcacaccccagctgcacctggctcccaaacactcctcgcctgcccacgtttcctcacacacactcacacccgaatcatacagaggtgtgctctcaaatgcacacacacatacattcactcagcaaataggtgcagactccccaaaacaaacccagtctctgagccccctccaccaccctcccctctcccgacctcactcccaagggccttgcctcagtggaacactgtgatttggacagggaatgcatcctgacttctgcacaccggtatatcacctttcctgcatccttaattaaacaaatcctgagcatttacaattcaaccagtatgcattcagcacctactgtgagccaggcccagttctaggagctgggagagaagggcggtgacaaaagagaccaaaaatctctcacagagatgataatgtgtcccacatcgccgggcacagtggctcatgcctgtaatccaagcactttgggaggccgaggcgggtggatcacttgaggtcaagagttcgatgccactgcactccagcctagacaacagagcaagactctgtctcaaaaaaaaaaaaaaaaaaaaaaaatttgagaccagcctgaccaacatggtgacaccccttctctactaaaaatacaaaaattaaccaggcacagtgtgtgcctgtaatcccagctactcaggaggctgaggcaggagaatcgcttgaacccaggaggcagaggttgcagtgagccaagatcgtgccgtcgcgctccagcctgggcaaccagagcgaaactctgactcaaaataaataaataaataaataaataaaagtaatgtgtcctacatcgcatggggcctgagaggacaggcaggcactcctaggaccatcatagcagcgacccagccctggtggccagtgcccctcccctcttttctaggacttttctccaagccagtccttcccctgtccccccttgtaagggctgtctggattagaagcctggccccaggggactgcatcctccaagatgctctccccagcctctgtgtgagaaggatggaggtagggaggctttcatgctgcctgccccctgaagctgaatgaccatccctgctgaatgaagtgttggggggaacccttaggtgtttggccttcaagtttgtcagctccagcagctcgtttttctggcagggcctggtatgacacatttggctgtgttctttgctctggagtggacctattgattcttatcgagctaccagctgagggggaaggggaggacaaatagtagggcagacctgggagagaagggaccctggaaaagcctggccagtggacctgccaggtgggaggcagagcacagataaagagcctgagcctggattgttcctgatctgtcacctaatggtggggagagccccacagtgctcaatgggagccagccagggggcagtcagggtggaagctggccaggggagggtcggggcctgctgaaggctgggaggcaaacgggatgcaaaataacatacaaatgaatgcccactggttttgcatacaaggcttctgggaggtaagaggttccagtcagaggggtctctcctgctttcacctttatattcccccactggattccagaactgtcaagttgggcagtattttataataaagtatgtggagtcaacaa

SEQ ID NO: 145504 - DNA, 3894 bp, Homo sapiens
  Payload ID: 8785
  Gene Symbol: KRT80
  Gene Name: keratin 80, type II
  Uniprot ID: Q6KB66
  ENST ID: ENST00000313234
  CDS Start-End: 99-1367
cccagctgtgaccagagcaaccagagcctgccacccgacgcaaccccaggctcactcgctcacccccctgggccctcctgcttccggccgggggcaccatggcctgccgctcctgcgtggttggcttcagcagcctcagcagctgtgaggtgaccccggtgggcagcccccggcctggaacctcaggatgggacagctgcagggcccccgggccgggcttcagctcccgcagcctcacaggctgctggtcggctggcactatctccaaggtgactgtgaaccccggcctgctggtgcccctggatgtcaagttggaccccgctgttcagcagctgaagaaccaggagaaggaggagatgaaggccctcaatgataaatttgcctccctaattggcaaggtgcaagccctggaacagcgcaaccagctgctggagacacgctggagcttcctgcagggccaggactcagccatcttcgacctcgggcatctctatgaggaatatcagggccggctgcaggaggaactgcgcaaagtgagccaggagcgggggcagctggaggccaacctgctgcaggtgctggagaaggttgaggagtttcgaatcaggtatgaggatgagatctccaagcgcacagacatggagttcacctttgttcagctgaagaaggacctggatgcagagtgtcttcatcggactgaactggaaaccaagttaaaaagcctggagagcttcgtggagttgatgaaaaccatctatgagcaggagctgaaggacctggcagcacaggtgaaggatgtgtcggtgaccgtcggcatggacagccgctgccacatcgacctgagcggcatcgtggaggaggtgaaggcccagtatgacgccgtcgcggctcgcagcctggaggaggccgaggcatactctcggagccagctggaggagcaggccgcccgctcggccgagtatgggagcagcctccagagcagccgcagcgagatcgcggatctcaatgtgcgcatccagaagctgcggtcccagatcctctctgtcaagagccattgcctgaaactggaggagaacatcaagacagctgaggagcagggtgagctggccttccaggatgccaagaccaagctggcccagctggaggccgccctgcagcaggccaagcaggacatggcgcggcagctgcgcaagtaccaggagctgatgaacgtcaagctggccctggacatcgagatcgccacctacaggaagctggtggagggcgaggagggcaggatggactcgccctcagccactgtggtcagcgctgtgcagtccaggtgcaaaaccgccccttccctcccctaccccttatgttccctgtagctgcctccagatcaggcctctccaaggccccctcccgaaagaagaagggcagcaaaggccccgtgatcaaaatcaccgaaatgtcagagaagtacttctcgcaggagtcggaggtctcagagtaaggcggctggaccccaggaaccccagggcactccactgcagcaggagggacttaagctagactcaagaaagcagcttggagcctctaggttgagaagagaggcaaaacctgatattgaactgagagaggggttcaaaactgactgtgttttgtgggctgccagggtgggagaggagcatcaccagctcctcagagccactccgctccatatcagtatctcacagtcccatccttccaaccttctggccagaggttttcctgatgggtgagtcggaattaggggtcagttttgtctccacctcctcgctcctctgaggctcctcctccagcatcaggctctgccaaggcccctctgactcttgcccaatccttgaccttgactcctatctcaagccttgccttgtctctgcctcggaactgggactgggactggctcatccacctatgtgcgggagccgaggaggacggcgtgggccctgtcctgtatctggaattcctgggaaggctggctgctgaagaccctcttggctttcccgtgctctttgggctccccagagacctgacagtattagggagtgaagggaggaggggccctggctatttgggacctaagcctaggccccagagatcagcccgaacacccgcatcccttcctcctcccatgggtccctcccagtaggcagtagtcagaactggatgggctgcccccagccagctcccagcagcttctccggaagctgctcttgccataatcaactccctgggagtggaagccagatggcagcttgagattgggcaggagcattcgatcttcctttcacctccctgccatgctggggtcctacccagcctggatctgagctctgtgcccccagccgggttgttcccagcctgagcaccgggctttggtgcaccaggccttggagacccctggtcccacccctgccgtgaagccccaggcccacttcccaagaatctcacttctcagggcctctgttctcctctccactgggccaaatagcctggccctcccctccttggcattcatgggggagcccaggaaccccccacacctatggggttagagctcctcctttcttctcactccttccccttcctccctccatgcccactccccctgcctccagcaggccaggaagaaggcacagtccaggcaagtctgggagcttccaagcccttgaggtccagctgtggggcccaaatgacagccttacaagggttctaccagagaggaaaattccacatcccaccagaagacaggggtgttggcaggcatactcctatctcctcctcttggctctcaatgctgaggcttgcagaggcatcccagcggcaccagcctcccactgcacagcttccttccctccttcactctcctctcccctccctgccccttgcctcacctcctcttctagactgcattagattcattcatctcatttgccaggacatgttggccagaggtctgggcccatcccaggcctcaaggccctccaggcctgtggggagcactggagggttactgactctctggccatgggaactcagagattctcatccccaaagtcccaaaagagggtgctgattggtgcttttcctcaggctcttcattggtttccaagggagcaaatcctcagtggggatacaagacatataaagtatatattattttttcataacttatgtggcttttaacttattgcttcccttcctgtttctgcatgatcagtctgtatgtactatctggaaagataacacatactccagccacctcacctgattggctatcttggggccatgtccccttcttgctgccacaggatgaataaagtgttgagatttgtctatggagaaagctgtgtgtctgtttttatctcccctctcaggaccagtcagccactggtcaatcaggctgatcatggaacattaggaattctccaattaagggagaaaaagtccagggacttagttatatcttcagaccagtgcagctggtacacacaaagttctcctgtctcaccatctgatatggtttggatgctcgtcccctccaaatctcatgttgaaatgtaattcccagtgttggaagtggagcctggtgggaagtatttggatcatgagagaggatccttcatgaatggctcagcaccatctccttggtgatgagtgagttctcactcaattcacatagatatggttgtttaaaagagtctgagacctctcccctctttctcgccatgtgatatgcctgctcccccttcaccttccgcctttactgtaagcttcctgaggccctcaccagaagctgagcaaatgttggtgccatgccagtacagcctgcagaattgtgagccaaaataaatgtcttttctttataaatta

SEQ ID NO: 145505 - DNA, 3859 bp, Homo sapiens
  Payload ID: 8785
  Gene Symbol: KRT80
  Gene Name: keratin 80, type II
  Uniprot ID: Q6KB66
  ENST ID: ENST00000394815
  CDS Start-End: 99-1457
cccagctgtgaccagagcaaccagagcctgccacccgacgcaaccccaggctcactcgctcacccccctgggccctcctgcttccggccgggggcaccatggcctgccgctcctgcgtggttggcttcagcagcctcagcagctgtgaggtgaccccggtgggcagcccccggcctggaacctcaggatgggacagctgcagggcccccgggccgggcttcagctcccgcagcctcacaggctgctggtcggctggcactatctccaaggtgactgtgaaccccggcctgctggtgcccctggatgtcaagttggaccccgctgttcagcagctgaagaaccaggagaaggaggagatgaaggccctcaatgataaatttgcctccctaattggcaaggtgcaagccctggaacagcgcaaccagctgctggagacacgctggagcttcctgcagggccaggactcagccatcttcgacctcgggcatctctatgaggaatatcagggccggctgcaggaggaactgcgcaaagtgagccaggagcgggggcagctggaggccaacctgctgcaggtgctggagaaggttgaggagtttcgaatcaggtatgaggatgagatctccaagcgcacagacatggagttcacctttgttcagctgaagaaggacctggatgcagagtgtcttcatcggactgaactggaaaccaagttaaaaagcctggagagcttcgtggagttgatgaaaaccatctatgagcaggagctgaaggacctggcagcacaggtgaaggatgtgtcggtgaccgtcggcatggacagccgctgccacatcgacctgagcggcatcgtggaggaggtgaaggcccagtatgacgccgtcgcggctcgcagcctggaggaggccgaggcatactctcggagccagctggaggagcaggccgcccgctcggccgagtatgggagcagcctccagagcagccgcagcgagatcgcggatctcaatgtgcgcatccagaagctgcggtcccagatcctctctgtcaagagccattgcctgaaactggaggagaacatcaagacagctgaggagcagggtgagctggccttccaggatgccaagaccaagctggcccagctggaggccgccctgcagcaggccaagcaggacatggcgcggcagctgcgcaagtaccaggagctgatgaacgtcaagctggccctggacatcgagatcgccacctacaggaagctggtggagggcgaggagggcaggatggactcgccctcagccactgtggtcagcgctgtgcagtccaggtgcaaaaccgctgcctccagatcaggcctctccaaggccccctcccgaaagaagaagggcagcaaaggccccgtgatcaaaatcaccgaaatgtcagagaagtacttctcgcaggagtcggaggtctcagagtaaggcggctggaccccaggaaccccagggcactccactgcagcaggagggacttaagctagactcaagaaagcagcttggagcctctaggttgagaagagaggcaaaacctgatattgaactgagagaggggttcaaaactgactgtgttttgtgggctgccagggtgggagaggagcatcaccagctcctcagagccactccgctccatatcagtatctcacagtcccatccttccaaccttctggccagaggttttcctgatgggtgagtcggaattaggggtcagttttgtctccacctcctcgctcctctgaggctcctcctccagcatcaggctctgccaaggcccctctgactcttgcccaatccttgaccttgactcctatctcaagccttgccttgtctctgcctcggaactgggactgggactggctcatccacctatgtgcgggagccgaggaggacggcgtgggccctgtcctgtatctggaattcctgggaaggctggctgctgaagaccctcttggctttcccgtgctctttgggctccccagagacctgacagtattagggagtgaagggaggaggggccctggctatttgggacctaagcctaggccccagagatcagcccgaacacccgcatcccttcctcctcccatgggtccctcccagtaggcagtagtcagaactggatgggctgcccccagccagctcccagcagcttctccggaagctgctcttgccataatcaactccctgggagtggaagccagatggcagcttgagattgggcaggagcattcgatcttcctttcacctccctgccatgctggggtcctacccagcctggatctgagctctgtgcccccagccgggttgttcccagcctgagcaccgggctttggtgcaccaggccttggagacccctggtcccacccctgccgtgaagccccaggcccacttcccaagaatctcacttctcagggcctctgttctcctctccactgggccaaatagcctggccctcccctccttggcattcatgggggagcccaggaaccccccacacctatggggttagagctcctcctttcttctcactccttccccttcctccctccatgcccactccccctgcctccagcaggccaggaagaaggcacagtccaggcaagtctgggagcttccaagcccttgaggtccagctgtggggcccaaatgacagccttacaagggttctaccagagaggaaaattccacatcccaccagaagacaggggtgttggcaggcatactcctatctcctcctcttggctctcaatgctgaggcttgcagaggcatcccagcggcaccagcctcccactgcacagcttccttccctccttcactctcctctcccctccctgccccttgcctcacctcctcttctagactgcattagattcattcatctcatttgccaggacatgttggccagaggtctgggcccatcccaggcctcaaggccctccaggcctgtggggagcactggagggttactgactctctggccatgggaactcagagattctcatccccaaagtcccaaaagagggtgctgattggtgcttttcctcaggctcttcattggtttccaagggagcaaatcctcagtggggatacaagacatataaagtatatattattttttcataacttatgtggcttttaacttattgcttcccttcctgtttctgcatgatcagtctgtatgtactatctggaaagataacacatactccagccacctcacctgattggctatcttggggccatgtccccttcttgctgccacaggatgaataaagtgttgagatttgtctatggagaaagctgtgtgtctgtttttatctcccctctcaggaccagtcagccactggtcaatcaggctgatcatggaacattaggaattctccaattaagggagaaaaagtccagggacttagttatatcttcagaccagtgcagctggtacacacaaagttctcctgtctcaccatctgatatggtttggatgctcgtcccctccaaatctcatgttgaaatgtaattcccagtgttggaagtggagcctggtgggaagtatttggatcatgagagaggatccttcatgaatggctcagcaccatctccttggtgatgagtgagttctcactcaattcacatagatatggttgtttaaaagagtctgagacctctcccctctttctcgccatgtgatatgcctgctcccccttcaccttccgcctttactgtaagcttcctgaggccctcaccagaagctgagcaaatgttggtgccatgccagtacagcctgcagaattgtgagccaaaataaatgtcttttctttataaatta

SEQ ID NO: 145506 - DNA, 1929 bp, Homo sapiens
  Payload ID: 8786
  Gene Symbol: KRT81
  Gene Name: keratin 81, type II
  Uniprot ID: Q14533
  ENST ID: ENST00000327741
  CDS Start-End: 70-1587
cattggagtttccatcaggactccaggtcccctatcctgtcctctgcaacccaaacgtccaggaggatcatgacctgcggatcaggatttggtgggcgcgccttcagctgcatctcggcctgcgggccgcggcccggccgctgctgcatcaccgccgccccctaccgtggcatctcctgctaccgcggcctcaccgggggcttcggcagccacagcgtgtgcggaggctttcgggccggctcctgcggacgcagcttcggctaccgctccgggggcgtgtgcgggcccagtcccccatgcatcaccaccgtgtcggtcaacgagagcctcctcacgcccctcaacctggagatcgaccccaacgcgcagtgcgtgaagcaggaggagaaggagcagatcaagtccctcaacagcaggttcgcggccttcatcgacaaggtgcgcttcctggagcagcagaacaaactgctggagacaaagctgcagttctaccagaaccgcgagtgttgccagagcaacctggagcccctgtttgagggctacatcgagactctgcggcgggaggccgagtgcgtggaggccgacagcgggaggctggcctcagagcttaaccacgtgcaggaggtgctggagggctacaagaagaagtatgaggaggaggtttctctgagagcaacagctgagaacgagtttgtggctctgaagaaggatgtggactgcgcctacctccgcaagtcagacctggaggccaacgtggaggccctgatccaggagatcgacttcctgaggcggctgtatgaggaggagatcctcattctccagtcgcacatctcagacacctccgtggttgtcaagctggacaacagccgggacctgaacatggactgcatcattgccgagattaaggcacagtatgacgacattgtcacccgcagccgggccgaggccgagtcctggtaccgcagcaagtgtgaggagatgaaggccacggtgatcaggcacggggagaccctgcgccgcaccaaggaggagatcaatgagctgaaccgcatgatccaaaggctgacggccgaggtggagaatgccaagtgccagaactccaagctggaggccgcggtggcccagtctgagcagcagggtgaggcggccctcagtgatgcccgctgcaagctggccgagctggagggcgccctgcagaaggccaagcaggacatggcctgcctgatcagggagtaccaggaggtgatgaactccaagctgggcctggacatcgagatcgccacctacaggcgcctgctggagggcgaggagcagaggctatgtgaaggcattggggctgtgaatgtctgtgtcagcagctcccggggcggggtcgtgtgcggggacctctgcgtgtcaggctcccggccagtgactggcagtgtctgcagcgctccgtgcaacgggaacgtggcggtgagcaccggcctgtgtgcgccctgcggccaattgaacaccacctgcggagggggttcctgcggcgtgggctcctgtggtatcagctccctgggtgtggggtcttgcggcagcagctgccggaaatgttaggcaccccaactcaagtcccaggccccaggcatctttcctgccctgccttgcttggcccatccagtccaggcgcctggagcaagtgctcagctacttctcctgcactttgaaagacccctcccactcctggcctcacatttctctgtgtgatcccccacttctgggctctgccaccccacagtgggaaaggccaccctagaaagaagtccgctggcacccataggaaggggcctcaggagcaggaagggccaggaccagaaccttgcccacggcaactgccttcctgcctctccccttcctcctctgctcttgatctgtgtttcaataaattaatgtagccaa

SEQ ID NO: 145507 - DNA, 1505 bp, Homo sapiens
  Payload ID: 8786
  Gene Symbol: KRT81
  Gene Name: keratin 81, type II
  ENST ID: ENST00000615839
  CDS Start-End: 51-1505
actccaggtcccctatcctgtcctctgcaacccaaacgtccaggaggatcatgacctgcggatcaggatttggtgggcgcgccttcagctgcatctcggcctgcgggccgcggcccggccgctgctgcatcaccgccgccccctaccgtggcatctcctgctaccgcggcctcaccgggggcttcggcagccacagcgtgtgcggaggctttcgggccggctcctgcggacgcagcttcggctaccgctccgggggcgtgtgcgggcccagtcccccatgcatcaccaccgtgtcggtcaacgagagcctcctcacgcccctcaacctggagatcgaccccaacgcgcagtgcgtgaagcaggaggagaaggagcagatcaagtccctcaacagcaggttcgcggccttcatcgacaaggtgcgcttcctggagcagcagaacaaactgctggagacaaagctgcagttctaccagaaccgcgagtgttgccagagcaacctggagcccctgtttgagggctacatcgagactctgcggcgggaggccgagtgcgtggaggccgacagcgggaggctggcctcagagcttaaccacgtgcaggaggtgctggagggctacaagaagaagtatgaggaggaggtttctctgagagcaacagctgagaacgagtttgtggctctgaagaaggatgtggactgcgcctacctccgcaagtcagacctggaggccaacgtggaggccctgatccaggagatcgacttcctgaggcggctgtatgaggaggagatcctcattctccagtcgcacatctcagacacctccgtggttgtcaagctggacaacagccgggacctgaacatggactgcatcattgccgagattaaggcacagtatgacgacattgtcacccgcagccgggccgaggccgagtcctggtaccgcagcaagtgtgaggagatgaaggccacggtgatcaggcacggggagaccctgcgccgcaccaaggaggagatcaatgagctgaaccgcatgatccaaaggctgacggccgaggtggagaatgccaagtgccagaactccaagctggaggccgcggtggcccagtctgagcagcagggtgaggcggccctcagtgatgcccgctgcaagctggccgagctggagggcgccctgcagaaggccaagcaggacatggcctgcctgatcagggagtaccaggaggtgatgaactccaagctgggcctggacatcgagatcgccacctacaggcgcctgctggagggcgaggagcagaggctatgtgaaggcattggggctgtgaatgtctgtgtcagcagctcccggggcggggtcgtgtgcggggacctctgcgtgtcaggctcccggccagtgactggcagtgtctgcagcgctccgtgcaacgggaacgtggcggtgagcaccggcctgtgtgcgccctgcggccaagtggggtcttgcggcagcagctgccggaaatgttag

SEQ ID NO: 145508 - DNA, 2664 bp, Homo sapiens
  Payload ID: 8787
  Gene Symbol: KRT82
  Gene Name: keratin 82, type II
  Uniprot ID: Q9NSB4
  ENST ID: ENST00000257974
  CDS Start-End: 79-1620
gggaagctgagcctgacttgatcatcctgccccggttctttcctccagggccgcatttctctgcctctctctcctgccatgtcgtaccactctttccagccaggctccaggtgtggcagtcagagtttcagctcatactcggctgtcatgccccggatggtcacccactatgcagtgagcaaggggccatgccggcccgggggtggtaggggcctccgagctctgggctgccttggctcacggagcctgtgcaacgtgggctttgggaggccccgggtagcctccaggtgtggaggtaccctgcctggcttcgggtaccgactgggagccacctgtgggccttctgcctgcatcacccctgtcaccatcaatgagagcctgctggtcccactggcactggagatagacccgactgtgcagagggtaaagagggatgagaaggagcagatcaagtgcctcaacaaccgtttcgcatctttcatcaacaaggtccgtttcctggagcagaagaacaagctgctggagaccaagtggaacttcatgcagcagcagaggtgctgccagaccaacatcgagcccatcttcgagggctatatcagcgcccttcggcggcagctggactgtgtgtccggggaccgcgtgaggctagagtcagagctctgcagcctccaggctgcactggagggctacaagaaaaaatacgaagaggagctctccctgcgtccctgtgttgagaatgagtttgttgccttgaagaaggacgtggacacagccttcctgatgaaggctgacctggagaccaacgcagaggcactcgtgcaggagatcgacttcctgaaaagcctgtatgaggaggagatctgcctgctccagtctcagatctctgagacctcggtcattgtgaagatggacaacagccgggagctggacgtggacggcatcatcgctgagatcaaggcgcagtatgacgacatcgccagccgcagcaaagccgaagcagaggcctggtaccagtgccggtatgaggagctgagagtcacagctgggaaccactgtgacaacctccgcaaccgtaagaacgagatcctggaaatgaataaactgatccagcggctgcagcaagaaaccgagaatgtcaaagcccagcgctgcaaacttgagggtgccatagctgaggcagagcagcagggcgaggcggctctcaatgatgccaagtgcaagctggcagggctggaggaggctctgcagaaggccaagcaggacatggcctgcctgctcaaggaatatcaggaggtgatgaactccaagctgggcctggacatcgagatcgccacctacaggcgcctgctggagggtgaagagcacaggctgtgcgaaggcatcgggcccgtgaatatctcagtgagcagctccaaaggcgccttcctgtacgagccatgtggggtcagcacgcctgtcctcagcactggcgtcctcaggagcaatgggggctgcagcatcgtgggcactggtgaactctatgtcccctgcgagccccaggggctactgagctgtgggagcgggcggaaatccagcatgacgctaggagctgggggcagctcccccagccacaagcattagcatgatccgagacatccaggagacagagcccctgccccatggccctggatgtcacactcccaccagggctgaagacaaggatgttccaaaaccccacctccctttattgactccacattcccctccagtgttccctccttgagagctgagctgcccctaggacccctcctttgcctcatgagtcaccttccactcacctgtgtgcagaccctcagctaggcccagatggtggggacagacggcagagaaagagcatgcattgctcttaaccgcagaatggcaataacccccaaaaggtcaaatgggcacaccacagttctgctctgtggatcatcccatggaagtttcctcacaaagtcagctcctctcccaccacaggctcacactgcccttactttaggctctcatgcccctaagaaaagtgaatttcctttaacaccgcctgaaacatgcacactgcaaatatcaaaaggagacacccccaaatcccactctaaattccaaagccaagtgccacgatttcaggatcagtcaggacctgccaatgtcctctcagcacagagaatcaagaggtggcctttgggcagtagatttactttctcaggtatgttgaacccaaactgtgagaataaatctttctcctgagctcacattggcaggtgatgtcaggccaatgcctagaacaaagggcaaagggatatggaatgtttactggacagttggaaaaccaaaaacagataccattttctcaatggaatcagttccccctccacccatccccttctgtacatagccgccccttcctgttccccaaccctttagctccttttgctttgagtctgatatgacagtgatgtggggctgccccagctgacttggaggccctggctcaggagctcatagatggaggaggtgtgggctgactacctcccagaagcccctcatgccaagcctgtcccactggggctccagggcctctgccctgaacatctgggcttctgttcaaaataaacctactctgttcatggattatagcaatcagga

SEQ ID NO: 145509 - DNA, 1875 bp, Homo sapiens
  Payload ID: 8788
  Gene Symbol: KRT83
  Gene Name: keratin 83, type II
  Uniprot ID: P78385
  ENST ID: ENST00000293670
  CDS Start-End: 64-1545
acaggcccttggttccatcctctgccatctactccactgttcagacacctcctaacctccgtcatgacctgtggcttcaactccataggctgtgggttccgccctggaaacttcagctgtgtctctgcctgcgggccccggccaagccgctgctgcatcaccgccgccccctaccgcggcatctcctgctaccgcggcctcaccgggggctttggcagccacagcgtgtgcgggggcttccgcgccggctcctgcggacgcagcttcggctaccgctccgggggcgtgtgcggacccagccccccatgcatcaccaccgtgtcggtcaacgagagcctcctcacgcccctcaacctggagatagaccccaacgcgcagtgcgtgaagcaggaggagaaggagcagatcaagtccctcaacagcagattcgcggccttcatcgacaaggtgcgcttcctggagcagcagaacaagctgctggagacaaagctgcagttctaccaaaaccgcgagtgctgccagagtaacctggagcccctgtttgctggctacatcgagactctgcggcgggaggccgagtgcgtggaggctgacagtgggaggctggcctcagagctcaaccacgtgcaggaggtgctggagggctacaagaagaagtatgaagaagaagtagcacttcgagccacagcagagaacgagtttgtggctctaaagaaggatgtggactgcgcctacctccgcaagtcagacctggaggccaacgtggaggccctgatccaggagattgacttcctgaggcggctgtacgaggaggagatccgcattctccaatcccacatctcagacacctccgtggttgtcaagctggacaacagccgggacctgaacatggactgcatcgttgccgagatcaaggcacagtatgatgacattgccacccgtagccgggctgaggccgagtcctggtatcgcagcaagtgtgaggagatgaaggccacagtgatcaggcacggggagaccctgcgccgcaccaaggaggagatcaacgagctgaaccgcatgatccagaggctgacagccgaggtggagaatgccaagtgccagaactccaagctggaagctgcggtggcccagtctgagcagcagggtgaggcggccctcagtgatgcccgctgcaagctggccgagctggagggcgccctgcagaaggccaagcaagacatggcctgcctgatcagggagtaccaggaggtgatgaactccaagctaggcctggatatcgagatcgccacctacaggcgcctgctggagggcgaggagcagaggctgtgtgaaggtgttgaagctgtgaatgtctgtgtcagcagctcccggggtggggttgtgtgcggggatctctgcgtgtcgggctcccggccggtgacgggcagcgtctgcagtgccccctgcaacgggaacctggtggtgagcactggtttgtgcaagccctgtggccagctgaacaccacctgtggagggggctcctgcggccaggggaggcattaagtggcccaaaagagagccaggggagccccttctgcctgccagacgtgccactgccccaccaccagctgaaaacagcagcacatcgctggcttttccccttgtgttctgagaatacaccatcggctcattcccaccagcggctcctccccacctttcatcccactggaaaggggcctgtggctggggaatagacccattccttcccctgtctcagccttcagcccctcccggggagaagggccttgcttccctggaagaagcactgtgagactgttccccctgcctctctggcctcttgtctccccttttccaataaacttggggacctgc

SEQ ID NO: 145510 - DNA, 2092 bp, Homo sapiens
  Payload ID: 8789
  Gene Symbol: KRT84
  Gene Name: keratin 84, type II
  Uniprot ID: Q9NSB2
  ENST ID: ENST00000257951
  CDS Start-End: 68-1870
agagggactcccagctccagctcacccattctacacttgctcttttgctcccaaccaggaagccatcatgtcttgccgctcctaccgagtcagctctggtcaccgggtgggcaacttcagctcttgttcagcaatgacaccacagaacctgaatcgcttccgggccaactctgtctcctgttggagtgggcctggattccggggccttggcagctttggtagtcggagtgtcatcacctttggatcgtactcaccccggatagcagctgtaggctctcggcccatccactgtggagtccgctttggtgctggctgtgggatgggttttggtgatgggagaggtgttggtctggggcctagggctgacagctgtgttggtctgggctttggagctggcagtggcattggctatggctttggtggccctggctttggttacagagttggaggggttggagtcccagcagccccatctatcacagctgtgactgtgaacaagagcctactgacccccctcaacctggagattgaccccaatgcccagagggtgaagaaggatgagaaggagcaaatcaagaccctcaacaacaagtttgcctccttcattgacaaggttcggttcctagagcagcagaataagctcctagagaccaagtggagcttcctccaagagcagaaatgtatcaggagcaatctggagccactcttcgagagctacatcaccaacctgcggaggcagttggaggtgctggtcagtgatcaggcccggctccaggctgagaggaaccacctgcaggatgtcctagagggcttcaagaagaagtatgaagaggaagtggtatgtcgggccaatgctgagaatgagtttgtggctctgaagaaggatgtggatgcagctttcatgaacaagtctgatctcgaggccaacgtggataccctaactcaggaaattgactttctaaaaacgctttacatggaggaaatccagttgctgcagtcgcacatctcagagacgtcggtcattgtgaagatggacaacagccgtgacctgaaccttgatgggatcattgctgaggtcaaggcccagtatgaggaggtggccaggcgcagccgggctgatgctgaggcctggtaccagaccaagtatgaagagatgcaggtgacagctggccaacactgtgacaacctgcgcaacatacggaacgagatcaacgaactgacccgcctgatccagaggcttaaggcagagattgagcacgccaaggctcagcgtgccaagttggaggctgcagtggccgaggccgagcagcagggcgaggcgaccctcagtgatgccaaatgcaagctggcagatctggagtgtgccctgcagcaggccaagcaggacatggcgcggcagctgtgcgagtaccaggagctgatgaatgccaagctgggcctggacatcgagatcgccacctacaggcgcctgctggagggcgaggagagccggctctgtgaaggtgttggaccagtaaacatatccgtcagcagctcccggggcggcctggtgtgcgggcctgagcctttggttgccggctccaccctctcccgcggcggggtcaccttctcaggtagcagcagcgtctgtgccaccagtggggtcctggcttcctgtggccccagcctgggtggagcccgggtcgccccggccactggggacctgctgagcactggcacaaggagtggctccatgctcatcagcgaggcctgtgtccccagcgtcccctgccccctgcccacccaggggggcttcagcagctgcagcggcggccgcagctccagcgtccgctttgtgtccaccaccacctcctgccggaccaagtactgagagcccagccccagacagctgctgcccagagaagaaccagctccacggctcctgcttctgcccccagggttcgtgggctctgggcttgacggtctccagctcccctttctgccaggaagccaccccttagcactcccccgattattctgcctggccccatgtcctcttggaggatttttctgccatgtagatgctccattagcagttccagctaagctggct

SEQ ID NO: 145511 - DNA, 2447 bp, Homo sapiens
  Payload ID: 8790
  Gene Symbol: KRT85
  Gene Name: keratin 85, type II
  Uniprot ID: P78386
  ENST ID: ENST00000257901
  CDS Start-End: 77-1600
agaaggatcctgagcctcgcactctgccgcccgcaccaccttccgctgcctctcagactctgctcagcctcacacgatgtcgtgccgctcctacaggatcagctcaggatgcggggtcaccaggaacttcagctcctgctcagctgtggcccccaaaactggcaaccgctgctgcatcagcgccgccccctaccgaggggtgtcctgctaccgagggctgacgggcttcggcagccgcagcctctgcaacctgggctcctgcgggccccggatagctgtaggtggcttccgagccggctcctgcggacgcagcttcggctaccgctccgggggcgtgtgcggacccagccccccatgcatcactaccgtgtcggtcaacgagagcctcctcacgcccctcaacctggagatcgaccccaacgcacagtgcgtgaagcaggaggagaaggagcagatcaagtccctcaacagcaggttcgcggccttcatcgacaaggtgcgcttcctggagcagcagaacaagctgctggagaccaagtggcagttctaccagaaccagcgctgctgcgagagcaacctggagccactgttcagtggctacatcgagactctgcggcgggaggccgagtgcgtggaggccgacagcgggaggctggcctcagagctcaaccatgtgcaggaggtgctggagggctacaagaagaagtatgaagaggaggtggccctgagagccacagcagagaatgagtttgtcgttctaaagaaggacgtggactgtgcctacctgcggaaatcagacctggaggccaatgtggaggccctggtggaggagtctagcttcctgaggcgcctctatgaagaggagatccgcgttctccaagcccacatctcagacacctcggtcatagtcaagatggacaacagccgagacctgaacatggactgcatcatcgctgagatcaaggctcagtatgacgatgttgccagccgcagccgggccgaggctgagtcctggtaccgtagcaagtgtgaggagatgaaggccacggtgatcaggcatggggagaccctgcgccgcaccaaggaggagatcaacgagctgaaccgcatgatccagaggctgacggccgagattgagaatgccaagtgccagcgtgccaagctggaggctgctgtggctgaggcagagcagcagggtgaggcggccctcagcgatgcccgctgcaagctggctgagctggagggcgccctgcagaaggccaagcaggacatggcctgcctgctcaaggagtaccaggaggtgatgaactccaagctgggcctggacatcgagatcgccacctacaggcgcctgctggagggcgaggaacacaggctgtgtgaaggtgtgggctctgtgaatgtctgtgtcagcagctcccgtggtggagtctcctgtgggggcctctcctacagcaccaccccagggcgccagatcacttctggcccctcagccataggcggcagcatcacggtggtggcccctgactcctgtgccccctgccagcctcgttcctccagcttcagctgcgggagtagccggtcggtccgctttgcctagtagagtcatggagccagggcttcctgccaagcacctgcctgcctgcatcactgcactgaatggcatgtgaatggaaaatgtgtgcttgcttccagaatcttctggatgttcctacagagggaaagacctacagagggaaagaccctcgggccgctcccctgcgccttttcatgctagggagatgcatcctagttgtcctcctggcagctgttttcagaggcattcccagcccttcacttaactcctacttagctccaaaatacctgtatccaatttgtattattcccccagctctcagggacaagaccagtcccccagcgtggtggtcagcacggaagctccaccttctgggtggaggcgccatcctaaccatccagccaggccacccacaacccgagaatcagggagaaagtccctccccagcagccccctcctcctggctgggaagaatggtcccccagcaagcacttgcctgttcattcctgttcatgttttgcttctctctcagactgccttcctgcttctgggctaacctgttccagccaggctcctcatgtgacctcgcagttgagaagcccattatcgtggggcatccttttgcctacagcccctggttagggcactttggacaggtcttgctattcagtgaacctttgtacatttcaaagaagactccatggctgctccagatgcccccttgctgggtgcaggtggggactgtccaatgcagagctggcgggacagagagttaagccacttcctgggtctccttcttgtgactgtctatgggtgcattgccttctgggttgtctcgatctgtgtttcaataaatgccgctgcaatgcaa

SEQ ID NO: 145512 - DNA, 1387 bp, Homo sapiens
  Payload ID: 8790
  Gene Symbol: KRT85
  Gene Name: keratin 85, type II
  ENST ID: ENST00000544265
  CDS Start-End: 203-1090
acagatgattttagacttgggggaaggaatgtgcattcctaaccccatctcagaggcagaaggactgcggcggaatgaagccaggctaggacaagggctggcccatgaataatacaaaaaatagatcctggaggggccaagacaacatctggaggggattaatcccttttcaatccccggaagaacttgcccaggagttgggatggtattcaaggtccagtttctcagctccagaccttctctctcccacacccaggacgtggactgtgcctacctgcggaaatcagacctggaggccaatgtggaggccctggtggaggagtctagcttcctgaggcgcctctatgaagaggagatccgcgttctccaagcccacatctcagacacctcggtcatagtcaagatggacaacagccgagacctgaacatggactgcatcatcgctgagatcaaggctcagtatgacgatgttgccagccgcagccgggccgaggctgagtcctggtaccgtagcaagtgtgaggagatgaaggccacggtgatcaggcatggggagaccctgcgccgcaccaaggaggagatcaacgagctgaaccgcatgatccagaggctgacggccgagattgagaatgccaagtgccagcgtgccaagctggaggctgctgtggctgaggcagagcagcagggtgaggcggccctcagcgatgcccgctgcaagctggctgagctggagggcgccctgcagaaggccaagcaggacatggcctgcctgctcaaggagtaccaggaggtgatgaactccaagctgggcctggacatcgagatcgccacctacaggcgcctgctggagggcgaggaacacaggctgtgtgaaggtgtgggctctgtgaatgtctgtgtcagcagctcccgtggtggagtctcctgtgggggcctctcctacagcaccaccccagggcgccagatcacttctggcccctcagccataggcggcagcatcacggtggtggcccctgactcctgtgccccctgccagcctcgttcctccagcttcagctgcgggagtagccggtcggtccgctttgcctagtagagtcatggagccagggcttcctgccaagcacctgcctgcctgcatcactgcactgaatggcatgtgaatggaaaatgtgtgcttgcttccagaatcttctggatgttcctacagagggaaagacctacagagggaaagaccctcgggccgctcccctgcgccttttcatgctagggagatgcatcctagttgtcctcctggcagctgttttcagaggcattcccagcccttcacttaactcctacttagctccaaaatacctgtatccaatttgtattattcccccagctctca

SEQ ID NO: 145513 - DNA, 2091 bp, Homo sapiens
  Payload ID: 8791
  Gene Symbol: KRT86
  Gene Name: keratin 86, type II
  Uniprot ID: O43790
  ENST ID: ENST00000293525
  CDS Start-End: 53-1513
tccattcggacgtctccatcctcagaacctcctctcttccccaaaaagcaccatgacttgtggatcttactgtggtggccgcgccttcagctgcatctcggcctgcgggccccggcccggccgctgctgcatcaccgccgccccctaccgtggcatctcctgctaccgcggcctcaccgggggcttcggcagccacagcgtgtgcggaggctttcgggccggctcctgcggacgcagcttcggctaccgctccgggggcgtgtgcgggcccagtcccccatgcatcaccaccgtgtcggtcaacgagagcctcctcacgcccctcaacctggagatcgaccccaacgcgcagtgcgtgaagcaggaggagaaggagcagatcaagtccctcaacagcaggttcgcggccttcatcgacaaggtgcgcttcctggagcagcagaacaaactgctggagacaaagctgcagttctaccagaaccgcgagtgttgccagagcaacctggagcccctgtttgagggctacatcgagactctgcggcgggaggccgagtgcgtggaggccgacagcgggaggctggcctcagagcttaaccacgtgcaggaggtgctggagggctacaagaagaagtatgaggaggaggtttctctgagagcaacagctgagaacgagtttgtggctctgaagaaggatgtggactgcgcctacctccgcaaatcagacctggaggccaatgtggaggccctgatccaggagatcgacttcctgaggcggctgtatgaggaggagatccgcgttctccagtcccacatctcagacacctccgtggttgtcaagctggacaacagccgggacctgaacatggactgcatcattgccgagatcaaggcacagtacgatgacattgtcacccgtagccgggctgaggccgagtcctggtaccgcagcaagtgtgaggagatgaaggccacggtgatcaggcacggggagaccctgcgccgcaccaaggaggagatcaacgagctgaaccgcatgatccagaggctgacggctgaggtggagaatgccaagtgccagaattccaagctggaggctgcggtggctcagtctgagcagcagggtgaggcggccctcagcgatgcccgctgcaagttggccgagctggagggtgccctgcagaaggccaagcaggacatggcctgcctgatcagggagtaccaggaggtgatgaactccaagctgggcctggacatcgagatcgccacctacaggcgcctgctggagggcgaggagcagaggctgtgcgagggcgtcggctcggtgaatgtctgcgtcagcagctcccgcggtggcgttgtctgtggcgatctctgcgcctccactactgcccctgttgtctccaccagagtcagtagcgtccccagcaacagcaacgtggtggtgggcactactaacgcctgcgccccctccgcccgggttggcgtctgcggcggcagctgtaagaggtgctaggaggctgccgcctccgccagcgcctgtcgccgtcactctccacccagccagtacctcgcgccaccagaacgcgccgcccgcgccggcctcccaatagccgccgcccgctgcctgcactctaagcgccctccccaccgctccgctccgggagccatccccggtcgcaggagtccggggagggccgggaggcgccatggtctctctctgtagcctttcctggtagtcaatttgttgtcccgaggattcatctttttcttccgcctgccttctgttttttttgctgtatacattggtcttgcctgagctcttccccaaagcttggaggaacgggggaggcccgggaatgtccctgtctgcacgacctgggactctgcccatgtgcttttgcctgtggaatggagacgcggaccctggatagtggttctatgactctgcgagggacaggcccacgcgtgtggggagaacatctcccttccggggctgccctcaagagcttctgaaaaactaatgactctgctgccttctcctttgtctttgtttcactctgtgtttccaataaactcattgtagcgaatcaa

SEQ ID NO: 145514 - DNA, 2217 bp, Homo sapiens
  Payload ID: 8791
  Gene Symbol: KRT86
  Gene Name: keratin 86, type II
  Uniprot ID: O43790
  ENST ID: ENST00000423955
  CDS Start-End: 179-1639
tttggtgctcaagagaggcttggaggagaccacagttctttctccatgtgtgaggaattaaaggcaactgtgcagaaacacacgcagagcctgaagcccagcaaggaggatctgaacaggcttaatcaggccatccagtggctgacggtggaggtgggcagtgctgagagtcagcaccatgacttgtggatcttactgtggtggccgcgccttcagctgcatctcggcctgcgggccccggcccggccgctgctgcatcaccgccgccccctaccgtggcatctcctgctaccgcggcctcaccgggggcttcggcagccacagcgtgtgcggaggctttcgggccggctcctgcggacgcagcttcggctaccgctccgggggcgtgtgcgggcccagtcccccatgcatcaccaccgtgtcggtcaacgagagcctcctcacgcccctcaacctggagatcgaccccaacgcgcagtgcgtgaagcaggaggagaaggagcagatcaagtccctcaacagcaggttcgcggccttcatcgacaaggtgcgcttcctggagcagcagaacaaactgctggagacaaagctgcagttctaccagaaccgcgagtgttgccagagcaacctggagcccctgtttgagggctacatcgagactctgcggcgggaggccgagtgcgtggaggccgacagcgggaggctggcctcagagcttaaccacgtgcaggaggtgctggagggctacaagaagaagtatgaggaggaggtttctctgagagcaacagctgagaacgagtttgtggctctgaagaaggatgtggactgcgcctacctccgcaaatcagacctggaggccaatgtggaggccctgatccaggagatcgacttcctgaggcggctgtatgaggaggagatccgcgttctccagtcccacatctcagacacctccgtggttgtcaagctggacaacagccgggacctgaacatggactgcatcattgccgagatcaaggcacagtacgatgacattgtcacccgtagccgggctgaggccgagtcctggtaccgcagcaagtgtgaggagatgaaggccacggtgatcaggcacggggagaccctgcgccgcaccaaggaggagatcaacgagctgaaccgcatgatccagaggctgacggctgaggtggagaatgccaagtgccagaattccaagctggaggctgcggtggctcagtctgagcagcagggtgaggcggccctcagcgatgcccgctgcaagttggccgagctggagggtgccctgcagaaggccaagcaggacatggcctgcctgatcagggagtaccaggaggtgatgaactccaagctgggcctggacatcgagatcgccacctacaggcgcctgctggagggcgaggagcagaggctgtgcgagggcgtcggctcggtgaatgtctgcgtcagcagctcccgcggtggcgttgtctgtggcgatctctgcgcctccactactgcccctgttgtctccaccagagtcagtagcgtccccagcaacagcaacgtggtggtgggcactactaacgcctgcgccccctccgcccgggttggcgtctgcggcggcagctgtaagaggtgctaggaggctgccgcctccgccagcgcctgtcgccgtcactctccacccagccagtacctcgcgccaccagaacgcgccgcccgcgccggcctcccaatagccgccgcccgctgcctgcactctaagcgccctccccaccgctccgctccgggagccatccccggtcgcaggagtccggggagggccgggaggcgccatggtctctctctgtagcctttcctggtagtcaatttgttgtcccgaggattcatctttttcttccgcctgccttctgttttttttgctgtatacattggtcttgcctgagctcttccccaaagcttggaggaacgggggaggcccgggaatgtccctgtctgcacgacctgggactctgcccatgtgcttttgcctgtggaatggagacgcggaccctggatagtggttctatgactctgcgagggacaggcccacgcgtgtggggagaacatctcccttccggggctgccctcaagagcttctgaaaaactaatgactctgctgccttctcctttgtctttgtttcactctgtgtttccaataaactcattgtagcgaatcaa

SEQ ID NO: 145515 - DNA, 562 bp, Homo sapiens
  Payload ID: 8791
  Gene Symbol: KRT86
  Gene Name: keratin 86, type II
  ENST ID: ENST00000553310
  CDS Start-End: 134-562
agtttcgggtggcccagccaactttcatgccagccgtcctcagcccttcctggtgctgggtctgccaggctcatggtcagccaggcctggggccctggagaggtcctctgcatcttgaattctgtggagcaccatgacttgtggatcttactgtggtggccgcgccttcagctgcatctcggcctgcgggccccggcccggccgctgctgcatcaccgccgccccctaccgtggcatctcctgctaccgcggcctcaccgggggcttcggcagccacagcgtgtgcggaggctttcgggccggctcctgcggacgcagcttcggctaccgctccgggggcgtgtgcgggcccagtcccccatgcatcaccaccgtgtcggtcaacgagagcctcctcacgcccctcaacctggagatcgaccccaacgcgcagtgcgtgaagcaggaggagaaggagcagatcaagtccctcaacagcaggttcgcggccttcatcgacaaggtgcgcttcctggagcagcagaacaaactgctggagacaaagctgcagttctaccagaac

SEQ ID NO: 145516 - DNA, 2290 bp, Homo sapiens
  Payload ID: 8792
  Gene Symbol: KRT9
  Gene Name: keratin 9, type I
  Uniprot ID: P35527
  ENST ID: ENST00000246662
  CDS Start-End: 67-1938
ccctgcacttgggagccggtagcactcctatcactgcttctcaacccgtgagctaccagctgtgtcatgagctgcagacagttctcctcgtcctacttgagccgcagcggcgggggtggcgggggcggcctgggcagcgggggcagcataaggtcttcctacagccgcttcagctcctcagggggcggtggaggagggggccgattcagctcttctagtggctatggtgggggaagctctcgtgtctgtgggaggggaggcggtggcagttttggctacagctacggcggaggatctgggggtggttttagtgccagtagtttaggcggtggctttgggggtggttccagaggttttggtggtgcttctggaggaggctatagtagttctgggggttttggaggtggctttggtggtggttctggaggtggctttggtggtggctatgggagtgggtttggggggtttgggggctttggaggtggtgctggaggaggtgatggtggtattctgactgctaatgagaagagcaccatgcaggaactcaattctcggctggcctcttacttggataaggtgcaggctctagaggaggccaacaacgacctggagaataagatccaggattggtacgacaagaagggacctgctgctatccagaagaactactccccttattataacactattgatgatctcaaggaccagattgtggacctgacagtgggcaacaacaaaactctcctggacattgacaacactcgcatgacactggatgacttcaggataaagtttgagatggagcaaaacctgcggcaaggagtggatgctgacatcaatggcctgcggcaggtgctggacaatctgaccatggagaagtctgacctggagatgcagtatgagactctgcaggaggagctgatggccctcaagaagaatcataaggaggagatgagtcagctgactgggcagaacagtggagatgtcaatgtggagataaacgttgctcctggcaaagatctcaccaagaccctcaatgacatgcgtcaggagtatgagcagctcattgctaagaacagaaaggacatcgagaatcaatatgagactcagataacccagatcgagcatgaggtatccagtagtggtcaggaggtgcagtccagtgccaaggaggtgacccagctccggcacggtgtccaggagttggagattgagctgcagtctcagctcagcaagaaagcagctctggagaagagcttggaagacacgaagaaccgctactgtggccagctgcagatgatccaggagcagatcagtaacttggaggcccagatcactgacgtccggcaagagatcgagtgccagaatcaggaatacagccttctgctcagcattaagatgcggctggagaaggaaatcgagacctaccacaacctccttgagggaggccaggaagactttgaatcctccggagctggaaaaattggccttggaggtcgaggaggaagtggaggcagttatggaagaggatccaggggaggaagtggaggcagctatggtggaggaggaagtggaggtggctatggtggaggaagtgggtccaggggaggaagtggaggcagctacggtggaggaagtggttctggaggaggtagtggaggtggctatggtggaggaagtggaggtggccatagcggaggaagtggaggtggtcatagtggaggaagtgggggcaactatggaggaggaagtggctctggaggaggaagtgggggtggctatggtggaggaagtgggtccaggggaggaagtggaggcagccatggtggaggaagtggttttggaggtgaaagtggaggcagctacggaggcggtgaagaagcgagtggaagtggtggcggctacggaggaggaagcggaaaatcatcccattcctagtcttcttcctcaaaatctggtgaccaagatgagacaaaaggcttcctttcgcgatactagagcctctgtaaacttctcctgcccagccccagctgagcatccccagatgggcagactcccgatgaagcctgcttattggatcctgacatcaggaatagctggcaacaagcccctgtgcccgtttgggactgaactgacttggcatatgtgcctctggctttccattggcttccaaccctgcttggctttgatgccttcagggttggggagacagacctctttcctctctctggcctggggtgctctcacaccctgcacgatcttgactataataaagcttccctactgcaaa

SEQ ID NO: 145517 - DNA, 1493 bp, Homo sapiens
  Payload ID: 8792
  Gene Symbol: KRT9
  Gene Name: keratin 9, type I
  ENST ID: ENST00000588431
  CDS Start-End: 232-1404
cacttgggagccggtagcactcctatcactgcttctcaacccgtgcaggctctagaggaggccaacaacgacctggagaataagatccaggattggtacgacaagaagggacctgctgctatccagaagaactactccccttattataacactattgatgatctcaaggaccagattgtggacctgacagtgggcaacaacaaaactctcctggacattgacaacactcgcatgacactggatgacttcaggataaagtttgagatggagcaaaacctgcggcaaggagtggatgctgacatcaatggcctgcggcaggtgctggacaatctgaccatggagaagtctgacctggagatgcagtatgagactctgcaggaggagctgatggccctcaagaagaatcataaggaggagatgagtcagctgactgggcagaacagtggagatgtcaatgtggagataaacgttgctcctggcaaagatctcaccaagaccctcaatgacatgcgtcaggagtatgagcagctcattgctaagaacagaaaggacatcgagaatcaatatgagactcagataacccagatcgagcatgaggtatccagtagtggtcaggaggtgcagtccagtgccaaggaggtgacccagctccggcacggtgtccaggagttggagattgagctgcagtctcagctcagcaagaaagcagctctggagaagagcttggaagacacgaagaaccgctactgtggccagctgcagatgatccaggagcagatcagtaacttggaggcccagatcactgacgtccggcaagagatcgagtgccagaatcaggaatacagccttctgctcagcattaagatgcggctggagaaggaaatcgagacctaccacaacctccttgagggaggccaggaagactttgaatcctccggagctggaaaaattggccttggaggtcgaggaggaagtggaggcagttatggaagaggatccaggggaggaagtggaggcagctatggtggaggaggaagtggaggtggctatggtggaggaagtgggtccaggggaggaagtggaggcagctacggtggaggaagtggttctggaggaggtagtggaggtggctatggtggaggaagtggaggtggccatagcggaggaagtggaggtggtcatagtggaggaagtgggggcaactatggaggaggaagtggctctggaggaggaagtgggggtggctatggtggaggaagtgggtccaggggaggaagtggaggcagccatggtggaggaagtggttttggaggtgaaagtggaggcagctacggaggcggtgaagaagcgagtggaagtggtggcggctacggaggaggaagcggaaaatcatcccattcctagtcttcttcctcaaaatctggtgaccaagatgagacaaaaggcttcctttcgcgatactagagcctctgtaaacttctcctgcccagccc

SEQ ID NO: 145518 - DNA, 1215 bp, Homo sapiens
  Payload ID: 8793
  Gene Symbol: KRTAP10-1
  Gene Name: keratin associated protein 10-1
  Uniprot ID: P60331
  ENST ID: ENST00000400375
  CDS Start-End: 46-894
tcactcactcacacctcccgcagctcacctcctccccaccccagcatggccgcgtccaccatgtccgtctgctccagcgcttgctccgactcctggcaggtggatgcctgcccagagagctgctgtgagccccactgctgcgccctcagctgctgcgccccggccccctgcctgaccctggtctgcaccccagtgagccgtgtgtccagcccctgctgccaggcagcctgtgagcccagcccctgccaatcaggctgcaccagctcctgcacgccctcgtgctgccagcagtctagctgccagccggcttgctgcacctcctccccctgccagcaggcctgctgcgtgcccgtctgctgcaagcctgtgtgctgcctgcccacctgctctaaggattcctcttcatgctgccagcagtctagctgccagccaacttgctgtgcctcttcctccagccagcagtcctgctgtgtgcctgtttgctgcaagcctgtgtgctatgtgcccacctgctctgaggattcctcttcatgctgccagcagtctagctgccatccagcttgctgcacctcctccccctgccagcaggcctgctgcgtgcccgtccgttgcaagcctgtctgctgcaagcccatctgctgtgtgcccgtctgctctggggcttccacttcatgctgccagcagtctagctgccagccggcttgctgcaccacctcctgctgcagaccctcctcctccgtgtccctcctctgccgccctgtatgccggcccgcctgctgtatgcctgtctcctcctgctgtgcccctgcctcctcctgccaggccagctgctgccgcccggcctcctgcgtgtccctcctctgccgccccgcgtgctcccgcccggcctgctgaggcctctgctcaggccaggagtccagctgctgatgggcacccgccctgggccagctgggctcagttcctgacctgggttaggtggcttcccccacctaggacgggtccccgtgtctcccctgtgctgaggtgaccccccctccttgctcccaggagcctccatccttgcagctccccagctcttgccttccagcaggtgcccacctgcctgctaggtcccctgtcctccctcccagcttctctgctctgggtcacttggcctcgacttgaacctctcagcacctcctcctgctccccaataaactctccttggtcacctga

SEQ ID NO: 145519 - DNA, 1100 bp, Homo sapiens
  Payload ID: 8794
  Gene Symbol: KRTAP10-10
  Gene Name: keratin associated protein 10-10
  Uniprot ID: P60014
  ENST ID: ENST00000380095
  CDS Start-End: 63-818
cactcactcacacactcactcactcacacacctcccccagctcaccgcctccccactccagcatggccgcctccaccatgtccatctgctccagcgcctgcactgactcttggcgggtagtcgactgcccagagagctgctgcgagccctgctgctgtgccccagcccccagcttgaccctggtctgcaccccagtgagctgtgtgtccagcccctgctgccagacggcctgtgagcccagcgcctgccaatcaggctacaccagctcctgcacaaccccatgctaccagcagtctagctgccagccggattgctgcacctcctccccctgccagcaggcctgctgtgtgcctgtctgctgtgtgcccgtctgctgcgtgcccgtctgtaacaagcctgtgtgcttcgtgcctacctgctccgagtcttccccttcatgctgccagcagtctagctgccagccaacttgctgcacctcctccccatgccagcaggcctgctgtgtgcctgtctgctctaagtccgtctgctatgtgcctgtgtgctctggggcttccacttcatgctgccagcagtctagctgccagcctgcttgctgcaccgcctcctgctgcagaccctcctcctccgtgtccctcctctgccaccctgtgtgcaagtccacctgctgcgtgcccgtcccctcctgcggtgcctctgcctcctcctgccagcccagctgctgccgcacggcctcctgtgtttccctcctctgccgccccgtgtgctcccgccctgcctgctacagcctctgctctggccagaagtccagctgctgacagccctggatgtgatccggagtcccttcccaccaggggctgacctcccagctgccccagcaagctctgccctctctggctttgacaccctcagaaggtggggcaggctctttgtcttggggaccaggatgctcccccagtccttcccagatgatggctgcctgtgggaccccagctactcccccagacccaagttctgcagaactaacccccagcaggcctggttccaccctgggcagcaccccctctagttctaataaagccgcctctgtctcacaccaa

SEQ ID NO: 145520 - DNA, 1237 bp, Homo sapiens
  Payload ID: 8795
  Gene Symbol: KRTAP10-11
  Gene Name: keratin associated protein 10-11
  Uniprot ID: P60412
  ENST ID: ENST00000334670
  CDS Start-End: 46-942
acactcacttacacctcccccagctcacctcctccccaccccagcatggccgcgtccaccatgtctgtctgctccagcgcttactccgactcctggcaggtggacgactgcccagagagctgctgtgagcccccctgcagcgcccccagctgctgcgccccggccccctccctgagcctggtctgcaccccagtgagctgtgtgtccagcccctgctgccaggcggcctgtgagcccagcgcctgccaatcaggctgcaccagctcctgcacgccgtcatgctgccagcagtctagctgccagccggcttgctgcacctcctccccctgccagcaggcctgctgtgtgcctgtctgctgcaagactgtctgctgcaagcctgtgtgctgtgtgcctgtctgctgtggggctgcttcttcgtgctgccggcagtctagctgccagccagcttgctgtgcctcttcctcctgccagccggcctgctgtgtgcccgtctgctgcaagcctgtgtgctgtgtgtccacctgctctgaggattcctcttcatgctgccagcagtctagctgccagccagcttgctgcacctcctcctcctaccagcaggcctgctgcgtgcctgtctgctgcaagactgtctactgcaagcccatctgctgtgtgcctgtctgctctagggcttcctcttcacgctgccagcagcctagctgccagccagcttgctgcaccacctcctgctgcagaccctcctcctctgtgtccctcctctgccaccccgtgtgcaggtccacctgctgtgtgcccgtctcctcctgctgtgcccccacctcctcctgccagtccagctgctgccgcccggcctcctgcgtgtccctcctctgccgccccgcaagctcccgcctggcctgctacagcctctgctcaggcaagaagtccagctgctgagtgctcaatccttgtctcctgctgactgtgtctttgctgccaagcaggattctccagtctcaggagcccctggagtcctcagaatccaccagctccatcagtagccacagagctgctgcctgaaggggattttgagcgcgtcacactttcctccccactgtctgggaagagacaacccacaaatccctcagcaggtggactgtggctttctggagcccccttctccaaatgtgttgcttatacccaatgtgacaaagaagaactgctctaatcaataaattcttgagtcaggaaa

SEQ ID NO: 145521 - DNA, 873 bp, Homo sapiens
  Payload ID: 8796
  Gene Symbol: KRTAP10-12
  Gene Name: keratin associated protein 10-12
  Uniprot ID: P60413
  ENST ID: ENST00000400365
  CDS Start-End: 31-768
agctcaacccccagcacggctgcatccaccatgtccgtctgctccagcgacctgagctatggcagccgcgtctgccttcctggttcctgtgactcttgctccgactcctggcaggtggacgactgcccagagagctgctgtgagcccccctgctgcgccccggccccctgcctgagcctggtctgcaccccagtgagccgtgtatccagcccctgctgccgagtgacctgtgagcccagcccctgccaatcaggctgcaccagctcctgcacgccctcgtgctgccagcagtctagctgccagccggcttgctgcacctcctccccctgccagcaggcctgctgcgtgcccgtctgctgcaagactgtctgctgcaagcctgtgtgctgtatgcccgtctgctgtgggccttcttcttcatgctgccagcagtctagctgccagccagcttgctgcatctcctccccgtgtcaacagtcctgctgtgtgcccgtctgctgcaagcccatctgctgtgtgcctgtctgctctggggcctcctctctgtgctgccagcagtctagctgccagccagcttgctgcaccacctcctgctgcagaccctcctcctccgtgtccctcctctgccgccctgtgtgcagacccgcccgccgcgtgcccgtcccctcctgctgtgtccccacctcctcctgccagccaagctgcggccgcctggcctcctgcgggtccctcctctgccgccccacatgttcccgcctggcctgctgaggcctctgctcaggccagaagtccagctgctgccaggcatgtcccccagggccactgggcactatgagtcccccacctctcccactactggcccctcggctgctc

SEQ ID NO: 145522 - DNA, 282 bp, Homo sapiens
  Payload ID: 8796
  Gene Symbol: KRTAP10-12
  Gene Name: keratin associated protein 10-12
  ENST ID: ENST00000618832
  CDS Start-End: 1-282
tgcaccagctcctgcacgccctcgtgctgccagcagtctagctgccagccggcttgctgcacctcctccccctgccagcaggcctgctgcgtgcccgtctgctgcaagactgtctgctgcaagccttctagctgccagccagcttgctgcatctcctccccgtgtcaacagtcctgctgtgtgcccgtctgctgcaagcccatctgctgtgtgcctccagcttgctgcaccacctcctgctgcagaccctcctcctccgtgtccctcctctgccgccctgtg

SEQ ID NO: 145523 - DNA, 1149 bp, Homo sapiens
  Payload ID: 8797
  Gene Symbol: KRTAP10-2
  Gene Name: keratin associated protein 10-2
  Uniprot ID: P60368
  ENST ID: ENST00000391621
  CDS Start-End: 48-815
tcactcactcacacacctcccccagctcacctcctccccactccagcatggccgcctccaccatgtccatctgctccagcgcctgcaccaactcctggcaggtggacgactgcccagagagctgctgtgagctcccctgcggcacccccagctgctgtgccccagccccctgcctgaccctggtctgcaccccagtgagctgtgtgtccagcccctgctgccaggcggcctgtgagcccagcgcctgccaatcaggctgcaccagctcctgcacgccctcgtgctgccagcagtctagctgccagccggcttgctgcacctcctccccctgccagcaggcctgctgcgtgcccgtctgctgcaagcctgtgtgctgtgtgcccgtctgctgtggggcttcttcatgctgccagcagtctagctgccagccagcttgctgtgcctcttcctcctgccagcagtcctgccgtgtgcctgtctgctgcaaagctgtgtgctgcgtgcccacctgctctgagtcatcctcttcatgctgccagcagtctagctgccagccggcttgctgcacctcctccccgtgtcagcagtcctgctgtgtgtccgtctgctgcaagcctgtctgctgcaagtccatctgctgtgtacctgtttgctctggggcttcctctccgtgctgccagcagtctagctgccagccagcttgctgcacctcctcctgctgcagaccctcctcctctgtgtccctcctctgccgccccgtgtgctcccgcccagcctcctgcagcttttcctcaggccaaaagtctagctgctgatggccatgtcccccagggccagccgggctcaggccccacctccctgccagtccttggacctcccagcccacccagcctcagcacagctcagcacagaaggagcagccccagccacagccgcccagccccggggtctcagatgctcactggctcctctctgacctcccgccgggcgggcgagccctggcttctcctcacggtgcttcctggctgcagaccacaaccctccgctggtcgctggtcgctggttggggatgggccctcctgacctgggtctcacccccaggagcgtcaccctctgcctctgagcaccaataaagcgtctgcggcccca

SEQ ID NO: 145524 - DNA, 971 bp, Homo sapiens
  Payload ID: 8798
  Gene Symbol: KRTAP10-3
  Gene Name: keratin associated protein 10-3
  Uniprot ID: P60369
  ENST ID: ENST00000391620
  CDS Start-End: 46-711
tcactcactcacgtctcccccagctcacctcctccccaccccagcatggccacgtctaccatgtccgtctgctccagcgcttactctgactcctggcaggtggacgcctgcccagagagctgctgtgagcccccctgctgcgccaccagctgctgcgccccggccccctgcctgaccctggtctgcaccccagtgagctgtgtgtccagcccctgctgccaggcggcctgtgagcccagcccctgccagtcaggctgcaccagctcctgcacgccctcgtgctgccagcagtctagctgccagccagcttgctgcacatcctccccctgccagcaggcctgctgcgtgcctgtctgctgcaagccagtctgctgtgtgcccgtctgctgcaagcctgtctgctgcaagcccatctgctgtgtgcccgtctgctctggggcttcctcttcatgctgccagcagtctagccgccagccggcttgctgcaccacctcctgctgcagaccctcctcctccgtgtccctcctctgccgccccgtgtgcaggtccacctgctgtgtgcccatcccctcctgctgtgcccctgcctccacctgccagcccagctgctgccgcccggcctcctgcgtgtccctcctctgccgccccacgtgctcccgcctctcttccgcgtgctgcggcctctcctcaggccagaagtccagctgctgacgggcaggtcccgtttctccagagttgttccagggccatctctgacttccgaaaatccttgcagccctgagccctgtctgagtctcctctgcccatagccactgcacctccagccagcaatgctgagctttcatgccgattccctccaggcatgcatctctcccacaccctcatctccatgctggccagccggtggtcactgtgtcctgccccatgtgagtgatcagtctgtcaacaaataaagtcaccaatgtgccctc

SEQ ID NO: 145525 - DNA, 1643 bp, Homo sapiens
  Payload ID: 8799
  Gene Symbol: KRTAP10-4
  Gene Name: keratin associated protein 10-4
  Uniprot ID: P60372
  ENST ID: ENST00000400374
  CDS Start-End: 31-1236
agctcaacccccagcacagcagcatccaccatgtccgtctgctccagcgacctgagctacagcagccgcgtctgccttcctggttcctgtgactcttgctccgactcctggcaggtggacgactgcccagagagctgctgcgagcccccctgctgcgcccccagctgctgcgccccggccccctgcctgagcctggtctgcaccccagtgagccgtgtgtccagcccctgctgcccagtgacctgtgagcccagcccctgccaatcaggctgcaccagctcctgcacgccctcgtgctgccagcagtctagctgccagctggcttgctgtgcctcctccccctgccagcaggcctgctgcgtgcccgtctgctgcaagactgtctgctgcaagcctgtgtgctgtgtgcccgtctgctgtggggattcttcatgctgccagcagtctagctgccagtcagcttgctgcacctcctccccctgccagcaggcctgctgtgtgcccatctgctgcaagcctgtctgctctgggatttcctcttcgtgctgccagcagtctagctgtgtgagctgtgtgtccagcccctgctgccaggcggtctgtgagcccagcccctgccaatcaggctgcatcagctcctgcacgccctcgtgctgccagcagtctagctgccagccggcttgctgcacctcctcctcctgccagcaggcctgctgcgtgcccgtctgctgcaagactgtctgctgcaagcctgtgtgctctgaggattcctcttcatgctgccagcagtctagctgccagccggcttgctgcacctcctctccctgccagcaggcttgctgtgtgcctgtctgctgcaagcctgtgtgctgcaagcctgtctgctctgtgcccatctgctctggggcttcctctctgtgctgccagcagtctagctgccagccagcttgctgcacctcctcccaaagccagcagggctgctgcgtgcccgtctgctgcaagcctgtgagctgtgtgcctgtttgctctggggcttcctcttcatgctgccagcaatctagctgccagccagcttgctgcaccacctcctgctgcagaccctcctcctccgtgtccctcctctgccgccccgtgtgcaggcccgcctgctgcgtgcccgtcccttcctgctgtgctcccacctcctcctgccaacccagctgctgccgcccagcctcctgcgtgtccctcctctgacgccccgtgtgctcccgcccagcctgctgaggcctccgctcaggtcagaagcccagctgctgatggacacgccccccagtgccagccaggctcaggtcccacctgaaagctgatagtcgcgtcctgaattgctcctgcactttgaccatttcctggtgtctgctgttgagctggacaatggaagaactgaaagtctatactcaatgctgcagccctcttgcggggggaggggggcgcttctagaaagttcccatggcagtggcctcccctccatatctcccacctctcatgagggtcagttcagccttgacccgtgaggtctctgtcctcctggctcagagccgcagagccttctttggacgccctcaagctgaccaataaaggccctgagactgcaatggcgctga

SEQ ID NO: 145526 - DNA, 1150 bp, Homo sapiens
  Payload ID: 8800
  Gene Symbol: KRTAP10-5
  Gene Name: keratin associated protein 10-5
  Uniprot ID: P60370
  ENST ID: ENST00000400372
  CDS Start-End: 27-842
ccagctcacgtcttccccaccccagcatggccgcgtgcaccatgtccgtctgctccagcgcttgctctgactcctggcgagtggacgactgcccagagagctgctgtgagcccccctgcggcaccgccccctgcctgaccctggtctgcaccccagtgagctgtgtgtccagcccctgctgccaggcggcctgtgagcccagcccctgccaatcaggctgcaccagctcctgcacgccctcgtgctgccagccggcttgctgcgcctcctccccctgccagcaggcctgctgcgtgcccgtctgctgcaagcctgtgtgctgcctgcccacctgctctaaggattcctcttcatgctgccagcagtctagctgccagccaacttgctgtgcctcttcctcctgccagcagtcctgctgtgtgcctgtctgctgcaagcccgtgtgctgtgtgcccacctgttctgaggattcctcttcatgctgccagcattctagctgccagccgacttgctgcacctcctccccctgccagcagtcctgctacgtgcctgtctgttgcaagcctgtctgctgcaaacccatctgctgtgtgcccgtctgctctggggcttccacttcatgctgccagcagtctagctgtcagccggcttgctgcaccacctcctgctgcagaccctcctcctccgtgtccctcctctgccgccccatatgcaggcccgcctgctgcctgcccatctcctcctgctgtgcccctgcctcctcctaccaggccagctgctgccgcccggcctcctgcgtgtccctcctctgccgccccgcgtgctcccccctggcctgctgaggcctctgctcaggccaggagtccagttgctgatgtgcacatcccccagggccaactggtcctgactcgggttaggaggttgcccccgcttgggacggggcccccatgtgctgaggtgacccccccctccatactcccaggaatctccatcctcgaagctccccagctcctgcctcccagcaggggcccacctgcctgttgggtcccctgtcctccctcccagcttctctgccccatgtcacttggcctcgacttgaacctgtcagcacctcctcctgctccccaataaactccccttggtcgcctga

SEQ ID NO: 145527 - DNA, 1238 bp, Homo sapiens
  Payload ID: 8801
  Gene Symbol: KRTAP10-6
  Gene Name: keratin associated protein 10-6
  Uniprot ID: P60371
  ENST ID: ENST00000400368
  CDS Start-End: 22-1119
ctccaccagttcaaccccagcatggccgcgtccaccatgtccgtctgctccagcgacctgagctacggcagccgcgtctgccttcctggttcctgtgactcttgctccgactcctggcaggtggacgactgcccagagagctgctgtgagcccccctgctgcgccccggccccctgcctgagcctggtctgcaccccagtgagccgtgtgtccagcccctgctgcccagtgacctgtgagcccagcccctgccaatcaggctgcaccagctcctgcacgccctcgtgctgccagcagtctagctgccagctggcttgctgtgcctcctccccctgccagcaggcctgctgcgtgcccgtctgctgcaagactgtctgctgcaagcctgtgtgctgtgtgtccgtctgctgtggggattcttcatgctgccagcagtctagctgccagtcagcttgctgcacctcctccccctgccagcaggcctgctgtgtgcccgtctgctgcaagcctgtctgctctgggatttcctcttcgtgctgccagcagtctagctgtgtgagctgtgtgtccagcccctgctgccaggcggtctgtgagcccagcccctgccaatcaggctgcaccagctcctgcacaccctcatgctgccagcagtctagctgccagccaacttgctgcacctcctccccctgccagcaggcctgctgcgtgcccgtctgctgcgtgcctgtgtgctgtgtgcccacctgctctgaggattcctcttcatgctgccagcagtctagctgccagccagcttgctgcacctcctccccctgccagcacgcctgctgtgtgcccgtctgctctggggcttccacatcatgctgccagcagtctagctgccagccggcttgctgcaccgcctcctgctgcagatcctcctcctccgtgtccctcctctgccaccctgtgtgcaagtccacctgctgcgtgcccgtcccctcctgtggtgcctctgcctcctcctgccagcccagctgctgccgcacggcctcctgtgtttccctcctctgccgccccatgtgctcccgccctgcctgctacagcctctgctctggccagaagtccagctgctgacagccctggatgtgatccggagtcccttcccaccaggggctgacctcccagctgccccagcaagctctgccctctctggctttgacaccctcagaagatggggcaggctctttgtctta

SEQ ID NO: 145528 - DNA, 790 bp, Homo sapiens
  Payload ID: 8801
  Gene Symbol: KRTAP10-6
  Gene Name: keratin associated protein 10-6
  ENST ID: ENST00000622352
  CDS Start-End: 30-764
agttcaaccccagcatggccgcgtccaccatgtccgtctgctccagcgacctgagctacggcagccgcgtctgccttcctggttcctgtgactcttgctccgactcctggcaggtggacgactgcccagagagctgctgtgagcccccctgctgcgccccggccccctgcctgagcctggtctgcaccccagtgagccgtgtgtccagcccctgctgcccagtgacctgtgagcccagcccctgccaatcaggctgcaccagctcctgcacgccctcgtgctgccagcagtctagctgccagctggcttgctgtgcctcctccccctgccagcaggcctgctgcgtgcccgtctgctgcaagactgtctgctgcaagcctgtgtgctgtgtgtccgtctgctgtggggattcttcatgctgccagcagtctagctgccagtcagcttgctgcacctcctccccctgccagcaggcctgctgtgtgcccgtctgctgcaagcccatctgctgtgtgcccgtctgctctggggcttccacttcatgctgccagcagtctagctgtcagccggcttgctgcaccacctcctgctgcagaccctcctcctccgtgtccctcctctgccgccccatatgcaggcccgcctgctgcctgcccatctcctcctgctgtgcccctgcctcctcctaccaggccagctgctgccgcccggcctcctgcgtgtccctcctctgccgccccgcgtgctcccccctggcctgctgaggcctctgctcaggccaggagtccag

SEQ ID NO: 145529 - DNA, 1578 bp, Homo sapiens
  Payload ID: 8802
  Gene Symbol: KRTAP10-7
  Gene Name: keratin associated protein 10-7
  Uniprot ID: P60409
  ENST ID: ENST00000609664
  CDS Start-End: 26-1138
catctcctccagttcaatccccagcatggctgcgtccactatgtctgtctgctccagcgacctgagctacggcagccgcgtctgccttcctggttcctgtgactcttgctccgactcctggcaggtggacgactgcccagagagctgctgcgagcccccctgctgcgccccggccccctgcctgagcctggtctgcaccccagtgagctatgtgtccagcccctgctgccgagtgacctgtgagcccagcccctgccaatcaggctgcaccagctcctgcacgccctcgtgctgccagcagtctagctgccagctggcttgctgtgcctcctccccctgccagcaggcctgctgcgtgcccgtctgctgcaagactgtctgctgcaagcctgtgtactgtgtgcctgtctgcagtggggattcttcatgctgccagcagtctagctgccagtcagcttgctgcacctcctccccctgccagcaggcctgctgtgtgcccatctgctgcaagcctgtctgctctgggatttcctcttcgtgctgccagcagtctagctgtgtgagctgtgtgtccagtccctgctgccaggcggtctgtgagcccagcccctgccaatcaggctgcatcagctcctgcacgccctcgtgctgccagcagtctagctgcaagccggcttgctgcacctcctccccttgccagcaggcctgctgtgtgcctgtctgctgcaagcccgtctgctgtgtgcccacctgctctgatgattccggttcatgctgccagccagcttgctgcacctcctcccaaagccagcagggctgctgcgtgcccgtctgctgtaagcctgtgtgctgtgtgcccgtctgctctggggcttccacttcatgctgccagcagtctagctgccagccggcttgctgcaccacctcctgctgcagaccctcctcctccgtgtccctcctctgccgccccgtgtgcaggcccgcctgctgcgtgcccgtcccctcctgctgcgcccccacctcctcctgccaggccagctgctgccgcccagcctcctgtgtgtctctcctttgccgccccgcatgctcccgcccggcctgctgtggccccacctcaacccagaagtccagctgctgagtgatctccttaagatcatccaaagcctgagtgctcactgccacctgcacccctggattctttacccttgacggctctccacatcccgctcctaagccctgcagtggacgtcagtggtcagctggccatccagtgtgcgcttctcctcctagaagcagctcagctgtttctccaagtcttgactttcccccaattacccagccctgcttccccagcaacaggtgggcagtgaccccagcaaggccagcgggtgctcccaggccatagcccggtgtggggagaaatgagggtagacaggtaccaactgggtttctcgtcactgtcccagctcagtggcgagccctgctcctcccctgctgtgggcctgggcctctttctctgtcttccctgaccacgggagcaggtcagacccttctaataaactcctttcctaaaaagta

SEQ ID NO: 145530 - DNA, 794 bp, Homo sapiens
  Payload ID: 8802
  Gene Symbol: KRTAP10-7
  Gene Name: keratin associated protein 10-7
  ENST ID: ENST00000616689
  CDS Start-End: 31-768
agttcaatccccagcatggctgcgtccactatgtctgtctgctccagcgacctgagctacggcagccgcgtctgccttcctggttcctgtgactcttgctccgactcctggcaggtggacgactgcccagagagctgctgcgagcccccctgctgcgccccggccccctgcctgagcctggtctgcaccccagtgagctatgtgtccagcccctgctgccgagtgacctgtgagcccagcccctgccaatcaggctgcaccagctcctgcacgccctcgtgctgccagcagtctagctgccagctggcttgctgtgcctcctccccctgccagcaggcctgctgcgtgcccgtctgctgcaagactgtctgctgcaagcctgtgtgctgtgtgcccgtctgctctggggcttccacttcatgctgccagcagtctagctgccagtcagcttgctgcaccttctccccatgccaacaggcctgctgtgtgcccatctgctgcaagcccatctgctgtgtgcctgtctgctctggggcttcctctctgtgctgccagaagtctagctgccagccggcttgctgcaccacctcctgctgcagaccctcctcctccgtgtccctcctctgccgccctgtgtgccggcctgcctgctgtgtgcctgtcccctcctgttgtgtccctgcctcctcctgccagcccagctgctgccacccggcctcctgcctgtccttcctctgccgccccgcgtgctcccgcctggcctgctgaggcctctgctcaggccaggagtccag

SEQ ID NO: 145531 - DNA, 876 bp, Homo sapiens
  Payload ID: 8803
  Gene Symbol: KRTAP10-8
  Gene Name: keratin associated protein 10-8
  Uniprot ID: P60410
  ENST ID: ENST00000334662
  CDS Start-End: 23-802
accacccagtccagcacccaccatggctgacgcctgctgcaccaggacgtatgtgattgctgcatccaccatgtctgtctgctccagtgacgtgggccatgtcagccgagtctcctcccccagcacctgcactggctcctcctggcaggtggacaattgccaggaaagctgctgcgagccccgctcctgtgcctccagctgctgtacccctagctgctgtgccccagccccctgcctggccctggtctgtgccccagtgagctgtgagcccagcccctgccaatcaggctgcaccgactcctgcacaccttcatgctgccagcagtctagctgccagccggcttgctgcacctcctccccctgccaacaggcctgctgtgtgcctgtgtgctgcaagtccaactgctgcaagcccgtgtgctgcgtgtccatctgctctggagcttcctccccatgctgccagcagtctagctgccagtcagcttgctgcaccttctccccatgccaacaggcctgctgtgtgcccatctgctgcaagcccatctgctgtgtgcctgtctgctctggggcttcctctctgtgctgccagaagtctagctgccagccggcttgctgcaccacctcctgctgcagaccctcctcctccgtgtccctcctctgccgccctgtgtgccggcctgcctgctgtgtgcctgtcccctcctgttgtgtccctgcctcctcctgccagcccagctgctgccacccggcctcctgcctgtccttcctctgccgccccgcgtgctcccgcctggcctgctgaggcctctgctcaggccaggagtccagctgctgatgggcacgtcccccagggccagccggctccggtcctgtcct

SEQ ID NO: 145532 - DNA, 1171 bp, Homo sapiens
  Payload ID: 8804
  Gene Symbol: KRTAP10-9
  Gene Name: keratin associated protein 10-9
  Uniprot ID: P60411
  ENST ID: ENST00000397911
  CDS Start-End: 50-928
tcacacactcacttacacctcccccagctcacctcctccccaccccagcatggccgcgtccaccatgtccatccgctccagcgcttactccgactcctggcaggtggacgactgcccagagagctgctgtgagcccccctgctgcgccaccagctgctgcgccccggccccctgcctgaccctggtctgcaccccagtgagccgtgtatccagcccctgctgccaggtgacctgtgagcccagcccctgccaatcaggctgcaccagctcctgcacgccctcgtgctgccagcagtctagctgccagccggcttactgcacctcctccccctgccagcaggcctgctgcgtgcccgtctgctgcaagcctgtgtgctgcgtgcccgtctgctgtggggcttcttcgtgctgccaacagtctagctaccagccagcttgctgtgcctcttcctcctgccagccggcctgctgtgtgcccgtctgctgcaaacctgtgtgctgtgcgcccacctgctctgaggattcctattcatgctgccaacagtctagctgccagccagcttgctgcacttcctccccctgccagcagtcctactgtgtgcctgtctgctgtaagcctgtctgctgcaaacccatctgctgtgtgcctgtctgctctggggcttcctctttgtgctgccagcagtctggctgccagccggcttgctgcaccacctcctgctgcagaccctcctcctctgtgtccctcctctgccgccctgtgtgcaggcccgcctgctgcgtgcccgtctcctcctgctgtgcccccacctcctcccgccagcccagctattgccgccaggcctcctgtgtgtcccttctctgccgccctgtgtgctcccgcccggcctgctacagcttctcctcaggccagaagtccagctgctgacggtcatgtcccccagggccagccgggctcaggccccacctccctgccagtccttggacctcccagcccacccagcctcagcacagctcaacacagaaggagcagccccagccacagccgcccagccccggggtctcagatgctcactggctcctccctgacctcccccccgggcaggcgagccctggcttctcctcacggtgcttcctggctgcagaccacaaccctccgctggtcgctggt

SEQ ID NO: 145533 - DNA, 615 bp, Homo sapiens
  Payload ID: 8804
  Gene Symbol: KRTAP10-9
  Gene Name: keratin associated protein 10-9
  ENST ID: ENST00000616529
  CDS Start-End: 25-603
agctcacctcctccccaccccagcatggccgcgtccaccatgtccatccgctccagcgcttactccgactcctggcaggtggacgactgcccagagagctgctgtgagcccccctgctgcgccaccagctgctgcgccccggccccctgcctgaccctggtctgcaccccagtgagccgtgtatccagcccctgctgccaggtgacctgtgagcccagcccctgccaatcaggctgcaccagctcctgcacgccctcgtgctgccagcagtctagctgccagccggcttactgcacctcctccccctgccagcaggcctgctgcgtgcccgtctgctgcaagcctgtgtgctgcgtgcccgtctgctgtaagcctgtctgctgcaaacccatctgctgtgtgcctgtctgctctggggcttcctctttgtgctgccagcagtctggctgccagccggcttgctgcaccacctcctgctgcagaccctcctcctctgtgtccctcctctgccgccctgcctcctgtgtgtcccttctctgccgccctgtgtgctcccgcccggcctgctacagcttctcctcaggccagaagtccagctgctgacggtcatgtccc

SEQ ID NO: 145534 - DNA, 903 bp, Homo sapiens
  Payload ID: 8805
  Gene Symbol: KRTAP1-1
  Gene Name: keratin associated protein 1-1
  Uniprot ID: Q07627
  ENST ID: ENST00000306271
  CDS Start-End: 65-598
aataggcagccataattcagaaactcctccaagcaacccaaccttcagatcaactcctgacaccatggcctgctgtcagaccagcttctgtggatttcccagctgctccaccagtgggacctgcggctccagctgctgccagccaagctgctgtgagaccagctcctgccagccacgctgctgtgagaccagctgctgccagccaagctgctgccagaccagcttctgtggatttcctagcttctcaaccggtgggacttgtgactctagctgctgccagccaagctgctgtgaaactagctgctgccagccaagctgctaccagaccagctcctgcggaactggctgtggcattggtggtggcattggctatggccaggagggcagcagtggagctgtgagcacccgtatcaggtggtgccgcccagactgccgtgtggagggtacctgcctgcccccctgctgcgtggtgagctgcacacccccatcctgctgccagctgcaccacgccgaggcctcctgctgccgcccatcctactgtggacagtcctgttgccgcccagtctgctgctgctactgctctgagcccacttgttgaaaacctccttctgctggggatcctgataagatggcaccttaaaactagccaaattagaatcctaacaatcttctgaactccagtacctataactgggcttgcaacctctcatcacacagccacataaattccctaggaagtaaattcatttacaatggaagaccaaaaatttttcctagacctggttgtcagccaaagtcctacaatgtgaaaagagttagatactattttactataaatatcacctgaaatatttcaacagttattgggacttaaatttaataaaagttttcatctcttcaatg

SEQ ID NO: 145535 - DNA, 903 bp, Homo sapiens; identical to SEQ ID NO: 145534
  Payload ID: 8805
  Gene Symbol: KRTAP1-1
  Gene Name: keratin associated protein 1-1
  Uniprot ID: Q07627
  ENST ID: ENST00000573871
  CDS Start-End: 65-598

SEQ ID NO: 145536 - DNA, 912 bp, Homo sapiens
  Payload ID: 8806
  Gene Symbol: KRTAP11-1
  Gene Name: keratin associated protein 11-1
  Uniprot ID: Q8IUC1
  ENST ID: ENST00000332378
  CDS Start-End: 32-523
gcaagctacctgcagccctctgtctgacatcatgtccttcaactgctccacaagaaattgctcttccaggcccattggaggacgctgcattgttccagtggcccaagttaccacgacttccaccactgatgctgactgcctgggcggcatctgtttgcccagttccttccagactggctcttggctcctggaccactgtcaagagacctgctgtgagcccactgcttgccagccaacctgttaccggcgaacttcatgtgtctccaacccttgccaggtgacttgctctcgacaaactacctgtatttccaacccctgctcaactacctacagccggccgctcacctttgtctctagtggatgtcagcccctgggaggcatctccagtgtctgccaaccagtgggcggcatctctactgtctgccaaccagtgggaggagtctctactgtctgccagccagcctgtggggtctccaggacgtatcagcagtcctgcgtgtccagctgccgaagaacctgctaagtgtgtaggagccagtgagcgaatcaagactccacgacctgccagctgtttccaggatcttccagcatgctgcttgtccctgaatagctcttcatagctgacccttcttgtgaccgcctgactgctggctactatccatgcacacgctgtctttagcactctaaaatttttctggccagccctaagcttgttttaagggttgctcactggtgctgtgtatgcctctggatgtgtccagaagctttaccatccacaccccagtctctgatgcttttgacatgttttcaccttgctgctgtatctcctggcctctgcttttgtgtctcacaaaaacagagcttgtctcaccatgtatttctcaataaacctgcattagttggcattgcaaa

SEQ ID NO: 145537 - DNA, 588 bp, Homo sapiens
  Payload ID: 8807
  Gene Symbol: KRTAP12-1
  Gene Name: keratin associated protein 12-1
  Uniprot ID: P59990
  ENST ID: ENST00000391617
  CDS Start-End: 41-331
cactgccctctgcctcgaccttatccagccacacgccaccatgtgccacaccagctgctcctcgggctgccagccagcctgctgcgcgcccagcccctgccaggcatcctgttacatccccgtgggctgccagtcctccgtgtgcgtgcccgtgagcttcaagccagccgtgtgtgtgcccgtgagatgccagtcctctgtgtgcgtgcccgtgagctgcaggcccgtcgtgtatgcggctccctcctgccagtcctctgggtgctgccagccttcctgcaccagcgtcctctgcagacccatctcctgcagcaccccttcctgctgctgagcatgaatctccagacccgctgctcccagtgcagatgaggccacacctgtacactccctggatgagtcctcagttggtcttctgcacatggtgcaggtgaaaagcatgctcagtgaaccctctgaattctggatcgagaatataatagaatgatctggagccctggctgaacttgcctatccccccagggaagtctggggtcccagagtcattctctgaccccatgagagtcaaataaaccagctttccccatgcaa

SEQ ID NO: 145538 - DNA, 739 bp, Homo sapiens
  Payload ID: 8808
  Gene Symbol: KRTAP12-2
  Gene Name: keratin associated protein 12-2
  Uniprot ID: P59991
  ENST ID: ENST00000360770
  CDS Start-End: 42-482
tcactgccctctgcctcgaccttatccagccacacgccaccatgtgtcataccagctgctcctcgggctgccagccagcctgctgcgcgcccagcccctgccagccagcctgttgtgtgcccagctcctgccaggcatcctgctgtgtgcctgtgggctgccagtcctccgtgtgtgtgcccgtgagcttcaagccagccgtgtgcctgcccgtgagctgccagtcttctgtgtgtgtgcccatgagcttcaagtcagctgtgtgcgtgcccgtgagctgccagtcttctgtgtgtgtgcctgtgagctgcaggcccattgtgtgtgcagccccctcctgccagtcctccctgtgcgtgcctgtgagctgcaggcctgtcgtgtatgcggctccgtcctgccagtcctctgggtgctgccagccctcctgcaccagcgtcctctgcagacccatctcctacagtatctcttcctgctgctgagcatgaatctccagacccgctgctcccagtgcagatgaggccacacctgtacactccctggatgagtcctcagttggtcttctgcacatggtgcaggtgaaaagcatgctcagttgaaccctctgaattctggattgagaatgtgacagaatgatctggagcccttgctgaccttgcccatccccccagggaagtctggggtcccagagtcattctctgaccccatgagagccaaataaaccagctttccccatgca

SEQ ID NO: 145539 - DNA, 410 bp, Homo sapiens
  Payload ID: 8809
  Gene Symbol: KRTAP12-3
  Gene Name: keratin associated protein 12-3
  Uniprot ID: P60328
  ENST ID: ENST00000397907
  CDS Start-End: 49-339
cagacatcaccatcctcctccccagtaccagcccagccacacgccaccatgtgccacaccagctgctccccagcctgccagccaacctgctgcatacacagcccctgccaggcatcctgctatgtgcccgtgagctgccagtcctccgtgtgcatgcccgtgagctgcacgcgcattgtgtgcgtggctccctcctgccagccctccgtgtgcgtgcccgtgagctgcaggcccatcatatatgtgactccctcttgccaatcttcggggtgctgccagcccccctgcaccactgccctctgcagacccatctcctgcagcaccccttcctgctgctgaccagctgctcctggtacacgggggtacacacctgtatccctccgtgaataagcatctggtggacccccaga

SEQ ID NO: 145540 - DNA, 441 bp, Homo sapiens
  Payload ID: 8809
  Gene Symbol: KRTAP12-3
  Gene Name: keratin associated protein 12-3
  ENST ID: ENST00000619249
  CDS Start-End: 1-441
tgccaatcaggctgcaccagctcctgcacgccgtcatgctgccagcagtctagctgccagccggcttgctgcacctcctccccctgccagcaggcctgctgtgtgcctgtctgctgcaagactgtctgctgcaagccttctagctgccagccagcttgctgtgcctcttcctcctgccagccggcctgctgtgtgcccgtctgctgcaagcctgcatcctgctatgtgcccgtgagctgccagtcctccgtgtgcatgcccgtgagctgcacgcgcattgtgtgcgtggctccctcctgccagccctccgtgtgcgtgcccgtgagctgcaggcccatcatatatgtgactccctcttgccaatcttcggggtgctgccagcccccctgcaccactgccctctgcagacccatctcctgcagcaccccttcctgctgctga

SEQ ID NO: 145541 - DNA, 447 bp, Homo sapiens
  Payload ID: 8810
  Gene Symbol: KRTAP12-4
  Gene Name: keratin associated protein 12-4
  Uniprot ID: P60329
  ENST ID: ENST00000391618
  CDS Start-End: 46-384
agaccagccctgtcctctgcgccccccacctgtccacactccatcatgtgccacaccagccactcttcgggctgcccaatggcctgccctggctccccgtgctgtgtccccagcacctgctacccacccgagggctatgggacctcctgctgctgctcagccccctgtgtggctctgctgtgccggcccctgtgtggggtatccacctgctgccagccagcctgctgtgtgcccagcccctgccaggtggcctgctgtgtgcctgtgagctgcaagcctgttttgtgtgtggcttccttctgcccaacctctgggtgctgccagcccttctgccccaccctggtctatagacctgtcacctggagcacccccactggctgctgagcaggtggcctcctatgaccctcgtaggtgcgaggtcagaagccagcaggctctctgaactcc

SEQ ID NO: 145542 - DNA, 972 bp, Homo sapiens
  Payload ID: 8811
  Gene Symbol: KRTAP1-3
  Gene Name: keratin associated protein 1-3
  Uniprot ID: Q8IUG1
  ENST ID: ENST00000344363
  CDS Start-End: 35-538
aagcaacccagacttcataccagctcccaacaccatgacctgctgccagaccagcttctgtggatatcccagctgctccaccagtgggacatgcggctccagctgctgccagccaagctgctgtgagaccagctgctgccagccaagctgctgccagaccagcttctgcggatttcctagcttctcaactagtgggacctgcagctccagttgctgccagccaagctgctgtgagaccagctgctgccagccaagctgctgccagaccagctcctgcggaactggctgtggcattggtggtggcattggctatggccaggagggcagcagtggagctgtgagcacccgtatcaggtggtgccgcccagactgccgtgtggagggtacctgcctgcccccctgctgtgtggtgagctgcacacccccaacctgctgccagctgcaccacgccgaggcctcctgctgccgcccatcctactgtggacagtcctgctgccgcccagtctgctgctgctactcctgtgagcccacctgctaaaagccagtttgctgattttcaacttgaaatttccactttcagttccattcatgaacgaattatttcttcaagcacttatggacaacgaacaaattcttcaacctttctttgtctttcttatgggggttaccaaatattttggcctcagaattatctgattcctttcaattccagaaagaccttactcttctctctgaggacgccaaaatacaaatttgacccaagaaatgaaaaagccgatttaccttgaaactgagcctttgcaagcattgaagcccacgctctgagtctcagcgccgacgagaccatggaagagccatctgtccttctcaggacactcacttcctgtatcccaccgtcctgcaaattgcaccccctatgaaagaggaataatataccaaggtctaataaattttaactattggtgcaacaaa

SEQ ID NO: 145543 - DNA, 972 bp, Homo sapiens; identical to SEQ ID NO: 145542
  Payload ID: 8811
  Gene Symbol: KRTAP1-3
  Gene Name: keratin associated protein 1-3
  Uniprot ID: Q8IUG1
  ENST ID: ENST00000575715
  CDS Start-End: 35-538

SEQ ID NO: 145544 - DNA, 749 bp, Homo sapiens
  Payload ID: 8812
  Gene Symbol: KRTAP13-1
  Gene Name: keratin associated protein 13-1
  Uniprot ID: Q8IUC0
  ENST ID: ENST00000355459
  CDS Start-End: 14-532
atctcccatcaacatgtcctacaactgctgctctggaaacttctcctcccgctcctgtggtggctacctgcactacccagcctcctcctgtggcttttcctaccccagcaaccaggtctacagcactgacctctgctctcccagcacgtgccagctgggttcctctctctataggggctgtcagcagacctgctgggagcccaccagctgccagacatcctatgtggagtccagcccctgccagacctcctgctaccgtcccagaacctccttgctctgcagtccctgccagacaacttactctgggtctctaggctttggatccagcagctgccgctccctgggctatggatcgaggagctgctactcagtgggctgtgggtccagtggcttcagatccctgggttatggaggctgtggcttcccttccctgggctatggcgttggattctgccgcccaacctacttggcttctaggagctgccagtcttcttgctacagaccaacttgtggatcaggcttctactattgatcatcttgttaaattgctgattttgttggctaatgccttcaatgcctctactcataacctttattgtcttcatcatgtacagaaagaattagcctcttattctataattatcaagttctcagtttgtctttgtccccaaatactggctggcaggcttcatctgaaaaactgtaattggagaactagctcaaaataaatcttgaaatacacattaaaa

SEQ ID NO: 145545 - DNA, 867 bp, Homo sapiens
  Payload ID: 8813
  Gene Symbol: KRTAP13-2
  Gene Name: keratin associated protein 13-2
  Uniprot ID: Q52LG2
  ENST ID: ENST00000399889
  CDS Start-End: 45-572
aatctttccactataactcagctgaactcacatctcccgtcaacatgtcctacaactgctgctctggaaacttctcctcccgctcctgtggtgactacctgcgctacccagcatcctcacgtggcttttcctaccccagcaatctggtctacagcactgacctctgctctcccagcacctgccagctgggttcctctctctataggggctgtcaggagatctgctgggagcccaccagctgccagacgtcctatgtggagtccagcccctgccagacctcctgctaccgccccagaacctccttgctctgcagtccttgcaagacgacttactctgggtctctaggctttggatccagcagctgccgctccctgggctatggatcgaggagctgctactcagtgggctgtgggtccagtggtgtcagatccctgggttatggaagctgtggcttcccttccctcggctatggatctggattctgccgcccaacctacttggcttctaggagctgccagtctccttgttacagaccagcctatggatcaaccttctgcagatcaacttgctgaatttccagaccttttaagcaaagtgtctcagtctctacgtagagctgttatcataggcatttccagcaatgtgagctaacccctcttactactagctcttcatcctttctctggcatcaagtactggctggacaggctagttctttcagactgtgaaattaatgaatgagcaaaatatagagtcaaatgtctataattttgaaacaagtgattcgttatcacgtaagttcatcttataaagtatatggaagttcagttttgtttcacgtaataaattcatttactgttgattcca

SEQ ID NO: 145546 - DNA, 486 bp, Homo sapiens
  Payload ID: 8813
  Gene Symbol: KRTAP13-2
  Gene Name: keratin associated protein 13-2
  ENST ID: ENST00000613611
  CDS Start-End: 1-486
atgtcctacaactgttgctctagaaacttctcctcctgctcccacgggggttacttgcactacccaggctcctcctaccccagcaatctggtctacagcactgacctctgctctcccagcacctgccagctgggttcctctctctataggggctgtcaggagatctgctgggagcccaccagctgccagacctcctgctaccgccccagaagctccgtgctctgcagtccctgccagtcgacttactctgagtctctaggctttggatccagcagctgccgctccctgggctatggatctaggagctgctactcagtgggccgtgggtccagtggcgtcagatccctgggttatggaggctgtggcttcccttccctgggctatggatctggattctgccacccaacatatgttctctttaggacattccagtcttcctgttacagaccaacttgtggatctggcttctaccgatcaacttgctaa

SEQ ID NO: 145547 - DNA, 704 bp, Homo sapiens
  Payload ID: 8814
  Gene Symbol: KRTAP13-3
  Gene Name: keratin associated protein 13-3
  Uniprot ID: Q3SY46
  ENST ID: ENST00000390690
  CDS Start-End: 57-575
ttaaaactcagaatcttcccaggtacactcagctgaactcacatcttcccgtcaacatgtcctacaactgttgctctagaaacttctcctcctgctcccacgggggttacttgcactacccaggctcctcctgtggctcttcctaccccagcaacctggtctacagcactgacctctgctctcccagcacctgccagctgggttcctctctctataggggctgtcaggagacctgctggaggcccaacagctgtcagacattgtgtgttgagtccagcccctgccacacctcctgctactaccccaggactcacatgctctgcaattcttgcctgactatgcatgttgggtctcggggttttggatccaatagctgctgctccctgagctgtggatccaggagctgctcctcactgggctgtggatccaatggcttcagatatctgaattatagaatccatacctccccttcccagagttatagatccagattctgccatccaatctattttccacctagaaggtggttccattcatcttgttatcagccattctgtagatctggtttctactgactaatgtggtgactggtaaaactcatttgagaaatgcatattctttagtaaggtcatctgttaatttcttcctttgagaagtattctaatattattgatcaccaggtcttccttactttccagccctca

SEQ ID NO: 145548 - DNA, 797 bp, Homo sapiens
  Payload ID: 8815
  Gene Symbol: KRTAP13-4
  Gene Name: keratin associated protein 13-4
  Uniprot ID: Q3LI77
  ENST ID: ENST00000334068
  CDS Start-End: 47-529
agaatcttcttaggtacactcagctgaactcccatctctcatcagcatgtcctacaactgctgctctagaaacttctcctcccgctcctttgggggctacctgtactacccaggctcctaccccagcagcctggtctacagcactgccctctgctctcccagcacctgccagctgcgttcctctctctacagggactgtcagaagacctgctgggagcccgccagctgccagaaatcctgctaccgccccaggacctccatcctctgctgtccctgtcagacgacttgctctggatctctaggctttcggtccagcagctgtcgctcccagggctatggatctaggtgctgctactcgctgggaaatggatccagtggcttcagattcctgaaatatggaggctgtggttttccttccctgagttacggatccagattctgctacccaaactacttggcttctggagcctggcagtcttcttgttacagaccaatctgtggatctcgcttctatcaattcacctgctaaatttctagatccttttgagtattgggatcaaagtctctactgaatgcagccattattttcattcttgccagatcccaatatctttttattcttccaccaccagcttcttgcatgaccaacttctggcagactgcgaaattaatgagtaacctaatattaacttctaatatctttaccattgatcgaatatatgctatctgattttcatccaaaaactgttgaaaatggaaattttaatctaataaatgtatgtaatctggtacccaaa

SEQ ID NO: 145549 - DNA, 408 bp, Homo sapiens
  Payload ID: 8816
  Gene Symbol: KRTAP1-4
  Gene Name: keratin associated protein 1-4
  Uniprot ID: P0C5Y4
  ENST ID: ENST00000377747
  CDS Start-End: 27-392
cagctctcaacccaactcctgacaccatggccagctgttccaccagtgggacctgtggctccagctgctgccagccaagctgctgtgaaactagctgctgccagccaagctgctgccagaccagctcctgcggaaccggctgtggcattggtggtggcattggctatggccaggagggcagcggtggatctgtgagcacccgtatcaggtggtgccacccagattgccacgtggagggcacctgcctgcccccctgctacctggtaagctgcacacccccatcctgctgccagctgcaccacgccgaggcctcctgctgccgcccgtcctactgtggacagtcctgctgccgcccagcctgctgctgccactgctgtgagcccacctgctaaaagccaggttgctgat

SEQ ID NO: 145550 - DNA, 408 bp, Homo sapiens; identical to SEQ ID NO: 145549
  Payload ID: 8816
  Gene Symbol: KRTAP1-4
  Gene Name: keratin associated protein 1-4
  Uniprot ID: P0C5Y4
  ENST ID: ENST00000576814
  CDS Start-End: 27-392

SEQ ID NO: 145551 - DNA, 1177 bp, Homo sapiens
  Payload ID: 8817
  Gene Symbol: KRTAP1-5
  Gene Name: keratin associated protein 1-5
  Uniprot ID: Q9BYS1
  ENST ID: ENST00000361883
  CDS Start-End: 48-572
cagaaactcctccaagcaacctaactcttaacccaacttctgacaccatgacctgctgccagaccagcttctgtggatatcccagcttctccatcagtgggacctgtggctccagctgctgccagccaagctgctgtgagaccagctgctgccagccacgcagctgccagactagcttctgcggatttcccagcttctcaaccagtgggacctgcagctccagttgctgccagccaagctgctgtgagaccagctgctgccagccaagctgctgtgagaccagctgctgccagccaagctgctgccagatcagctcctgcggaactggctgtggcattggtggtggcatcagctatggccaggagggcagcagtggagctgtgagcacccgtatcaggtggtgccgcccagacagtcgtgtggagggcacctacctacccccctgctgtgtggtgagctgcacgcccccatcctgctgccaactgcaccatgcccaggcctcctgctgccgcccgtcctactgtggacagtcctgctgccgcccagtctgctgctgtgagcccacttgctgaaagccagtttgcttattttcaattgcctaggtcacagtgtctctgaactgttcatcccttgaccacctctggaccactaacaagttctcagactttgcattgcttgtgatggagactactaagtatatgagctcacaattctatctgattccattctacaatgaataccttgacccttcactggggacacagaaatgctacaaagccacctgctgatcatcaatttgcttgggatatactatttctgatatttctgcaggattaaaaattactgacatgttgtggaatttatccatgagaactatccacaagtctaatgtttccatgctttataatctattttatcttgtttacctaaaattttttgcaacatcaaagacaccaaattatagccaagtgacattcctcaagtcaccagagagaatggaagctcatcacccaacattcagcttctaagaagtaggctggactttccacattttaacatctgatccatcccttggtttttggatcataatgatcttgcctgctggatatttcagttatatctgtgatacaatgtcttctgtcatttcttaataaatattatatactaggcaaagaaa

SEQ ID NO: 145552 - DNA, 1177 bp, Homo sapiens; identical to SEQ ID NO: 145551
  Payload ID: 8817
  Gene Symbol: KRTAP1-5
  Gene Name: keratin associated protein 1-5
  Uniprot ID: Q9BYS1
  ENST ID: ENST00000572212
  CDS Start-End: 48-572

SEQ ID NO: 145553 - DNA, 671 bp, Homo sapiens
  Payload ID: 8818
  Gene Symbol: KRTAP15-1
  Gene Name: keratin associated protein 15-1
  Uniprot ID: Q3LI76
  ENST ID: ENST00000334067
  CDS Start-End: 54-467
cacacacacacgctcctcactgcaaatcacctgagctcagaactcctgttaacatgtcttacaactgcagctctggaaacttctcctcctgctgttttggaagttacctgaggtatccagtttccacttataatttgttctaccccagcaatgccatctattctccaaatacctgccaactgggctcctctctctacaatggctgtcaggagacctactgtgagcccaccagctgccagacatcctgcactttggccagatcctatcagacatcctgttactgcccaaagaattccatcttctgcagtccccgccagactaactacataagatcccttggatgtggaaacactggccttggatctcttggttgtggaagcactggcttccaatctctggactgtgggtccagcttctaccacccaactaccttttcatccaggaatttccaggcaacttgttactaaccagcctttgggtctcgcctttttggatcatcttactgaatattctccattctctcatgattatttctgtactctatggaactgcaacactcagcctgtccaatatctgtgattgttgaccatctacatcagtaggactcagcatcctagccctcttggaagtatatgattgaacacggacaaattaatcttgacctaggaccc

SEQ ID NO: 145554 - DNA, 1554 bp, Homo sapiens
  Payload ID: 8819
  Gene Symbol: KRTAP16-1
  Gene Name: keratin associated protein 16-1
  Uniprot ID: A8MUX0
  ENST ID: ENST00000391352
  CDS Start-End: 1-1554
atgtctggcagttgctcttctaggaaatgcttctccgtgccagccacctctctctgctccactgaggtgagctgtggaggccccatctgcctgcccagttcctgccagagccagacatggcagctggtgacttgtcaagacagctgtggatcatccagctgtgggccacagtgccgtcagccctcctgtcctgtgagtagctgtgcccaacccctgtgctgtgatcctgtcatttgtgagccttcttgctccgtgagcagcggctgccaacccgtgtgctgtgaggccaccacctgtgagccttcttgctctgtgagcaactgctaccaacctgtgtgcttcgaggccaccatctgtgagccttcttgctcagtgagcaactgctgccaacctgtgtgctttgaggccaccgtttgtgagccttcttgttccgtgagcagctgtgctcaacctgtgtgctgtgagcctgctatttgtgagccttcttgctccgtgagcagctgctgccagcctgtaggctctgaagccacttcctgccaaccagtcctctgtgtgcccacttcctgccagcctgtcctctgcaaatccagctgctgccagccagttgtctgtgagcccagctgctgttcagctgtctgcaccctgcctagttcctgccaacctgtggtctgtgagccttcctgctgtcagccggtgtgcccgacacctacctgctctgtgaccagtagctgccaggctgtctgctgtgaccccagcccttgtgagccaagttgctcagagtctagcatctgccagccagctacgtgtgtggctctggtctgtgagccagtttgcctccgccctgtctgctgtgttcagagctcgtgcgagccaccttctgtccccagcacttgccaagagccttcttgttgtgtctccagtatctgccaacccatctgctctgagcccagcccctgctcaccagctgtctgtgtgtccagtccatgccaacctacttgctatgtagtcaagcgctgtccttctgtctgccctgagccagtttcctgcccatctacctcctgccgacctctttcctgcagtccagggtcttctgcatctgccatctgccgaccaacttgtcctaggactttctacatacccagttccagcaaacggccttgcagtgctacgatttcctaccgcccggtctcccgtccgatctgccgcccaatctgctctggactcctcacctataggcagccatacatgacatccatctcctaccgtcctgcctgctatcgcccatgctactccatcctgcgccgcccagcctgtgtcacttcctactcttgccgcccagtctacttccgcccatcttgcactgagtctgactcttgcaaacgggattgcaaaaaatccacttccagccaactggattgtgttgacacaaccccctgcaaggtggatgtctcagaagaggctccctgccagcccactgaagccaaacccatcagcccaaccacccgtgaggccgcagcagctcagcctgctgccagcaagcctgccaactgctaa

SEQ ID NO: 145555 - DNA, 1554 bp, Homo sapiens; identical to SEQ ID NO: 145554
  Payload ID: 8819
  Gene Symbol: KRTAP16-1
  Gene Name: keratin associated protein 16-1
  Uniprot ID: A8MUX0
  ENST ID: ENST00000572734
  CDS Start-End: 1-1554

SEQ ID NO: 145556 - DNA, 779 bp, Homo sapiens
  Payload ID: 8820
  Gene Symbol: KRTAP17-1
  Gene Name: keratin associated protein 17-1
  Uniprot ID: Q9BYP8
  ENST ID: ENST00000334202
  CDS Start-End: 46-363
gaactccggctgcgttaccgacctgcgagctgacgggcccggaccatggggtgctgcccgggggactgcttcacctgctgcacccaggagcaaaactgctgtgaagagtgctgctgtcagccgggctgctgtggctgctgcggctcctgctgtggctgtgggggctctggctgcgggggctctggctgcgggggcagctgctgcggatcgtcttgctgtggatctggctgcggaggctgtggaggctgcggaggctgcgggggtggctgctgtggatccagttgctgtgggtccagttgctgcggctccgggtgctgtgggcctgtgtgctgccagcccacacctatatgcgacacaaaatgaagacctttccctccaccactgatgcagtcccaccgaaagcctccatctgctccagggggacagcccctcgtgtccagaaccttccatacccccaagacagtgtcttgtctttctgtgatttgtagaggagggcttgttctccaacaccttctctggtatttcaaggcaccgagaacaagagccatactctgatgaaacattaaaactcggtcacaactaagtgatcccaagctcaagggtgaatccccaatactttacttattcacatgaagttcaatgtcttgtactataagacatcctcttcttcaaggtgtctttgggactgatcctccgccctggctttctgcagctttgagatgcaaaaaaggtccatcttctttgtgagcctcttaataaatttgagcatgctggcataa

SEQ ID NO: 145557 - DNA, 779 bp, Homo sapiens; identical to SEQ ID NO: 145556
  Payload ID: 8820
  Gene Symbol: KRTAP17-1
  Gene Name: keratin associated protein 17-1
  Uniprot ID: Q9BYP8
  ENST ID: ENST00000574858
  CDS Start-End: 46-363

SEQ ID NO: 145558 - DNA, 646 bp, Homo sapiens
  Payload ID: 8821
  Gene Symbol: KRTAP19-1
  Gene Name: keratin associated protein 19-1
  Uniprot ID: Q8IUB9
  ENST ID: ENST00000390689
  CDS Start-End: 28-300
acaaaccaactcaccactcctgacaccatgagtcactacggcagctactacggaggcctgggctacagctgtggaggcttcggtggcctgggctatggctatggctgtggatgtggcagcttctgcagacggggttctggctgtggctatggaggctacggatatggctctggctttggaagctacggatatggctctggctttggaggctacggatatggctctggctttggaggctatggatatggctgctgccgcccatcgtacaatggaggatacggattctctggcttttattaaatgaattgctgaaattggaagcagaggagaaacctccaaatgtgtttggtcctgtcccgtgctttcattccaaaaatccattctattgccttcagcatcaatggagagatatttagctatgttaaatctttaaaatagatttaagctgcttctgtgaatatttgttgtctttttactttcggagtccgtcacctgaaatcatattcatgtataactactctaggttgttcttctaaatttgctttatttttcttaccaccattaccttgatgttatctatcaagatcctagcaaaaacttgtattttgcttttatctaataaatgaagtaaagtataaatatttta

SEQ ID NO: 145559 - DNA, 380 bp, Homo sapiens
  Payload ID: 8822
  Gene Symbol: KRTAP19-2
  Gene Name: keratin associated protein 19-2
  Uniprot ID: Q3LHN2
  ENST ID: ENST00000334055
  CDS Start-End: 89-247
gcaaacccaactcactatctctgacaccgtgagctactagggcagctactgtggaggtctgggctatggctgtggaggctttggtggcatgtgctatggctacggctgtggatgtggcagcttctgcagactgggctatggctgcggctatgaaggatgcagatatggttgtggccacagaggctgtggagatggctgctgctgcccatcatgctacagaagatatagattcactggcttctactaagctgctgctctagtgatgcagcatctgttattttgaagggatttaaaaacaagttacttacttctaagatacaatgggggtaaaggtgtaaatgtgtaaatgctcccattccaaagggagaaattgaccaaaa

SEQ ID NO: 145560 - DNA, 522 bp, Homo sapiens
  Payload ID: 8823
  Gene Symbol: KRTAP19-3
  Gene Name: keratin associated protein 19-3
  Uniprot ID: Q7Z4W3
  ENST ID: ENST00000334063
  CDS Start-End: 29-274
gcaaaccaaactcactacccctgacaccatgagctactacggcagctactatggaggcctgggctatggctgtggaggctttggtggcctgggctatggctatggctgtggatgtggcagcttccgcagactgggttctggctgtggctatggaggctacggatatggctctggctttggaggctatggatatggctctggcttcggaggctacggatatggctgctaccgcccatcatactatggaggatatggattctctggattctattaaactactgccccagcaacacaatgtgtgaaattataagaggactttcccagagctgacttcaatcattggacaacaaagatcatgctggagctatttgcacaaaagaatttaacatctcagaatttcaggcaattttttttctctgtatacccacatctctataataatcctagtattctctacttttgcttttaaagctgattgaattatctgtttatcttccaataaaacattctattttcaaacac

SEQ ID NO: 145561 - DNA, 216 bp, Homo sapiens
  Payload ID: 8823
  Gene Symbol: KRTAP19-3
  Gene Name: keratin associated protein 19-3
  ENST ID: ENST00000620117
  CDS Start-End: 1-216
atgagctactacggcagctactatggaggcctgggctatggctgtggaggctttggtggcctgggctatggctatggctgtggatgtggcagcttccgcagactgggttctggctgtggctatggaggctacggatatggctctggctttggaggctatggatatggctgctgccgcccatcgtacaatggaggatacggattctctggcttttat

SEQ ID NO: 145562 - DNA, 310 bp, Homo sapiens
  Payload ID: 8824
  Gene Symbol: KRTAP19-4
  Gene Name: keratin associated protein 19-4
  Uniprot ID: Q3LI73
  ENST ID: ENST00000334058
  CDS Start-End: 24-278
aacaactcaccactcctgacgccatgagctactatggcagctattacagaggcctgggctatggctgtggaggctttggtggcctaggctatggctatggctgtggatgtggcagcttccgcagactgggttatggctgtggctttggaggcaacggatatggctactgccgcccatcatgctatggaggatatggattctcaattctactgaaatcctaccctgaggacacgatatcagaggtcataagaagatcattcaatttaaccaaatattgagtcaaacaagggcacactagatcaatccaaga

SEQ ID NO: 145563 - DNA, 461 bp, Homo sapiens
  Payload ID: 8825
  Gene Symbol: KRTAP19-5
  Gene Name: keratin associated protein 19-5
  Uniprot ID: Q3LI72
  ENST ID: ENST00000334151
  CDS Start-End: 28-246
gcataccaactcaccactcctgacaccatgaactactacggcaactactatggaggcctgggctacggctacggaggcttcgatgacctgggctatggctatggctgtggatgtggcagcttccgcagactgggctatggcggtggctacggaggctacggatacggctctggcttcggaggctatggataccgcagctgccgtccatcatgctatggaggatatggattctctggattttattgaaatccttccctgacaacctaacatgaggggacataagaagatcacccaaacctgactgcaataacaaacaaacgaggtcaccctggatcaagccaagatcaagagcagttagcatctaagaggtttaagaatacctatcattccataattctttgctttatgtctctggatgtgtcttacttgtacctttataactgtggggtttctctgttcct

SEQ ID NO: 145564 - DNA, 330 bp, Homo sapiens
  Payload ID: 8826
  Gene Symbol: KRTAP19-6
  Gene Name: keratin associated protein 19-6
  Uniprot ID: Q3LI70
  ENST ID: ENST00000334046
  CDS Start-End: 32-208
gcattgaactgaatctctagtccctgacaccatgagatactatggcagctactacagaggcctgggatatggctgtggaggctttggtggtctgggctatggctgtggctgtggaggctacagatatggctctggctatggaggctatagatatggctgctgccgcccatcatgccgtgaaggatatggattctctggattctactaaaaaacttgctgattctcatactctaactccaagatcttgcccgtatgcttcagcaaggcgaacacttttctcaatgtagagaaaatacctaccattttttggcttcatgctccagaaggaac

SEQ ID NO: 145565 - DNA, 440 bp, Homo sapiens
  Payload ID: 8827
  Gene Symbol: KRTAP19-7
  Gene Name: keratin associated protein 19-7
  Uniprot ID: Q3SYF9
  ENST ID: ENST00000334849
  CDS Start-End: 26-217
acaacagctaaccacttctgacaacatgagctactccggcagctactatggaggcctaggctacggctgtggaggattcggtggcctgggctatggctatagctgtggatgtggcagcttccgcagactgggctatggctgtggctatggaggctacagatacagctgctgccacccatcatgctatgggggatactggtcttctggattctattgaataaatacttgaaatatagtcttctgtgagattcccaattcttccaagaaactttattccataaccatatggaattccatattccataacaaaacagctgcttggatcacctgccttttgacaatagtgtgaagaaaacttgatcaactagatattggcatttgattagtgatgttctccagatattcacttttttattggctggagagccattatactctaa

SEQ ID NO: 145566 - DNA, 216 bp, Homo sapiens
  Payload ID: 8827
  Gene Symbol: KRTAP19-7
  Gene Name: keratin associated protein 19-7
  ENST ID: ENST00000614763
  CDS Start-End: 1-216
atgagctactccggcagctactatggaggcctaggctacggctgtggaggattcggtggcctgggctatggctatagctgtggatgtggcagcttccgcagactgggctatggctgtggctatggaggctacagatatggctctggctatggaggctatagatatggctgctgccgcccatcatgccgtgaaggatatggattctctggattctac

SEQ ID NO: 145567 - DNA, 318 bp, Homo sapiens
  Payload ID: 8828
  Gene Symbol: KRTAP19-8
  Gene Name: keratin associated protein 19-8
  Uniprot ID: Q3LI54
  ENST ID: ENST00000382822
  CDS Start-End: 34-225
ttgacctccaaacacatctacagttgctgaaccatgagctactacagaagctattatggaggcctgggctatggctatggaggctttggtggctggggctatggctatggctgcggctatggcagcttccgcaggttgggctatggctgtggctacggaggctatggattcagctgttgccgaccattatactacggaggatatggattctctgccttctactgaagagtgaactcattctttggatcactagaatctgtctatcatcctgacttaattctcctttcaggtctttttaccccctctgtgaattgcgca

SEQ ID NO: 145568 - DNA, 275 bp, Homo sapiens
  Payload ID: 8829
  Gene Symbol: KRTAP20-1
  Gene Name: keratin associated protein 20-1
  Uniprot ID: Q3LI63
  ENST ID: ENST00000334664
  CDS Start-End: 31-201
tctacacctgaaccatccatttctgacaccatgatttactacagcaactattatggtggctatgggtatggtgggcttggctgtggctatggctgtggttatcgtggctatggatgtggttatggtggctatggaggctatggaaatggctactactgcccatcttgctatggaagatattggtcatatggtttctactgaacaattctagagctcaccagatttgtctgcttgtgaaacctggattctcatgctgctcttgttcatctgatcct

SEQ ID NO: 145569 - DNA, 384 bp, Homo sapiens
  Payload ID: 8830
  Gene Symbol: KRTAP20-2
  Gene Name: keratin associated protein 20-2
  Uniprot ID: Q3LI61
  ENST ID: ENST00000330798
  CDS Start-End: 29-226
ctcaaccaaatcctccactcttgaaaccatgtgctactacagcaactactatggtggtctgcgttatggctatggagtcctgggcggtggctatggctgtggctgtggttatggccatggctatggaggcctgggctgtggctatggccgtggctatggtggctatggatatggctgctgccgcccatcttgctatggaagatactggtcctgtggcttctactgagaaatatctggcaactcaacctcgtggtctcttccacatggacttcctaaatttgccttcataattcttcatatgagtaattcatttttctgttgtaaaatgtcaacatcatccttaagtatctggaagaaaaaataggtcagatgctgcaagcctca

SEQ ID NO: 145570 - DNA, 273 bp, Homo sapiens
  Payload ID: 8831
  Gene Symbol: KRTAP20-3
  Gene Name: keratin associated protein 20-3
  Uniprot ID: Q3LI60
  ENST ID: ENST00000382826
  CDS Start-End: 26-160
ggctagagacttaaatcctgacacaatgagctactatggcaactactacggaggactgggctatggctatgactgtaaatatagttatacctctggctttggtgcctttagaatcctggactgtggctacagatgtggctgtggtggggtatggatttgactgctgccaccaatatgattatgctacatgcttattatcaggcactgactgaataatatctacaattgggtccattttcttatgagacaggggtgctgttctactacactttt

SEQ ID NO: 145571 - DNA, 224 bp, Homo sapiens
  Payload ID: 8832
  Gene Symbol: KRTAP20-4
  Gene Name: keratin associated protein 20-4
  Uniprot ID: Q3LI62
  ENST ID: ENST00000382828
  CDS Start-End: 32-166
tccacaactgaaacatccacttctgaacaccatgtcctactacagccatctttctggtggcctgggctgcggcttggctgtggctgtgactatgggaaggactgtggctgtggctgagtatggcaggtgcagacatggctgccactcatcttactctgccaggtaatgacaccatggattccactgaggaacacctagagcagttcagtctactgcactcctcc

SEQ ID NO: 145572 - DNA, 776 bp, Homo sapiens
  Payload ID: 8833
  Gene Symbol: KRTAP2-1
  Gene Name: keratin associated protein 2-1
  Uniprot ID: Q9BYU5
  ENST ID: ENST00000391419
  CDS Start-End: 50-436
catccagctcctctccacagcccaacccacaccagcctcagacaccaccatgaccggctcctgctgcggctccaccttctcctccctgagctacgggggaggctgctgccagccctgctgctgccgcgacccctgctgctgccgccccgtgacctgccagaccaccgtgtgccgccccgtgacctgcgtgccccgctgcacgcgccccatctgcgagccctgccgccgcccggtgtgctgcgacccctgctccctgcaggaaggctgctgccgccccatcacctgctgcccctcgtcgtgcacggctgtggtgtgcaggccctgctgctgggccaccacctgctgccagcctgtgtctgtgcagtccccctgctgccggcccccctgcggccagccgaccccttgcagcaccacctgcaggacctcctcctgctgagccaccacctgctgccagcctgtgtctgtgcagtccccctgcggccagccgaccccttgcagcaccacctgcaggacctcctcctgctgagcagtgcactgactgcccggaacgcgtaactcaccttctgaaaaagtcacactcccatttctctactttaacaaacctcctgccctgagcccacaaaaccccacatcaaccaagcagggaaccgagcactgggctcatctattaagacctgggccattctgaagtctgtaaaagaagcaatttccttcttcttaagatttcgtggcatgtttattttctaataaatatctgttctttggccttgcaaaaa

SEQ ID NO: 145573 - DNA, 375 bp, Homo sapiens
  Payload ID: 8833
  Gene Symbol: KRTAP2-1
  Gene Name: keratin associated protein 2-1
  ENST ID: ENST00000542137
  CDS Start-End: 1-375
atgaccggctcctgctgcggctccaccttctcctccctgagctacgggggaggctgctgccagccctgctgctgccgcgacccctgctgctgccgccccgtgacctgccagaccaccgtgtgccgccccgtgacctgcgtgccccgctgcacgcgccccatctgcgagccctgccgccgcccggtgtgctgcgacccctgctccctgcaggaaggctgctgccgccccatcacctgctgcccctcgtcgtgcacggctgtggtgtgcaggccctgctgctgggccaccacctgctgccagcctcctgtgtctgtgcagtccccctgcggccagccgaccccttgcagcaccacctgcaggacctcctcctgctga

SEQ ID NO: 145574 - DNA, 776 bp, Homo sapiens; identical to SEQ ID NO: 145572
  Payload ID: 8833
  Gene Symbol: KRTAP2-1
  Gene Name: keratin associated protein 2-1
  Uniprot ID: Q9BYU5
  ENST ID: ENST00000571136
  CDS Start-End: 50-436

SEQ ID NO: 145575 - DNA, 375 bp, Homo sapiens; identical to SEQ ID NO: 145573
  Payload ID: 8833
  Gene Symbol: KRTAP2-1
  Gene Name: keratin associated protein 2-1
  ENST ID: ENST00000617413
  CDS Start-End: 1-375

SEQ ID NO: 145576 - DNA, 599 bp, Homo sapiens
  Payload ID: 8834
  Gene Symbol: KRTAP21-1
  Gene Name: keratin associated protein 21-1
  Uniprot ID: Q3LI58
  ENST ID: ENST00000335093
  CDS Start-End: 51-290
cctcagaagcatcttcttgaaacccatctcaattctctcctcttgacaacatgtgttgcaactactacggcaactcctgtggctatggctccggctgtggctgtggctatggctctggctctggctgtggctgtggctatggaactggctatggctgtgggtatggctgtgggtttggctcccattatggctgtggttatggaactggctatggctgtggatatggctctggctctggctactgtggctaccggccattttgctttagaagatgctattcttcctgctaaaacatcactgtcggaggaccatttgcttctaaaatgacacgtctgaagataatgctgattcaaggattcgtactccaagatttctatatccaagaattacatgcttgacagaatcttcgacctctagcctcacatttctttgaatgaaatcatggccataggatccatggtgtcatctgactgttttccaaatgttatcttttgctcccttaatctctgattctctgttatgactgtgttaatgatcataacatctacagttgcggaagtcaatcatttgtaataaaaatggttctttattcctaaaaa

SEQ ID NO: 145577 - DNA, 440 bp, Homo sapiens
  Payload ID: 8835
  Gene Symbol: KRTAP21-2
  Gene Name: keratin associated protein 21-2
  Uniprot ID: Q3LI59
  ENST ID: ENST00000333892
  CDS Start-End: 32-283
cacctcaactgaaatctaacctcctgaaatcatgtgttgcaactactacagaaactgctgtgggggctgtggatatggctctggctggagttccggctgtggatatggttgtggctatggctgtggatacggctctggctgtagatatggctctggctatggaactggctgtggctatggctgtggatacggctctggctgtggatatggctgtggatacagctctagctgctgtggctaccgaccactttgctacagaagatgctattcctcttgctactaatcatcactacaggtcatccttggctttgcaatgacctctccaagatcaagttcaattgaaatctcccctacccattatcttcacatctaagtaaaggttgactatggtcacctgactatctgaatgcatataagagaagctgttggcagtggatgga

SEQ ID NO: 145578 - DNA, 253 bp, Homo sapiens
  Payload ID: 8836
  Gene Symbol: KRTAP21-3
  Gene Name: keratin associated protein 21-3
  Uniprot ID: Q3LHN1
  ENST ID: ENST00000444335
  CDS Start-End: 19-195
ttctcatctcctgacactatgtatttcaattacaaaagtgtgtgtgggagctgtggatttggctcttgctatggttgtgggtatggctgtatacacagcacccactgtggctgtaacggttattatggttgttatgaaaataaatattctgttatagatgatctgatattttttgcttctaagaaatgccattgagcattgtttcttatttagtttctcaaagatctgttctgctttaatcaccttcaatcct

SEQ ID NO: 145579 - DNA, 733 bp, Homo sapiens
  Payload ID: 8837
  Gene Symbol: KRTAP2-2
  Gene Name: keratin associated protein 2-2
  Uniprot ID: Q9BYT5
  ENST ID: ENST00000398477
  CDS Start-End: 20-391
accagcctcagacaccaccatgaccggctcctgctgcggctccaccttctcctccctgagctacgggggaggctgctgccagccctgctgctgccgcgacccctgctgctgccgccccgtgacctgccagaccaccgtgtgccgccccgtgacctgcgtgccccgctgcacgcgccccatctgcgagccctgccgccgcccggtgtgctgcgacccctgctccctgcaggaaggctgctgccgccccatcacctgctgcccctcgtcgtgcacggctgtggtgtgcaggccctgctgctgggccaccacctgctgccagcctgtgtctgtgcagtccccctgcggccagccgaccccttgcagcaccacctgcaggacctcctcctgctgagccaccacctgctgccagcctgtgtctgtgcagtccccctgcggccagccgaccccttgcagcaccacctgcaggacctcctcctgctgagcagcccgttatcacgaagggcccctcagaagatggccaggtccatcccgctgcccctcagggcttcaccgcagagcaatacacgtttccttgagaagcccatttctcatctcttcatactagctcacactatgcattgaagacaccttttcagaccaaccacagatgagaaatacttttcctaggactccagtctaactcctatatcatgttgtctgctttctaataaactcaatactcctaccatagaaa

SEQ ID NO: 145580 - DNA, 390 bp, Homo sapiens
  Payload ID: 8837
  Gene Symbol: KRTAP2-2
  Gene Name: keratin associated protein 2-2
  ENST ID: ENST00000542910
  CDS Start-End: 1-390
atgaccggctcctgctgcggctccaccttctcctccctgagctacgggggaggctgctgccagccctgctgctgccgcgacccctgctgctgccgccccgtgacctgccagaccaccgtgtgccgccccgtgacctgcgtgccccgctgcacgcgccccatctgcgagccctgccgccgcccggtgtgctgcgacccctgctccctgcaggaaggctgctgccgccccatcacctgctgcccctcgtcgtgcacggctgtggtgtgcaggccctgctgctgggccaccacctgctgccagcctgtgtctgtgcagtccccctgcggccagccgtccccctgcggccagccgaccccttgcagcaccacctgcaggacctcctcctgctga

SEQ ID NO: 145581 - DNA, 863 bp, Homo sapiens
  Payload ID: 8837
  Gene Symbol: KRTAP2-2
  Gene Name: keratin associated protein 2-2
  ENST ID: ENST00000573155
  CDS Start-End: 49-435
atccagctcctctccacagcccaacccacaccagcctcagacaccaccatgaccggctcctgctgcggctccaccttctcctccctgagctacgggggaggctgctgccagccctgctgctgccgcgacccctgctgctgccgccccgtgacctgccagaccaccgtgtgccgccccgtgacctgcgtgccccgctgcacgcgccccatctgcgagccctgccgccgcccggtgtgctgcgacccctgctccctgcaggaaggctgctgccgccccatcacctgctgcccctcgtcgtgcacggctgtggtgtgcaggccctgctgctgggccaccacctgctgccagcctgtgtctgtgcagtccccctgctgccggcccccctgcggccagccgaccccttgcagcaccacctgcaggacctcctcctgctgagccaccacctgctgccagcctgtgtctgtgcagtccccctgcggccagccgaccccttgcagcaccacctgcaggacctcctcctgctgagccaccacctgctgccagcctgtgtctgtgcagtccccctgcggccagccgaccccttgcagcaccacctgcaggacctcctcctgctgagcagcccgttatcacgaagggcccctcagaagatggccaggtccatcccgctgcccctcagggcttcaccgcagagcaatacacgtttccttgagaagcccatttctcatctcttcatactagctcacactatgcattgaagacaccttttcagaccaaccacagatgagaaatacttttcctaggactccagtctaactcctatatcatgttgtctgctttctaataaactcaatactcctaccata

SEQ ID NO: 145582 - DNA, 714 bp, Homo sapiens
  Payload ID: 8837
  Gene Symbol: KRTAP2-2
  Gene Name: keratin associated protein 2-2
  ENST ID: ENST00000614687
  CDS Start-End: 1-372
atgaccggctcctgctgcggctccaccttctcctccctgagctacgggggaggctgctgccagccctgctgctgccgcgacccctgctgctgccgccccgtgacctgccagaccaccgtgtgccgccccgtgacctgcgtgccccgctgcacgcgccccatctgcgagccctgccgccgcccggtgtgctgcgacccctgctccctgcaggaaggctgctgccgccccatcacctgctgcccctcgtcgtgcacggctgtggtgtgcaggccctgctgctgggccaccacctgctgccagcctgtgtctgtgcagtccccctgcggccagccgaccccttgcagcaccacctgcaggacctcctcctgctgagccaccacctgctgccagcctgtgtctgtgcagtccccctgcggccagccgaccccttgcagcaccacctgcaggacctcctcctgctgagcagcccgttatcacgaagggcccctcagaagatggccaggtccatcccgctgcccctcagggcttcaccgcagagcaatacacgtttccttgagaagcccatttctcatctcttcatactagctcacactatgcattgaagacaccttttcagaccaaccacagatgagaaatacttttcctaggactccagtctaactcctatatcatgttgtctgctttctaataaactcaatactcctaccatagaaa

SEQ ID NO: 145583 - DNA, 296 bp, Homo sapiens
  Payload ID: 8838
  Gene Symbol: KRTAP22-1
  Gene Name: keratin associated protein 22-1
  Uniprot ID: Q3MIV0
  ENST ID: ENST00000334680
  CDS Start-End: 35-181
ctgctatacaactgagcctacctttcttgaaaccatgagctttgataacaactaccatggtggccagggctatgccaaaggaggcctgggctgcagctatggctgtggtcttagcggctatggctatgcctgctactgcccatggtgttatgaaagatcttggttttctggctgcttctgagaaattagagattgctgatctgtttaggccattctcttatgagctatgttttcttcccgtgtttttttctgttcaaagagtgacaactaaaatttagcccacattgccaagtcag

SEQ ID NO: 145584 - DNA, 293 bp, Homo sapiens
  Payload ID: 8839
  Gene Symbol: KRTAP22-2
  Gene Name: keratin associated protein 22-2
  Uniprot ID: Q3LI68
  ENST ID: ENST00000382830
  CDS Start-End: 24-161
attgaactccatcttctgacaccatgtgctactaccacaactattatggtagcctggactatggttgcagctatggctctgaatatggtaactctggatatgcctgcaactttccgtgctcctatggaagattcctattggctcctagaaagaaattctgattgctgatcactttgagccattttcttgtgatgcactaattgcatcaacagggttatttatggattcgttattgtctctccaattttaactaactctaattattgattaccacaggtcatatttgcattgga

SEQ ID NO: 145585 - DNA, 875 bp, Homo sapiens
  Payload ID: 8840
  Gene Symbol: KRTAP2-3
  Gene Name: keratin associated protein 2-3
  Uniprot ID: P0C7H8
  ENST ID: ENST00000391418
  CDS Start-End: 65-451
attcacacctgagaacatccagctcctctcaacagcccaacccacaccagcctcagacaccaccatgaccggctcctgctgcggctccaccttgtcctccctgagctacgggggaggctgctgccagccctgctgctgccgcgacccctgctgctgccgccccgtgacctgccagaccaccgtgtgccgccccgtgacctgcgtgccccgctgcacgcgccccatctgcgagccctgccgccgcccggtgtgctgcgacccctgctccctgcaggaaggctgctgccgccccatcacctgctgcccctcgtcgtgcacggctgtggtgtgcaggccctgctgctgggccaccacctgctgccagcctgtgtctgtgcagtccccctgctgccggcctccctgcggccagccgaccccttgcagcaccacctgcaggacctcctcctgctgagaccccacctctcctctcaacgcacgaaacattcccaggtgcacagaagcttgtgcagactcttctaccccttctggatcagatgagagactccacctttgcagcctagctgatcctcaagcacgaattcaacaataacatcctatctatttccccacataattatgcagctaatcctggccctctctgacaatcttgagaaaaattccagctttcatcattcgaattcctggcttgaaaaaaaaaacgagtaaataaaaatcaaagctcctcttgaatagaactctgtcccactgactcatcacccttttttctactgtttcaaggttctcagatgagatttttttcttccaggataatactatttgtatgctgtatttttgcactgtaaaaaaaaataaaattatatttctggggaagcaaa

SEQ ID NO: 145586 - DNA, 875 bp, Homo sapiens; identical to SEQ ID NO: 145585
  Payload ID: 8840
  Gene Symbol: KRTAP2-3
  Gene Name: keratin associated protein 2-3
  Uniprot ID: P0C7H8
  ENST ID: ENST00000570303
  CDS Start-End: 65-451

SEQ ID NO: 145587 - DNA, 211 bp, Homo sapiens
  Payload ID: 8841
  Gene Symbol: KRTAP23-1
  Gene Name: keratin associated protein 23-1
  Uniprot ID: A1A580
  ENST ID: ENST00000334160
  CDS Start-End: 4-201
aacatgtcctacaactgctgctgtggaaacttctcctcccattcctgtgagggctacctgtgctactcaggctactcccgtggtggctcctcgtaccccagcaacctggtctacagcactgaacctttgatctcccagcacctgccagctgggttcctctctctgcaagggctttcaggagacttgctgggaaacccctagctgccagatg

SEQ ID NO: 145588 - DNA, 764 bp, Homo sapiens
  Payload ID: 8842
  Gene Symbol: KRTAP2-4
  Gene Name: keratin associated protein 2-4
  Uniprot ID: Q9BYR9
  ENST ID: ENST00000394015
  CDS Start-End: 35-421
aatagcccaacccacaccagcctcagacaccaccatgaccggctcctgctgcggctccaccttgtcctccctgagctacgggggaggctgctgccagccctgctgctgccgcgacccctgctgctgccgccccgtgacctgccagaccaccgtgtgccgccccgtgacctgcgtgccccgctgcacgcgccccatctgcgagccctgccgccgcccggtgtgctgcgacccctgctccctgcaggaaggctgctgccgccccatcacctgctgcccctcgtcgtgcacggctgtggtgtgcaggccctgctgctgggccaccacctgctgccagcctgtgtctgtgcagtccccctgctgccggcccccctgcggccagccgaccccttgcagcaccacctgcaggacctcctcctgctgagaccccaatgcccccacagagcaatacactgaagcctaaacatctatctggtgtttttaaaaagttaaaagaaaaatagattttttttcacaaggtgacaatagtgatttttaccatctggatacagcctggtgtaagcagacgtccattaccaccctcacccacattttcaggtgtctacatcagccttagtcattatggatagtaaatcgacctttaagaattcctggggtggactttgcaaacacattctacaacctgatggtttttactgctcaaactgtcaccatcatcttttgcaatgtgttgctcactgttgtcaataaactaatttttcctggca

SEQ ID NO: 145589 - DNA, 764 bp, Homo sapiens; identical to SEQ ID NO: 145588
  Payload ID: 8842
  Gene Symbol: KRTAP2-4
  Gene Name: keratin associated protein 2-4
  Uniprot ID: Q9BYR9
  ENST ID: ENST00000572903
  CDS Start-End: 35-421

SEQ ID NO: 145590 - DNA, 1650 bp, Homo sapiens
  Payload ID: 8843
  Gene Symbol: KRTAP24-1
  Gene Name: keratin associated protein 24-1
  Uniprot ID: Q3LI83
  ENST ID: ENST00000340345
  CDS Start-End: 27-791
gacacactgcacagcgaccactgagcatgcctgcaggctccatgtctactacaggctatcctggggtctgcagtaccacatcatacagaactcactgttatatcccagtgacctcttctgttactcttagctccagtgatttaagccctacctttggacactgcttacccagtagctaccaaggaaatctctggctcctggattactgccaagaatcctacggtgaagcaccaacctgcaaatctcccagctgtgagcccaagacctgcagtaccactggttgtgacccgtcaaactcctctgtgccctgcaactccccatcagcaggccaagtcttcagtgtctgtgaaactaccaacgtcagccccagccccagctgcagcccaagcacccagaccaatgggtatgtatgcaattgccacatacccactcgaaatgcatccaaagcctgccaaaccctccgcaacggttccaactgctttggacaacttaactgcttatccaagagtttccaaactctaaaccactgcagattgagtactttggggtataaaagctaccaaaatccttgcttcatacccagctacgtctcaccattatgttatatttccaacagctgccaaccccaaagctatttagtgagaaattatcactattcaagctacaggcctacgagctgccgaccactgagctatttatctagaagcttcagatctctgagctatatacccagtacctttccacctctgaggtatttgtgcagtggtagcagacctctgaaatgctattgaccaacttccagaatttatagcagctggaaattgcccaatggggaagattctactaagtactagaacgtctaattttctgctgaatctctttattcagcctaagaatcttgttacattaagttcaaatacaactcccaggtttattaaccacagccagtatcacctgctaggttttcttttttctgttgttctgttattgctctttgtactaaaagctgaccctgaaggtaacatcattatttctgagatttattacaatggacttaccgaagagactccatttgaaatacaaccatcaccggctttcttactttggctgtcactgtcacttgtctgacagtgtgattatcacctacctttcctgatgaaatggggcctccatggtttgactgcagattccagcatgcaaattcattcggatggctttgattgtcattaatatttttgtcaactacctaactagcaccttgctaataagccgatagaaaacactatcttgagcataataagttgaactatttcatccttttcttactgattgattgtaagaacaggcaaatagcaatggtgactagagctcaaaaatagaagacttcagcaaatcttctcttccagagaagccataaaacaagattcactggtactcagcttttgttctccatgcctaagaaaaagcctcagaattagctaaagcatgaaaattatttgttgaaagaagaacaaatactgttagagaccctttacaattatgtgtaatctgcgtttaggattctcctatcatcttgccttgccaatttattgcattctgactctggaaaatgtcctagttcttagttaataaacaaatttctgtctggaa

SEQ ID NO: 145591 - DNA, 370 bp, Homo sapiens
  Payload ID: 8844
  Gene Symbol: KRTAP25-1
  Gene Name: keratin associated protein 25-1
  Uniprot ID: Q3LHN0
  ENST ID: ENST00000416044
  CDS Start-End: 25-333
ttctcaagttcctgccaatcctcaatgcataacagatctcaaggcttttttttcagtagttgccacccccaaaaccatgtctcttatggctgtcaatcaccgagctttattttttgtcgctgtcaatcactgaattttgtgtccaggacctgctatcccttgagctatttctcctatggtaatcaaactataggttctatatccaacagcttcagatccctgaattatgtgtctcatagtttccaacctatttccttcatgcacagcagtttccaaccagcttgttctgattttgtgggttggcaatctccatttcttagaagaacatgctgaattgtcttttcagtgtcttgccctgacagcgttttac

SEQ ID NO: 145592 - DNA, 1193 bp, Homo sapiens
  Payload ID: 8845
  Gene Symbol: KRTAP26-1
  Gene Name: keratin associated protein 26-1
  Uniprot ID: Q6PEX3
  ENST ID: ENST00000360542
  CDS Start-End: 282-914
aagaaggatagatcctattaaaactcagtcgcattggtttatagatagacgtaatcaatggatggcattgcaaggagcatccagttttatggagggtggaagcctcacttccttggctataataaagagttctgatgcatcttcatacaacaagaggaagagtctgcacgcagaagcaccaccttctagggataaataaagggtcaagctaaggaagggcagaacaaacttcagacactcacttctttgcctcaacttcagcctgctctcacaacctcactatgtcttgccccaactactgctcgggaaactccaactcaggatctctcagaacctcccgccatattcctctcacctccatcgacctctgccctaccagcgtgagctgtggagatgtcctctacttacccactagctctcaagaccatacctgggtcacagacaactgccaagagacctgcggtgaaccaaccagctgccagccggtccactgtgagaccggcaatcttgaaacctcttgcggttcttccactgcttactacgtgcccaggccttgccaaggaagcagttttcttcctgcttctttcttctccagttcctgccttccagtatcctgtagaccacagaggtatgtgtccagcggctgtcgtccactgaggccgctgctcaatagttaccagcccataggagactgtgtgcccaatgcctatcgcccccaattctgcttgtccaagagttgccagccccaaaacctcctcacttctggatgccaaccctcgagttgcttggcctatcgtcctcaaagtcttcacgttgtgtccagcagcctcagacctctggggcctctgttcagtggttgccaacctctgacccatgtgttcagcacgtgtcgtccatcttgctctggactgtgaaaccagcagcttctttgttccagtgaataatcactctgagcatccacaacaaaaattcaaactccatggacttttgcttctttgctagtagcaactgatgtttcttagttttactgtgcctgatctaatgcaagctgcttctctcgcatgttttatcttgttttcatctttccttgacatcaaaaaaattagtttacaatgctattcaatgttgctctggtctgggaagaatgtatttgttttgcactataataaatgcgattaagtccaaattaagaa

SEQ ID NO: 145593 - DNA, 682 bp, Homo sapiens
  Payload ID: 8846
  Gene Symbol: KRTAP27-1
  Gene Name: keratin associated protein 27-1
  Uniprot ID: Q3LI81
  ENST ID: ENST00000382835
  CDS Start-End: 27-650
gaccatctttaaggatttttagcaatatgcctcatagccactgccattcactcaggagcttccacaatgccccaccactctctgccatcacacatggcactaatcctataacctttgaagacagattgtgtttgcccagcagcttccatagcagaacctgtttcctggacaactttcaagaaacctgcaatgaaaccaccagctgccaaatgaccaattgtgaacaggacttattcacagacgatagctgtgtgcaaagtaactgcttccccggagttgtccaaactacttactccaattccaggccctgcgaaaggacagcgtgccaatcagaaagttcttcagcagggctggcttgtgtttctcagccttgccaatcagaaagcactcagcagatgggttttgtagcccagagctgccaacctgcaagcctcaagggaaacagttgcccacccaagacttctaagtctaaaaatttcgaaactctggaacgtgcatctagccaatgtcagtgtcagtctcagaaccctgaatccagttcctgtagacctctggtcaatgttgcacctgagccacaactcctggaatcttctccaggagttgaaccaacttgctgtgttactggtggttctcaattgcctagtaagtgaagatctgtaggggagatggcttatattctcat

SEQ ID NO: 145594 - DNA, 1026 bp, Homo sapiens
  Payload ID: 8847
  Gene Symbol: KRTAP29-1
  Gene Name: keratin associated protein 29-1
  Uniprot ID: A8MX34
  ENST ID: ENST00000391353
  CDS Start-End: 1-1026
atggcagacggctgttgtcctggaaacaccacagccattccagctgtgcccaccatcaccacatacccagttaaaggtggatttcgacatgctctctgtttgcctagttcctgccacagcagaatgtggcaactggtcacatgccaagaaagctgtcagccatccattggtgccccaagtggctgtgatcctgcttcgtgtcaacctacccgccttccagcaacgtcttgtgtgggttttgtttgccaacctatgtgctcccacgcagcctgctatcagtctggcactggtcagtctccttgtctggttagctcatgtcagccatcctgctcggaatctacttgttgtcaggaaaagtgctgcgatgccagtccctgccagcaaagctcctgccaggaatctgtctgcatgtctggatcatgtcaggcagcttgtggccaatcagtctgctgtgatgctggatcctgccagccatcctgctctgaagtgacctcctgtccggaaacttcttgcctaccaaccatctgtacagctagtccatgccaaccaacttggtgccaaggaagttcatgtcaacccgtcagtggtgaaggccagccctgtaaatcaacttattatcaacccatctgctatattttcaagccttgccaatcagccctctacatgcctgttccctgccagccatcgacttgtgtgttcagttcttgcaatactacttgctgtgtgccttcccattgccagccacctcactgccaactggttccttccacatgcttcatctaccagccagtggctaactgccaggccccttgttccacaaagaactgttgcaaaccagcttcttgtgacactgtgatttctggccaaccaacttgtgatggacccccttcctataaccagagtggctgcaaatcagcttgctgtgtgactggtttaggcacatcacccagtagtggctccaattgcttgccgacttcatgccaacccagctgtgagtccagcttctgcaaggcaacactttgttaa

SEQ ID NO: 145595 - DNA, 1026 bp, Homo sapiens; identical to SEQ ID NO: 145594
  Payload ID: 8847
  Gene Symbol: KRTAP29-1
  Gene Name: keratin associated protein 29-1
  Uniprot ID: A8MX34
  ENST ID: ENST00000576125
  CDS Start-End: 1-1026

SEQ ID NO: 145596 - DNA, 1026 bp, Homo sapiens; identical to SEQ ID NO: 145594
  Payload ID: 8847
  Gene Symbol: KRTAP29-1
  Gene Name: keratin associated protein 29-1
  Uniprot ID: A8MX34
  ENST ID: ENST00000574737
  CDS Start-End: 1-1026

SEQ ID NO: 145597 - DNA, 594 bp, Homo sapiens
  Payload ID: 8848
  Gene Symbol: KRTAP3-1
  Gene Name: keratin associated protein 3-1
  Uniprot ID: Q9BYR8
  ENST ID: ENST00000391588
  CDS Start-End: 41-337
agacttctctcaactcaacaaaaacccacctcccattgccatgtattgctgtgctctccgctcctgcagcgtccccaccggccctgccaccaccttctgctcatttgataaaagctgccgctgtggagtctgcctacccagcacctgcccacatgagatcagcctccttcagcccatctgctgtgacacctgccccccaccctgctgcaagcctgatacctatgtgccaacttgctggctgctcaacaactgtcacccgactcccggactgagtgggatcaacctgaccacctatgttcagcctggctgtgagagtccctgtgagccccgctgttaaccagccgagtctgcacaggttccgtgaggtggctgcccaatgtcctctgcaccatctgggcttcagcactcactactgcctacatcaaggctaaggccatcccaatccccggggccaagtcttgatgaatcttcttaattatttgcacatttgggtaccattggagacctcccttctgtcttttaggctatttcatcactctttgagaaataaccattttgaccatttgttaataaactttattctggcttagcaaa

SEQ ID NO: 145598 - DNA, 594 bp, Homo sapiens; identical to SEQ ID NO: 145597
  Payload ID: 8848
  Gene Symbol: KRTAP3-1
  Gene Name: keratin associated protein 3-1
  Uniprot ID: Q9BYR8
  ENST ID: ENST00000571440
  CDS Start-End: 41-337

SEQ ID NO: 145599 - DNA, 702 bp, Homo sapiens
  Payload ID: 8849
  Gene Symbol: KRTAP3-2
  Gene Name: keratin associated protein 3-2
  Uniprot ID: Q9BYR7
  ENST ID: ENST00000391587
  CDS Start-End: 42-338
cctcatctaagaaactgaaagctaaccagacgcccattgccatggattgctgtgcctctcgcagctgcagtgtccccactgggcctgccaccaccatctgctcctccgacaaatcctgccgctgtggagtctgcctgcccagcacctgcccacacacagtttggttactggagcccatctgctgtgacaactgtcccccaccctgccacattcctcagccctgcgtgcccacctgcttcctgctcaactcctgccagccaactccgggcctggagaccctcaacctcaccaccttcactcagccctgctgtgagccctgcctcccaagaggctgctgatggatggctactttgctcagtgcccgacaacgaagaatccagaagctgtcccttcagtattcacttgcctcagtagtttgccagatgttaaggtagaccagatgacccagatatgaagaacttacctttggttttaatgggggaaaaaaagaaaagtattttttatggttatttagctgaaaaaccatttggttcctgtgggcaggtgaatgagttttattagcaaaatactgtttcaatctttaagacctcagattacatgttcttgatcatattgcttcctggctcttgtttcttgtactgggtattttcatagaagaaaatttcttggtgggttttccaataaactatatttctctggcaa

SEQ ID NO: 145600 - DNA, 702 bp, Homo sapiens; identical to SEQ ID NO: 145599
  Payload ID: 8849
  Gene Symbol: KRTAP3-2
  Gene Name: keratin associated protein 3-2
  Uniprot ID: Q9BYR7
  ENST ID: ENST00000575409
  CDS Start-End: 42-338

SEQ ID NO: 145601 - DNA, 704 bp, Homo sapiens
  Payload ID: 8850
  Gene Symbol: KRTAP3-3
  Gene Name: keratin associated protein 3-3
  Uniprot ID: Q9BYR6
  ENST ID: ENST00000391586
  CDS Start-End: 37-333
caatcaaacccataaataccacagactctaatagccatggattgctgtgcctctcgaggctgcagtgtccccaccgggcctgccaccaccatctgctcctctgacaaatcctgccgctgtggagtctgcctgcccagcacctgcccacacacagtttggttactggagcccacctgctgtgacaactgtcccccaccctgccacattcctcagccctgcgtgcccacctgcttcctgctcaactcctgccagccaactccaggcctggagaccctcaacctcaccaccttcactcagccctgctgtgagccctgcctcccaagaggctgctaatggatggctactttgctcagtgcctgagattgaaaaagtcaacatagaagctttagcattcacctatctcagtacctacaactaatgtactctgctttagaaattggaacaaggatggtactaccacaatcaccccctgcaaaaaaaaagagaccaagaaactttcaatgaccattcagctataaccaactgcagtttgaatcagtggatgcctatagcttcctgaagctgttcgattccttcatattaaagtgtctctttctgtgggtggtttgggaattctgttttcagtcttgggtggtatctttctgaaaattaaggaagttcttcatgattatcctaataaattttacatctctggcatagcacaa

SEQ ID NO: 145602 - DNA, 704 bp, Homo sapiens; identical to SEQ ID NO: 145601
  Payload ID: 8850
  Gene Symbol: KRTAP3-3
  Gene Name: keratin associated protein 3-3
  Uniprot ID: Q9BYR6
  ENST ID: ENST00000572132
  CDS Start-End: 37-333

SEQ ID NO: 145603 - DNA, 1241 bp, Homo sapiens
  Payload ID: 8851
  Gene Symbol: KRTAP4-1
  Gene Name: keratin associated protein 4-1
  Uniprot ID: Q9BYQ7
  ENST ID: ENST00000398472
  CDS Start-End: 489-929
atttctgctgttttcttctagttgtttcacagtttatttttctcagaagaatcttcagaaaacaagaaacatcatcccatttgaggactgctgtgagacacacagttttcaggatgacacacagaatgctgagttccaagtgatctgtcacctgacaatcgactggatgagtaagattacaagtctttgaaattaaatgacacactaaattaactgaagacaagaggaggaggaaagactggattggctaaactctaacacagagaaagaataaaagtgcattccaccttttatacagatattttcccacaattagctaacttgataattgcctatctattaagataaacaataacaaggaaatagcttttatgtggtgacaacagctcctcagctgagtataaaagtggacatgggataaggagattcccacattcgaaaaactcactgtcttggaaacctacctagaacctccaccctctgacaccatggttaactcttgttgtggctctgtctgctctgaccagggctgtgatcaaggcctctgccaagagacctgctgccgccccagctgctgccagaccacctgttgctgccccagctgtgttgtatccagctgctgccgcccatcctgctctcagactacctgctgccagaccacttgctgtcgccccagctgctgccacccagtctgttgtcagaccacctgccgccccagctgtggtgtgtccagctgctgccgcccactctgctgtcagaccacctgccaccccagctgtggtatgtccagctgctgccgtccactctgttgtcagaccacctgccgccccagctgtggtgtgtccagctgctgccgtccactctgctgtcagaccacctgctgccgtgcaacttgctgccgccccagctgctgtggatcctcttgttgaacctcatattggactatcaaccatgagccagtcaccatcccatgatatgaaagtgtcatttatatcaacttgtccatgtgttaaatggccatcagctttattatcctgttattccactaagtaactggtgaaagggcatccatctacatttaataccactcatttttcccatggatctcttcccagcagcattcagacctcagatgcatgatgcagttagactaagcctctaagtttctgactgttatgcttgatttgaccttcaaaattacatattaactgttcttcaataaatattatcttaatatcagt

SEQ ID NO: 145604 - DNA, 737 bp, Homo sapiens
  Payload ID: 8851
  Gene Symbol: KRTAP4-1
  Gene Name: keratin associated protein 4-1
  ENST ID: ENST00000620667
  CDS Start-End: 42-425
ctgtcttggaaacctacctagaacctccaccctctgacaccatggttaactcttgttgtggctctgtctgctctgaccagggctgtgatcaaggcctctgccaagagacctgctgccgccccagctgctgccagaccacctgttgctgccccagctgtgttgtatccagctgctgccgcccatcctgctctcagactacctgctgccagaccacttgctgtcgccccagctgctgccacccagtctgttgtcagaccacctgccgccccagctgtggtgtgtccagctgctgccgtccactctgttgtcagaccacctgccgccccagctgtggtgtgtccagctgctgccgtccactctgctgtcagaccacctgctgccgtgcaacttgctgccgccccagctgctgtggatcctcttgttgaacctcatattggactatcaaccatgagccagtcaccatcccatgatatgaaagtgtcatttatatcaacttgtccatgtgttaaatggccatcagctttattatcctgttattccactaagtaactggtgaaagggcatccatctacatttaataccactcatttttcccatggatctcttcccagcagcattcagacctcagatgcatgatgcagttagactaagcctctaagtttctgactgttatgcttgatttgaccttcaaaattacatattaactgttcttcaataaatattatcttaatatcagt

SEQ ID NO: 145605 - DNA, 1180 bp, Homo sapiens
  Payload ID: 8852
  Gene Symbol: KRTAP4-11
  Gene Name: keratin associated protein 4-11
  Uniprot ID: Q9BYQ6
  ENST ID: ENST00000391413
  CDS Start-End: 46-633
ttcactctcctagaaacccaactagatccttcaccctctgacaccatggtaaactcctgttgtggctccgtgtgctctcaccaaggctgtggccgagacctctgccaggagacctgctgccgccccagctgctgtgagaccacctgctgcaggaccacctactgtcgccccagctgctgtgtgtccagctgctgcaggccccagtgctgccagtctgtgtgctgccagcccacctgctgccgccccagatgctgcatctccagctgctgtcgccccagctgctgtgtgtccagctgctgcaagccccagtgctgccagtctatgtgctgccagcccacttgctgccgccccagatgctgcatctccagctgctgtcgccccagctgctgtgtgtccagctgctgcagaccccagtgctgccagtctgtgtgctgccagcccacctgctgccaccccagctgcagcatctccagctgctgccgcccctcttgctgtgaatccagctgctgccgcccctgctgctgcctgcgtccagtctgtggccgagtctcctgccacaccacttgctatcgcccaacctgtgtcatctccagctgcccccgccccttgtgctgtgcctcctcttgctgctgagcccactgccctggctcatctctcccttcactgcaggcccacagttgtagaccattcttctgtgctgactattaggacacatggagtgggattgatgtcattcagcagggtggacttcatgtttccaatgagcccatcaccatcccactgactctgtgagaacattctggttcattttaaactccctcccttgctttctttctcttccagtcatggcaccaaatatgaaataatttgtaatccactagctaagaaattattccaatcctctaaattcctcattttttaaatcgttttgagcctacagaatatccttcccagtgaggtacacattatctccatttcaaacatattatttgtctgtcagcctttcagtcattcttttctcttggaaaggtaggaggctgcccctcccatgctctcctgctttctccctgttctctctttgtctctgtttgttcaagtttgccagaatttttctattttattggttctttatctttattgtgttcacaaaatatattgtattaaacttttcatttagaaa

SEQ ID NO: 145606 - DNA, 1180 bp, Homo sapiens
  Payload ID: 8852
  Gene Symbol: KRTAP4-11
  Gene Name: keratin associated protein 4-11
  Uniprot ID: Q9BYQ6
  ENST ID: ENST00000573418
  CDS Start-End: 46-633
ttcactctcctagaaacccaactagatccttcaccctctgacaccatggtaaactcctgttgtggctccgtgtgctctcaccaaggctgtggccaagacctctgccaggagacctgctgccgccccagctgctgtgagaccacctgctgcaggaccacctactgtcgccccagctgctgtgtgtccagctgctgcaggccccagtgctgccagtctgtgtgctgccagcccacctgctgccgccccagatgctgcatctccagctgctgtcgccccagctgctgtgtgtccagctgctgcaagccccagtgctgccagtctatgtgctgccagcccacttgctgccgccccagatgctgcatctccagctgctgtcgccccagctgctgtgtgtccagctgctgcagaccccagtgctgccagtctgtgtgctgccagcccacctgctgccaccccagctgcagcatctccagctgctgccgcccctcttgctgtgaatccagctgctgccgcccctgctgctgcctgcgtccagtctgtggcggagtctcctgccacaccacttgctatcgcccaacctgtgtcatctccagctgcccccgccccttgtgctgtgcctcctcttgctgctgagcccactgccctggctcatctctcccttcactgcaggcccacagttgtagaccattcttctgtgctgactattaggacacatggagtgggattgatgtcattcagcagggtggacttcatgtttccaatgagcccatcaccatcccactgactctgtgagaacattctggttcattttaaactccctcccttgctttctttctcttccagtcatggcaccaaatatgaaataatttgtaatccactagctaagaaattattccaatcctctaaattcctcattttttaaatcgttttgagcctacagaatatccttcccagtgaggtacacattatctccatttcaaacatattatttgtctgtcagcctttcagtcattcttttctcttggaaaggtaggaggctgcccctcccatgctctcctgctttctccctgttctctctttgtctctgtttgttcaagtttgccagaatttttctattttattggttctttatctttattgtgttcacaaaatatattgtattaaacttttcatttagaaa

SEQ ID NO: 145607 - DNA, 705 bp, Homo sapiens
  Payload ID: 8852
  Gene Symbol: KRTAP4-11
  Gene Name: keratin associated protein 4-11
  ENST ID: ENST00000613957
  CDS Start-End: 27-659
accgagaacctccaccctctgacaccatggtcaactcctgttgtggctctgtgtgctctgaccagggctgtggcccagtctgctgtcagcccacctgctgccgccccagctgctgtcagaccacctgctgtaggaccacctgctgccgccccagctgctgtgtgtccagctgctgcagaccccagtgctgccagtctgtgtgctgccagcccacctgctgccgccccagctgctgtcagaccacctgctgccgccccagatgctgcatctccagctgctgtcgccccagctgctgtgtgtccagctgctgcaagccccagtgctgccagtctatgtgctgccagcccacttgctgccgccccagatgctgcatctccagctgctgtcgccccagctgctgtgtgtccagctgctgcagaccccagtgctgccagtctgtgtgctgccagcccacctgctgccaccccagctgcagcatctccagctgctgccgcccctcttgctgtgaatccagctgctgccgcccctgctgctgccgcccctgctgctgcgtgcgtccagtctgtggccgagtctcctgccacaccacttgctatcgcccaacctgtgtcatctccacctgtccccgccccgtgtgctgcgcctcctcttgctgctgagcccactgccctggctcatctctcccttcgccgctggtccacaaat

SEQ ID NO: 145608 - DNA, 1077 bp, Homo sapiens
  Payload ID: 8853
  Gene Symbol: KRTAP4-12
  Gene Name: keratin associated protein 4-12
  Uniprot ID: Q9BQ66
  ENST ID: ENST00000394014
  CDS Start-End: 46-651
ctcactctcctggaaacccaccgagaacctccaccctctgacaccatggtcaactcctgttgtggctctgtgtgctctgaccagggctgtggcctggagaactgctgccgccccagctgctgccagaccacctgctgcaggaccacctgctgccgccccagctgctgtgtgtccagctgctgcaggccccagtgctgccagtctgtgtgctgtcagcccacctgctgccgccccagctgctgtcagaccacctgctgtaggaccacctgctgccgccccagctgctgtgtgtccagctgctgcagaccccagtgctgccagtctgtgtgctgccagcccacctgctgccgccccagctgctgtcagaccacctgctgcaggaccacttgctgccgccccagctgctgtgtgtccagctgctgcagaccccagtgctgccagtctgtgtgctgccagcccacctgctgccgccccagctgctgcatctccagcagctgctgcccctcttgctgtgaatccagctgctgccgcccctgctgctgcctgcgtccagtctgtggccgagtctcctgccacaccacttgctatcgcccaacctgtgtcatctccacctgcccccgccccttgtgctgtgcctcctcttgctgctaaatctctgctgtgaacacaccacttccttattacgtcctttcctacagatgaaggctctcattgcaaacatgcggactgttcaagagaattgatctgggtcccataagcaaacctcatccttagaaattctgtatttgcattctaccttttgtccaaactcccttccttccaaaggaattcattgacaatctcctaataaattgacaaattgtcctccaacatcctcccacctctttgacttcaggacatttattcatcatgcctaaggaatttgaagattgcctccatcatttgtagggccacagatcttaaagcctccaaccttgaagtccagtgaagtctctctcttaaagtcttttgcaaacatttttgtaccttgttatttccatgtaccaaaataaacctctattctattggcactgaaaa

SEQ ID NO: 145609 - DNA, 1077 bp, Homo sapiens; identical to SEQ ID NO: 145608
  Payload ID: 8853
  Gene Symbol: KRTAP4-12
  Gene Name: keratin associated protein 4-12
  Uniprot ID: Q9BQ66
  ENST ID: ENST00000571271
  CDS Start-End: 46-651

SEQ ID NO: 145610 - DNA, 708 bp, Homo sapiens
  Payload ID: 8854
  Gene Symbol: KRTAP4-16P
  Gene Name: keratin associated protein 4-16, pseudogene
  ENST ID: ENST00000440582
  CDS Start-End: 1-708
atgtgcagttcaaagatgccatgcagccccagtgcttccagtctgtgtgctgccagcccacccaactgctgtcaccccagctgttgtcagaccacctgctgcagaaccacctcctgctcccacagctgctctgtgtccagctgctgcagaccccagtgctgccattccgtgtgctgccagcccacctgctgccgccccagctgctgtcagaccacctgctgcaggacgacctgctgccaccccagctgctgtgtgtccagctgctgcagaccccagtgctgccattccgtgtgcttccagcccacctgctgccaccccagctgctgcatctccagcagctgctgcccctcttgctgtgaatcgagctgctgctgcccctgctgctgcctgcgtccagtctgtggtcgagtctcctgccacgtcacttgctatcacccaacctgtgtcatctccacctgcccccaccccttgtgctgtgcctcccctccccttcccctccccttcccttccccacccgttcccctccctttcttcctttcccttgccctcccctcccctccccgcccttcccctcccctcctctccccagtgttaatcccctccccttccccttccccttctctcccttcactttcccctcccctcccctcccctcccctcccctcccctcatttccccagtgttaatcccaagagcatgcttcaataa

SEQ ID NO: 145611 - DNA, 708 bp, Homo sapiens
  Payload ID: 8854
  Gene Symbol: KRTAP4-16P
  Gene Name: keratin associated protein 4-16, pseudogene
  ENST ID: ENST00000576939
  CDS Start-End: 1-708
atgtgcagttcaaagatgccatgcagccccagtgcttccagtctgtgtgctgccagcccacccaactgctgtcaccccagctgttgtcagaccacctgctgcagaaccacctcctgctcccacagctgctctgtgtccagctgctgcagaccccagtgctgccattccgtgtgctgccagcccacctgctgccgccccagctgctgtcagaccacctgctgcaggacgacctgctgccaccccagctgctgtgtgtccagctgctgcagaccccagtgctgccattccgtgtgcttccagcccacctgctgccaccccagctgctgcatctccagcagctgctgcccctcttgctgtgaatcgagctgctgctgcccctgctgctgcctgcgtccagtctgtggtcgagtctcctgccacgtcacttgctatcatccaacctgtgtcatctccacctgcccccaccccttgtgctgtgcctcccctccccttcccctccccttcccttccccacccgttcccctccctttcttcctttcccttgccctcccctcccctccccgcccttcccctcccctcctctccccagtgttaatcccctccccttccccttccccttctctcccttcactttcccctcccctcccctcccctcccctcccctcccctcatttccccagtgttaatcccaagagcatgcttcaataa

SEQ ID NO: 145612 - DNA, 763 bp, Homo sapiens
  Payload ID: 8855
  Gene Symbol: KRTAP4-2
  Gene Name: keratin associated protein 4-2
  Uniprot ID: Q9BYR5
  ENST ID: ENST00000377726
  CDS Start-End: 45-455
ccaccttcctggaaatccacccagaacctccaccctctgacaccatggtcaactcctgttgtggctctgtgtgctctgaccagggctgtggcctagagaactgctgccgtcccagctgctgccagaccacctgctgcaggaccacctgctgccgccccagctgctgtgtgtccagctgctgcagaccgcagtgctgccagtctgtgtgctgccagcccacctgctgcagccccagctgctgccagaccacttgctgcaggaccacctgctgccgtcccagctgctgtgtgtccagctgcttcagaccccagtgctgccagtctgtgtactgccagcccacctgctgccgccccagctgtggccagaccacctgctgcaggaccacctgctaccgccccagctgctgtgtgtccacctgctgccgcccaacctgctctagtggctcttgctgctgatgccctcacctatactcacctgcctttattaaccagcattcttgatatgatccacctgtgaactgaatcatgcaaggccaattggacaacctcagttccaaccaattcttggattgagtttggcctccaaatatgctcaccaaacactatgttgctaccctctaccaaatgaatacaagtttgaattttctctgaaatatgtcaaccccatgttccctgaattgaaatatttgctctctaccataatttatcacatggagctattcctctatcttaaataaattttaatttttgaggcatacaaataa

SEQ ID NO: 145613 - DNA, 964 bp, Homo sapiens
  Payload ID: 8856
  Gene Symbol: KRTAP4-3
  Gene Name: keratin associated protein 4-3
  Uniprot ID: Q9BYR4
  ENST ID: ENST00000391356
  CDS Start-End: 23-610
agaacctccaccctctgacgccatggtcagctcctgctgtggctctgtctgctctgaccagagctgtggtcaaggtctcggccaggagagctgctgccgccccagctgctgccagaccacctgctgcaggaccacctgctgccgccccagctgctgcatttccagttgctgcaggccttcctgctgtatctccagctgctgcaaacccagctgctgcaggaccacctgctgccgccccagctgctgcatttccagttgctgcaggccttcctgctgtatctccagctgctgcaaacccagctgctgcaggaccacctgctgccgccccagctgctgcatttctagttgctgcaggccttcctgctgtatctctagctgttgcaaacccagctgctgccagaccacctgctgccgccccagctgctgtatctccagctgctacaggccccagtgctgccagccctcctgctgccgcccggcttgctgcatttctagttgctgtcatcccagctgctgtgtgtccagctgccgctgccctttcagctgcccgaccacctgctgtagaacaacctgcttccaccccatctgctgcggcagttcttgctgctgagtgaagctgctctggatttgtgcaccttcttgctctcaaccttcagttcaggcacagagtatctattcagagaacatgtggacttcctgatgtcgtgaaaacagaggcatggactgatttggaaaatattttattagtatgtattctcttttatagaagtttttattcctattgaatctgaatttacagtcaaattccacatcacatgttttagaattctttattctaattcaatatacataaatcttcaaatggtatccttctagatgtttcttcctaatgttttctgtggtatcaattttcatgtggaattgtttgatgttcctcaataaaacttcatagtgttcaaaagca

SEQ ID NO: 145614 - DNA, 1081 bp, Homo sapiens
  Payload ID: 8857
  Gene Symbol: KRTAP4-4
  Gene Name: keratin associated protein 4-4
  Uniprot ID: Q9BYR3
  ENST ID: ENST00000390661
  CDS Start-End: 41-541
cttcctggaaacccacccagaacctccaccctctgacaccatggtcaactcctgttgtggctctgtgtgctctgaccagggctgtggcctagagaactgctgccgtcccagctactgccagaccacctgctgcaggaccacctgctgccgccccagctgctgtgtgtccagctgctgcagaccccagtgctgccagaccacctgctgcaggaccacctgctgccaccccagctgctgtgtgtccagctgctgcagaccccagtgctgccagtctgtgtgctgccagcccacctgctgcagaccccaatgctgccagactacctgctgtaggaccacctgctgccgccccagctgctgcaggccccagtgctgccagtctgtgtgctgccagcccacctgctgctgccccagctactgtgtgtccagctgctgcagaccccagtgctgccagaccacctgctgcagaaccacctgctgccgccccagctgctgtgtgtccaggtgctacaggccccattgtggccagtctctatgctgctagcccatctgctggcaaaccacctgctacaggaccacctgctgccaccccagctattgcatttccagctgctgccagccttcctgcagtatctctagcagcagtagctcctcctgctgtggcttcagctgctgcaggctctcctgctgcatctccagttgctgccgccccaactgctgccagaccatgtgctgccgcccaacctgctctagtgcttcttgctgctgaggctgtcatctggactcaccagattctcatcaaccagcattcttgatgtagctcatctatgagctgagttatgggaagctagttggaaaacttcagttccaaccaattcttagattgaatctggcctccaaatatatgctccccccacattttacctctctaccaaatgaacataagttgtaatttgctctgaaatctgtcaactatcttaattgaaatatttgctctctgccataatttctcatatggagctattccattttaaacaaatatttatctaaataaatcttaaataaattttcaggcatagaaata

SEQ ID NO: 145615 - DNA, 879 bp, Homo sapiens
  Payload ID: 8858
  Gene Symbol: KRTAP4-5
  Gene Name: keratin associated protein 4-5
  Uniprot ID: Q9BYR2
  ENST ID: ENST00000343246
  CDS Start-End: 36-581
tagaaatccacccagaacctccaccctctgacaccatggtcagctcctgttgtggctctgtcagctctgagcagagctgtggcctggagaactgctgccgccccagctgctgccagaccacctgctgcaggaccacctgctgccgccccagctgctgcaagccccagtgctgccagtctgtgtgctaccagcccacctgctgccaccctagctgctgcatctccagctgctgccgcccctattgctgtgaatccagctgctgccgcccctgctgctgccagaccacctgctgcaggaccacctgctgcaggaccacctgctgctgccccagctgctgtgtgtccagctgctgcagaccccagtgctgccagtctgtgtgctgccagcccacttgctgccgtcccagctgctgcatctccagctgctgccacccctcttgctgtgaatccagctgctgccgcccctgctgctgcgtgcgtccagtctgtggccgagtctcctgccacaccacttgctatcgcccaacctgtgtcatctccacctgcccccgccccttgtgctgtgcctcctcttgctgctaatgtctccttgtgatatttgtcatactatgaatgtcttcattagtcatttaaaatgcactgtagccagccagtcactggaaaaatgaacacttccctgccagtttgtctcatgtggcattcagagtggacattcagctcttctaggaaatgacagacaatcacattcattaaaatatgttatgccaggccccaatgcagttatttttagatgagcagtgtcttcattcgaaggggacactaactgtgatgatctcatataatattgttttcatgtattaataaacagccacttccctaa

SEQ ID NO: 145616 - DNA, 1055 bp, Homo sapiens
  Payload ID: 8859
  Gene Symbol: KRTAP4-6
  Gene Name: keratin associated protein 4-6
  Uniprot ID: Q9BYQ5
  ENST ID: ENST00000345847
  CDS Start-End: 1-618
atggtcagctcctgttgtggttccgtctgctctgaccagggctgtggcctggagacctgctgccgccccagctgctgtcagaccacctgctgcaggaccacctgctgccgccccagctgctgtgtgtccagctgctgcagaccccagtgctgccagtctgtgtgctgccagcccacctgctgccgtcccagctgctgtcccagctgctgtcagaccacctgctgcaggaccacctgctgccgccctagctgctgtgtatccagctgctgcagaccccagtgctgccagtctgtgtgctgccagcccacttgctgccgtcccagctgcagcatctccagctgctgtcgccccagctgctgtgtgtccaggtgctgcaggtcccagtgctgccagtctgtgtgctgccagccaacctgctgccgtcccagctgctgcatctccagctgctgccgcccctcttgctgtgaatccagctgctgccgcccgtgctgctgccgcccctgctgctgcctgcgtccagtctgtggccgagtctcctgccacaccacttgctatcgcccaacctgtgtcatttccacctgcccccgtcccttgtgctgtgcctcctcttgctgctgagctccttgcctgaaactatctcctccccttcagctcactcctcacagaagcagaccttgtgcatctcataaacaactcagaagaggccattcccaccaactgtgtttccatatcctggacatatatctaggatatatgtcctggctatacatctagaatatatgttccccatgttgacccaagtgtgaaattagatattatttacagaaagaaattaatagaatttaccaaattttataccttatatttgtatttatggataccaagttcttctgtcccaaacatggaaattcttgcagggtaactcggggcaaggttgtctcactctcagatttgaaagtctgattgtttcaccctgtatttccttttacagcaatgtttctgtatcttatttttgctgcttctgaataaaactccacttttgtcgcatagaaata

SEQ ID NO: 145617 - DNA, 992 bp, Homo sapiens
  Payload ID: 8860
  Gene Symbol: KRTAP4-7
  Gene Name: keratin associated protein 4-7
  Uniprot ID: Q9BYR0
  ENST ID: ENST00000391417
  CDS Start-End: 58-525
aaacccaagaacttcactctcttggaaacccacccagatcctccccgttctgacaccatggtcagctcctgttgtggctccgtgtgctctgaccagggctgcagccaagacctctgtcaggagacctgctgccgccccagctgctgtcagaccacctgttgcaggaccacctgctaccgccccagctgttgtgtgtccagctgctgcaggccccagtgctgccagtctgtgtgctgccaacccacctgctgtcgccccacctgctgtgagacgacctgctgccaccctaggtgctgcatctccagctgctgccgccccagctgctgtatgtccagctgctgcaagccccagtgctgccagtctgtgtgctgccagcccacctgctgccgccccagctgctgccgcccctgctgctgcctgcgtccagtctgtggccgagtctcctgccacaccacttgctatcgcccaacctgtgtcatctccacctgtccccgccccttgtgctgtgcctcctcttgctgctgagcccactgccctggctcacgtcccccttcaccactggcccacagatgtagacccttctactgtgctgaccattaggatacatgaagtggggttgatgtcattcaataggatggaccttatgcttccaaagagcccaccaccatttcactgactctgtgagaacattctggttcattttaaactccctcctttgctttctttttcttctggtggtggcaccaaatgtgaattaatttgtaatacactagctaagaaattattccaatcttctgatttccttattttctttatcactttaaggtacagattctccttctcagtgaggtagatattatctgcaggaccagttttgtcactgatgttgcaccctcagatccagccacccaattgtattctgtgtttctcctagggtgaatttcttatgctttgttgtatctctgctttctaataaacttttctgcacttaa

SEQ ID NO: 145618 - DNA, 423 bp, Homo sapiens
  Payload ID: 8860
  Gene Symbol: KRTAP4-7
  Gene Name: keratin associated protein 4-7
  ENST ID: ENST00000621138
  CDS Start-End: 1-423
atggtcagctcctgttgtggctccgtgtgctctgaccagggctgcagccaagacctctgtcaggagacctgctgccgccccagctgctgtcagaccacctgttgcaggaccacctgctaccgccccagctgttgtgtgtccagctgctgcaggccccagtgctgccagtctgtgtgctgccaacccacctgctgtcgccccacctgctgtgagacgacctgctgccaccctaggtgctgcatctccagctgctgccgccccagctgctgtatgtccagctgctgcaagccccagtgctgccagtctgtgtgctgccagcccacctgctgccgccccagctgctgccgcccctgctgctgccgcccaacctgtgtcatctccacctgtccccgccccttgtgctgtgcctcctcttgctgctga

SEQ ID NO: 145619 - DNA, 690 bp, Homo sapiens
  Payload ID: 8860
  Gene Symbol: KRTAP4-7
  Gene Name: keratin associated protein 4-7
  ENST ID: ENST00000612231
  CDS Start-End: 27-644
acccagatcctccccgttctgacaccatggtcagctcctgttgtggctccgtgtgctctgaccagggctgcagccaagacctctgtcaggagacctgctgccgccccagctgctgtcagaccacctgttgcaggaccacctgctaccgccccagctgttgtgtgtccagctgctgcaggccccagtgctgccagtctgtgtgctgccaacccacctgctgtcgccccacctgctgtgagacgacctgctgccaccctaggtgctgcatctccagctgctgccgccccagctgctgtatgtccagctgctgcaagccccagtgctgccagtctgtgtgctgccagcccacctgctgccgccccagctgctgcatctccagctgctgtcgccccagctgctgtgtgtccagctgctgcaagccccagtgctgccagtctgtgtgctgccagcccaactgctgccgccccagctgcagcatctccagctgctgccgcccctcttgctgtgaatccagctgctgccgcccctgctgctgcgtgcgtccagtctgtggccgagtctcctgccacaccacttgctatcgcccaacctgtgtcatctccagctgcccccgccccttgtgctgtgcctcctcttgctgctgagcccactgccctggcttatctcccccttcaccactggcccacagat

SEQ ID NO: 145620 - DNA, 468 bp, Homo sapiens
  Payload ID: 8861
  Gene Symbol: KRTAP4-8
  Gene Name: keratin associated protein 4-8
  ENST ID: ENST00000318329
  CDS Start-End: 1-468
atggtcaactcctgttgtggctccgtgtgctctgaccaaggctgtggccaagacctctgccaggagacctgctgctgccccagctgctgtcagaccacctgctgcaggaccacctgctaccgccccagctacagtgtgtcctgctgctgcagaccccagtgctgccagtctgtgtgctgccagcccacctgctgtcgccccagctgctgtgtgcccacctgctgccaccctagctgctgcatctccagctgctgccgccccagctgctgtgtgtccagctgctgcaagccccagtgctgccagtctgtgtgctgccagcccaactgctgccgccccagctgctgccgcccctgctgctgcctgcgtccagtctgtggccgagtctcctgccacaccacttgctatcgcccagcctgtgtcatctccacctgcccccgccccgtgtgctgcgcctcctcttgctgctga

SEQ ID NO: 145621 - DNA, 1161 bp, Homo sapiens
  Payload ID: 8861
  Gene Symbol: KRTAP4-8
  Gene Name: keratin associated protein 4-8
  Uniprot ID: Q9BYQ9
  ENST ID: ENST00000333822
  CDS Start-End: 58-615
aaactcaagaactttactctcttggaaacccaaatagatccttcaccctctgacaccatggtcaactcctgttgtggctccgtgtgctctgaccaaggctgtggccaagacctctgccaggagacctgctgctgccccagctgctgtcagaccacctgctgcaggaccacctgctaccgccccagctacagtgtgtcctgctgctgcagaccccagtgctgccagtctgtgtgctgccagcccacctgctgtcgccccagctgctgtgtgtccagctgctgcaagccccagtgctgccagtctgtgtgctgccagcccacctgctgccaccctagctgctgcatctccagctgctgccgccccagctgctgtgtgtccagctgctgcaagccccagtgctgccagtctgtgtgctgccagcccaactgctgccgccccagctgcagcatctccagctgctgccgcccctcttgctgtgaatccagctgctgccgcccctgctgctgcctgcgtccagtctgtggccgagtctcctgccacaccacttgctatcgcccagcctgtgtcatctccacctgcccccgccccgtgtgctgcgcctcctcttgctgctgagcccactgccctggctcatctctcccttcaccgctggtccacaaatgtagaccattcttctgtgctgaatattaggacacatggagtgggatttatgtcattcagcagggtggacctcatgtatccaatgagcccatcaccatcccgctgactctgtgagaacattctggttcattttaaactccctcccttgctttctttttcttccagtcatggcaccaaatacgaattaatttgtaatccactagctaagaaattattccaatcctctaaattcctcattttttaaaatcattttgagcctacagaatatccttcccaattaggtacacattatctccctttcaaacatactatttgtctgtcagcctttcagtcattcttttcttttggaaaggtaggaggctgcccctcccgtgctctcccgctttctccctgctctctctttctctcactgttcaagtttgtcagaatttttctattttattagttctttatctttattgtgttcacaaaatatattgtattaaacttttcatttagaaa

SEQ ID NO: 145622 - DNA, 588 bp, Homo sapiens
  Payload ID: 8861
  Gene Symbol: KRTAP4-8
  Gene Name: keratin associated protein 4-8
  ENST ID: ENST00000574631
  CDS Start-End: 1-588
atggtcaactcctgttgtggctccgtgtgctctgaccaaggctgtggccaagacctctgccaggagacctgctgctgccccagctgctgtcagaccacctgctgcaggaccacctgctaccgccccagctacagtgtgtcctgctgctgcagaccccagtgctgccagtctgtgtgctgccagcccacctgctgccgccccagatgctgcatctccagctgctgtcgccccagctgctgtgtgtccagctgctgcaagccccagtgctgccagtctgtgtgctgccagcccacctgctgccaccctagctgctgcatctccagctgctgccgccccagctgctgtgtgtccagctgctgcaagccccagtgctgccagtctgtgtgctgccagcccacctgctgccaccctagctgcagcatctccagctgctgccgcccctcttgctgtgaatccagctgctgccgcccctgctgctgcgtgcgtccagtctgtggccgagtctcctgccacaccacttgctatcgcccaacctgtgtcatctccacctgtccccgccccgtgtgctgcgcctcctcttgctgctga

SEQ ID NO: 145623 - DNA, 1144 bp, Homo sapiens
  Payload ID: 8861
  Gene Symbol: KRTAP4-8
  Gene Name: keratin associated protein 4-8
  ENST ID: ENST00000612944
  CDS Start-End: 41-598
ctcttggaaacccaaatagatccttcaccctctgacaccaatggtcaactcctgttgtggctccgtgtgctctgaccaaggctgtggccaagacctctgccaggagacctgctgctgccccagctgctgtcagaccacctgctgcaggaccacctgctaccgccccagctacagtgtgtcctgctgctgcagaccccagtgctgccagtctgtgtgctgccagcccacctgctgtcgccccagctgctgtgtgtccagctgctgcaagccccagtgctgccagtctgtgtgctgccagcccacctgctgccaccctagctgctgcatctccagctgctgccgccccagctgctgtgtgtccagctgctgcaagccccagtgctgccagtctgtgtgctgccagcccacctgctgccaccctagctgcagcatctccagctgctgccgcccctcttgctgtgaatccagctgctgccgcccctgctgctgcgtgcgtccagtctgtggccgagtctcctgccacaccacttgctatcgcccaacctgtgtcatctccacctgtccccgccccgtgtgctgcgcctcctcttgctgctgagcccactgccctggctcatctctcccttcgccgctggtccacaaatgtagaccattcttctgtgctgaatattaggacacatggagtgggattgatgtcattcagcagggtggacctcatgtatccaatgagcccatcaccatcccgctgactctgtgagaacattctggttcattttaaactccctcccttgctttatttttcttccagtcatggcaccaaatacgaattaatttgtaatccactagctaagaaataattccaatcctctaaattcctcattttttaaaatcattttgagcctacagaatatccttcccaattaggtacacattatctccctttcaaacatactatttgtctgtcagcctttcagtcattcttttcttttggaaaggtaggaggctgcccctcccgtgctctcccgctttctccctgctccctctttctctcactgttcaagtttgccagaatttttctattttattagttctttatctttattgtgttcacaaaatatattgtattaaacttttcatttagaaa

SEQ ID NO: 145624 - DNA, 1157 bp, Homo sapiens
  Payload ID: 8862
  Gene Symbol: KRTAP4-9
  Gene Name: keratin associated protein 4-9
  Uniprot ID: Q9BYQ8
  ENST ID: ENST00000391415
  CDS Start-End: 58-690
aaacccaagaacttcactctcttggaagcccacccagatcctccccgttctgacaccatggtcagctcctgttgtggctccgtgtgctctgaccagggctgcggccaagacctctgtcaggagacctgctgccgccccagctgctgtgagaccacctgctgcaggaccacctgctgccgccccagctgttgtgtatccagctgctgcaggccccagtgctgccagtctgtgtgctgccaacccacttgttcccgccccagctgctgtcagaccacctgttgcaggaccacctgctaccgccccagctgttgtgtgtccagctgctgcaggccccagtgctgccagcctgcgtgctgccaacccacttgctgtcgccccagctgctgtgagacgacctgctgccaccctaggtgctgcatctccagctgctgtcgccccagctgctgtgtgtccagctgctgcaagccccagtgctgccagtctgtgtgctgccagcccaactgctgccgccccagctgcagcatctccagctgctgccgcccctcttgctgtgaatccagctgctgccgcccctgctgctgcgtgcgtccagtctgtggccgagtctcctgccacaccacttgctatcgcccaacctgtgtcatctccagctgcccccgccccttgtgctgtgcctcctcttgctgctgagcccactgccctggcttatctcccccttcaccactggcccacagatgtagacccttctactgtgctgaccattaggatacaggaagtggggttgatgtcattcaatagaatggaactcatgtttccaatgagcccatcaccatttcactgactctttgagaacattctgattcattttaaactccctcccttgctttctttttcttccggtggtggcaccaaatgtgaattaatttgtaatccactagctagaaattattccaatcctctaatttcctcattttctttatcactttgaggtacagatcttcttctcagtgaggcagacattatctgcaggaccagttttgtcactgaggttgcaccctcagatccagccgcccagttatattctgtgtttctcctagtgtgaatttcttatgctttgttgcatctctgctttttaataaaatttctgtacataagaa

SEQ ID NO: 145625 - DNA, 1157 bp, Homo sapiens
  Payload ID: 8862
  Gene Symbol: KRTAP4-9
  Gene Name: keratin associated protein 4-9
  ENST ID: ENST00000574465
  CDS Start-End: 58-690
aaacccaagaacttcactctcttgaaaacccacccagatcctccccgttctgacaccatggtcagctcctgttgtggctccgtgtgctctgaccagggctgcggccaagacctctgtcaggagacctgctgccgccccagctgctgtgagaccacctgctgcaggaccacctgctgccgccccagctgttgtgtatccagctgctgcaggccccagtgctgccagtctgtgtgctgccaacccacttgttcccgccccagctgctgtcagaccacctgttgcaggaccacctgctaccgccccagctgttgtgtgtccagctgctgcaggccccagtgctgccagcctgtgtgctgccaacccacctgctgtcgccccagctgctgtgagacgacctgctgccaccctaggtgctgcatctccagctgctgtcgccccagctgctgtgtgtccagctgctgcaagccccagtgctgccagtctgtgtgctgccagcccaactgctgccgccccagctgcagcatctccagctgctgccgcccctcttgctgtgaatccagctgctgccgcccctgctgctgcgtgcgtccagtctgtggccgagtctcctgccacaccacttgctatcgcccaacctgtgtcatctccagctgcccccgccccttgtgctgtgcctcctcttgctgctgagcccactgccctggcttatctcccccttcaccactggcccacagatgtagacccttctactgtgctgaccattaggatacaggaagtggggttgatgtcattcaatagaatggaactcatgtttccaatgagcccatcaccatttcactgactctttgagaacattctgattcattttaaactccctcccttgctttctttttcttccggtggtggcaccaaatgtgaattaatttgtaatccactagctagaaattattccaatcctctaatttcctcattttctttatcactttgaggtacagatcttcttctcagtgaggcagacattatctgcaggaccagttttgtcactgaggttgcaccctcagatccagccgcccagttatattctgtgtttctcctagtgtgaatttcttatgctttgttgcatctctgctttttaataaaatttctgtacataagaa

SEQ ID NO: 145626 - DNA, 558 bp, Homo sapiens
  Payload ID: 8862
  Gene Symbol: KRTAP4-9
  Gene Name: keratin associated protein 4-9
  ENST ID: ENST00000617453
  CDS Start-End: 1-558
atggtcagctcctgttgtggctccgtgtgctctgaccagggctgcggccaagacctctgtcaggagacctgctgccgccccagctgctgtgagaccacctgctgcaggaccacctgctgccgccccagctgttgtgtatccagctgctgcaggccccagtgctgccagtctgtgtgctgccaacccacttgttaccgccccagctgttgtgtgtccagctgctgcaggccccagtgctgccagcctgcgtgctgccaacccacttgctgtcgccccaggtgctgcatctccagctgctgtcgccccagctgctgtgtgtccagctgctgcaagccccagtgctgccagtctgtgtgctgccagcccaactgctgccgccccagctgcagcatctccagctgctgccgcccctcttgctgtgaatccagctgctgccgcccctgctgctgcgtgcgtccagtctgtggccgagtctcctgccacaccacttgctatcgcccaacctgtgtcatctccagctgcccccgccccttgtgctgtgcctcctcttgctgctga

SEQ ID NO: 145627 - DNA, 942 bp, Homo sapiens
  Payload ID: 8863
  Gene Symbol: KRTAP5-1
  Gene Name: keratin associated protein 5-1
  Uniprot ID: Q6L8H4
  ENST ID: ENST00000382171
  CDS Start-End: 35-871
cctctacctgctccaccctcaatccaccagaaccatgggctgttgcggctgctccggaggctgtggctccagctgtgggggctgtggctccggctgtgggggctgtggctccggctgtgggggctgtggctctggctgtggaggttctggctccagctgctgtgtgcccgtctgctgctgcaagcccgtgtgctgccgtgtgccaacctgttcctgctccagctgtggcaaagggggctgtggctcttctgggggctccaaggggggctgtggctcctgtggaggctgcaaggggggctgtggctcttgtgggggatccaaggggggttgtggctcctgtgggggctccaaggggggctgtggctcttgtgggggatccaagggtggctgtggttccggctgtgggggatgtggctccagctgctgtgtgcctgtctgctgctgcaagcccatgtgctgctgtgtgccagcttgttcctgctccagctgtggcaaagggggctgtggctcctgtgggtgctccaagggggcctgtggttcttgtgggggctccaaggggggctgtggctcctgtggaggctgcaaggggggctgcggttcttgtgggggatccaaggggggttgtggctccggctgtgggggctgtggctccggctgcggtgtgcccgtgtgttgctgttcctgttccagttgtggctcttgcgcggggtctaagggaggctgcgggtcatcctgctcccagtgcagttgctgtaagccctgctgctgttcctcaggctgtgggtcatcctgttgccaatccagctgctgcaagccctgctgctcccagtccagttgctgtgtccccgtgtgctgccagtgcaagatctgatttctggctttgcaggactcttaccatggccaggcattcctgcccagcctttacctccttttcctggcacc

SEQ ID NO: 145628 - DNA, 942 bp, Homo sapiens; identical to SEQ ID NO: 145627
  Payload ID: 8863
  Gene Symbol: KRTAP5-1
  Gene Name: keratin associated protein 5-1
  Uniprot ID: Q6L8H4
  ENST ID: ENST00000619083
  CDS Start-End: 35-871

SEQ ID NO: 145629 - DNA, 942 bp, Homo sapiens; identical to SEQ ID NO: 145627
  Payload ID: 8863
  Gene Symbol: KRTAP5-1
  Gene Name: keratin associated protein 5-1
  Uniprot ID: Q6L8H4
  ENST ID: ENST00000625554
  CDS Start-End: 35-871

SEQ ID NO: 145630 - DNA, 504 bp, Homo sapiens
  Payload ID: 8864
  Gene Symbol: KRTAP5-10
  Gene Name: keratin associated protein 5-10
  ENST ID: ENST00000376536
  CDS Start-End: 1-504
atgggctgctgtggctgctccggaggctgtggctccggctgtgggggttgtggctccggctgtgggggctgtggctccggctgtgggggctatggctctggctgtgggggctgtggctccagctgctgtgtgcccgtctgctgctgcaagcccgtgtgctgctgtgtgccagcctgttcctgctccagctgtggctcctgtgggggctccaagggtggctgtggttcctgtgggggctccaaggggggctgtggttcttgtggctgctcccagtgcaattgctgtaagccctgctgctgctcctcaggctgtggatcctgctgccagtccagctgctgcaatccctgctgctgccagtccagctgctgtgtccccgtgtgctgccagtctagctgctgcaagccctgctgctgtcagtccagctgctgtgtctccagctgctgcaggtcctgctgctccaagtccagctgctgtgtccctatttgctgtcagtacaagatctga

SEQ ID NO: 145631 - DNA, 1176 bp, Homo sapiens
  Payload ID: 8864
  Gene Symbol: KRTAP5-10
  Gene Name: keratin associated protein 5-10
  Uniprot ID: Q6L8G5
  ENST ID: ENST00000398531
  CDS Start-End: 26-634
gatccaccctcaatctaccagaatcatgggctgctgtggctgctccggaggctgtggctccggctgtgggggttgtggctccggctgtgggggctgtggctccggctgtgggggctatggctctggctgtgggggctgtggctccagctgctgtgtgcccgtctgctgctgcaagcccgtgtgctgctgtgtgccagcctgttcctgctccagctgtggctcctgtgggggctccaagggggactgtggctcttgtgggggctccaaagggggctgtggttcctgtgggggctccaaggggggctgtggctcctgtgggggctccaaggggggctgtggttcttgtgggggctccaaggggggctgtggctcctgtgggggctccaaaggtggctgtggttcctgtgggggctccaaggggggctgtggttcttgtggctgctcccagtgcaattgctgtaagccctgctgctgctcctcaggctgtggatcctgctgccagtccagctgctgcaatccctgctgctgccagtccagctgctgtgtccccgtgtgctgccagtctagctgctgcaagccctgctgctgtcagtccagctgctgtgtccccgtgtgctgccagtgtaagatctgaggctctgaacccagaccttcaggtttcacctgtttggtgaaagcatttgttatgatttccctgaattaattcatcccacgcatcctccctgaggcacctgccccttctccagctcatcatccatgcacgcacctccttccatggctcagctctccactgggccctgccttcagcctcctcactccggaaatgcatgtttccttgatgcaggaggtggccttgcctggacgcgggcacccagccaactgccatggtgttccctgcacttgggtgtggaccatcttcttcttctccctcggctgactgagatgcaaggtctgaccccacaaggccaggccaatgttgctcagtgatcactaagaaccagcttctcaaccaccattgggaccctggatcctccagggccgctcgctgcctgttctccagtggccacctgtgaccaggaaggtctccttccttcctgttgtctccatctatttaaaaacaataacaaagtaatgaatgaatttccttacaataaagcctctcatgtctgtaaatca

SEQ ID NO: 145632 - DNA, 1021 bp, Homo sapiens
  Payload ID: 8865
  Gene Symbol: KRTAP5-11
  Gene Name: keratin associated protein 5-11
  Uniprot ID: Q6L8G4
  ENST ID: ENST00000398530
  CDS Start-End: 39-509
tgctcctctacctgctctactctcaatccgccagaatcatgggctgctgtggctgttctggaggctgtggctctggctgtgggggctgtggctccggcagtgggggctgtggctctggctgtgggggctgtggctccagctgctgtgtgcccatttgctgctgcaagcctgtgtgctgctgtgtgccagcctgttcctgctccagctgtggctcctgtgggggctccaaagggggctgtggctcttgtgggagctccaagggtgggtgtggttcttgtggctgctcccagtccaactgctgtaagccctgctgctcctcctcaggctgtgggtcattctgctgccagtccagctgctccaaaccctgctgctgccaatccagctgctgccagtccagctgctgcaagccctgctgctgccaatccagctgctgccagtctagctgcttcaagccctgctgctgccagtccagctgctgtgtccccgtgtgctgccagtgtaagatctgaggctctggacccagaccttcaggtttctcctctttggtgaaagcatttcttatggtttctctgaatcagttcatcccacacatcatcctgaggcacctgcacctgctctagctcatcatccatgcatgcacctctttccatggctcggctctcctctaggccctgccttcagcttcctcactccggaaacatgtgtttccttgatgcaggaggtgttcttccctggacgccatggtgttccctgcacttgggtgtggaccatcttcttcttctccctgggctgactgagatgctaggtctgaccccacaaggccaggccgacattcctgagtgatcactaagaaccagtttctcaaccaccactgggattctgggtcctcctgggctgctgcctgttctcctgtgacccacctgtgagcaagaaggtctccttccttcctgttgtctccatctatttaaaaaaaaaatgaatgaatttccttgcaataaagcctctcatgtctgtaaaccaa

SEQ ID NO: 145633 - DNA, 531 bp, Homo sapiens
  Payload ID: 8865
  Gene Symbol: KRTAP5-11
  Gene Name: keratin associated protein 5-11
  ENST ID: ENST00000616086
  CDS Start-End: 1-531
atgggctgctgtggctgttctggaggctgtggctctggctgtgggggctgtggctccggcagtgggggctgtggctctggctgtgggggctgtggctccagctgctgtgtgcccatttgctgctgcaagcctgtgtgctgctgtgtgccagcctgttcctgctccagctgtggctcctgtgggggctccaaagggggctgtggctcttgtgggagctccaagggtgggtgtggttcttgtggctgctcccagtccaactgctgtaagccctgctgctcctcctcaggctgtgggtcattctgctgccagtccagctgctccaaaccctgctgctgccaatccagctgctgccagtccagctgctgcaagccctgctgctgccaatccagctgctgccagtctagctgcttcaagccctgctgctgccagtccagctgctgtgtccccgtgtgctgccactccagctgctgcaagccctgctgctcccagtccagctgctgtgtccctatttgctgtcagtacaagatctga

SEQ ID NO: 145634 - DNA, 558 bp, Homo sapiens
  Payload ID: 8865
  Gene Symbol: KRTAP5-11
  Gene Name: keratin associated protein 5-11
  ENST ID: ENST00000617152
  CDS Start-End: 1-558
atgggctgctgtggctgttctggaggctgtggctctggctgtgggggctgtggctccggcagtgggggctgtggctctggctgtgggggctgtggctccagctgctgtgtgcccatttgctgctgcaagcctgtgtgctgctgtgtgccagcctgttcctgctccagctgtggctcctgtgggggctccaaagggggctgtggctcttgtgggagctccaagggtgggtgtggttcttgtggctgctcccagtccaactgctgtaagccctgctgctcctcctcaggctgtgggtcattctgctgccagtccagctgctccaaaccctgctgctgccaatccagctgctgccagtccagctgctgcaagccctgctgctgccaatccagctgctgccagtctagctgcttcaagccctgctgctgccagtccagctgctgcaaactctgctgctgctcctcaggctgtggatcaacctgctcccagtccagctgctgcaagccctgctgctcccagtccagctgctgtgtccctatttgctgtcagtacaagatctga

SEQ ID NO: 145635 - DNA, 1118 bp, Homo sapiens
  Payload ID: 8866
  Gene Symbol: KRTAP5-2
  Gene Name: keratin associated protein 5-2
  Uniprot ID: Q701N4
  ENST ID: ENST00000412090
  CDS Start-End: 45-578
ctcacctgctcctctacctgctccaccctcaatccaccagaaccatgggctgctgtggctgctccagaggctgtggctccggctgtgggggctgtggctccagctgtgggggttgtggctctggctgtgggggctgtggctccggccgtgggggctgtggctctggctgtgggggctgcagctccagctgtgggggatgtggctccagatgttatgtgcctgtctgctgctgcaagcccgtgtgctcctgggtgccagcctgttcctgcaccagctgtggctcctgtgggggctccaaggggggctgtggctcctgtgggggctccaaggggggctgtggctcctgtgggggttccaaggggggctgtggttcttgtggctgctcccagtccagctgttgtaagccctgttgctgctcctcaggctgtggatcatcctgctgccagtccagctgctgcaagccctgctgctgccagtccagctgctgtgtccccgtgtgctgccagtccagctgctgcaagccctgttgctgccagtccaactgttgtgtccctgtgtgctgccagtgtaagatctgaggctctggacccagaccttcaggtttctcctgtttggtgaaagcatttcttatggttccctgagtcagttcgtcccacacatcctccctgaggcacctgcacctgctctagctcaccatccatgcacacacctccttccatggctcagctctcctctgggccctgccttcagcctcctcactccagaaacgtgtgtttccctgatgcgggaggtgtcctcgcctggacgcaggcacccagccgactgccacgatgttccctgcacttgggtgtggaccatcttcttcttctccctgggctgactgagatgcaaggtctgaccccacaaggccaggccgacgtttctgagtgatcactaagaaccagcttctcaaccaccatcaggaccctggatcctcctgggccgctgcctgttctcctgtggcccaagtgtgaccaggaaggtctctttccttcctgttgtctccatctgtttaaaaaaaaataacaaaataatgaatgaatttccttgcaataaagcctctcatgtctgtaaatcaa

SEQ ID NO: 145636 - DNA, 1118 bp, Homo sapiens; identical to SEQ ID NO: 145635
  Payload ID: 8866
  Gene Symbol: KRTAP5-2
  Gene Name: keratin associated protein 5-2
  Uniprot ID: Q701N4
  ENST ID: ENST00000612541
  CDS Start-End: 45-578

SEQ ID NO: 145637 - DNA, 1118 bp, Homo sapiens; identical to SEQ ID NO: 145635
  Payload ID: 8866
  Gene Symbol: KRTAP5-2
  Gene Name: keratin associated protein 5-2
  Uniprot ID: Q701N4
  ENST ID: ENST00000628787
  CDS Start-End: 45-578

SEQ ID NO: 145638 - DNA, 899 bp, Homo sapiens
  Payload ID: 8867
  Gene Symbol: KRTAP5-3
  Gene Name: keratin associated protein 5-3
  Uniprot ID: Q6L8H2
  ENST ID: ENST00000399685
  CDS Start-End: 79-795
gggctcagagaactccacacctgcacacctccctctcacctgctcctctacctgctccaccctcaacccaccagaaccatgggctgctctggctgctctggaggctgtggctccagctgtgggggctgtggctccagctgtgggggctgtggctccggctatgggggctgtggctccggctgctgtgtacctgtctgctgctgcaagcccgtgtgctgctgtgtgccagcctgttcctgctccagctgtggctcctgtgggggctccaagggggtctgtggctcttgtgggggctgcaaggggggctgtggctcctgtggaggctccaaggggggctgtggctccagctgctgtgtgcccgtctgctgctcctccagctgtggctcctgtgggggttccaagggggtctgtggatttcgtgggggctccaaggggggctgcggttcttgtggctgctcccagtgcagctgctataagccctgctgctgctcctcaggctgtgggtcatcctgctgccagtccagctgctgcaagcccagctgctcccagtccagctgctgtaagccctgctgttcccagtccagctgctgtaagccctgctgctgctcctcaggctgtgggtcatcctgctgccagtccagctgctgcaaaccctgctgttcccagtccagctgctgtaagccctgctgctgctcctcaggctgtgggtcatcctgctgccagtccagctgctgcaagccctgctcctcccagtccagctgctgtgtcccaatttgctgccagtgcaagatctgaggctctgcccacaaacctcagtgggtcctacagatccgggctctccaggaatgattgcagctgtgtcctgaattcctgaagcacgtctctgaatctgtcctcct

SEQ ID NO: 145639 - DNA, 899 bp, Homo sapiens; identical to SEQ ID NO: 145638
  Payload ID: 8867
  Gene Symbol: KRTAP5-3
  Gene Name: keratin associated protein 5-3
  Uniprot ID: Q6L8H2
  ENST ID: ENST00000620564
  CDS Start-End: 79-795

SEQ ID NO: 145640 - DNA, 510 bp, Homo sapiens
  Payload ID: 8867
  Gene Symbol: KRTAP5-3
  Gene Name: keratin associated protein 5-3
  ENST ID: ENST00000616336
  CDS Start-End: 1-510
atgggctgctctggctgctctggaggctgtggctccagctgtgggggctgtggctccagctgtgggggctgtggctccggctatgggggctgtggctccggctgctgtgtacctgtctgctgctgcaagcccgtgtgctgctgtgtgccagcctgttcctgctccagctgtggcaaggggggctgtggctcctgtgggggctccaaggggggctgcggttcttgtggctgctcccagtgcagctgctgtaagccctgctgctgctcctcaggctgtgggtcatcctgctgccagtccagctgctgcaaaccctgctgttcccagtccagctgctgtaagccctgctgctgctcctcaggctgtgggtcatcctgctgccagtccagctgctgcaagccctgctgctgttcctcaggctgtgggtcatcctgttgccaatccagctgctgcaagccctgctgctcccagtccagttgctgtgtccccgtgtgctgccagtgcaagatctga

SEQ ID NO: 145641 - DNA, 899 bp, Homo sapiens
  Payload ID: 8867
  Gene Symbol: KRTAP5-3
  Gene Name: keratin associated protein 5-3
  Uniprot ID: Q6L8H2
  ENST ID: ENST00000627584
  CDS Start-End: 79-795
gggctcagagaactccaaacctgcacacctccctctcacctgctcctctacctgctccaccctcaacccaccagaaccatgggctgctctggctgctctggaggctgtggctccagctgtgggggctgtggctccagctgtgggggctgtggctccggctatgggggctgtggctccggctgctgtgtacctgtctgctgctgcaagcccgtgtgctgctgtgtgccagcctgttcctgctccagctgtggctcctgtgggggctccaagggggtctgtggctcttgtgggggctgcaaggggggctgtggctcctgtggaggctccaaggggggctgtggctccagctgctgtgtgcccgtctgctgctcctccagctgtggctcctgtgggggttccaagggggtctgtggatttcgtgggggctccaaggggggctgcggttcttgtggctgctcccagtgcagctgctataagccctgctgctgctcctcaggctgtgggtcatcctgctgccagtccagctgctgcaagcccagctgctcccagtccagctgctgtaagccctgctgttcccagtccagctgctgtaagccctgctgctgctcctcaggctgtgggtcatcctgctgccagtccagctgctgcaaaccctgctgttcccagtccagctgctgtaagccctgctgctgctcctcaggctgtgggtcatcctgctgccagtccagctgctgcaagccctgctcctcccagtccagctgctgtgtcccaatttgctgccagtgcaagatctgaggctctgcccacaaacctcagtgggtcctacagatccgggctctccaggaatgactgcagctgtgtcctgaattcctgaagcacgtctctgaatctgtcctcct

SEQ ID NO: 145642 - DNA, 1181 bp, Homo sapiens
  Payload ID: 8868
  Gene Symbol: KRTAP5-4
  Gene Name: keratin associated protein 5-4
  ENST ID: ENST00000399682
  CDS Start-End: 46-732
tctcatctgctcctctacctgctccaccctcaatccaccagaaccatgggctgctgtggctgctctggaggctgtggctccggctgtgggggctgtggctccggctgtgggggctgtggctctggctgtgggggctgtggctccggctgtgggggctgtggctccggctgtgggggctgtggctccagctgctgtgtgcccatctgctgctgcaaacctgtgtgctgctgtgtgccagcctgttcctgctccagctgtggctcctgtgggggctccaaggggggctatggctcttgtgggggttccaaggggggctgtgtctcctgtgggggttccaaggggggctgtggctcctgtgggggctccaaggggggctgtggctcctgtgggggttccaaggggggctgtggctcctgtgggggctccaaaggaggctgtggctcttgtggctgctcccagtgcagctgctgtaagccctgctgcttctcttcaggctgtgggtcatcctgctgccagtccagctgctgtaagccctgctgctcctcctcaggttgtgggtcatcctgctgccagtccagctgctgcaagccctactgctgccagtccagctgctgtaagccctgctgctcctcctcaggttgtgggtcatcctgctgccagtccagttgctgcaatccctgctgctcccagtctagttgctgtgtccctgtgtgctgccagtgtaagatctgaggctctggactcaggcctcatgtgagtcctgctaatcctgtcttccaaagctgtgacctgtccttcattgttgagccccaaatcattgctcagggtccattccctgctgtagaacgatgccatatctggctgccttttcctaagaagagtccaccctaattaatgtccattgtctctcctaacaaattctctccccaagtcaactgcaattgcagctgaatcacccctcacccactagcctcgcctttgctcatcttttcagaggcctgagctcctgaacccacttgcagtcctgtcttttccagctggagcagctgggcataagcgtcccacctgcaacaaggtgggcgtttaagaggcttccttggagtggctttgcatgtccaacactctgctgtatctttttttttttttttttttttttgagatggagtctcgcactgtcaccc

SEQ ID NO: 145643 - DNA, 660 bp, Homo sapiens
  Payload ID: 8868
  Gene Symbol: KRTAP5-4
  Gene Name: keratin associated protein 5-4
  ENST ID: ENST00000617720
  CDS Start-End: 1-660
atgggctgctgtggctgctctggaggctgtggctccggctgtgggggctgtggctccggctgtgggggctgtggctctggctgtgggggctgtggctccggctgtgggggctgtggctccggctgtgggggctgtggctccagctgctgtgtgcccatctgctgctgcaaacctgtgtgctgctgtgtgccagcctgttcctgctccagctgtggctcctgtgggggctccaaggggggctatggctcttgtgggggttccaaggggggctgtgtctcctgtgggggttccaaggggggctgtggctcctgtgggggctccaaggggggctgtggctcctgtgggggttccaaggggggctgtggctcctgtgggggctccaaaggaggctgtggctcttgtggctgctcccagtgcagctgctgtaagccctgctgcttctcttcaggctgtgggtcatcctgctgccagtccagctgctgtaagccctcctgctgccagtccagctgctgcaagccctactgctgccagtccagctgctgtaagccctgctgctcctcctcaggttgtgggtcatcctgctgccagtccagttgctgcaatccctgctgctcccagtctagttgctgtgtccctgtgtgctgccagtgtaagatctga

SEQ ID NO: 145644 - DNA, 660 bp, Homo sapiens; identical to SEQ ID NO: 145643
  Payload ID: 8868
  Gene Symbol: KRTAP5-4
  Gene Name: keratin associated protein 5-4
  ENST ID: ENST00000616115
  CDS Start-End: 1-660

SEQ ID NO: 145645 - DNA, 564 bp, Homo sapiens
  Payload ID: 8868
  Gene Symbol: KRTAP5-4
  Gene Name: keratin associated protein 5-4
  ENST ID: ENST00000615268
  CDS Start-End: 1-564
atgggctgctgtggctgctctggaggctgtggctccggctgtgggggctgtggctccggctgtgggggctgtggctctggctgctgtgtgcccatctgctgctgcaaacctgtgtgctgctgtgtgccagcctgttcctgctccagctgtggctcctgtgggggctccaaggggggctgtggctcctgtgggggttccaaggggggctgtggctcctgtgggggctccaaaggaggctgtggctcttgtggctgctcccagtgcagctgctgtaagccctgctgctgctcttcaggctgtgggtcatcctgctgccagtccagctgctgtaagccctgctgttcccagtccagctgctgtaagccctgctgctgctcctcaggctgtgggtcatcctgctgccagtccagctgctgcaaaccctgctgttcccagtccagctgctgtaagccctgctgctgctcctcaggctgtgggtcatcctgctgccagtccagctgctgcaagccctgctcctcccagtccagctgctgtgtcccaatttgctgccagtgcaagatctga

SEQ ID NO: 145646 - DNA, 900 bp, Homo sapiens
  Payload ID: 8868
  Gene Symbol: KRTAP5-4
  Gene Name: keratin associated protein 5-4
  ENST ID: ENST00000611225
  CDS Start-End: 35-532
cctctacctgctccaccctcaatccaccagaaccatgggctgctgtggctgctctggaggctgtggctccggctgtgggggctgtggctccggctgtgggggctgtggctctggctgtgggggctgtggctccagctgctgtgtgcccatctgctgctgcaaacctgtgtgctgctgtgtgccagcctgttcctgctccagctgtggctcctgtgggggctccaaggggggctgtggctcctgtgggggctccaaggggggctgtggctcctgtgggggttccaaggggggctgtggctcttgtggctgctcccagtgcagctgctgtaagccctgctgctgctcttcaggctgtgggtcatcctgctgccagtccagctgctgtaagccctgctgctgccagtccagctgctgtaagccctgctgctcctcctcaggttgtgggtcatcctgctgccagtccagttgctgcaatccctgctgctcccagtctagttgctgtgtccctgtgtgctgccagtgtaagatctgaggctctggactcaggcctcatgtgagtcctgctaatcctgtcttccaaagctgtgacctgtccttcattgttgagccccaaatcattgctcagggtccattccctgctgtagaacgatgccatatctggctgccttttcctaagaagagtccaccctaattaatgtccattgtctctcctaacaaattctctccccaagtcaactgcaattgcagctgaatcacccctcacccactagcctcgcctttgctcatcttttcagaggcctgagctcctgaacccacttgcagtcctgtcttttccagctggagcagctgggcataagcgtcccacctgctacaaggtgggcgtttaagaggcttccttgg

SEQ ID NO: 145647 - DNA, 1359 bp, Homo sapiens
  Payload ID: 8868
  Gene Symbol: KRTAP5-4
  Gene Name: keratin associated protein 5-4
  Uniprot ID: Q6L8H1
  ENST ID: ENST00000630519
  CDS Start-End: 46-912
tctcatctgctcctctacctgctccaccctcaatccaccagaaccatgggctgctgtggctgctctggaggctgtggctccggctgtgggggctgtggctccggctgtgggggctgtggctctggctgtgggggctgtggttccggctgtgggggctgtggctccggctgtgggggctgtggctccagctgctgtgtgcccatctgctgctgcaaacctgtgtgctgctgtgtgccagcctgttcctgctccagctgtggctcctgtgggggctccaaggggggctatggctcttgtgggggttccaaggggggctgtgtctcctgtgggggttccaaggggggctgtggctcctgtgggggctccaaggggggctgtggctcctgtgggggttccaaggggggctgtggctcctgtgggggctccaaggggggctgtgtctcctgtgggggttccaaggggggctgtggctcctgtgggggttccaaggggggctgtgtctcctgtggggggtccaaggggggctgtggctcctgtgggggctccaaggggggctgtggctcctgtgggggttccaaggggggctgtggctcctgtgggggctccaaaggaggctgtggctcttgtggctgctcccagtgcagctgctgtaagccctgctgctgctcttcaggctgtgggtcatcctgctgccagtccagctgctgtaagccctgctgctcctcctcaggttgtgggtcatcctgctgccagtccagctgctgcaagccctactgctgccagtccagctgctgtaagccctgctgctcctcctcaggttgtgggtcatcctgctgccagtccagttgctgcaatccctgctgctcccagtctagttgctgtgtccctgtgtgctgccagtgtaagatctgaggctctggactcaggcctcatgtgagtcctgctaatcctgtcttccaaagctgtgacctgtccttcattgttgagccccaaatcattgctcagggtccattccctgctgtagaacgatgccatatctggctgccttttcctaagaagagtccaccctaattaatgtccattgtctctcctaacaaattctctccccaagtcaactgcaattgcagctgaatcacccctcacccactagcctcgcctttgctcatcttttcagaggcctgagctcctgaacccacttgcagtcctgtcttttccagctggagcagctgggcataagcgtcccacctgctacaaggtgggcgtttaagaggcttccttggagtggctttgcatgtccaacactctgctgtatctttttttttttttttttttttgagatggagtctcgcactgtcaccc

SEQ ID NO: 145648 - DNA, 1181 bp, Homo sapiens; identical to SEQ ID NO: 145642
  Payload ID: 8868
  Gene Symbol: KRTAP5-4
  Gene Name: keratin associated protein 5-4
  ENST ID: ENST00000629556
  CDS Start-End: 46-732

SEQ ID NO: 145649 - DNA, 933 bp, Homo sapiens
  Payload ID: 8869
  Gene Symbol: KRTAP5-5
  Gene Name: keratin associated protein 5-5
  Uniprot ID: Q701N2
  ENST ID: ENST00000399676
  CDS Start-End: 67-780
ggctccacacctgcacctccctctcacctgctcctctacctgctccaccctcaatccaccagaaccatgggctgctgtggctgctccggaggctgtggctccggctgtggaggccgtggctccggctgtgggggctgtggctccggctgtggaggctgtggctctggctgtgggggctgtggctccggctgtggaggctgtgggggctgtggctccggctgtgcgggctgtgggggatgtggctccggctgctgtgtgcctgtctgctgctgcaagcccatgtgctgctgtgtgccagcttgttcctgctccagctgtggcaaagggggctgtggctcttgcgggggctccaagagaggctgtgtctcctgtggggtgtccaagggggcctgtggctcctgtggggggtccaaggggggctgtggctcctgtggggggtccaaggggggctgtggctcctgtggggggtccaaggggggctgtggctcctgtggggggtccaaggggggctgtggttcttatggctgctcccagtccagctgctgcaagccctgctgctgctcctcaggctgtgggtcatcctgctgccagtccagctgctgtaagccttactgctgccagtccagctgctgtaagccctactgctgccagtccagctgctgtaagccctgtagctgcttctcaggctgtggatcatcctgctgccaatccagctgctacaagccctgctgctgccagtccagctgctgtgtccccgtgtgctgccagtgtaagatctgaggctctgactgcagactgcaggtggcctgactggtgaagggcccggctgcccagcttccttgccctgggttctctggtgctccactgtctccactgtgtcctcactggcttcatccactccacaccagtgctcccgaaactgactgaggaccc

SEQ ID NO: 145650 - DNA, 558 bp, Homo sapiens
  Payload ID: 8869
  Gene Symbol: KRTAP5-5
  Gene Name: keratin associated protein 5-5
  ENST ID: ENST00000613035
  CDS Start-End: 1-558
gggggctgtggctccggctgtggaggccgtggctccggctgtgggggctgtggctccggctgtggaggctgtggctccggctgtgggggctgtggctccggctgtgggggctgtgggggatgtggctccggctgctcttgttcctgctccagctgtggcaaagggggctgtggctcttgcgggggctccaagagaggctgtgtctcctgtggggtgtccaagggggcctgtggctcctgtggggggtccaaggggggctgtggctcctgtggggggtccaaggggggctgtggctcctgtggggggtccaaggggggctgtggttcttatggctgctcccagtgcagctgctgtaagccctgctgctgctcctcaggctgtgggtcatcctgctgccagtccagctgctgtaagccttactgctgccagtccagctgctgtaagccctgtagctgcttctcaggctgtggatcatcctgctgccaatccagctgctacaagccctgctgctgccagtccagctgctgtgtccccgtgtgctgccagtgtaagatctga

SEQ ID NO: 145651 - DNA, 933 bp, Homo sapiens; identical to SEQ ID NO: 145649
  Payload ID: 8869
  Gene Symbol: KRTAP5-5
  Gene Name: keratin associated protein 5-5
  Uniprot ID: Q701N2
  ENST ID: ENST00000618541
  CDS Start-End: 67-780

SEQ ID NO: 145652 - DNA, 885 bp, Homo sapiens
  Payload ID: 8869
  Gene Symbol: KRTAP5-5
  Gene Name: keratin associated protein 5-5
  ENST ID: ENST00000626614
  CDS Start-End: 67-732
ggctccacacctgcacctccctctcacctgctcctctacctgctccaccctcaatccaccagaaccatgggctgctgtggctgctccggaggctgtggctccggctgtggaggccttggctccggctgtgggggctgtggctccggctgtggaggccgtggctccggctgtgggggctgtggctccggctgtggaggctgtggctccggctgtgggggctgtggctccggctgtgggggctgtgggggatgtggctccggctgctgtgtgcctgtctgctgctgcaagcccatgtgctgctgtgtgccagcttgttcctgctccagctgtggcaaagggggctgtggctcttgcgggggctccaagagaggctgtgtctcctgtggggtgtccaagggggcctgtggctcctgtggggggtccaaggggggctgtggctcctgtggggggtccaaggggggctgtggctcctgtggggggtccaaggggggctgtggttcttatggctgctcccagtgcagctgctgtaagccctgctgctgctcctcaggctgtgggtcatcctgctgccagtccagctgctgtaagccttactgctgccagtccagctgctgtaagccctgtagctgcttctcaggctgtggatcatcctgctgccaatccagctgctacaagccctgctgctgccagtccagctgctgtgtccccgtgtgctgccagtgtaagatctgaggctctgactgcagactgcaggtggcctgactggtgaagggcccgtctgcccagcttccttgccctgggttctctggtgctccactgtctccactgtgtcctcactggcttcatccactccacaccagtgcttccgaaactgactgaggaccc

SEQ ID NO: 145653 - DNA, 561 bp, Homo sapiens
  Payload ID: 8870
  Gene Symbol: KRTAP5-6
  Gene Name: keratin associated protein 5-6
  Uniprot ID: Q6L8G9
  ENST ID: ENST00000382160
  CDS Start-End: 52-441
cctccctctcacctgctcctctacctgctccaccctcaatccaccagaaccatgggctgctgtggctgctctggaggctgtggctccggctgtgggggctgtggctctggctgtgggggctgtgggtccagctgctgtgtgcccatctgctgctgcaagcccgtgtgctgctgtgtgccagcctgttcctgcaccagctgtggctcttgtgggggctccaaggggtgctgtggctcttgtgggggctccaaagggggctgtggctcttgtgggggctccaagggaggctgtggctcttgtggctgctcccagtgcagttgctgcaagccctgctactgttcctcaggctgtgggtcatcctgctgccagtccagctgctgcaagccctgctgttcccaggccagctgctgtgtccccatttgctgccagtgcaaaatctgaggctctgactttggacctcaggtgagtccagcatatccacaccacccaagaagtgaccagtgctgcatttcagttctggctgtcccacagctccaggagttgtgtcccctgaattttgca

SEQ ID NO: 145654 - DNA, 561 bp, Homo sapiens; identical to SEQ ID NO: 145653
  Payload ID: 8870
  Gene Symbol: KRTAP5-6
  Gene Name: keratin associated protein 5-6
  Uniprot ID: Q6L8G9
  ENST ID: ENST00000611731
  CDS Start-End: 52-441

SEQ ID NO: 145655 - DNA, 1408 bp, Homo sapiens
  Payload ID: 8871
  Gene Symbol: KRTAP5-7
  Gene Name: keratin associated protein 5-7
  Uniprot ID: Q6L8G8
  ENST ID: ENST00000398536
  CDS Start-End: 35-532
cctctacctgctccaccctcaatccaccagaaccatgggctgctgtggctgttccgaaggctgtggctccggctgtgggggctgtggctccggctgtgggggctgtggctctggctgtgggggatgtggctccagctgctgtgtgcccgtctgctgctgcaagcccgtgtgctgctgtgtgccagcctgttcctgctccagctgtggctcctgtgggggctccaagggaggctgtggctcctgtgggggctccaaggggggctgtggctcttgtgggggttctaaggggggctgtggttcttgtggctgctcccagtgcagctgctataagccctgctgctgctcctcaggctgtgggtcatcctgctgccagtccagctgctgtaagccctgctgctgccagtccagctgctgtaagccctgctgctgttcctcaggctgtgggtcatcctgctgccagtccagttgctgcaatccctgctgctcccagtctagctgctgtgtccccgtgtgctgccagtgtaagatctgaggctctggactcaggtctcatgtgagtcctgctaaccccattttccgaagctgtgacctgtccttcatcgttgagccccaaaccactgctcagggtccattcctcactataagatgaagccatatctgcctgccttttcctaaggagagtccaccctaattaatgtccattccctcctaacaaattctcttcccaagtcaactgcaactgcggctgaatcacccctcacccgctagccttgcctttgcttgtgtattcagaggcctgagctcctgaacccacttgaagtcctgtcttttccagctggagcagctgggcatgagtgtcccacctgcaacaaggtgggcgtttaagaggcttccttggagtggctttgcctgtccaacactctgctttatcttaaatgaaaagttgcaaactaataaaaataccatgccgacaaactgaaacacatatcttgctgatttctctgttgttcggggtcattactatggctatggctattgttttcttgttcttgttgtgtttcggactgcgtgggtctgatgctgatgttgctggaaggtgctaggatggggctggctgtctcctctgcctctcatctccttcctggctgacccctcttttctcagaacccctctcttcctaggtctttccagctattgatctgatggagacaggactgttcctcaggccagggccacagaagcagaagaggctgctgaaaactctggggagttcagacttgcctcctttccctggtccaggcctctgccatcttcctttgggaagtttttgtaaccaacttactctgattgtctttgttgttacacagcctgttgcctctgtaaataaacactcctagcaccaagccaa

SEQ ID NO: 145656 - DNA, 1183 bp, Homo sapiens
  Payload ID: 8872
  Gene Symbol: KRTAP5-8
  Gene Name: keratin associated protein 5-8
  Uniprot ID: O75690
  ENST ID: ENST00000398534
  CDS Start-End: 32-595
ctacctgctccaccctcaacccaccagaaccatgggctgctgtggctgctctggaggctgtggctccggctgtgggggctgcggctctggctgtgggggatgtggctctagctgctgtgtgcccatctgctgctgcaagcccgtgtgctgctgtgtgccagcctgttcctgctccagctgtggctcctgtgggggctccaaggggggccgtggctcctgtgggggctccaagggggactgtggctcctgtgggggctccaagggaggctgtggttcttgtggctgctcccagtgcagctgctataagccctgctgttgctcctcaggctgtgggtcatcctgctgccagtccagctgctgcaaaccctgctgttcccagtccagctgttgtaagccctgcagctgctcttcaggctgtgggtcatcctgctgccagtccagctgctgcaagccctgctgttcccagtccagctgctgtaagccctgctgctgctcttcaggctgtgggtcatcctgctgccagtccagctgctgcaagccctgctgttcccagtccagctgctgtgtcccaatttgctgccagtgcaagatctgaggctctgcctacaaatctcagctggtcccacagatctgggctctccaggaatgactgtagctgtgtcctgaattcctgaagcacatctctgagtctgtcctcctctggactaaggcagcctagcgtccagggctcagtactcagctgctcagcctctgaggtcatgagggcttctggcatgctgggtgctgcccatcaaccctcccagaatcccctcttcctttcctgacctcatcacttcaaccttctcagggcttcaagatcccacatccctgggcccctcctgtgagcctgctggaaacacactgaaactggaatcctccgacctgctgccgcctctccccggtccctgcaacctcctggctcctccacccttcatcttcatcctgcctgagctgccacagctccgattgtttttggagttgacctagaggactcagaattattagagaccccaggatcctctcctgaggaggaggggcgcccagtctcctcttctacctctgacctggccttgtttctttccccagggcttcgccttgtaagtgcctaggctgaatcttctaaataaatacgatccacacctcc

SEQ ID NO: 145657 - DNA, 1136 bp, Homo sapiens
  Payload ID: 8873
  Gene Symbol: KRTAP5-9
  Gene Name: keratin associated protein 5-9
  Uniprot ID: P26371
  ENST ID: ENST00000528743
  CDS Start-End: 241-750
atgaattccacaaggaaatcatctcaggaggaagggctcatacttggatccagaaaatatcaacatagccaaagaaaaacaatcaagacatacctccaggagctgtgtaacagcaaccggaaagagaaacaatggtgtgttcctatgtgggatataaagagccggggctcagggggctccacacctgcacctccttctcacctgctcctctacctgctccaccctcaatccaccagaaccatgggctgctgtggctgctccggaggctgtggctccagctgtggaggctgtgactccagctgtgggagctgtggctctggctgcaggggctgtggccccagctgctgtgcacccgtctactgctgcaagcccgtgtgctgctgtgttccagcctgttcctgctctagctgtggcaagcggggctgtggctcctgtgggggctccaagggaggctgtggttcttgtggctgctcccagtgcagttgctgcaagccctgctgttgctcttcaggctgtgggtcatcctgctgccagtgcagctgctgcaagccctactgctcccagtgcagctgctgtaagccctgttgctcctcctcgggtcgtgggtcatcctgctgccaatccagctgctgcaagccctgctgctcatcctcaggctgtgggtcatcctgctgccagtccagctgctgcaagccctgctgctcccagtccagatgctgtgtccctgtgtgctaccagtgcaagatctgaggctctagtgggaaacctcaggtagctcctgaagatctgtgctttccaacaagtgactacccttgaagcacatccccttctggatctgaaaagagcccttggctcagggcgtctttttccagcccctgaggaaatggaatgaaccactccctgcccattccctataagaatatcccaagacccaggcaattttgcccctctttcccacatgcccccatatgtctgagccaaactgcactgggggctgccctcatgccaagcaagagcctggaattccccttcttgataattccatgggagacagcaaacccttctttcctttgcctgccaggagcttcacgacatttgcagatggatgtcctgcaacccaaatgatcacatgtatc

SEQ ID NO: 145658 - DNA, 500 bp, Homo sapiens
  Payload ID: 8874
  Gene Symbol: KRTAP6-1
  Gene Name: keratin associated protein 6-1
  Uniprot ID: Q3LI64
  ENST ID: ENST00000329122
  CDS Start-End: 27-242
caaggacaacctccacaaccaacaccatgtgtggcagctactacggaaactactatggcacccctggctatgggttctgtggctatggaggcctgggctatggctatggaggcctgggctgtggctatggctcctgctgtggctgtggcttccgcagactgggctgtggctatggctatggctcccgctccctctgtggctatggctatggatgcggctctggctctggctactattattgaggatgccatgggagactctcaccctctatcctgtgatactgagattcactaattctgaagcccacatgttctgagattttcccttgagtgatgatatcctgcaatggaagtctaatatggtctgttgttgagctaccatctaacctacaaatatcttgaatttccatcatgaaacgggataaggtaaaattcacctgtcagttctcctttcatcagaatgatggtgtcacatcatctgccttgatgacttttatgatg

SEQ ID NO: 145659 - DNA, 313 bp, Homo sapiens
  Payload ID: 8875
  Gene Symbol: KRTAP6-2
  Gene Name: keratin associated protein 6-2
  Uniprot ID: Q3LI66
  ENST ID: ENST00000334897
  CDS Start-End: 29-217
cccaaggacaacctccacaaccatcacgatgtgcggcagctactacggaaactactacggcgaccatggctatgggtgctgtggatacgaaggcctaggctatggctatggaagcctgcgctgtggctatagctcctgctgtggctatggtcatggctacggctcccgcttcttctgtggctgtggctatggatgcggctctggctactactattgaggacaccgtgggagactcatcctctatcctgtgacatcgggattcaccaattctgaaccccgtatgctctgagctcggggctggatgaagattatc

SEQ ID NO: 145660 - DNA, 636 bp, Homo sapiens
  Payload ID: 8876
  Gene Symbol: KRTAP6-3
  Gene Name: keratin associated protein 6-3
  Uniprot ID: Q3LI67
  ENST ID: ENST00000391624
  CDS Start-End: 7-339
ccaaggatgacctcaacaaccaacaccatgtgtggcagctactacagaaactacaatggtggccatggctatgggtgctgtggctacggaggcctgggctgtggttatggcggctgtggctatgggtgctgtggctacggaggcctgggctttggctatggaggcctggactgtggctatggaggcctgggctgtggctatggctccttctgtggctgtggctacagaggcctggactgtggctatggctgtggctatggctatgtctcccactccttctgtggctgtggctataggtgcggctctggctatggctccagctttggctactactattgaggacaccatgggagactctcaccctctatcctgtgacattgcaattcaccaattctgaagcccacatgctctgagcctttcccttgattgatgatatcctgcagtggaagtctaatatgatctgttgttgatctaccatctaacccaaaaataccctgagtttccatcatgaagtgggataaggtgaagttcacctgtcacttctccttttatcaggatgatggtgtcacagtgactcctttgatgactttcatgctgtagtttgtttctctgctgacctaataaacacatttaatc

SEQ ID NO: 145661 - DNA, 721 bp, Homo sapiens
  Payload ID: 8877
  Gene Symbol: KRTAP7-1
  Gene Name: keratin associated protein 7-1 (gene/pseudogene)
  Uniprot ID: Q8IUC3
  ENST ID: ENST00000621162
  CDS Start-End: 62-325
attaacacttgggtaacttacccttcacaatccatctaaatccttctcaattgctgccaccatgactcgttacttctgctgtggaagctacttcccaggataccctatctatgggaccaacttccatgggaccttcagagccacccccttgaactgtgttgtgcctctgggctctcccctgaactatggctgtggatgcaatggctacagctccctgggctacagctttggtggtagcaacatcaacaacctgggcggctgctatggtggtagcttctataggccatggggctctggctctggctttggctacagcacctactgatggaccaatggctccagtgactacaggactctcaattaattctctgcacagaacaacctgaagagcaatgactgtcttcctaccttcccatgtgcttgggtgatacatcttccatcttcttgctgacttcttgctgtggtctttgtctttgatgctgttggacaagtcacccaggactcaggtgctgaactgatactcatctacagacaaaggaagcaagatgcatttttttggtcatacttgaattttaacagtgaaaaagtagtttgcctcccatggttgctctgctcatgtattattagcttctacatcaacattaatgtattacaaattgggtgtgggtagtaaggggattttctgtcagtctcttaataaatctatttccttcagcataaa

SEQ ID NO: 145662 - DNA, 556 bp, Homo sapiens
  Payload ID: 8878
  Gene Symbol: KRTAP8-1
  Gene Name: keratin associated protein 8-1
  Uniprot ID: Q8IUC2
  ENST ID: ENST00000329621
  CDS Start-End: 33-224
tgttgctacctaagccctccactcccgacaccatgctctgcgacaacttccccggggctgtcttcccaggatgctactggggcagctatggctacccgctgggatatagcgttggctgtggctatggcagcacctactctccagtgggctatggcttcggctatggctacaacggctgtggggctttcggctacaggagatactcgccatttgctctctactgattggctgaaatccccgaggtgtagcatcttctctcccttgaaggctgagccccacatctccaggttccccccgtatccactccttcagtcctcatttgctcatcaacctcagagacactgctttccaacttacctcgagtcccaggggaggaaaatgaaaaagcagacgcttcctcaagctgcctcccctggctgatgttctctgggacattttcggaaatttgacctcccacttgtcatgagctacttttgaattttccatgacactcatgacttgtgatgaagtcatggatatgtctatcaaaatctcaataaatttgtctcagctggta

SEQ ID NO: 145663 - DNA, 753 bp, Homo sapiens
  Payload ID: 8879
  Gene Symbol: KRTAP9-1
  Gene Name: keratin associated protein 9-1
  Uniprot ID: A8MXZ3
  ENST ID: ENST00000398470
  CDS Start-End: 1-753
atgacccactgctgttccccttgctgtcagcctacatgctgcaggaccacctgctgcaggacaacctgctggaagcccaccactgtgaccacctgcagcagcacaccctgttgccagccctcctgctgtgtgcccagctgctgccagccttgctgccacccaacttgctgtcaaaacacctgctgcaggaccacctgctgccagcccacttgtgtggccagctgctgccagccttcctgctgcagcacaccctgctgccagcccacctgctgtgggtccagctgctgtggccaaaccagctgtgggtccagctgctgtcagcctatttgtgggtccagttgctgtcagccttgctgtcacccgacttgctatcaaactatctgcttcaggaccacctgctgccagcctacctgctgccagcccacctgctgcaggaacacctcttgccagcccacctgctgtgggtccagctgctgccagccttgctgccacccaacatgctgtcaaaccatttgtagatccacctgctgccaaccatcctgtgtgaccagatgctgcagcacaccctgttgccagccaacctgtggtgggtccagctgctgtagccaaacctgcaatgagtccagctattgtctgccttgctgccgtcccacctgctgccagaccacctgctacaggaccacctgttgccgccccagctgttgctgcagtccttgctgtgtctccagctgctgccagccttcctgctgctaa

SEQ ID NO: 145664 - DNA, 351 bp, Homo sapiens
  Payload ID: 8879
  Gene Symbol: KRTAP9-1
  Gene Name: keratin associated protein 9-1
  ENST ID: ENST00000634235
  CDS Start-End: 1-351
tgctgccacccaacttgctgtcaaaacacctgctgcaggaccacctgctgccagcccacttgtgtggccagctgctgccagccttcctgctgcagcacaccctgctgccagcccacctgctgtgggtccagctgctgtgggaccacctgctgccagcctacctgctgccagcccacctgctgcaggaacacctcttgccagcccacctgctgtgggtccagctgctgccagcctccttgctgccgtcccacctgctgccagaccacctgctacaggaccacctgttgccgccccagctgttgctgcagtccttgctgtgtctccagctgctgccagccttcctgctgctaa

SEQ ID NO: 145665 - DNA, 369 bp, Homo sapiens
  Payload ID: 8879
  Gene Symbol: KRTAP9-1
  Gene Name: keratin associated protein 9-1
  ENST ID: ENST00000635603
  CDS Start-End: 1-369
tgctgtcagcctacatgctgcaggaccacctgctgcaggccctcctgctgtgtgcccagctgctgccagccttgctgccacccaacttgctgtcaaaacacctgctgcaggaccacctgctgccagcccacttgtgtggccagctgctgccagccttcctgctgcagcacaccctgctgccagcccacctgctgtgggtccagctgctgtggccaaaccagctgtgggtccagctgctgtcagcctatttgtgggtccagttgctgtcagccttgctgtcacccgaccacctgctgccagcctacctgctgccagcccacctgctgcaggaacacctcttgccagcccacctgctgtgggtccagctgc

SEQ ID NO: 145666 - DNA, 330 bp, Homo sapiens
  Payload ID: 8879
  Gene Symbol: KRTAP9-1
  Gene Name: keratin associated protein 9-1
  ENST ID: ENST00000634358
  CDS Start-End: 1-330
tgtcagcctacatgctgcaggaccacctgctgcaggacaacctgctggaagcccaccactccctcctgctgtgtgcccagctgctgccagccttgctgccacccaacttgctgtcaaaacacctgctgcaggaccacctgctgccagcccacttgtgtggccagctgctgccagccttcctgctgcagcacaccctgctgccagcccacctgctgtggccaaacctgcaatgagtccagctattgtctgccttgctgccgtcccacctgctgccagaccacctgctacaggaccacctgttgccgccccagctgttgctgcagtccttgc

SEQ ID NO: 145667 - DNA, 1005 bp, Homo sapiens
  Payload ID: 8880
  Gene Symbol: KRTAP9-2
  Gene Name: keratin associated protein 9-2
  Uniprot ID: Q9BYQ4
  ENST ID: ENST00000377721
  CDS Start-End: 8-532
tgacaccatgacccactgttgctccccttgctgtcagcctacctgctgcaggaccacctgctgcaggaccacctgctggaagcccaccactgtgaccacctgcagcagcacaccctgctgccagcccgcctgctgtgtgtccagctgctgccagccttgctgccgcccaacttgctgtcaaaacacctgctgtaggaccacctgctgccagcccacctgtgtgaccagctgctgccagccttcctgctgcagcacaccctgctgccagcccacctgctgtgggtccagctgctgtggccaaaccagctgtgggtccagctgtggccagagcagctcctgtgcacctgtgtactgcagaagaacctgctactaccccacgactgtctgcctgcctggttgcctaaaccagagctgtggctccaactgctgccagccctgctgccgcccagcctgctgtgagaccacctgctgcaggaccacttgcttccagcccacctgtgtgtccagctgctgccagccttcttgctgctgatcacgttccaagagaaccaccatcctcacacaacaaatttctgctcaactgactcatcttttgggggactaatttaatttgctgctgacagccaccatgctctcacccaaatttttatgaattctctacatgtttaaaatcttggaaatctgcttgagggagggcagaatacttcatcctgattctctttttccttacaccttgtggatcatgtgccagcttcatctgttctcaagtttgagtcatggtctcagctttgactctaaagtcaagagcttcattccctgcttctaaggaatttaggtttctgcaactgatcgatgatctttgcaatcttttttttgttttcaatatcctcctcatcgttcttgtatccttctttcttcttttcatgataaatttgtgttgtgtccctggtagcagaaatccttacctatatgtttctgaataaattctgaaccatcctcatctca

SEQ ID NO: 145668 - DNA, 1005 bp, Homo sapiens
  Payload ID: 8880
  Gene Symbol: KRTAP9-2
  Gene Name: keratin associated protein 9-2
  Uniprot ID: Q9BYQ4
  ENST ID: ENST00000572513
  CDS Start-End: 8-532
tgacaccatgacccactgttgctccccttgctgtcagcctacatgctgcaggaccacctgctgcaggaccacctgctggaagcccaccactgtgaccacctgcagcagcacatcctgctgccagcccgcctgctgtgtgtccagctgctgccagccttgctgccgcccaacttcctgtcaaaacacctgctgtaggaccacctgctgccagcccacctgtgtgaccagctgctgccagccttcctgctgcagcacaccctgctgccagcccacctgctgtgggtccagctgctgtggccaaaccagctgtgggtccagctgtggccagagcagctcctgtgcacctgtgtactgcagaagaacctgctactaccccacgactgtctgcctgcctggttgcctaaaccagagctgtggctccaactgctgccagccgtgctgccgcccagcctgctgtgagaccacctgctgcaggaccacttgcttccagcccacctgtgtgtccagctgctgccagccttcttgctgctgatcacgttccaagagaaccaccatcctcacacaacaaatttctgctcaactgactcatcttttgggggactaatttaatttgctgctgacagccaccatgctctcacccaaatttttatgaattctctacatgtttaaaatcttggaaatctgcttgagggagggcagaatacttcatcctgattctctttttccttacaccttgtggatcatgtgccagcttcatctgttctcaagtttgagtcatggtctcagctttgactctaaagtcaagagcttcattccctgcttctaaggaatttaggtttctgcaactgatcgatgatctttgcaatcttttttttgttttcaatatcctcctcatcgttcttgtatccttctttcttcttttcatgataaatttgtgttgtgtccctggtagcagaaatccttacctatatgtttctgaataaattctgaaccatcctcatctca

SEQ ID NO: 145669 - DNA, 1005 bp, Homo sapiens
  Payload ID: 8880
  Gene Symbol: KRTAP9-2
  Gene Name: keratin associated protein 9-2
  ENST ID: ENST00000571104
  CDS Start-End: 8-532
tgacaccatgacccactgttgctccccttgctgtcagcctacctgctgcaggaccacctgctgcaggaccacctgctggaagcccaccactgtgaccacctgcagcagcacaccctgctgccagcccgcctgctgtgtgtccagctgctgccagccttgctgccgcccaacttgctgtcaaaacacctgctgtaggaccacctgctgccagcccacctgtgtgaccagctgctgccagccttcctgctgcagcacaacctgctgccagcccacctgctgtgggtccagctgctgtggccaaaccagctgtgggtccagctgtggccagagcagctcctgtgcacctgtgtactgcagaagaacctgctactaccccacgactgtctgcctgcctggttgcctaaaccagagctgtggctccaactgctgccagccgtgctgccgcccagcctgctgtgagaccacctgctgcaggaccacttgcttccagcccacctgtgtgtccagctgctgccagccttcttgctgctgatcacgttccaagagaaccaccatcctcacacaacaaatttctgctcaactgactcatcttttgggggactaatttaatttgctgctgacagccaccatgctctcacccaaatttttatgaattctctacatgtttaaaatcttggaaatctgcttgagggagggcagaatacttcatcctgattctctttttccttacaccttgtggatcatgtgccagcttcatctgttctcaagtttgagtcatggtctcagctttgactctaaagtcaagagcttcattccctgcttctaaggaatttaggtttctgcaactgatcgatgatctttgcaatcttttttttgttttcaatatcctcctcatcgttcttgtatccttctttcttcttttcatgataaatttgtgttgtgtccctggtagcagaaatccttacctatatgtttctgaataaattctgaaccatcctcatctca

SEQ ID NO: 145670 - DNA, 720 bp, Homo sapiens
  Payload ID: 8880
  Gene Symbol: KRTAP9-2
  Gene Name: keratin associated protein 9-2
  ENST ID: ENST00000615963
  CDS Start-End: 28-492
agaagcccaccctccacccctgacaccatgacccactgttgctccccttgctgtcagcctacatgctgcaggaccacctgctgcaggaccacctgctggaagcccaccactgtgaccacctgcagcagcacatcctgctgccagcccgcctgctgtgtgtccagctgctgccagccttgctgccgcccaacttcctgtcaaaacacctgctgccagcccatctgtgtgaccagctgctgccagccttcctgctgtagcacaccctgctgccagcccacatgctgtgggtccagctgtggtcagagcagctcctgtgcacctgtgtactgcagaagaacctgctaccaccccacaactgtctgcctgcctggttgcctaaaccagagctgtggctccagctgctgccagccctgctgccgcccagcctgctgtgagaccacttgcttccagcccacctgtgtgtacagctgctgccagccttcttgctgctgatcaagtcccaagagaaccaccatactcacacaacaaatttctgctcaactgactcatcttttgggggactaatttaatttgctgctgacagccaccatgctttcacccaaatttttatgaattctctgcatgtttaaaatcttgtgaatcagcctgagggagggcagaatacttcatcttgattctctttttccttacaccttgtggatcatgtgccagcttcgtctg

SEQ ID NO: 145671 - DNA, 992 bp, Homo sapiens
  Payload ID: 8881
  Gene Symbol: KRTAP9-3
  Gene Name: keratin associated protein 9-3
  Uniprot ID: Q9BYQ3
  ENST ID: ENST00000411528
  CDS Start-End: 40-519
tcacctcttaacagaagcccaccctccatccctgacaccatgacccactgttgctccccttgctgtcagcctacctgctgcaggaccacctgctggcagcccaccactgtgaccacctgcagcagcacaccctgctgtcagccctcctgctgtgtttccagctgctgccagccttgctgccacccaacttgctgtcaaaacacctgctgtaggaccacctgctgccagcccatctgtgtgaccagctgctgccagccttcctgctgtagcacaccctgctgccagcccacatgctgtgggtccagctgtggtcagagcagctcctgtgcacctgtgtactgcagaagaacctgctaccaccccacaagtgtttgtctgcctggttgcctaaaccagagctgtggctccaactgctgccagccctgctgccgcccagcctgctgtgagaccacctgctgcaggaccacttgtttccagcccacctgtgtgtacagctgctgccagccttcttgctgctaatcaactcccaagagaactaccatcctcacacaacaaccttcagctcaactgacttgtcttttgagggactaatttactttgctgctgacagccaccatgctctcacccaaatttttatgaattctctacatgtttaaaatcttgggaatctgcttgagggagggcagaatacttcatcctcattccctctttccttacaccttgtggatcatgtgccagcttcgtctgttcttaatttggagtcatgatctcagctttgtctcaaaaatcaagagcttcattctttgcttctaaggaatttaggtttctgcaactgatcaatcatctttgcaattatattttcattttaaatatccttctcatggttcttgtatccttctttcttcttttcacgataactttgggttatgtctctggtagcagagattcttacctatatgtttctgaataaactctgaaccatcttcatctca

SEQ ID NO: 145672 - DNA, 992 bp, Homo sapiens
  Payload ID: 8881
  Gene Symbol: KRTAP9-3
  Gene Name: keratin associated protein 9-3
  Uniprot ID: Q9BYQ3
  ENST ID: ENST00000571096
  CDS Start-End: 40-519
tcacctcttaacagaagcccaccctccatccctgacaccatgacccactgttgctccccttgctgtcagcctacctgctgcaggaccacctgctggcagcccaccactgtgaccacctgcagcagcacaccctgctgccagccctcctgctgtgtttccagctgctgccagccttgctgccacccaacttgctgtcaaaacacctgctgtaggaccacctgctgccagcccatctgtgtgaccagctgctgccagccttcctgctgtagcacaccctgctgccagcccacatgctgtgggtccagctgtggtcagagcagctcctgtgcacctgtgtactgcagaagaacctgctaccaccccacaagtgtttgtctgcctggttgcctaaaccagagctgtggctccaactgctgccagccctgctgccgcccagcctgctgtgagaccacctgctgcaggaccacttgtttccagcccacctgtgtgtacagctgctgccagccttcttgctgctaatcaactcccaagagaactaccatcctcacacaacaaccttcagctcaactgacttgtcttttgagggactaatttactttgctgctgacagccaccatgctctcacccaaatttttatgaattctctacatgtttaaaatcttgggaatctgcttgagggagggcagaatacttcatcctcattccctctttccttacaccttgtggatcatgtgccagcttcgtctgttcttaatttggagtcatgatctcagctttgtctcaaaaatcaagagcttcattctttgcttctaaggaatttaggtttctgcaactgatcaatcatctttgcaattatattttcattttaaatatccttctcatggttcttgtatccttctttcttcttttcacgataactttgggttatgtctctggtagcagagattcttacctatatgtttctgaataaactctgaaccatcttcatctca

SEQ ID NO: 145673 - DNA, 967 bp, Homo sapiens
  Payload ID: 8882
  Gene Symbol: KRTAP9-4
  Gene Name: keratin associated protein 9-4
  Uniprot ID: Q9BYQ2
  ENST ID: ENST00000334109
  CDS Start-End: 35-499
tctgaacagaagcccaccctctacccctgacaccatgacccactgttgctccccttgctgtcagcctacatgctgcaggaccacctgctgcaggaccacctgctggaagcccaccactgtgaccacctgcagcagcacaccctgctgccagccctcctgctgtgtttccagctgctgccagccttgctgccgcccaacttgctgtcaaaacacctgctgccagcccacctgtgtgaccagctgctgccagccttcctgctgcagcacaccctgctgccagcccacctgctgtgggtccagctgtgaccagagcagctcctgtgcacctgtgtactgcagaagaacctgctactaccccacaactgtctgcctgcctggttgcctaaaccagagctgtggctccaactgctgccagccctgctgccgcccagcctgctgtgagaccacttgcttccagcccacctgtgtgtccagctgctgtcagcctttttgctgctgatcaagtcccaagagaaccaccatcctcacacaacaactttctgctcaactgacttatcttttgggggactaatttaatttgctgctgacagccaccatgctctcacccaaatttttatgaattctctacctgtttaaaatcttgggaatctacttgagggagggcagaatacttcatcctgattctctttttccttacactttgtggatcatgtgccagcttcgtgtgttctcaattttgagtcatggtctcagctttgactcaaaagtcaagagcttcattctctgcttctaaggaatttaggtttctgcaactgatcaataatctttgcaatcatatttttgttttcaatatcctcctcatggttcttgtatccttctttcttcttttcataactttgggttatgtttctgctaccagcagagattcttagctatatgtttctgaataaactctgaaccatcctca

SEQ ID NO: 145674 - DNA, 967 bp, Homo sapiens
  Payload ID: 8882
  Gene Symbol: KRTAP9-4
  Gene Name: keratin associated protein 9-4
  Uniprot ID: Q9BYQ2
  ENST ID: ENST00000575341
  CDS Start-End: 35-499
tctgaacagaagcccaccctccacccctgacaccatgacccactgttgctccccttgctgtcagcctacatgctgcaggaccacctgctgcaggaccacctgctggaagcccaccactgtgaccacctgcagcagcacaccctgctgccagccctcctgctgtgtgtccagctgctgccagccttgctgccgcccaacttgctgtcaaaacacctgctgccagcccacctgtgtgaccagctgctgccagccttcctgctgcagcacaccctgctgccagcccacctgctgtgggtccagctgtgaccagagcagctcctgtgcacctgtgtactgcagaagaacctgctactaccccacaactgtctgcctgcctggttgcctaaaccagagctgtggctccaactgctgccagccctgctgccgcccagcctgctgtgagaccacttgcttccagcccacctgtgtgtacagctgctgtcagcctttttgctgctgatcaagtcccgagagaaccaccatcctcacacaacaactttctgctcaactgacttatcttttgggggactaatttaatttgctgctgacagccaccatgctctcacccaaatttttatgaattctctacatgtttaaaatcttgggaatctgcttgagggagggcagaatacttcatcctgattctctttttccttacactttgtggatcatgtgccagcttcgtgtgttctcaattttgagtcatggtctcagctttgactcaaaagtcaagagcttcattctctgcttctaaggaatttaggtttctgcaactgatcaataatctttgcaatcatatttttgttttcaatatcctcctcatggttcttgtatccttctttcttcttttcataactttgggttatgtttctgctaccagcagagattcttagctatatgtttctgaataaactctgaaccatcctca

SEQ ID NO: 145675 - DNA, 967 bp, Homo sapiens
  Payload ID: 8882
  Gene Symbol: KRTAP9-4
  Gene Name: keratin associated protein 9-4
  Uniprot ID: Q9BYQ2
  ENST ID: ENST00000570861
  CDS Start-End: 35-499
tctgaacagaagcccaccctctacccctgacaccatgacccactgttgctccccttgctgtcagcctacatgctgcaggaccacctgctgcaggaccacctgctggaagcccaccactgtgaccacctgcagcagcacaccctgctgccagccctcctgctgtgtttccagctgctgccagccttgctgccgcccaacttgctgtcaaaacacctgctgccagcccacctgtgtgaccagctgctgccagccttcctgctgcagcacaccctgctgccagcccacctgctgtgggtccagctgtgaccagagcagctcctgtgcacctgtgtactgcagaagaacctgctactaccccacaactgtctgcctgcctggttgcctaaaccagagctgtggctccaactgctgccagccctgctgccgcccagcctgctgtgagaccacttgcttccagcccacctgtgtgtccagctgctgtcagcctttttgctgctgatcaagtcccaagagaaccaccatcctcacacaacaactttctgctcaactgacttatcttttgggggactaatttaatttgctgctgacagccaccatgctctcacccaaatttttatgaattctctacctgtttaaaatcttgggaatctgcttgagggagggcagaatacttcatcctgattctctttttccttacactttgtggatcatgtgccagcttcgtgtgttctcaattttgagtcatggtctcagctttgactcaaaagtcaagagcttcattctctgcttctaaggaatttaggtttctgcaactgatcaataatctttgcaatcatatttttgttttcaatatcctcctcatggttcttgtatccttctttcttcttttcataactttgggttatgtttctgctaccagcagagattcttagctatatgtttctgaataaactctgaaccatcctca

SEQ ID NO: 145676 - DNA, 1303 bp, Homo sapiens
  Payload ID: 8883
  Gene Symbol: KRTAP9-6
  Gene Name: keratin associated protein 9-6
  Uniprot ID: A8MVA2
  ENST ID: ENST00000391355
  CDS Start-End: 40-522
tcacctctgaacagaagcccaccctccacccctgacaacatgacccactgttgctcccctggctgtcagcctacctgctgcaggaccacttgctgcaggactacctgctggcagcccaccattgtgaccacctgcagcagcacaccctgctgccagccctcctgctgtgtgtccagctgctgccagccttactgccacccaacttgctgtcaaaacacctgctgcaggaccacctgctgccagcccacctgtgtgaccagctgctgccagccttcctgctgcagcacaccctgctaccagcccatctgctgtgggtccagctgctgtggccaaaccagctgtgggtccagctgtggccagagcagctcctgtgcacctgtgtactgcagaagaacctgctaccaccccacgactgtctgcctgcctggttgcctcaaccagagctgtggatccagctgctgccagccctgctactgcccagcctgctgtgtgtccagctgctgccagcattcttgttgctgagcagcaccacagaggaccatcatcctcacacaacaaccttctgctcaactgaccttttttttcttttgagacggagcctcactgtcacccaggctggagtgcagtagcacgctctcggctcgctgcaacctccatcttctgggttcaagtgattctcctgcctcagcctcctgagtagctgggattacatgcctgtgccaccacgcctggctaattttttgtatttttagtatttttagtagttttcaccatgttgatcagacttgtctggaactcctgccctcaggtgatccacctgcctcagcctcccaaagtgctgggattacaggtgtgagctaccacacccagacccaactcacttatctttcagaagacagatttactttcaaactttactgatacacagtatgctttcaccaattttttttatttctttgcctgtttaaaatcttgggaatcagcttgagggagggcagaatacttcatcctgattcttttttccttacactttgtggatcatgtgccagcttcatgtgttctcaatgtggagacatggtctccattcgactctaaagtcaagagcttcattctctccttctaagaaacttaggtttctgcaactgatcaataatctttgcaatcatatttttgttttcaattttgtcctcatgtttcttttacccttctttcttcttttcattgtaactttgggctatgtccctagtagcagggattcttacctatatatttctgaataaattctgaaccatccttcatctca

SEQ ID NO: 145677 - DNA, 525 bp, Homo sapiens
  Payload ID: 8883
  Gene Symbol: KRTAP9-6
  Gene Name: keratin associated protein 9-6
  ENST ID: ENST00000574248
  CDS Start-End: 1-525
atgacccactgttgctcccctggctgtcagcctacctgctgcaggaccacttgctgcaggactacctgctggcagcccaccattgtgaccacctgcagcagcacaccctgctgccagccctcctgctgtgtgtccagctgctgccagccttgctgccacccaacttgctgtcaaaacacctgctgcaggaccacctgctgccagcccacctgtgtgaccagctgctaccagccttcctgctgcagcacaccctgctgccagcccatctgctgtgggtccagctgctgtggccaaaccagctgtgggtccagctgctgccagcccagctcctgtgcacccatctactgcaggagaacctgctaccaccccacgagtgtctacctgcctggttgcctaaaccagagctgtggctccagctgctgccagccgtgctgccgcccagcctgctgtgagactacctgctgcaggaccacttgcttccagcccacctgtgtgaccagctgctgtcagcctgcttgctgctga

SEQ ID NO: 145678 - DNA, 1303 bp, Homo sapiens; identical to SEQ ID NO: 145676
  Payload ID: 8883
  Gene Symbol: KRTAP9-6
  Gene Name: keratin associated protein 9-6
  Uniprot ID: A8MVA2
  ENST ID: ENST00000576511
  CDS Start-End: 40-522

SEQ ID NO: 145679 - DNA, 1039 bp, Homo sapiens
  Payload ID: 8884
  Gene Symbol: KRTAP9-7
  Gene Name: keratin associated protein 9-7
  Uniprot ID: A8MTY7
  ENST ID: ENST00000391354
  CDS Start-End: 40-549
tcacctctgaacagaagtccaccctccacccctgacaccatgacccactgttgctccccttgctgtcagcctacctgctgcaggaccacctgctggaagcccaccactgtgaccacctgcagcagcacaccctgctgccagccctcctgctgtgtgtccagctgctgccagccttgctgccacccaacttgctgtcaaaacacctgctgcaggaccacctgctgccagcccacctgtgtgaccagctgctgccagccttcctgctgcagcacaccctgctgccagcccatctgctgtgggtccagctgctgtggccaaaccagctgtgggtccagctgctgccagcccagctcctgtgcacccatctactgcaggagaacctgctaccaccccacgagtgtctacctgcctggttgcctaaaccagagctgtggctccagctgctgccagccgtgctgccgcccagcctgctgtgagactacctgctgcaggaccacttgcttccagcccacctgtgtgaccagctgctgtcagcctgcttgctgctgatcagttccgcagaggaccatcatccccatacagtaaccctctggcaaaagatttaccttctgggggacaaatttactttcaaactgtgatgaaaaccaacaaagtgaacttagggtgaactttgctcaccctaatttttatgacttctctgcatgtttaacattttgtgaatcagcttgagtgagggtagagtacttcatcctgattcttttttccttacaccttgtggatcatgtgccaccttcatgtattttcaatttggagtcatggtctcagcttgactctaaagtcaagagcttcattccctttctctaagaaacttaggttttgcaactgatcaataatcttcacaatcatgttttcattttcagtgtcctcctcgtggttcttttatccttattcctttcatgatcattttgggttatctccctagaaacagggactcttacctatatgtttcttaataaactcaaagctgtccttcatctca

SEQ ID NO: 145680 - DNA, 1039 bp, Homo sapiens; identical to SEQ ID NO: 145679
  Payload ID: 8884
  Gene Symbol: KRTAP9-7
  Gene Name: keratin associated protein 9-7
  Uniprot ID: A8MTY7
  ENST ID: ENST00000573531
  CDS Start-End: 40-549

SEQ ID NO: 145681 - DNA, 960 bp, Homo sapiens
  Payload ID: 8885
  Gene Symbol: KRTAP9-8
  Gene Name: keratin associated protein 9-8
  Uniprot ID: Q9BYQ0
  ENST ID: ENST00000254072
  CDS Start-End: 8-487
tgacaccatgacccactgttgttccccttgctgtcagcctacgtgctgcaggaccacctgctggaagcccaccactgtgaccacctgcagcagcacaccctgctgccagccctcctgctgtgtgtccagctgctgccagccttgctgccgcccaacttgctgtcaaaacacctgctgccagcccatctgtgtgaccagctgctgccagccttcctgctgcagcacaccctgctgtcagcccacctgctgtggccaaaccagctgtgggtccagctgtggtcagagcagctcctgtgcacctgtgtactgcagaagaacctgctaccaccccacgactgtctgcctgcctggttgcctaaaccagagctgtggctccaactgctgccagccctgctgccgcccagcctgctgtgagaccacctgctgcaggaccacttgcttccagcccacctgtgtgtccagctgctgccagccttcttgctgctgatcacgttccaagagaaccaccatcctcacacaacaaatttctgctcaactgactcatcttttgggggactaatttaatttgctgctgacagccaccatgctctcacccaaatttttatgaattctctacatgtttaaaatcttggaaatctgcttgagggagggcagaatacttcatcctgattctctttttccttacaccttgtggatcatgtgccagcttcatctgttctcaagtttgagtcatggtctcagctttgactctaaagtcaagagcttcattccctgcttctaaggaatttaggtttctgcaactgatcgatgatctttgcaatcttttttttgttttcaatatcctcctcatcgttcttgtatccttctttcttcttttcatgataaatttgtgttgtgtccctggtagcagaaatccttacctatatgtttctgaataaattctgaaccatcctcatctca

SEQ ID NO: 145682 - DNA, 750 bp, Homo sapiens
  Payload ID: 8885
  Gene Symbol: KRTAP9-8
  Gene Name: keratin associated protein 9-8
  ENST ID: ENST00000622336
  CDS Start-End: 28-522
agaagcccaccctccatccctgacaccatgacccactgttgctccccttgctgtcagcctacctgctgcaggaccacctgctgcaggaccacctgctggaagcccaccactgtgaccacctgcagcagcacaccctgctgccagccctcctgctgtgtgtccagctgctgccagccttgctgccgcccaacttgctgtcaaaacacctgctgccagcccatctgtgtgaccagctgctgccagccttcctgctgcagcacaccctgctgtcagcccacctgctgtggccaaaccagctgtgggtccagctgtggtcagagcagctcctgtgcacctgtgtactgcagaagaacctgctaccaccccacgactgtctgcctgcctggttgcctaaaccagagctgtggctccaactgctgccagccctgctgccgcccagcctgctgtgagaccacctgctgcaggaccacttgcttccagcccacctgtgtgtccagctgctgccagccttcttgctgctgatcacgttccaagagaaccaccatcctcacacaacaaatttctgctcaactgactcatcttttgggggactaatttaatttgctgctgacagccaccatgctctcacccaaatttttatgaattctctacatgtttaaaatcttggaaatctgcttgagggagggcagaatacttcatcctgattctctttttccttacaccttgtggatcatgtgccagcttcatctg

SEQ ID NO: 145683 - DNA, 981 bp, Homo sapiens
  Payload ID: 8886
  Gene Symbol: KRTAP9-9
  Gene Name: keratin associated protein 9-9
  Uniprot ID: Q9BYP9
  ENST ID: ENST00000394008
  CDS Start-End: 3-512
ccatgacccactgttgctccccttgctgtcagcctacctgctgcaggaccacctgctggaagcccaccactgtgaccacctgcagcagcacaccctgctgccagccctcctgctgtgtgtctagctgctgccagccttgctgccgcccagcttgctgtcaaaacacctgctgcaggaccacctgctgccagcccacctgtctgaccagctgctgccagccttcctgctgcagcacaacctgctgccagcccatctgctgtgggtccagctgctgtggccaaaccagctgtgggtccagctgtggccagagcagctcctgtgcacctgtgtactgcagaagaacctgctactacccgacgactgtctgcctgcctggttgcctcaaccagagctgtggatccagctgctgccagccctgctgccgccccgcctgctgtgagaccacctgctgcaggaccacttgcttccagcccacctgtgtgtccagctgctgccagccttcttgctgctgatcaagtcccaagagaacaaccatcttcacacaacaaccttctgctcaactgacttatcttttggaggactaatttaccttactgctgacagcaaccatgttctcacccaaatttttatgaattctctgcatatttaaaatcttgtgaatcagcttgagggagggcagaatacttcatcctgattctctttttcttataccttgtgaatcatgtgccagcttcatgtgttctcaattttgagtcatggtctcagctttgactcaaaagtcaagagcttcattctcttcacttaagaaacttaagttgctgcaaatgattaagaatcttcacaactatgttttcttttcaatatactcatgattcttgtatcctgcttccttcttttaatgatcactttgggttatctccctataaccagggatcttacctatatatttcttaataaataaatttggaactattattcata

SEQ ID NO: 145684 - DNA, 981 bp, Homo sapiens
  Payload ID: 8886
  Gene Symbol: KRTAP9-9
  Gene Name: keratin associated protein 9-9
  Uniprot ID: Q9BYP9
  ENST ID: ENST00000570825
  CDS Start-End: 3-512
ccatgacccactgttgctccccttgctgtcagcctacctgctgcaggaccacctgctggaagcccaccactgtgaccacctgcagcagcacaccctgctgccagccctcctgctgtgtgtctagctgctgccagccttgctgccgcccagcttgctgtcaaaacacctgctgcaggaccacctgctgccagcccacctgtctgaccagctgctgccagccttcctgctgcagcacaacctgctgccagcccatctgctgtgggtccagctgctgtggccaaaccagctgtgggtccagctgtggccagagcagctcctgtgcacctgtgtactgcagaagaacctgctactacccgacgactgtctgcctgcctggttgcctcaaccagagctgtggatccagctgctgccagccctgctgccgccccgcctgctgtgagaccacctgctgcaggaccacttgcttccagcccacctgtgtgtccagctgctgccagccttcttgctgctgatcaagtcccaagagaacaaccatcttcacacaacaaccttctgctcaactgacttatcttttggaggactaatttaccttactgctgacagcaaccatgttctcacccaaatttttatgaattctctgcatatttaaaatcttgtgaatcagcttgagggagggcagaatacttcatcctgattctctttttcttataccttgtgaatcatgtgccagcttcatgtgttctcaattttgagtcatggtctcagctttgactcaaaagtcaagagcttcattctcttcacttaagaaacttaagttgctgcaaatgattaagaatcttcacaactatgttttcttttcaatatactcatgattcttgtatcctgcttccttcttttaatgatcactttgggttatctccctataaccagggatcttacatatatatttcttaataaataaatttggaactattattcata

SEQ ID NO: 145685 - DNA, 986 bp, Homo sapiens
  Payload ID: 8886
  Gene Symbol: KRTAP9-9
  Gene Name: keratin associated protein 9-9
  ENST ID: ENST00000592900
  CDS Start-End: 1-525
atgacccactgttgctccccttgctgtcagcctacctgctgcaggaccacctgctgcaggaccacctgctggaagcccaccactgtgaccacctgcagcagcacaccctgctgccagccctcctgctgtgtgtctagctgctgccagccttgctgccgcccagcttgctgtcaaaacacctgctgcaggaccacctgctgccagcccacctgtctgaccagctgctgccagccttcctgctgcagcacaacctgctgccagcccatctgctgtgggtccagctgctgtggccaaaccagctgtgggtccagctgtggccagagcagctcctgtgcacctgtgtactgcagaagaacctgctactacccgacgactgtctgcctgcctggttgcctcaaccagagctgtggatccagctgctgccagccctgctgccgccccgcctgctgtgagaccacctgctgcaggaccacttgcttccagcccacctgtgtgtccagctgctgccagccttcttgctgctgatcaagtcccaagagaacaaccatcttcacacaacaaccttctgctcaactgacttatcttttggaggactaatttaccttactgctgacagcaaccatgttctcacccaaatttttatgaattctctgcatatttaaaatcttgtgaatcagcttgagggagggcagaatacttcatcctgattctctttttcttataccttgtgaatcatgtgccagcttcatctgttctcaattttgagtcatggtctcagctttgactcaaaagtcaagagcttcattctcttcacttaagaaacttaagttgctgcaaatgattaagaatcttcacaactatgttttcttttcaatatactcatgattcttgtatcctgcttccttcttttaatgatcactttgggttatctccctataaccagggatcttacctatatatttcttaataaataaatttggaactat

SEQ ID NO: 145686 - DNA, 933 bp, Homo sapiens
  Payload ID: 8886
  Gene Symbol: KRTAP9-9
  Gene Name: keratin associated protein 9-9
  Uniprot ID: Q9BYP9
  ENST ID: ENST00000618683
  CDS Start-End: 3-467
ccatgacccactgttgctccccttgctgtcagcctacctgctgcaggaccacctgctgcaggaccacctgctggaagcccaccactgtgaccacctgcagcagcacaccctgctgccagccctcctgctgtgtgtctagctgctgccagccttgctgccgcccagcttgctgtcaaaacacctgctgcaggaccacctgctgccagcccacctgtctgtccagctgctgtggccaaaccagctgtgggtccagctgtggccagagcagctcctgtgcacctgtgtactgcagaagaacctgctactacccgacgactgtctgcctgcctggttgcctcaaccagagctgtggatccagctgctgccagccctgctgccgccccgcctgctgtgagaccacctgctgcaggaccacttgcttccagcccacctgtgtgtccagctgctgccagccttcttgctgctgatcaagtcccaagagaacaaccatcttcacacaacaaccttctgctcaactgacttatcttttggaggactaatttaccttactgctgacagcaaccatgttctcacccaaatttttatgaattctctgcatatttaaaatcttgtgaatcagcttgagggagggcagaatacttcatcctgattctctttttcttataccttgtgaatcatgtgccagcttcatgtgttctcaattttgagtcatggtctcagctttgactcaaaagtcaagagcttcattctcttcacttaagaaacttaagttgctgcaaatgattaagaatcttcacaactatgttttcttttcaatatactcatgattcttgtatcctgcttccttcttttaatgatcactttgggttatctccctataaccagggatcttacctatatatttcttaataaataaatttggaactattattc

SEQ ID NO: 145687 - DNA, 933 bp, Homo sapiens
  Payload ID: 8886
  Gene Symbol: KRTAP9-9
  Gene Name: keratin associated protein 9-9
  ENST ID: ENST00000617040
  CDS Start-End: 3-467
ccatgacccactgttgctccccttgctgtcagcctacctgctgcaggaccacctgctgcaggaccacctgctggaagcccaccactgtgaccacctgcagcagcacaccctgctgccagccctcctgctgtgtgtctagctgctgccagccttgctgccgcccagcttgctgtcaaaacacctgctgcaggaccacctgctgccagcccacctgtctgtccagctgctgtggccaaaccagctgtgggtccagctgtggccagagcagctcctgtgcacctgtgtactgcagaagaacctgctactacccgacgactgtctgcctgcctggttgcctcaaccagagctgtggatccagctgctgccagccctgctgccgccccgcctgctgtgagaccacctgctgcaggaccacttgcttccagcccacctgtgtgtccagctgctgccagccttcttgctgctgatcaagtcccaagagaacaaccatcttcacacaacaaccttctgctcaactgacttatcttttggaggactaatttaccttactgctgacagcaaccatgttctcacccaaatttttatgaattctctgcatatttaaaatcttgtgaatcagcttgagggagggcagaatacttcatcctgattctctttttcttataccttgtgaatcatgtgccagcttcatctgttctcaattttgagtcatggtctcagctttgactcaaaagtcaagagcttcattctcttcacttaagaaacttaagttgctgcaaatgattaagaatcttcacaactatgttttcttttcaatatactcatgattcttgtatcctgcttccttcttttaatgatcactttgggttatctccctataaccagggatcttacctatatatttcttaataaataaatttggaactattattc

SEQ ID NO: 145688 - DNA, 650 bp, Homo sapiens
  Payload ID: 8886
  Gene Symbol: KRTAP9-9
  Gene Name: keratin associated protein 9-9
  ENST ID: ENST00000610858
  CDS Start-End: 29-553
cagaagcccaccctctacccctgacaccatgacccactgttgctccccttgctgtcagcctacatgctgcaggaccacctgctgcaggaccacctgctggaagcccaccactgtgaccacctgcagcagcacaccctgctgccagccctcctgctgtgtttccagctgctgccagccttgctgccgcccaacttgctgtcaaaacacctgctgcaggaccacctgctgccagcccacctgtctgaccagctgctgccagccttcctgctgcagcacaacctgctgccagcccatctgctgtgggtccagctgctgtggccaaaccagctgtgggtccagctgtggccagagcagctcctgtgcacctgtgtactgcagaagaacctgctactacccgacgactgtctgcctgcctggttgcctcaaccagagctgtggatccagctgctgccagccctgctgccgccccgcctgctgtgagaccacctgctgcaggaccacttgcttccagcccacctgtgtgtccagctgctgccagccttcttgctgctgatcaagtcccaagagaacaaccatcttcacacaacaaccttctgctcaactgacttatcttttggaggactaatttaccttactgctgacagcaacca

SEQ ID NO: 145689 - DNA, 981 bp, Homo sapiens
  Payload ID: 8886
  Gene Symbol: KRTAP9-9
  Gene Name: keratin associated protein 9-9
  ENST ID: ENST00000610933
  CDS Start-End: 3-512
ccatgacccactgttgctccccttgctgtcagcctacctgctgcaggaccacctgctggaagcccaccactgtgaccacctgcagcagcacaccctgctgccagccctcctgctgtgtgtctagctgctgccagccttgctgccgcccagcttgctgtcaaaacacctgctgcaggaccacctgctgccagcccacctgtctgaccagctgctgccagccttcctgctgcagcacaacctgctgccagcccatctgctgtgggtccagctgctgtggccaaaccagctgtgggtccagctgtggccagagcagctcctgtgcacctgtgtactgcagaagaacctgctactacccgacgactgtctgcctgcctggttgcctcaaccagagctgtggatccagctgctgccagccctgctgccgccccgcctgctgtgagaccacctgctgcaggaccacttgcttccagcccacctgtgtgtccagctgctgccagccttcttgctgctgatcaagtcccaagagaacaaccatcttcacacaacaaccttctgctcaactgacttatcttttggaggactaatttaccttactgctgacagcaaccatgttctcacccaaatttttatgaattctctgcatatttaaaatcttgtgaatcagcttgagggagggcagaatacttcatcctgattctctttttcttataccttgtgaatcatgtgccagcttcatctgttctcaattttgagtcatggtctcagctttgactcaaaagtcaagagcttcattctcttcacttaagaaacttaagttgctgcaaatgattaagaatcttcacaactatgttttcttttcaatatactcatgattcttgtatcctgcttccttcttttaatgatcactttgggttatctccctataaccagggatcttacctatatatttcttaataaataaatttggaactattattcata

SEQ ID NO: 145690 - DNA, 525 bp, Homo sapiens
  Payload ID: 8886
  Gene Symbol: KRTAP9-9
  Gene Name: keratin associated protein 9-9
  ENST ID: ENST00000611783
  CDS Start-End: 25-504
aacccaccctccacccctgacaccatgacccactgttgctccccttgctgtcagcctacctgctgcaggaccacctgctggaagcccaccactgtgaccacctgcagcagcacaccctgctgccagccctcctgctgtgtgtctagctgctgccagccttgctgccgcccagcttgctgtcaaaacacctgcttccagcccacctgtgtgtccagctgctgccagccttcttgctgcagcacaccctgctgccagtccagctgctgtggccaaaccagctgtgggtccagctgtggccagagcagctcctgtgcacctgtgtactgcagaagaacctgctaccaccccacgactgtctgcctgcctggttgcctaaatcagagctgtggctccagctgctgccagccctgctgccgcccagcctgctgtgagaccacctgctgcaggaccacttgcttccagcccacttctgtgatcagctgctgtcagccttcttgctgctgaccaactctccagaggaccacc

SEQ ID NO: 145691 - DNA, 933 bp, Homo sapiens
  Payload ID: 8886
  Gene Symbol: KRTAP9-9
  Gene Name: keratin associated protein 9-9
  Uniprot ID: Q9BYP9
  ENST ID: ENST00000617021
  CDS Start-End: 3-467
ccatgacccactgttgctccccttgctgtcagcctacctgctgcaggaccacctgctgcaggaccacctgctggaagcccaccactgtgaccacctgcagcagcacaccctgctgccagccctcctgctgtgtgtctagctgctgccagccttgctgccgcccagcttgctgtcaaaacacctgctgcaggaccacctgctgccagcccacctgtctgtccagctgctgtggccaaaccagctgtgggtccagctgtggccagagcagctcctgtgcacctgtgtactgcagaagaacctgctactacccgacgactgtctgcctgcctggttgcctcaaccagagctgtggatccagctgctgccagccctgctgccgccccgcctgctgtgagaccacctgctgcaggaccacttgcttccagcccacctgtgtgtccagctgctgccagccttcttgctgctgatcaagtcccaagagaacaaccatcttcacacaacaaccttctgctcaactgacttatcttttggaggactaatttaccttactgctgacagcaaccatgttctcacccaaatttttatgaattctctgcatatttaaaatcttgtgaatcagcttgagggagggcagaatacttcatcctgattctctttttcttataccttgtgaatcatgtgccagcttcatgtgttctcaattttgagtcatggtctcagctttgactcaaaagtcaagagcttcattctcttcacttaagaaacttaagttgctgcaaatgattaagaatcttcacaactatgttttcttttcaatatactcatgattcttgtatcctgcttccttcttttaatgatcactttgggttatctccctataaccagggatcttacatatatatttcttaataaataaatttggaactattattc

SEQ ID NO: 145692 - DNA, 2502 bp, Homo sapiens
  Payload ID: 8887
  Gene Symbol: RP5-1028K7.3
  Gene Name: Keratin-like protein KRT222
  ENST ID: ENST00000476049
  CDS Start-End: 43-930
atcgataaggttcagttagccaaggtggaggatgggaaaagaatggaactgtcccagctactcaatgagatcagggcaaactatgaaaagatcctcaccagaaatcagatagagacggtgctctcaacaaggatccagctagaagaagacataagcaaaaaaatggacaaagatgaagaggctttgaaggcagctcaagcagaactcaaggaggcccgacgccagtggcaccacctgcaagtggaaattgaatctctccatgctgtggaaaggggccttgaaaactccctacatgccagcgagcagcattaccagatgcagctgcaagacctagagactgtgattgaaggactagaaaaagagctacaggaagtaaggcgcggcatcgaaaagcagcttcaagagcacgagatgcttctcaacacgaagatgaggctggaacaagaaatagcaacttatcgccacctcctagaaaaagaagaaatcagatattatggttgtatccaaggtgggaaaaaagacaaaaagcctaccacaagtagagttggttttgttttaccatcagccattataaatgaaatatcttttactacaaaagtcccacaaaagtatgagaatgaaaatgtagaaacagtaaccaaacaggcaatcttaaatgggagtatcgttaaggagagcactgaagctcatggcactattcagacagagaaagtggatgaagttattaaagaatgggaaggttctttctttaaagataaccctcgattgaggaaaaagtctgtttctcttcgatttgatcttcatttagcagccactgatgaagggtgtttagagactaagcaggataatctaccagatatagaagtcaggcttatcatgagaagatcatgcagtattccctctatcaaacctccatcaacagctaattaatccaaagatagtatttgacttgattggaaaatgttaggatggaccaaggtgggccataccaactccctctgtcccaaaattaaccacaggtcagggatcccatacgttcattctccctccacagtgacccacaatatccatcgggtgtttatgtatccaaagaagaggctactcattccatctggtaaaccaacatactcatgatttagtggaaagagccctggagtggcacagagggctgcctcaatacacacttactgagcgtctaacaatgaatgggtcaagcccttcgtaggcactggcaatgggaagatgaccaatacagacggctgaaccttgctttcaaggccttcataaagcactggagatgacaaacacggtccgatacaaagggtcgggttcaggactccaaccattattatcaaagagccacgggaatacaaaggaaggattactaggggggaagttccaggagggcatcacaaagagacctctgagctggatccagaaggacagatgagtttaagctgaaagtggggacggtcgttcccgctggtgggaaccgaaggagccgaggcagcgctgaggcggagaccagtaaaggcttccaaccctgacctaaagttgtgggagattggcaagattattggtggcatgtggcgagatctcactgatgaagaaaaacaagaatatttaaacgaatacgaagcagaaaagatagagtacaatgaatctatgaaggcctatcataattcccccgcgtaccttgcttacataaatgcaaaaagtcgtgcagaagctgctttagaggaagaaagtcgacagagacaatctcgcatggagaaaggagaaccgtacatgagcattcagcctgctgaagatccagatgattatgatgatggcttttcaatgaagcatacagccaccgcccgtttccagagaaaccaccgcctcatcagtgaaattcttagtgagagtgtggtgccagacgttcggtcagttgtcacaacagctagaatgcaggtcctcaaacggcaggtccagtccttaatggttcatcagcgaaaactagaagctgaacttcttcaaatagaggaacgacaccaggagaagaagaggaaattcctggaaagcacagattcatttaacaatgaacttaaaaggttgtgcggtctgaaagtagaagtggatatggagaaaattgcagctgagattgcacaggcagaggaacaggcccgcaaaaggcaggaggaaagggagaaggaggccgcagagcaagctgagcgcagtcagagcagcatcgttcctgaggaagaacaagcagctaacaaaggcgaggagaagaaagacgacgagaacattccgatggagacagaggagacacaccttgaagaaacaacagagagccaacagaatggtgaagaaggcacgtctactcctgaggacaaggagagtgggcaggagggggtcgacagtatggcagaggaaggaaccagtgatagtaacactggctcggagagcaacagtgcaacagtggaggagccaccaacagatcccataccagaagatgag

SEQ ID NO: 145693 - DNA, 552 bp, Homo sapiens
  Payload ID: 8888
  Gene Symbol: KRTCAP2
  Gene Name: keratinocyte associated protein 2
  Uniprot ID: Q8N6L1
  ENST ID: ENST00000295682
  CDS Start-End: 32-520
ggagtagcaagtccgcggtaagcgctgacgcatgcgcatagctaaccgcacccggttcagctcgcctttcttggccagaggcgccggttggactcacgggcggggcatgatggtggtgggtacgggcacctcgctggcgctctcctccctcctgtccctgctgctctttgctgggatgcagatgtacagccgtcagctggcctccaccgagtggctcaccatccagggcggcctgcttggttcgggtctcttcgtgttctcgctcactgccttcaataatctggagaatcttgtctttggcaaaggattccaagcaaagatcttccctgagattctcctgtgcctcctgttggctctctttgcatctggcctcatccaccgagtctgtgtcaccacctgcttcatcttctccatggttggtctgtactacatcaacaagatctcctccaccctgtaccaggcagcagctccagtcctcacaccagccaaggtcacaggcaagagcaagaagagaaactgaccctgaatgttcaataaagttgattctttgta

SEQ ID NO: 145694 - DNA, 872 bp, Homo sapiens
  Payload ID: 8889
  Gene Symbol: KRTCAP3
  Gene Name: keratinocyte associated protein 3
  Uniprot ID: Q53RY4
  ENST ID: ENST00000288873
  CDS Start-End: 33-755
acagcggccctgcggctggcgcggcggacgggatgaggcgctgcagtctctgcgctttcgacgccgcccgggggcccaggcggctgatgcgtgtgggcctcgcgctgatcttggtgggccacgtgaacctgctgctgggggccgtgctgcatggcaccgtcctgcggcacgtggccaatccccgcggcgctgtcacgccggagtacaccgtagccaatgtcatctctgtcggctcggggctgctgagcgtttccgtgggacttgtggccctcctggcgtccaggaaccttcttcgccctccactgcactgggtcctgctggcactagctctggtgaacctgctcttgtccgttgcctgctccctgggcctccttcttgctgtgtcactcactgtggccaacggtggccgccgccttattgctgactgccacccaggactgctggatcctctggtaccactggatgaggggccgggacatactgactgcccctttgaccccacaagaatctatgatacagccttggctctctggatcccttctttgctcatgtctgcaggggaggctgctctatctggttactgctgtgtggctgcactcactctacgtggagttgggccctgcaggaaggacggacttcaggggcagctagaggaaatgacagagcttgaatctcctaaatgtaaaaggcaggaaaatgagcagctactggatcaaaatcaagaaatccgggcatcacagagaagttgggtttaggacagcaggtgctgttccgagactcagtcctaaagggttttttttcccactaagcaaggggccctgacctcgggatgagataacaaattgtaataaagtaacttctcttttcttcta

SEQ ID NO: 145695 - DNA, 942 bp, Homo sapiens
  Payload ID: 8889
  Gene Symbol: KRTCAP3
  Gene Name: keratinocyte associated protein 3
  Uniprot ID: Q53RY4
  ENST ID: ENST00000407293
  CDS Start-End: 160-828
ttccgggccctggcgtctcgtctccttaccctggggctacccttgccccgtcctactgcccgcggttaacccgccgcgagccgcctctcccctccccgcccgactcaaccctgccctcccccgtgctttgcagacgccgcccgggggcccaggcggctgatgcgtgtgggcctcgcgctgatcttggtgggccacgtgaacctgctgctgggggccgtgctgcatggcaccgtcctgcggcacgtggccaatccccgcggcgctgtcacgccggagtacaccgtagccaatgtcatctctgtcggctcggggctgctgagcgtttccgtgggacttgtggccctcctggcgtccaggaaccttcttcgccctccactgcactgggtcctgctggcactagctctggtgaacctgctcttgtccgttgcctgctccctgggcctccttcttgctgtgtcactcactgtggccaacggtggccgccgccttattgctgactgccacccaggactgctggatcctctggtaccactggatgaggggccgggacatactgactgcccctttgaccccacaagaatctatgatacagccttggctctctggatcccttctttgctcatgtctgcaggggaggctgctctatctggttactgctgtgtggctgcactcactctacgtggagttgggccctgcaggaaggacggacttcaggggcagctagaggaaatgacagagcttgaatctcctaaatgtaaaaggcaggaaaatgagcagctactggatcaaaatcaagaaatccgggcatcacagagaagttgggtttaggacaggtgctgttccgagactcagtcctaaagggttttttttcccactaagcaaggggccctgacctcgggatgagataacaaattgtaataaagtaacttctcttttcttcta

SEQ ID NO: 145696 - DNA, 373 bp, Homo sapiens
  Payload ID: 8889
  Gene Symbol: KRTCAP3
  Gene Name: keratinocyte associated protein 3
  ENST ID: ENST00000452499
  CDS Start-End: 1-189
gctctatctggttactgctgtgtggctgcactcactctacgtggagttgggccctgcaggaaggacggacttcaggggcagctagaggaaatgacagagcttgaatctcctaaatgtaaaaggcaggaaaatgagcagctactggatcaaaatcaagaaatccgggcatcacagagaagttgggtttaggacaggtagtagctgggtgtgacgcaagagtgaaacagaaagcctggcagccacggtttcctgggattaaagtcaaagcattatgaatatggcactaaagtgactgagctaccagaccaatgatcctgtaaggcagccacagaactaaaaaacaacaattattattaaactgctctggattctc

SEQ ID NO: 145697 - DNA, 665 bp, Homo sapiens
  Payload ID: 8889
  Gene Symbol: KRTCAP3
  Gene Name: keratinocyte associated protein 3
  ENST ID: ENST00000453171
  CDS Start-End: 16-222
ggcgcggcggacgggatgaggcgctgcagtctctgcgctttcgagcgtttccgtgggacttgtggccctcctggcgtccaggaaccttcttcgccctccactgcactgggtcctgctggcactagctctggtgaacctgctcttgtccgttgcctgctccctgggcctccttcttgctgtgtcactcactgtggccaacggtggccgccgccttattgctgactgccacccaggactgctggatcctctggtaccactggatgaggggccgggacatactgactgcccctttgaccccacaagaatctatgatacagccttggctctctggatcccttctttgctcatgtctgcaggggaggctgctctatctggttactgctgtgtggctgcactcactctacgtggagttgggccctgcaggaaggacggacttcaggggcagctagaggaaatgacagagcttgaatctcctaaatgtaaaaggcaggaaaatgagcagctactggatcaaaatcaagaaatccgggcatcacagagaagttgggtttaggacaggtgctgttccgagactcagtcctaaagggttttttttcccactaagcaaggggccctgacctcgggatgagataacaaattgtaataaagtaacttctcttttcttc

SEQ ID NO: 145698 - DNA, 956 bp, Homo sapiens
  Payload ID: 8889
  Gene Symbol: KRTCAP3
  Gene Name: keratinocyte associated protein 3
  Uniprot ID: Q53RY4
  ENST ID: ENST00000543753
  CDS Start-End: 48-770
gggccgggcccaggtacagcggccctgcggctggcgcggcggacgggatgaggcgctgcagtctctgcgctttcgacgccgcccgggggcccaggcggctgatgcgtgtgggcctcgcgctgatcttggtgggccacgtgaacctgctgctgggggccgtgctgcatggcaccgtcctgcggcacgtggccaatccccgcggcgctgtcacgccggagtacaccgtagccaatgtcatctctgtcggctcggggctgctgagcgtttccgtgggacttgtggccctcctggcgtccaggaaccttcttcgccctccactgcactgggtcctgctggcactagctctggtgaacctgctcttgtccgttgcctgctccctgggcctccttcttgctgtgtcactcactgtggccaacggtggccgccgccttattgctgactgccacccaggactgctggatcctctggtaccactggatgaggggccgggacatactgactgcccctttgaccccacaagaatctatgatacagccttggctctctggatcccttctttgctcatgtctgcaggggaggctgctctatctggttactgctgtgtggctgcactcactctacgtggagttgggccctgcaggaaggacggacttcaggggcagctagaggaaatgacagagcttgaatctcctaaatgtaaaaggcaggaaaatgagcagctactggatcaaaatcaagaaatccgggcatcacagagaagttgggtttaggacaggtagtagctgggtgtgacgcaagagtgaaacagaaagcctggcagccacggtttcctgggattaaagtcaaagcattatgaatatggcactaaagtgactgagctaccagaccaatgatcctgtaaggcagccacagaactaaaaaacaacaattattattaaactgctctggattctcaa

SEQ ID NO: 145699 - DNA, 1793 bp, Homo sapiens
  Payload ID: 8890
  Gene Symbol: KDF1
  Gene Name: keratinocyte differentiation factor 1
  Uniprot ID: Q8NAX2
  ENST ID: ENST00000320567
  CDS Start-End: 90-1286
gagcggcgagggggcgggggaggggctgagccggaggcggctcacctggcgggacaggtgcctggctgctacaaaccatgcaatgagccatgccccgccctggacacccccgcccagcatctgggcctccacgcttgggaccgtgggagcggccaacagagctatgtctggagacatatgataaaccacctcagcccccaccaagccgccgcacccgtagaccagaccccaaggaccctggccaccatgggccagagagcattaccttcatctctggctctgctgagccggcccttgagtcccccacctgctgcctgctctggcgaccctgggtgtgggagtggtgccgggctgccttctgcttccgccgctgccgggattgcctccagcgctgtggagcctgtgtgcggggatgcagcccctgcctgtctactgaggactccactgaggggactgctgaagccaactgggccaaggagcacaatggagtgccccccagccctgatcgtgcaccccccagccggcgggatggccagcggctcaagtcaaccatgggcagcagcttcagctaccccgatgttaagctcaaaggcatccctgtgtatccctacccgagggccacctccccagcccctgatgcggactcctgctgcaaggagccactggccgatcccccacccatgcgacacagcctgcccagcacctttgccagtagtcctcgtggctccgaggagtactattctttccatgagtcggacctggacctgccggagatgggcagtggctccatgtcgagccgagaaattgatgtgctcatcttcaagaagctgacagagctgttcagcgtacaccagatcgatgagctggccaagtgcacatcagacactgtgttcctggagaagaccagtaagatctcggaccttatcagcagcatcacgcaggactaccacctggatgagcaggatgctgagggccgcctggtacgcggcatcattcgcattagtacccgaaagagccgtgctcgcccacagacctcggagggtcgttcaactcgggctgctgccccaaccgctgctgcccctgacagtggccatgagaccatggtgggctcaggtctcagccaggatgagctgacagtgcagatctcccaggagacgactgcagatgccatcgcccggaagctgaggccttatggagctccagggtacccagcaagccatgactcatccttccagggcaccgacacagactcgtcgggggcacccttgctccaggtgtactgctaacccctgccaggcccagctgccacaccctttctgggagaagcatggcctacagaatgaagagggggaccaggaacccctgtgggagaggcttagacctgaagcagtgcccactctggctcctcctgccttggctgactgggttcctggaccatgtgcatttcactgggccatgggatctacatctccttgcatccccagctggtctgatccctgccagggccccttccttcctgctcatggtcttcaggtggcctgatcatggaaagtaaggagttaggcattaccttctgggagtgaaccctgactccatccccctattgccaccctaaccaatcatgcaaacttctccctccctggggtaattcaacagttaaaagaagcttatcttaaatgtattgtattggggggtgggcagggcccactctatgttatgttaaggagttggttctggttcttggctgatgttctgtatcttaacatgaccacagtttgtaagtacaaaggtaa

SEQ ID NO: 145700 - DNA, 1651 bp, Homo sapiens
  Payload ID: 8890
  Gene Symbol: KDF1
  Gene Name: keratinocyte differentiation factor 1
  ENST ID: ENST00000616918
  CDS Start-End: 69-692
ggggctgagccggaggcggctcacctggcgggacaggtgcctggctgctacaaaccatgcaatgagccatgccccgccctggacacccccgcccagcatctgggcctccacgcttgggaccgtgggagcggccaacagagctatgtctggagacatatgataaaccacctcagcccccaccaagccgccgcacccgtagaccagaccccaaggaccctggccaccatgggccagagagcattaccttcatctctggctctgctgagccggcccttgagtcccccacctgtctactgaggactccactgaggggactgctgaagccaactgggccaaggagcacaatggagtgccccccagccctgatcgtgcaccccccagccggcgggatggccagcggctcaagtcaaccatgggcagcagcttcagctaccccgatgttaagctcaaaggcatccctgtgtatccctacccgagggccacctccccagcccctgatgcggactcctgctgcaaggagccactggccgatcccccacccatgcgacacagcctgcccagcacctttgccagtagtcctcgtggctccgaggagtactattctttccatgagtcggacctggacctgccggagatgggcagtggctccatgtcgagccgagaaattgatgtgctcatcttcaagaagctgacagagctgttcagcgtacaccagatcgatgagctggccaagtgcacatcagacactgtgttcctggagaagaccagtaagatctcggaccttatcagcagcatcacgcaggactaccacctggatgagcaggatgctgagggccgcctggtacgcggcatcattcgcattagtacccgaaagagccgtgctcgcccacagacctcggagggtcgttcaactcgggctgctgccccaaccgctgctgcccctgacagtggccatgagaccatggtgggctcaggtctcagccaggatgagctgacagtgcagatctcccaggagacgactgcagatgccatcgcccggaagctgaggccttatggagctccagggtacccagcaagccatgactcatccttccagggcaccgacacagactcgtcgggggcacccttgctccaggtgtactgctaacccctgccaggcccagctgccacaccctttctgggagaagcatggcctacagaatgaagagggggaccaggaacccctgtgggagaggcttagacctgaagcagtgcccactctggctcctcctgccttggctgactgggttcctggaccatgtgcatttcactgggccatgggatctacatctccttgcatccccagctggtctgatccctgccagggccccttccttcctgctcatggtcttcaggtggcctgatcatggaaagtaaggagttaggcattaccttctgggagtgaaccctgactccatccccctattgccaccctaaccaatcatgcaaacttctccctccctggggtaattcaacagttaaaagaagcttatcttaaatgtattgtattggggggtgggcagggcccactctatgttatgttaaggagttggttctggttcttggctgatgttctgtatcttaacatgaccacagtttgtaagtacaaagg

SEQ ID NO: 145701 - DNA, 491 bp, Homo sapiens
  Payload ID: 8891
  Gene Symbol: KRTDAP
  Gene Name: keratinocyte differentiation-associated protein
  Uniprot ID: P60985
  ENST ID: ENST00000338897
  CDS Start-End: 90-389
gggaccccatttctgtgctcatctgcctccttggcaatataaagagcaagcactgaggccccgcctcagagcaccccaaacttgacgccatgaagatcccggtccttcctgccgtggtgctcctctccctcctggtgctccactctgcccagggagccaccctgggtggtcctgaggaagaaagcaccattgagaattatgcgtcacgacccgaggcctttaacaccccgttcctgaacatcgacaaattgcgatctgcgtttaaggctgatgagttcctgaactggcacgccctctttgagtctatcaaaaggaaacttcctttcctcaactgggatgcctttcctaagctgaaaggactgaggagcgcaactcctgatgcccagtgaccatgacctccactggaagagggggctagcgtgagcgctgattctcaacctaccataactctttcctgcctcaggaactccaataaaacattttccatccaa

SEQ ID NO: 145702 - DNA, 451 bp, Homo sapiens
  Payload ID: 8891
  Gene Symbol: KRTDAP
  Gene Name: keratinocyte differentiation-associated protein
  Uniprot ID: P60985
  ENST ID: ENST00000484218
  CDS Start-End: 90-347
gggaccccatttctgtgctcatctgcctccttggcaatataaagagcaagcactgaggccccgcctcagagcaccccaaacttgacgccatgaagatcccggtccttcctgccgtggtgctcctctccctcctggtgctccactctgcccagggagccaccctgggtggtcctgaggaagaaagcaccattgagaattatgcgtcacgacccgaggcgtttaaggctgatgagttcctgaactggcacgccctctttgagtctatcaaaaggaaacttcctttcctcaactgggatgcctttcctaagctgaaaggactgaggagcgcaactcctgatgcccagtgaccatgacctccactggaagagggggctagcgtgagcgctgattctcaacctaccataactctttcctgcctcaggaactccaataaaacattttccatccaaca

SEQ ID NO: 145703 - DNA, 2492 bp, Homo sapiens
  Payload ID: 8892
  Gene Symbol: KPRP
  Gene Name: keratinocyte proline-rich protein
  Uniprot ID: Q5T749
  ENST ID: ENST00000606109
  CDS Start-End: 29-1768
gtcactcttgactggctgcatcaggaccatgtgtgaccagcagcagatccagtgccgcctgccgctccaacagtgctgcgtcaagggtccctccttctgctcctctcaatccccctttgcccagagccaagtggtggttcaagccccttgtgagatgcaaattgtggactgccctgcatcatgcccagttcaagtttgccaggtgtcagaccaggctccatgccagtctcagaccacacaggtgaagtgccagtctaagaccaagcaggtgaagggccaggctcaatgtcagtctaagaccacccaggtgaagggccaggctgcatcccaatctcaaacttcctctgttcaaagccaggctccatgccaatctgaggtgtcctacgtgcagtgcgaagcgtcacaacctgttcagacttgcttcgtagaatgtgctccagtttgttatacagaaacttgttatgtagaatgcccagtccagaactatgtaccctgtccagctcctcagcctgtccagatgtatagagggcgtcctgcagtgtgccagcctcagggaagattctccacccagtgccagtatcaaggctcctatagcagttgtggcccccagtttcagtcaagggctacctgcaacaactacaccccccagttccagttgaggccttcctacagcagctgtttccctcagtatcggtcccggacttcatttagtccctgtgtgccccagtgccagacccagggctcctatgggagcttcactgaacagcaccgctctcggagcaccagcagatgccttcctcctcctcggcggctgcagcttttcccccgcagctgttccccaccaagacgttttgagccctgctccagcagctacctgccactaagaccctctgaaggtttccctaactactgcaccccaccccgccgctctgaacccatatataacagtcgctgtcctcgccgccccatttcaagctgctctcagagacgtggccccaagtgccgaatcgagatttcctccccgtgctgccccaggcaggttcccccacagaggtgtcctgttgagattcctcccatcagacgccgctcccagagctgtggcccgcagccctcctggggcgcctcctgccctgagctgaggccacacgtagagccacgtccactcccaagcttctgtccaccacggcgtcttgaccagtgtccagagtcaccactgcagcgatgtccacctcctgctccacgtccacgtctgcgcccagaaccatgcataagtctagaaccacgcccgcgtcctctaccacgacaactttcagaaccttgtttgtatccagaaccacttccagcactacgtccaacaccgcggccagttccccttcctcgcccagggcagtgtgagattccagagccacgtccatgcctgcagccctgtgagcacccagagccttgtccacgaccagagccaattcccctgccggcgccctgcccaagcccggagccctgcagggagacttggcgcagccccagcccatgctggggcccaaatccagttccatacccaggagacctaggctgtcatgagtctagtccacaccgcctagacaccgaagctccctactgtggcccatccagttacaaccaggggcaagagagtggtgctggctgtgggcctggtgatgtgtttccagagcggaggggtcaggatggccatggagaccaaggcaatgcctttgctggagtgaaaggggaagcaaagagtgcttatttttaaaggaaaggtgactgagataaccctctctcctgctctgaaaatgttgttcctcctattccacaatttccagtacgctcttgtttgaatctctccaaagatattcagagactccctattacgaaggtgatgtccaaactcctttgcctatcatccaaagatccacacctgggtctcagatgcctctccagcctcacgtgtcactcctcgcccgtacgcatcctcggctctagccagaccagtctggccactgggcacagcttgggtgttccccaggccatactttagatgtccctgcctccaagcctctgctcactcttccccactctgcctggaccacttctctcctcctccccagcttctgaaatccaccccatctttcagtgcctctcccttggagccttctttgcttgttcccactcacaagaacctgtgccgacttcctagaactcactgcatcccccgcactacttggtaactgcctggtgacatctcttgaattgttatttcactttgcaggcatgtcttccttatctgcccaactaggttgtaaactcccaactgagtggagtcggagaatctctaaatctcagtgtctatcctggggctggctgttgcttagcaaggcttgtgggttggcagcttgaaccatgttctgtcctgatgctcaactgcaggaactgaggtgagaggaggccatgtgacaataaagatcattatgtactca

SEQ ID NO: 145704 - DNA, 2162 bp, Homo sapiens
  Payload ID: 8893
  Gene Symbol: KERA
  Gene Name: keratocan
  Uniprot ID: O60938
  ENST ID: ENST00000266719
  CDS Start-End: 249-1307
gaagaagatccaagaaggctgaggtaagcagtcttctgaagccctgtcaaagtggaaacaatagatcaaaggtgttcatggtgactgggacgagtaggtttcactgtttctcatagacgacttgacagcttaaagtaaaaacaaattattttcgtcaaagtttttttttttctcttaactgatttttagcaaacctcagactgagacacaggactcaacggtgtattcctggaaggcaaggtgctataatggcaggcacaatctgtttcatcatgtgggtgttattcataacagacactgtgtggtctagaagtgtgaggcaggtctatgaagtacatgattcagatgattggactattcatgacttcgagtgtcccatggaatgtttctgcccacccagttttcctactgctttatattgtgaaaatagaggtctcaaagaaattcctgctattccttcaagaatttggtatctttatcttcaaaacaacctgatagaaaccattcctgaaaagccatttgagaatgccacccagctaagatggataaatctaaacaagaacaaaataaccaactacggaattgaaaaaggagccctaagccagctgaagaagttgctcttcttatttctggaagataatgagctagaggaggtaccttctccattgccaagaagtttagaacaattacaattagctagaaataaggtgtccagaattcctcaagggacctttagcaatctggagaacctgacccttcttgacctacagaacaacaaattagtggacaatgcctttcaaagagacacttttaaaggactcaagaatctcatgcagctaaacatggccaagaatgccctgaggaatatgcctccaagattaccagccaatacaatgcagttgtttttagacaacaattccattgaaggaataccagaaaattattttaatgtgattcctaaagtggcctttttgagactaaatcacaacaaactgtcagatgagggtctcccatcaagaggatttgatgtatcatcaattctagatcttcaactgtcgcacaatcaactcacaaaggttccccgaatcagtgctcatctgcagcaccttcaccttgatcataacaaaattaaaagtgtgaatgtctctgtaatatgtcccagcccatccatgctgcctgcagaacgagattccttcagttatggacctcatcttcgctacctccgtctggatggaaatgaaatcaaaccaccaattccaatggctttaatgacctgcttcagacttctgcaggctgtcattatttaaacacattctcaccaaatctaaaattagtttaatgagctgtttctgacatgaaatgtggttaccattaataggtttaggacacaagtcatattccccattgctctcggccaccattttcatttgtgcagtgtattttttctattcaaagatgcttttgccagttacatgcatcacagcctgcattaatttgcttttcttttaattaataaaacagacacagagttaagatagtttatcaactcaaagatagttttattttggtctcttccatagcttattaacactaaagaaaacaattacattcttatacaataaaaaggacacatttgtgtatgtttaaaattacttatgcagataccgtaatttacagtataaatgtaataatcaaacaggaggataacgacctgaagaaaatgagaaaataaaatatttcttaattgtaatcataataaaacaattgcagattgctaagtagctgttggtggtacaagtttgatatttagcttgagaatgggtatggaatgaatcaaatacttcatcactaaagaattcttgttatttaatatcaaataatgaaacagcagtcacttctagttcattaccatttcttgtagctgttgtttttagatatagtccactgcattcttataagttctaaattttatgtttattataatgcatttcttgtggaatcttagtgttttaacatttgaaatccacttaaactgcaaattgttctttatatttgattgtgttttttggattttctaaataaaaatattgaatgctttctaacaaaacagaatatttcaaagaaattagcaagcttcattaaagaacatgttttaataaaaa

SEQ ID NO: 145705 - DNA, 2397 bp, Homo sapiens
  Payload ID: 8894
  Gene Symbol: KHK
  Gene Name: ketohexokinase (fructokinase)
  Uniprot ID: P50053
  ENST ID: ENST00000260598
  CDS Start-End: 479-1375
gcagatgcgaggcccagctgtacctcgcgtgtcccgggtcgggagtcggagacgcaggtgcaggagagtgcggggcaagtagcgcattttctctttgcattctcgagatcgcttagccgcgctttaaaaaggtttgcatcagctgtgagtccatctgacaagcgaggaaactaaggctgagaagtgggaggcgttgccatctgcaggcccaggcaacctgctacgggaagaccggggaccaagacctctgggttggctttcctagacccgctcgggtcttcgggtgtcgcgaggaagggccctgctcctttcgttccctgcacccctggccgctgcaggtggctccctggaggaggagctcccacgcggaggaggagccagggcagctgggagcggggacaccatcctcctggataagaggcagaggccgggaggaaccccgtcagccgggcgggcaggaagctctgggagtagcctcatggaagagaagcagatcctgtgcgtggggctagtggtgctggacgtcatcagcctggtggacaagtaccctaaggaggactcggagataaggtgtttgtcccagagatggcagcgcggaggcaacgcgtccaactcctgcaccgttctctccctgctcggagccccctgtgccttcatgggctcaatggctcctggccatgttgctgacttcctggtggccgacttcaggcggcggggcgtggacgtgtctcaggtggcctggcagagcaagggggacacccccagctcctgctgcatcatcaacaactccaatggcaaccgtaccattgtgctccatgacacgagcctgccagatgtgtctgctacagactttgagaaggttgatctgacccagttcaagtggatccacattgagggccggaacgcatcggagcaggtgaagatgctgcagcggatagacgcacacaacaccaggcagcctccagagcagaagatccgggtgtccgtggaggtggagaagccacgagaggagctcttccagctgtttggctacggagacgtggtgtttgtcagcaaagatgtggccaagcacttggggttccagtcagcagaggaagccttgaggggcttgtatggtcgtgtgaggaaaggggctgtgcttgtctgtgcctgggctgaggagggcgccgacgccctgggccctgatggcaaattgctccactcggatgctttcccgccaccccgcgtggtggatacactgggagctggagacaccttcaatgcctccgtcatcttcagcctctcccaggggaggagcgtgcaggaagcactgagattcgggtgccaggtggccggcaagaagtgtggcctgcagggctttgatggcatcgtgtgagagcaggtgccggctcctcacacaccatggagactaccattgcggctgcatcgccttctcccctccatccagcctggcgtccaggttgccctgttcaggggacagatgcaagctgtggggaggactctgcctgtgtcctgtgttccccacagggagaggctctggggggatggctgggggatgcagagcctcagagcaaataaatcttcctcagagccagcttctcctctcaatgtctgaactgctctggctgggcattcctgaggctctgactcttcgatcctccctctttgtgtccattccccaaattaacctctccgcccaggcccagaggaggggctgcctgggctagagcagcgagaagtgccctgggcttgccaccagctctgccctggctggggaggacactcggtgccccacacccagtgaacctgccaaagaaaccgtgagagctcttcggggccctgcgttgtgcagactctattcccacagctcagaagctgggagtccacaccgctgagctgaactgacaggccagtggggggcaggggtgcgcctcctctgccctgcccaccagcctgtgatttgatggggtcttcattgtccagaaatacctcctcccgctgactgccccagagcctgaaagtctcacccttggagcccaccttggaattaagggcgtgcctcagccacaaatgtgacccaggatacagagtgttgctgtcctcagggaggtccgatctggaacacatattggaattggggccaactccaatatagggtgggtaaggccttataatgtaaagagcatataatgtaaagggctttagagtgagacagacctggattaaaatctgccatttaattagctgcatatcaccttagggtacagcacttaacgcaatctgcctcaatttcttcatctgtcaaatggaaccaattctgcttggctacagaattattgtgaggataaaatcatatataaaatgcccagcatgatgcctgatgtgtacaaggctctc

SEQ ID NO: 145706 - DNA, 2411 bp, Homo sapiens
  Payload ID: 8894
  Gene Symbol: KHK
  Gene Name: ketohexokinase (fructokinase)
  Uniprot ID: P50053
  ENST ID: ENST00000260599
  CDS Start-End: 514-1410
cggggccgccgcgaccgcgggcttcaggcagggctgcagatgcgaggcccagctgtacctcgcgtgtcccgggtcgggagtcggagacgcaggtgcaggagagtgcggggcaagtagcgcattttctctttgcattctcgagatcgcttagccgcgctttaaaaaggtttgcatcagctgtgagtccatctgacaagcgaggaaactaaggctgagaagtgggaggcgttgccatctgcaggcccaggcaacctgctacgggaagaccggggaccaagacctctgggttggctttcctagacccgctcgggtcttcgggtgtcgcgaggaagggccctgctcctttcgttccctgcacccctggccgctgcaggtggctccctggaggaggagctcccacgcggaggaggagccagggcagctgggagcggggacaccatcctcctggataagaggcagaggccgggaggaaccccgtcagccgggcgggcaggaagctctgggagtagcctcatggaagagaagcagatcctgtgcgtggggctagtggtgctggacgtcatcagcctggtggacaagtaccctaaggaggactcggagataaggtgtttgtcccagagatggcagcgcggaggcaacgcgtccaactcctgcaccgttctctccctgctcggagccccctgtgccttcatgggctcaatggctcctggccatgttgctgattttgtcctggatgacctccgccgctattctgtggacctacgctacacagtctttcagaccacaggctccgtccccatcgccacggtcatcatcaacgaggccagtggtagccgcaccatcctatactatgacaggagcctgccagatgtgtctgctacagactttgagaaggttgatctgacccagttcaagtggatccacattgagggccggaacgcatcggagcaggtgaagatgctgcagcggatagacgcacacaacaccaggcagcctccagagcagaagatccgggtgtccgtggaggtggagaagccacgagaggagctcttccagctgtttggctacggagacgtggtgtttgtcagcaaagatgtggccaagcacttggggttccagtcagcagaggaagccttgaggggcttgtatggtcgtgtgaggaaaggggctgtgcttgtctgtgcctgggctgaggagggcgccgacgccctgggccctgatggcaaattgctccactcggatgctttcccgccaccccgcgtggtggatacactgggagctggagacaccttcaatgcctccgtcatcttcagcctctcccaggggaggagcgtgcaggaagcactgagattcgggtgccaggtggccggcaagaagtgtggcctgcagggctttgatggcatcgtgtgagagcaggtgccggctcctcacacaccatggagactaccattgcggctgcatcgccttctcccctccatccagcctggcgtccaggttgccctgttcaggggacagatgcaagctgtggggaggactctgcctgtgtcctgtgttccccacagggagaggctctggggggatggctgggggatgcagagcctcagagcaaataaatcttcctcagagccagcttctcctctcaatgtctgaactgctctggctgggcattcctgaggctctgactcttcgatcctccctctttgtgtccattccccaaattaacctctccgcccaggcccagaggaggggctgcctgggctagagcagcgagaagtgccctgggcttgccaccagctctgccctggctggggaggacactcggtgccccacacccagtgaacctgccaaagaaaccgtgagagctcttcggggccctgcgttgtgcagactctattcccacagctcagaagctgggagtccacaccgctgagctgaactgacaggccagtggggggcaggggtgcgcctcctctgccctgcccaccagcctgtgatttgatggggtcttcattgtccagaaatacctcctcccgctgactgccccagagcctgaaagtctcacccttggagcccaccttggaattaagggcgtgcctcagccacaaatgtgacccaggatacagagtgttgctgtcctcagggaggtccgatctggaacacatattggaattggggccaactccaatatagggtgggtaaggccttataatgtaaagagcatataatgtaaagggctttagagtgagacagacctggattaaaatctgccatttaattagctgcatatcaccttagggtacagcacttaacgcaatctgcctcaatttcttcatctgtcaaatggaaccaattctgcttggctacagaattattgtgaggataaaatcatatataaaatgcccagcatgatg

SEQ ID NO: 145707 - DNA, 1303 bp, Homo sapiens
  Payload ID: 8894
  Gene Symbol: KHK
  Gene Name: ketohexokinase (fructokinase)
  ENST ID: ENST00000429697
  CDS Start-End: 467-1303
cccagctgtacctcgcgtgtcccgggtcgggagtcggagacgcaggtgcaggagagtgcggggcaagtagcgcattttctctttgcattctcgagatcgcttagccgcgctttaaaaaggtttgcatcagctgtgagtccatctgacaagcgaggaaactaaggctgagaagtgggaggcgttgccatctgcaggcccaggcaacctgctacgggaagaccggggaccaagacctctgggttggctttcctagacccgctcgggtcttcgggtgtcgcgaggaagggccctgctcctttcgttccctgcacccctggccgctgcaggtggctccctggaggaggagctcccacgcggaggaggagccagggcagctgggagcggggacaccatcctcctggataagaggcagaggccgggaggaaccccgtcagccgggcgggcaggaagctctgggagtagcctcatggaagagaagcagatcctgtgcgtggggctagtggtgctggacgtcatcagcctggtggacaagtaccctaaggaggactcggagataaggtgtttgtcccagagatggcagcgcggaggcaacgcgtccaactcctgcaccgttctctccctgctcggagccccctgtgccttcatgggctcaatggctcctggccatgttgctgattttgtcctggatgacctccgccgctattctgtggacctacgctacacagtctttcagaccacaggctccgtccccatcgccacggtcatcatcaacgaggccagtggtagccgcaccatcctatactatgacagcttcctggtggccgacttcaggcggcggggcgtggacgtgtctcaggtggcctggcagagcaagggggacacccccagctcctgctgcatcatcaacaactccaatggcaaccgtaccattgtgctccatgacacgagcctgccagatgtgtctgctacagactttgagaaggttgatctgacccagttcaagtggatccacattgagggccggaacgcatcggagcaggtgaagatgctgcagcggatagacgcacacaacaccaggcagcctccagagcagaagatccgggtgtccgtggaggtggagaagccacgagaggagctcttccagctgtttggctacggagacgtggtgtttgtcagcaaagatgtggccaagcacttggggttccagtcagcagaggaagccttgaggggcttgtatggtcgtgtgaggaaaggggctgtgcttgtctgtgcctgggctgaggagggcgccgacgccctgggc

SEQ ID NO: 145708 - DNA, 6725 bp, Homo sapiens
  Payload ID: 8895
  Gene Symbol: KHNYN
  Gene Name: KH and NYN domain containing
  Uniprot ID: O15037
  ENST ID: ENST00000251343
  CDS Start-End: 140-2176
gggagagaaaggagggatgaagccgcctgcccactggacgggagggctgcagccagagcttcagggcagccctgctggatgggacagcactgagggctggacctggggggatggagaacatgggctgggggcagcagccatgcctacctggggggcccgccccgcgtccccagatcgctttgcggtgtctgcggaggctgagaacaaggttcgggaacagcagccccatgtggagcgcatcttcagcgtgggggtgagcgtccttccgaaggactgtccggacaacccccacatctggctgcagctggagggccccaaggaaaacgccagcagagccaaggagtacctgaagggcctctgcagcccagaactgcaggatgaaatccactacccgcccaaactgcactgcatctttctgggagcccagggcttcttccttgactgcctggcctggagcacgtcagcccatctggtgcccagggcgccaggctcactgatgatcagtggcctgactgaagcctttgtcatggctcagagccgggtagaagagctggcagagcggctgagctgggacttcacgccaggaccatcttccggagcctctcagtgtactggagtgctgagagacttctctgccctgctgcagtccccgggggatgcccatagagaggctctgttgcagttgcccctggctgtccaggaggagctgctgagtctggtgcaggaggcgtctagtgggcaggggccaggagcactggcttcttgggaggggcggagctcagccttgctgggtgctcagtgccaaggagtgagagctccccctagtgacggcagggagtccctggacactggatctatgggacccggagattgcaggggagcaaggggagacacttacgctgtggagaaggagggagggaaacagggtggtcccagggagatggattgggggtggaaggagttgcctggggaagaggcgtgggagagagaagtggccctcaggccacagtcagtgggtggaggggcaagggagtcagcacccctgaaagggaaggccctggggaaggaggagatagctctgggaggaggagggttctgtgtccaccgtgagcctcccggtgcccatggctcctgtcacagggcagctcagtcccgaggagcctccctcctccagcggctccacaatgggaatgcctctcctccgagggtgcccagccctccacctgcaccggaacccccatggcactgtggagaccggggtgactgcggagaccggggagacgtgggggacaggggagacaagcagcagggcatggcacggggtcgggggcctcaatggaaacgaggcgcccgagggggcaacttggtgactggcacacagcgtttcaaggaggccctgcaggatcctttcaccctgtgccttgccaatgtgcctggccagccagacctccgccatattgtcattgacggcagcaacgtggccatggtgcatggcctccagcactacttctccagccggggcattgccattgctgtgcagtacttctgggaccgtggtcaccgtgacataactgtctttgtgcctcagtggcgcttcagtaaggatgccaaagtcagagagagtcacttcctgcaaaagctgtattccctcagcctgctctccctcacaccctcacgagtcatggatggcaagaggatctcctcctatgatgacaggttcatggtgaagctggctgaagagacagatgggataattgtctccaatgaccagttccgggacctggcggaggagtctgagaagtggatggcaatcatcagagaacgcctgctgccctttacctttgtgggaaacctcttcatggtacctgatgacccactggggcgaaacggccccaccctggatgaatttctgaagaagccagccaggacacaggggtcttctaaggctcagcatccttccaggggctttgcagaacatggtaaacagcagcaggggagagaagaggaaaaaggtagtggtggcattcggaagacccgggaaacagagcggctccggcggcagctgctggaggtgttttggggtcaggatcacaaagtggacttcatcctgcagcgggagccatactgccgggacatcaaccaactgtctgaggccctgctcagtcttaacttttgagcctcacctgcttgagtggctgccgccctgtcagctccagccgcctccagctcagccctttctgtgagagtccctctgctgctcactctgatccagaggcaccctgagttggtgctttggatcagggaagccactttgggacaggtccataaagtgaactgatcttaccgagtcaggacctcagccagctctcaagaggttctgctcagccttaacttctcaactttgccttagcacagggtttctgtagggagtgggggctgctagaggggattagttccggagactgagactgttggctccacctccaagctgagctagggtggagggcagggtgggcaggaagtgacaggaagttaagctgttcctctccctggctgctgctctggatggccagagaacaagatgctcccttgctgagctcctgggagcgtggaaggagatgctaggccctggcacagtgttatgtggactgggccacgatagggtggagtgagctagtgaagaaggcagagggagacttggcttctggtctcagctatgcctgttttgtgaccttgattgagttgcttgggctttacttctgcctacaaatcaggggtaaaaatacctgttgggaggagaaatgagaacatagaggaaagcctcttggaggaaaggtgcttggaccaagtctcaggtgtgtctgcctgtggctgcacaggctctctaaccgaaacctcactttcagagagatgtgggtcctttgtctccaggatccacaccctagattttaacactgcattctcactataacgtgccctataatggctgcatcccttttgagcaacctccaaaatctacatttacacagtaggtaaattagggatgactgcattatcaaaatactctcagggttcctataaatggcagctctcctgttgtattcaggtgttgtttacagactaacaaatgtgttggcaaatccctggttagatgcacttcctggtgttgagatgaacacgtcgatttttcaccaatcgatgaagccatgctctgcaatgacaatattaatgtgatccgaccctaacattttctctatggaagacgtatgttgcataaagcaaggcacacttctgctttatgtgtgtgtgtatggggatgggaggacttaacggaagttgaaccagttggttctagatgaaccaattatctggaaaatgaaagaaccagagttggaaggcacttgactggccaccagaccaactctgctgttactgacatgctttcttcaccctgattcctagaggtcattgccctggatctgcttgaagtcctcctgtgccagggaatttactatctccagggtagcacattccctgtgtagacggtattaatcagtactccttactttagtgcagcctaaagtatgcttttctgttacatccacctttgaggctggtcatacctccaggaacaatacagagccagtcaacttcctggaatccaagaccagataaagaagtaggacaggtgcccctgggttctgttctgtgtgggcctgtggggagtctctagacaagatcttttccaggccctgacttctgcctccctctgagtggcacagggagttgaatactgcatggcgagtgtaatgatgatggggagggtccttgtgtcctcaccccttcctttttggtgatttacaccactgtaccatactgacccaggctgggggcaggtgtgttggagacaggctggtcaaagaggtgacaatgattaagagataacccagcggtccctgagaagagattggttagtatggcctgaactggtggctgggggaactgtgtctggtcaagttatggcagatgtcacagctttaggtaggtaaaaagggtcctagatgaaaaccttggagtttttttttttcctgatagggttgtttatacttcttgattggtttcttgccattttcactttcagtgatggtgggtgtgcagtagaccaaaagtgtcttctgcccttttgtgctaagggccctggttgactgagtggccccagtcagatgagaggcaagtcctaagcttcttatagacagggatgttgactttgttctgctgcagcctgataaactgggaccactgtgtggttagtaatgcacttgccatttggtgacacagactgaaggctatcctacacctgggccttacctcttcctctactggcatcctaatggcactctgacagcatccagggtgactacagggcccattggaaatggatcatcattctctcttctagtgtctatctttatcataacctgatgtcccaaacttgtgacaagttcttttggcaactgaaggaccaagaagggaaacggtgatgagagagactgctcattgtaactttcaaaaccccgtctttggggaagaatcatctagggtgacattccttgaagtaaatcccaggagaatctaggccaaagagatgagccaaggttagtgagacaatttatttttattgcctaaactgcagagcattctctacacagcgtaaaggagaagtggggcagctgcaggacatgtagagaaaccaaactgggaaatcttacaaggagttgaaaagattaatgtcccaacctgatgagattacggccttgagacaataaggtggagcaacagaacaatgggaaagaggactgggagaggaatctaagaaccagatggcttcagctctctagaggagctgagcctattcacagtgcctaacctggaagcctgtgaggaacaggcctcaggcccttgccacgacctacttaggctacaatttcctttaaggcagcccctagctctgggaaggaatactggtagccagtggccagtgttcgctgtgggatcaccttctggccctccagcagcatgatggcacgctgtcgcccaaagacagcttgcaccacagcgctggggagagggatgaaggctcggcggcccagggcagcacccaaggtctgggcaaactcagcattagtggcggaggatggagccactccattcaggaccccgtgcacgtggtttgcttcaagggcatgggtcaggattcctgccaggtccccgatgtgtatccaggggaagaattggtggcctgagccgatggggccccccaggcccaggcgaaagggcagcagcatgtggcccatggcaccacccccacggcccagcacaacccctagagcaggaaagagggaaggtacaggggtcctctcagccttgaaggagcccactgctcctcctggtttctgtttccccttcctcactctccccatgctgacttggctctgtaacagaagtgagcagtatggctgtctttaagacctcacaccttctcatctgcaggttggctagaagtggtggcatcctctcactctgtaattgtaatctcagctctcctaatcccatcacttccccagcccagagaagacattccaaccctgtctgatacccaggcccgtttctcacctgagcgcaccaccacctggcgtgtagaatctccaggaagcctggctgcagcttcccatttggttacgaggttggagaaaaagtcaaagtcccctcctgggctgtcttcatcatactccgcagtcagactgggctggtagtaagctgccggtggaacacaatcatttgccctgggtgtccttggtcctgcctggctctctgtagtggaggctccccttggcctcaccttctctggcccttaggatctccccatttggagacagagccatttggatattttccccttgaacttctccatgacctgaagcgttccttccctggaggaactctggttgcagggctaaacttagaggctgctagagtgtagtggttaagaacaggaacttgggtaccaggcgcctgaattttaatcagctccctcatttattaactctctgacttgatgcaagttacttaacctctctgtatagaattttcacatctttaaaatgggaataatagtacctacctcatagggttgttgtaaggaataaatgataataagcataaaacacttcaaatagtggctggtgtgtataattgtttgcaattacttggtcccaaaggtgaccaggaactctgttcctaaagaactatggtgtgagaagtaagggactttgggataggtggacttttccctggcattgagtgatgccactccccactgttttttcagggtctcaatttcttagtgaaagtacacaaaggttaggagaaacatgcatggatcaagggcctaggaagtcattttgcctggaaaagaccagtgctctggtgtgtgcatagctacagaggtctgagttaccccgttcccctggcgaatataaggggctggtgatttggggggcgtacctacacctgtgactaagacccaggccttggggggttgtggggctttggtgatggctttagccagcaattgggtggtctctaggcggctgccgattacctctttttggaaggtttcattccatctgcaggagaaacatgggaaataaaaagccactaaatac

SEQ ID NO: 145709 - DNA, 3359 bp, Homo sapiens
  Payload ID: 8895
  Gene Symbol: KHNYN
  Gene Name: KH and NYN domain containing
  Uniprot ID: O15037
  ENST ID: ENST00000553935
  CDS Start-End: 200-2236
aagtgactcaagaaacagtttgcgtgcgatgtggacaagagaggtccccgctgggtgaggaacccgggaaggcccgcccagattcgggccccctgcccttgtcccctgggctgggggcgcgggcaaagcgggggcctggcgggcgctgagaggacctgaagccggcgcgggcggcggaggcgggctgggggcagcagccatgcctacctggggggcccgccccgcgtccccagatcgctttgcggtgtctgcggaggctgagaacaaggttcgggaacagcagccccatgtggagcgcatcttcagcgtgggggtgagcgtccttccgaaggactgtccggacaacccccacatctggctgcagctggagggccccaaggaaaacgccagcagagccaaggagtacctgaagggcctctgcagcccagaactgcaggatgaaatccactacccgcccaaactgcactgcatctttctgggagcccagggcttcttccttgactgcctggcctggagcacgtcagcccatctggtgcccagggcgccaggctcactgatgatcagtggcctgactgaagcctttgtcatggctcagagccgggtagaagagctggcagagcggctgagctgggacttcacgccaggaccatcttccggagcctctcagtgtactggagtgctgagagacttctctgccctgctgcagtccccgggggatgcccatagagaggctctgttgcagttgcccctggctgtccaggaggagctgctgagtctggtgcaggaggcgtctagtgggcaggggccaggagcactggcttcttgggaggggcggagctcagccttgctgggtgctcagtgccaaggagtgagagctccccctagtgacggcagggagtccctggacactggatctatgggacccggagattgcaggggagcaaggggagacacttacgctgtggagaaggagggagggaaacagggtggtcccagggagatggattgggggtggaaggagttgcctggggaagaggcgtgggagagagaagtggccctcaggccacagtcagtgggtggaggggcaagggagtcagcacccctgaaagggaaggccctggggaaggaggagatagctctgggaggaggagggttctgtgtccaccgtgagcctcccggtgcccatggctcctgtcacagggcagctcagtcccgaggagcctccctcctccagcggctccacaatgggaatgcctctcctccgagggtgcccagccctccacctgcaccggaacccccatggcactgtggagaccggggtgactgcggagaccggggagacgtgggggacaggggagacaagcagcagggcatggcacggggtcgggggcctcaatggaaacgaggcgcccgagggggcaacttggtgactggcacacagcgtttcaaggaggccctgcaggatcctttcaccctgtgccttgccaatgtgcctggccagccagacctccgccatattgtcattgacggcagcaacgtggccatggtgcatggcctccagcactacttctccagccggggcattgccattgctgtgcagtacttctgggaccgtggtcaccgtgacataactgtctttgtgcctcagtggcgcttcagtaaggatgccaaagtcagagagagtcacttcctgcaaaagctgtattccctcagcctgctctccctcacaccctcacgagtcatggatggcaagaggatctcctcctatgatgacaggttcatggtgaagctggctgaagagacagatgggataattgtctccaatgaccagttccgggacctggcggaggagtctgagaagtggatggcaatcatcagagaacgcctgctgccctttacctttgtgggaaacctcttcatggtacctgatgacccactggggcgaaacggccccaccctggatgaatttctgaagaagccagccaggacacaggggtcttctaaggctcagcatccttccaggggctttgcagaacatggtaaacagcagcaggggagagaagaggaaaaaggtagtggtggcattcggaagacccgggaaacagagcggctccggcggcagctgctggaggtgttttggggtcaggatcacaaagtggacttcatcctgcagcgggagccatactgccgggacatcaaccaactgtctgaggccctgctcagtcttaacttttgagcctcacctgcttgagtggctgccgccctgtcagctccagccgcctccagctcagccctttctgtgagagtccctctgctgctcactctgatccagaggcaccctgagttggtgctttggatcagggaagccactttgggacaggtccataaagtgaactgatcttaccgagtcaggacctcagccagctctcaagaggttctgctcagccttaacttctcaactttgccttagcacagggtttctgtagggagtgggggctgctagaggggattagttccggagactgagactgttggctccacctccaagctgagctagggtggagggcagggtgggcaggaagtgacaggaagttaagctgttcctctccctggctgctgctctggatggccagagaacaagatgctcccttgctgagctcctgggagcgtggaaggagatgctaggccctggcacagtgttatgtggactgggccacgatagggtggagtgagctagtgaagaaggcagagggagacttggcttctggtctcagctatgcctgttttgtgaccttgattgagttgcttgggctttacttctgcctacaaatcaggggtaaaaatacctgttgggaggagaaatgagaacatagaggaaagcctcttggaggaaaggtgcttggaccaagtctcaggtgtgtctgcctgtggctgcacaggctctctaaccgaaacctcactttcagagagatgtgggtcctttgtctccaggatccacaccctagattttaacactgcattctcactataacgtgccctataatggctgcatcccttttgagcaacctccaaaatctacatttacacagtaggtaaattagggatgactgcattatcaaaatactctcagggttcctataaatggcagctctcctgttgtattcaggtgttgtttacagactaacaaatgtgttggcaaatccctggttagatgcacttcctggtgttgagatgaacacgtcgatttttcaccaatcgatgaagccatgctctgcaatgacaatattaatgtgatccgaccctaacattttctctatggaagacgtatgttgcataaagcaaggcacacttctgcttta

SEQ ID NO: 145710 - DNA, 911 bp, Homo sapiens
  Payload ID: 8895
  Gene Symbol: KHNYN
  Gene Name: KH and NYN domain containing
  ENST ID: ENST00000556510
  CDS Start-End: 508-911
cccggcccggcccctgggccctgggcggtgctcctggcccgacggagaggggcagcggacggctgggggaggggtgggagtggcttgaaccttggaaatggcagaccagggcccccagaggacagcctagttcaatcccctgctgaggattcgtccttaagaagcttcagagtgccccaggagactccttctggcctccaggccgagctggagcccccccacccttcttgctccggactgtggtcatccttttccaaagcccagacgcccactctcgatagacagccttgtttaccgggacttcctctccggagaggcctgcgtgacatacaccctccctacctccagtggactcagatgcttgtcacctcctggggctgtttaccagagccttaactaggtgcgacctgttgatagctggtgtagtcccaggaaccaggatttggatggagggtacaatgaggctctgagctgccttctccccttccagggctgggggcagcagccatgcctacctggggggcccgccccgcgtccccagatcgctttgcggtgtctgcggaggctgagaacaaggttcgggaacagcagccccatgtggagcgcatcttcagcgtgggggtgagcgtccttccgaaggactgtccggacaacccccacatctggctgcagctggagggccccaaggaaaacgccagcagagccaaggagtacctgaagggcctctgcagcccagaactgcaggatgaaatccactacccgcccaaactgcactgcatctttctgggagcccagggcttcttccttgactgcctggcctggagcacgtcagcccatctggtgcccagggcgccaggctcactgatgatcagtggcctgactgaagcctttgtcatggctcagagccgggt
